United States Patent Application Publication US 2024/0398993 A1 - sequence listing, part 8

SEQ ID NO: 23513 - protein, 753 aa, Homo sapiens
MSTRTPLPTVNERDTENHTSHGDGRQEVTSRTSRSGARCRNSIASCADEQPHIGNYRLLKTIGKGNFAKVKLARHILTGREVAIKIIDKTQLNPTSLQKLFREVRIMKILNHPNIVKLFEVIETEKTLYLIMEYASGGEVFDYLVAHGRMKEKEARSKFRQIVSAVQYCHQKRIVHRDLKAENLLLDADMNIKIADFGFSNEFTVGGKLDTFCGSPPYAAPELFQGKKYDGPEVDVWSLGVILYTLVSGSLPFDGQNLKELRERVLRGKYRIPFYMSTDCENLLKRFLVLNPIKRGTLEQIMKDRWINAGHEEDELKPFVEPELDISDQKRIDIMVGMGYSQEEIQESLSKMKYDEITATYLLLGRKSSELDASDSSSSSNLSLAKVRPSSDLNNSTGQSPHHKVQRSVSSSQKQRRYSDHAGPAIPSVVAYPKRSQTSTADSDLKEDGISSRKSSGSAVGGKGIAPASPMLGNASNPNKADIPERKKSSTVPSSNTASGGMTRRNTYVCSERTTADRHSVIQNGKENSTIPDQRTPVASTHSISSAATPDRIRFPRGTASRSTFHGQPRERRTATYNGPPASPSLSHEATPLSQTRSRGSTNLFSKLTSKLTRRNMSFRFIKRLPTEYERNGRYEGSSRNVSAEQKDENKEAKPRSLRFTWSMKTTSSMDPGDMMREIRKVLDANNCDYEQRERFLLFCVHGDGHAENLVQWEMEVCKLPRLSLNGVRFKRISGTSIAFKNIASKIANELKL

SEQ ID NO: 23514 - protein, 752 aa, Homo sapiens
MSTRTPLPTVNERDTENHTSHGDGRQEVTSRTSRSGARCRNSIASCADEQPHIGNYRLLKTIGKGNFAKVKLARHILTGREVAIKIIDKTQLNPTSLQKLFREVRIMKILNHPNIVKLFEVIETEKTLYLIMEYASGGEVFDYLVAHGRMKEKEARSKFRQGCQAGQTIKVQVSFDLLSLMFTFIVSAVQYCHQKRIVHRDLKAENLLLDADMNIKIADFGFSNEFTVGGKLDTFCGSPPYAAPELFQGKKYDGPEVDVWSLGVILYTLVSGSLPFDGQNLKELRERVLRGKYRIPFYMSTDCENLLKRFLVLNPIKRGTLEQIMKDRWINAGHEEDELKPFVEPELDISDQKRIDIMVGMGYSQEEIQESLSKMKYDEITATYLLLGRKSSELDASDSSSSSNLSLAKVRPSSDLNNSTGQSPHHKVQRSVSSSQKQRRYSDHAGPAIPSVVAYPKRSQTSTADSDLKEDGISSRKSSGSAVGGKGIAPASPMLGNASNPNKADIPERKKSSTVPSSNTASGGMTRRNTYVCSERTTADRHSVIQNGKENSTIPDQRTPVASTHSISSAATPDRIRFPRGTASRSTFHGQPRERRTATYNGPPASPSLSHEATPLSQTRSRGSTNLFSKLTSKLTRSRNVSAEQKDENKEAKPRSLRFTWSMKTTSSMDPGDMMREIRKVLDANNCDYEQRERFLLFCVHGDGHAENLVQWEMEVCKLPRLSLNGVRFKRISGTSIAFKNIASKIANELKL

SEQ ID NO: 23515 - protein, 729 aa, Homo sapiens
MSTRTPLPTVNERDTENHTSHGDGRQEVTSRTSRSGARCRNSIASCADEQPHIGNYRLLKTIGKGNFAKVKLARHILTGREVAIKIIDKTQLNPTSLQKLFREVRIMKILNHPNIVKLFEVIETEKTLYLIMEYASGGEVFDYLVAHGRMKEKEARSKFRQIVSAVQYCHQKRIVHRDLKAENLLLDADMNIKIADFGFSNEFTVGGKLDTFCGSPPYAAPELFQGKKYDGPEVDVWSLGVILYTLVSGSLPFDGQNLKELRERVLRGKYRIPFYMSTDCENLLKRFLVLNPIKRGTLEQIMKDRWINAGHEEDELKPFVEPELDISDQKRIDIMVGMGYSQEEIQESLSKMKYDEITATYLLLGRKSSELDASDSSSSSNLSLAKVRPSSDLNNSTGQSPHHKVQRSVSSSQKQRRYSDHAGPAIPSVVAYPKRSQTSTADSDLKEDGISSRKSSGSAVGGKGIAPASPMLGNASNPNKADIPERKKSSTVPSSNTASGGMTRRNTYVCSERTTADRHSVIQNGKENSTIPDQRTPVASTHSISSAATPDRIRFPRGTASRSTFHGQPRERRTATYNGPPASPSLSHEATPLSQTRSRGSTNLFSKLTSKLTRSRNVSAEQKDENKEAKPRSLRFTWSMKTTSSMDPGDMMREIRKVLDANNCDYEQRERFLLFCVHGDGHAENLVQWEMEVCKLPRLSLNGVRFKRISGTSIAFKNIASKIANELKL

SEQ ID NO: 23516 - protein, 744 aa, Homo sapiens
MSTRTPLPTVNERDTENHTSHGDGRQEVTSRTSRSGARCRNSIASCADEQPHIGNYRLLKTIGKGNFAKVKLARHILTGREVAIKIIDKTQLNPTSLQKLFREVRIMKILNHPNIVKLFEVIETEKTLYLIMEYASGGEVFDYLVAHGRMKEKEARSKFRQIVSAVQYCHQKRIVHRDLKAENLLLDADMNIKIADFGFSNEFTVGGKLDTFCGSPPYAAPELFQGKKYDGPEVDVWSLGVILYTLVSGSLPFDGQNLKELRERVLRGKYRIPFYMSTDCENLLKRFLVLNPIKRGTLEQIMKDRWINAGHEEDELKPFVEPELDISDQKRIDIMVGMGYSQEEIQESLSKMKYDEITATYLLLGRKSSELDASDSSSSSNLSLAKVRPSSDLNNSTGQSPHHKVQRSVSSSQKQRRYSDHAGPAIPSVVAYPKRSQTSTADSDLKEDGISSRKSSGSAVGGKGIAPASPMLGNASNPNKADIPERKKSSTVPSSNTASGGMTRRNTYVCSERTTADRHSVIQNGKENSTIPDQRTPVASTHSISSAATPDRIRFPRGTASRSTFHGQPRERRTATYNGPPASPSLSHEATPLSQTRSRGSTNLFSKLTSKLTRRLPTEYERNGRYEGSSRNVSAEQKDENKEAKPRSLRFTWSMKTTSSMDPGDMMREIRKVLDANNCDYEQRERFLLFCVHGDGHAENLVQWEMEVCKLPRLSLNGVRFKRISGTSIAFKNIASKIANELKL

SEQ ID NO: 23517 - protein, 713 aa, Homo sapiens
MSTRTPLPTVNERDTENHTSHGDGRQEVTSRTSRSGARCRNSIASCADEQPHIGNYRLLKTIGKGNFAKVKLARHILTGREVAIKIIDKTQLNPTSLQKLFREVRIMKILNHPNIVKLFEVIETEKTLYLIMEYASGGEVFDYLVAHGRMKEKEARSKFRQIVSAVQYCHQKRIVHRDLKAENLLLDADMNIKIADFGFSNEFTVGGKLDTFCGSPPYAAPELFQGKKYDGPEVDVWSLGVILYTLVSGSLPFDGQNLKELRERVLRGKYRIPFYMSTDCENLLKRFLVLNPIKRGTLEQIMKDRWINAGHEEDELKPFVEPELDISDQKRIDIMVGMGYSQEEIQESLSKMKYDEITATYLLLGRKSSEVRPSSDLNNSTGQSPHHKVQRSVSSSQKQRRYSDHAGPAIPSVVAYPKRSQTSTADSDLKEDGISSRKSSGSAVGGKGIAPASPMLGNASNPNKADIPERKKSSTVPSSNTASGGMTRRNTYVCSERTTADRHSVIQNGKENSTIPDQRTPVASTHSISSAATPDRIRFPRGTASRSTFHGQPRERRTATYNGPPASPSLSHEATPLSQTRSRGSTNLFSKLTSKLTRSRNVSAEQKDENKEAKPRSLRFTWSMKTTSSMDPGDMMREIRKVLDANNCDYEQRERFLLFCVHGDGHAENLVQWEMEVCKLPRLSLNGVRFKRISGTSIAFKNIASKIANELKL

SEQ ID NO: 23518 - protein, 760 aa, Homo sapiens
MSTRTPLPTVNERDTENHTSHGDGRQEVTSRTSRSGARCRNSIASCADEQPHIGNYRLLKTIGKGNFAKVKLARHILTGREVAIKIIDKTQLNPTSLQKLFREVRIMKILNHPNIVKLFEVIETEKTLYLIMEYASGGEVFDYLVAHGRMKEKEARSKFRQGCQAGQTIKVQVSFDLLSLMFTFIVSAVQYCHQKRIVHRDLKAENLLLDADMNIKIADFGFSNEFTVGGKLDTFCGSPPYAAPELFQGKKYDGPEVDVWSLGVILYTLVSGSLPFDGQNLKELRERVLRGKYRIPFYMSTDCENLLKRFLVLNPIKRGTLEQIMKDRWINAGHEEDELKPFVEPELDISDQKRIDIMVGMGYSQEEIQESLSKMKYDEITATYLLLGRKSSEVRPSSDLNNSTGQSPHHKVQRSVSSSQKQRRYSDHAGPAIPSVVAYPKRSQTSTADSDLKEDGISSRKSSGSAVGGKGIAPASPMLGNASNPNKADIPERKKSSTVPSSNTASGGMTRRNTYVCSERTTADRHSVIQNGKENSTIPDQRTPVASTHSISSAATPDRIRFPRGTASRSTFHGQPRERRTATYNGPPASPSLSHEATPLSQTRSRGSTNLFSKLTSKLTRRNMSFRFIKRLPTEYERNGRYEGSSRNVSAEQKDENKEAKPRSLRFTWSMKTTSSMDPGDMMREIRKVLDANNCDYEQRERFLLFCVHGDGHAENLVQWEMEVCKLPRLSLNGVRFKRISGTSIAFKNIASKIANELKL

SEQ ID NO: 23519 - protein, 659 aa, Homo sapiens
MSTRTPLPTVNERDTENHTSHGDGRQEVTSRTSRSGARCRNSIASCADEQPHIGNYRLLKTIGKGNFAKVKLARHILTGREVAIKIIDKTQLNPTSLQKLFREVRIMKILNHPNIVKLFEVIETEKTLYLIMEYASGGEVFDYLVAHGRMKEKEARSKFRQIVSAVQYCHQKRIVHRDLKELRERVLRGKYRIPFYMSTDCENLLKRFLVLNPIKRGTLEQIMKDRWINAGHEEDELKPFVEPELDISDQKRIDIMVGMGYSQEEIQESLSKMKYDEITATYLLLGRKSSELDASDSSSSSNLSLAKVRPSSDLNNSTGQSPHHKVQRSVSSSQKQRRYSDHAGPAIPSVVAYPKRSQTSTADSDLKEDGISSRKSSGSAVGGKGIAPASPMLGNASNPNKADIPERKKSSTVPSSNTASGGMTRRNTYVCSERTTADRHSVIQNGKENSTIPDQRTPVASTHSISSAATPDRIRFPRGTASRSTFHGQPRERRTATYNGPPASPSLSHEATPLSQTRSRGSTNLFSKLTSKLTRRNMSFRFIKSRNVSAEQKDENKEAKPRSLRFTWSMKTTSSMDPGDMMREIRKVLDANNCDYEQRERFLLFCVHGDGHAENLVQWEMEVCKLPRLSLNGVRFKRISGTSIAFKNIASKIANELKL

SEQ ID NO: 23520 - protein, 279 aa, Homo sapiens
MENSEKTEVVLLACGSFNPITNMHLRLFELAKDYMNGTGRYTVVKGIISPVGDAYKKKGLIPAYHRVIMAELATKNSKWVEVDTWESLQKEWKETLKVLRHHQEKLEASDCDHQQNSPTLERPGRKRKWTETQDSSQKKSLEPKTKAVPKVKLLCGADLLESFAVPNLWKSEDITQIVANYGLICVTRAGNDAQKFIYESDVLWKHRSNIHVVNEWIANDISSTKIRRALRRGQSIRYLVPDLVQEYIEKHNLYSSESEDRNAGVILAPLQRNTAEAKT

SEQ ID NO: 23521 - protein, 133 aa, Homo sapiens
MKPQFVGILLSSLLGAALGNRMRCYNCGGSPSSSCKEAVTTCGEGRPQPGLEQIKLPGNPPVTLIHQHPACVAAHHCNQVETESVGDVTYPAHRDCYLGDLCNSAVASHVAPAGILAAAATALTCLLPGLWSG

SEQ ID NO: 23522 - protein, 1132 aa, Homo sapiens
MIATPLKHSRIYLPPEASSQRRNLPMDAIFFDSIPSGTLTPVKDLVKYQNSSLKLNDHKKNQFLKMTTFNNKNIFQSTMLTEATTSNSSLDISAIKPNKDGLKNKANYESPGKIFLRMKEKVLRDKQEQPSRNSSLLEPQKSGNNETFTPNRVEKKKLQHTYLCEEKENNKSFQSDDSSLRASVQGVPLESSNNDIFLPVKQKIQCQQEKKAPLHNLTYELPTLNQEQENFLAVEARNKTLTRAQLAKQIFHSKESIVATTKSKKDTFVLESVDSADEQFQNTNAETLSTNCIPIKNGSLLMVSDSERTTEGTSQQKVKEGNGKTVPGETGLPGSMKDTCKIVLATPRLHITIPRRSKRNISKLSPPRIFQTVTNGLKKNQVVQLQEWMIKSINNNTAICVEGKLIDVTNIYWHSNVIIERIEHNKLRTISGNVYILKGMIDQISMKEAGYPNYLIRKFMFGFPENWKEHIDNFLEQLRAGEKNREKTKQKQKTGRSVRDIRKSMKNDARENQTDTAQRATTTYDFDCDNLELKSNKHSESPGATELNMCHSNCQNKPTLRFPDDQVNNTIQNGGGDDLSNQELIGKKEYKMSSKKLKIGERTNERIIKSQKQETTEELDVSIDILTSREQFFSDEERKYMAINQKKAYILVTPLKSRKVIEQRCMRYNLSAGTIKAVTDFVIPECQKKSPISKSMGTLENTFEGHKSKNKEDCDERDLLTVNRKIKISNLEKEQMLTSDFKKNTRLLPKLKKIENQVAMSFYKHQSSPDLSSEESETEKEIKRKAEVKKTKAGNTKEAVVHLRKSTRNTSNIPVILEPETEESENEFYIKQKKARPSVKETLQKSGVRKEFPITEAVGSDKTNRHPLECLPGLIQDKEWNEKELQKLHCAFASLPKHKPGFWSEVAAAVGSRSPEECQRKYMENPRGKGSQKHVTKKKPANSKGQNGKRGDADQKQTIKITAKVGTLKRKQQMREFLEQLPKDDHDDFFSTTPLQHQRILLPSFQDSEDDDDILPNMDKNPTTPSSVIFPLVKTPQCQHVSPGMLGSINRNDCDKYVFRMQKYHKSNGGIVWGNIKKKLVETDFSTPTPRRKTPFNTDLGENSGIGKLFTNAVESLDEEEKDYYFSNSDSA

SEQ ID NO: 23523 - protein, 390 aa, Homo sapiens
MIATPLKHSRIYLPPEASSQRRNLPMDAIFFDSIPSGTLTPVKDLVKYQNSSLKLNDHKKNQFLKMTTFNNKNIFQSTMLTEATTSNSSLDISAIKPNKDGLKNKANYESPGKIFLRMKEKVLRDKQEQPSRNSSLLEPQKSGNNETFTPNRVEKKKLQHTYLCEEKENNKSFQSDDSSLRASVQGVPLESSNNDIFLPVKQKIQCQQEKKAPLHNLTYELPTLNQEQENFLAVEARNKTLTRAQLAKQIFHSKESIVATTKSKKDTFVLESVDSADEQFQNTNAETLSTNCIPIKNGSLLMVSDSERTTEGTSQQKVKEGNGKTVPGETGLPGSMKDTCKIVLATPRLHITIPRRSKRNISKLSPPRIFQTVTNGLKKNQVVQLQEWMI

SEQ ID NO: 23524 - protein, 128 aa, Homo sapiens
MRTALLLLAALAVATGPALTLRCHVCTSSSNCKHSVVCPASSRFCKTTNTVEPLRGNLVKKDCAESCTPSYTLQGQVSSGTSSTQCCQEDLCNEKLHNAAPTRTALAHSALSLGLALSLLAVILAPSL

SEQ ID NO: 23525 - protein, 183 aa, Homo sapiens
MMQICDTYNQKHSLFNAMNRFIGAVNNMDQTVMVPSLLRDVPLADPGLDNDVGVEVGGSGGCLEERTPPVPDSGSANGSFFAPSRDMYSHYVLLKSIRNDIEWGVLHQPPPPAGSEEGSAWKSKDILVDLGHLEGADAGEEDLEQQFHYHLRGLHTVLSKLTRKANILTNRYKQEIGFGNWGH

SEQ ID NO: 23526 - protein, 496 aa, Homo sapiens
MADESETAVKPPAPPLPQMMEGNGNGHEHCSDCENEEDNSYNRGGLSPANDTGAKKKKKKQKKKKEKGSETDSAQDQPVKMNSLPAERIQEIQKAIELFSVGQGPAKTMEEASKRSYQFWDTQPVPKLGEVVNTHGPVEPDKDNIRQEPYTLPQGFTWDALDLGDRGVLKELYTLLNENYVEDDDNMFRFDYSPEFLLWALRPPGWLPQWHCGVRVVSSRKLVGFISAIPANIHIYDTEKKMVEINFLCVHKKLRSKRVAPVLIREITRRVHLEGIFQAVYTAGVVLPKPVGTCRYWHRSLNPRKLIEVKFSHLSRNMTMQRTMKLYRLPETPKTAGLRPMETKDIPVVHQLLTRYLKQFHLTPVMSQEEVEHWFYPQENIIDTFVVENANGEVTDFLSFYTLPSTIMNHPTHKSLKAAYSFYNVHTQTPLLDLMSDALVLAKMKGFDVFNALDLMENKTFLEKLKFGIGDGNLQYYLYNWKCPSMGAEKVGLVLQ

SEQ ID NO: 23527 - protein, 416 aa, Homo sapiens
MNSLPAERIQEIQKAIELFSVGQGPAKTMEEASKRSYQFWDTQPVPKLGEVVNTHGPVEPDKDNIRQEPYTLPQGFTWDALDLGDRGVLKELYTLLNENYVEDDDNMFRFDYSPEFLLWALRPPGWLPQWHCGVRVVSSRKLVGFISAIPANIHIYDTEKKMVEINFLCVHKKLRSKRVAPVLIREITRRVHLEGIFQAVYTAGVVLPKPVGTCRYWHRSLNPRKLIEVKFSHLSRNMTMQRTMKLYRLPETPKTAGLRPMETKDIPVVHQLLTRYLKQFHLTPVMSQEEVEHWFYPQENIIDTFVVENANGEVTDFLSFYTLPSTIMNHPTHKSLKAAYSFYNVHTQTPLLDLMSDALVLAKMKGFDVFNALDLMENKTFLEKLKFGIGDGNLQYYLYNWKCPSMGAEKVGLVLQ

SEQ ID NO: 23528 - protein, 2555 aa, Homo sapiens
MPPLLAPLLCLALLPALAARGPRCSQPGETCLNGGKCEAANGTEACVCGGAFVGPRCQDPNPCLSTPCKNAGTCHVVDRRGVADYACSCALGFSGPLCLTPLDNACLTNPCRNGGTCDLLTLTEYKCRCPPGWSGKSCQQADPCASNPCANGGQCLPFEASYICHCPPSFHGPTCRQDVNECGQKPGLCRHGGTCHNEVGSYRCVCRATHTGPNCERPYVPCSPSPCQNGGTCRPTGDVTHECACLPGFTGQNCEENIDDCPGNNCKNGGACVDGVNTYNCRCPPEWTGQYCTEDVDECQLMPNACQNGGTCHNTHGGYNCVCVNGWTGEDCSENIDDCASAACFHGATCHDRVASFYCECPHGRTGLLCHLNDACISNPCNEGSNCDTNPVNGKAICTCPSGYTGPACSQDVDECSLGANPCEHAGKCINTLGSFECQCLQGYTGPRCEIDVNECVSNPCQNDATCLDQIGEFQCICMPGYEGVHCEVNTDECASSPCLHNGRCLDKINEFQCECPTGFTGHLCQYDVDECASTPCKNGAKCLDGPNTYTCVCTEGYTGTHCEVDIDECDPDPCHYGSCKDGVATFTCLCRPGYTGHHCETNINECSSQPCRHGGTCQDRDNAYLCFCLKGTTGPNCEINLDDCASSPCDSGTCLDKIDGYECACEPGYTGSMCNINIDECAGNPCHNGGTCEDGINGFTCRCPEGYHDPTCLSEVNECNSNPCVHGACRDSLNGYKCDCDPGWSGTNCDINNNECESNPCVNGGTCKDMTSGYVCTCREGFSGPNCQTNINECASNPCLNQGTCIDDVAGYKCNCLLPYTGATCEVVLAPCAPSPCRNGGECRQSEDYESFSCVCPTGWQGQTCEVDINECVLSPCRHGASCQNTHGGYRCHCQAGYSGRNCETDIDDCRPNPCHNGGSCTDGINTAFCDCLPGFRGTFCEEDINECASDPCRNGANCTDCVDSYTCTCPAGFSGIHCENNTPDCTESSCFNGGTCVDGINSFTCLCPPGFTGSYCQHDVNECDSQPCLHGGTCQDGCGSYRCTCPQGYTGPNCQNLVHWCDSSPCKNGGKCWQTHTQYRCECPSGWTGLYCDVPSVSCEVAAQRQGVDVARLCQHGGLCVDAGNTHHCRCQAGYTGSYCEDLVDECSPSPCQNGATCTDYLGGYSCKCVAGYHGVNCSEEIDECLSHPCQNGGTCLDLPNTYKCSCPRGTQGVHCEINVDDCNPPVDPVSRSPKCFNNGTCVDQVGGYSCTCPPGFVGERCEGDVNECLSNPCDARGTQNCVQRVNDFHCECRAGHTGRRCESVINGCKGKPCKNGGTCAVASNTARGFICKCPAGFEGATCENDARTCGSLRCLNGGTCISGPRSPTCLCLGPFTGPECQFPASSPCLGGNPCYNQGTCEPTSESPFYRCLCPAKFNGLLCHILDYSFGGGAGRDIPPPLIEEACELPECQEDAGNKVCSLQCNNHACGWDGGDCSLNFNDPWKNCTQSLQCWKYFSDGHCDSQCNSAGCLFDGFDCQRAEGQCNPLYDQYCKDHFSDGHCDQGCNSAECEWDGLDCAEHVPERLAAGTLVVVVLMPPEQLRNSSFHFLRELSRVLHTNVVFKRDAHGQQMIFPYYGREEELRKHPIKRAAEGWAAPDALLGQVKASLLPGGSEGGRRRRELDPMDVRGSIVYLEIDNRQCVQASSQCFQSATDVAAFLGALASLGSLNIPYKIEAVQSETVEPPPPAQLHFMYVAAAAFVLLFFVGCGVLLSRKRRRQHGQLWFPEGFKVSEASKKKRREPLGEDSVGLKPLKNASDGALMDDNQNEWGDEDLETKKFRFEEPVVLPDLDDQTDHRQWTQQHLDAADLRMSAMAPTPPQGEVDADCMDVNVRGPDGFTPLMIASCSGGGLETGNSEEEEDAPAVISDFIYQGASLHNQTDRTGETALHLAARYSRSDAAKRLLEASADANIQDNMGRTPLHAAVSADAQGVFQILIRNRATDLDARMHDGTTPLILAARLAVEGMLEDLINSHADVNAVDDLGKSALHWAAAVNNVDAAVVLLKNGANKDMQNNREETPLFLAAREGSYETAKVLLDHFANRDITDHMDRLPRDIAQERMHHDIVRLLDEYNLVRSPQLHGAPLGGTPTLSPPLCSPNGYLGSLKPGVQGKKVRKPSSKGLACGSKEAKDLKARRKKSQDGKGCLLDSSGMLSPVDSLESPHGYLSDVASPPLLPSPFQQSPSVPLNHLPGMPDTHLGIGHLNVAAKPEMAALGGGGRLAFETGPPRLSHLPVASGTSTVLGSSSGGALNFTVGGSTSLNGQCEWLSRLQSGMVPNQYNPLRGSVAPGPLSTQAPSLQHGMVGPLHSSLAASALSQMMSYQGLPSTRLATQPHLVQTQQVQPQNLQMQQQNLQPANIQQQQSLQPPPPPPQPHLGVSSAASGHLGRSFLSGEPSQADVQPLGPSSLAVHTILPQESPALPTSLPSSLVPPVTAAQFLTPPSQHSYSSPVDNTPSHQLQVPEHPFLTPSPESPDQWSSSSPHSNVSDWSEGVSSPPTSMQSQIARIPEAFK

SEQ ID NO: 23529 - protein, 952 aa, Homo sapiens
MGVRHPPCSHRLLAVCALVSLATAALLGHILLHDFLLVPRELSGSSPVLEETHPAHQQGASRPGPRDAQAHPGRPRAVPTQCDVPPNSRFDCAPDKAITQEQCEARGCCYIPAKQGLQGAQMGQPWCFFPPSYPSYKLENLSSSEMGYTATLTRTTPTFFPKDILTLRLDVMMETENRLHFTIKDPANRRYEVPLETPHVHSRAPSPLYSVEFSEEPFGVIVRRQLDGRVLLNTTVAPLFFADQFLQLSTSLPSQYITGLAEHLSPLMLSTSWTRITLWNRDLAPTPGANLYGSHPFYLALEDGGSAHGVFLLNSNAMDVVLQPSPALSWRSTGGILDVYIFLGPEPKSVVQQYLDVVGYPFMPPYWGLGFHLCRWGYSSTAITRQVVENMTRAHFPLDVQWNDLDYMDSRRDFTFNKDGFRDFPAMVQELHQGGRRYMMIVDPAISSSGPAGSYRPYDEGLRRGVFITNETGQPLIGKVWPGSTAFPDFTNPTALAWWEDMVAEFHDQVPFDGMWIDMNEPSNFIRGSEDGCPNNELENPPYVPGVVGGTLQAATICASSHQFLSTHYNLHNLYGLTEAIASHRALVKARGTRPFVISRSTFAGHGRYAGHWTGDVWSSWEQLASSVPEILQFNLLGVPLVGADVCGFLGNTSEELCVRWTQLGAFYPFMRNHNSLLSLPQEPYSFSEPAQQAMRKALTLRYALLPHLYTLFHQAHVAGETVARPLFLEFPKDSSTWTVDHQLLWGEALLITPVLQAGKAEVTGYFPLGTWYDLQTVPVEALGSLPPPPAAPREPAIHSEGQWVTLPAPLDTINVHLRAGYIIPLQGPGLTTTESRQQPMALAVALTKGGEARGELFWDDGESLEVLERGAYTQVIFLARNNTIVNELVRVTSEGAGLQLQKVTVLGVATAPQQVLSNGVPVSNFTYSPDTKVLDICVSLLMGEQFLVSWC

SEQ ID NO: 23530 - protein, 830 aa, Homo sapiens
MANCQIAILYQRFQRVVFGISQLLCFSALISELTNQKEVAAWTYHYSTKAYSWNISRKYCQNRYTDLVAIQNKNEIDYLNKVLPYYSSYYWIGIRKNNKTWTWVGTKKALTNEAENWADNEPNNKRNNEDCVEIYIKSPSAPGKWNDEHCLKKKHALCYTASCQDMSCSKQGECLETIGNYTCSCYPGFYGPECEYVRECGELELPQHVLMNCSHPLGNFSFNSQCSFHCTDGYQVNGPSKLECLASGIWTNKPPQCLAAQCPPLKIPERGNMTCLHSAKAFQHQSSCSFSCEEGFALVGPEVVQCTASGVWTAPAPVCKAVQCQHLEAPSEGTMDCVHPLTAFAYGSSCKFECQPGYRVRGLDMLRCIDSGHWSAPLPTCEAISCEPLESPVHGSMDCSPSLRAFQYDTNCSFRCAEGFMLRGADIVRCDNLGQWTAPAPVCQALQCQDLPVPNEARVNCSHPFGAFRYQSVCSFTCNEGLLLVGASVLQCLATGNWNSVPPECQAIPCTPLLSPQNGTMTCVQPLGSSSYKSTCQFICDEGYSLSGPERLDCTRSGRWTDSPPMCEAIKCPELFAPEQGSLDCSDTRGEFNVGSTCHFSCDNGFKLEGPNNVECTTSGRWSATPPTCKGIASLPTPGLQCPALTTPGQGTMYCRHHPGTFGFNTTCYFGCNAGFTLIGDSTLSCRPSGQWTAVTPACRAVKCSELHVNKPIAMNCSNLWGNFSYGSICSFHCLEGQLLNGSAQTACQENGHWSTTVPTCQAGPLTIQEALTYFGGAVASTIGLIMGGTLLALLRKRFRQKDDGKCPLNPHSHLGTYGVFTNAAFDPSP

SEQ ID NO: 23531 - protein, 303 aa, Homo sapiens
MPEESSPRRTPQSIPYQDLPHLVNADGQYLFCRYWKPTGTPKALIFVSHGAGEHSGRYEELARMLMGLDLLVFAHDHVGHGQSEGERMVVSDFHVFVRDVLQHVDSMQKDYPGLPVFLLGHSMGGAIAILTAAERPGHFAGMVLISPLVLANPESATTFKVLAAKVLNLVLPNLSLGPIDSSVLSRNKTEVDIYNSDPLICRAGLKVCFGIQLLNAVSRVERALPKLTVPFLLLQGSADRLCDSKGAYLLMELAKSQDKTLKIYEGAYHVLHKELPEVTNSVFHEINMWVSQRTATAGTASPP

SEQ ID NO: 23532 - protein, 283 aa, Homo sapiens
METGPEDPSSMPEESSPRRTPQSIPYQDLPHLVNADGQYLFCRYWKPTGTPKALIFVSHGAGEHSGRYEELARMLMGLDLLVFAHDHVGHGQSEGERMVVSDFHVFVRDVLQHVDSMQKDYPGLPVFLLGHSMGGAIAILTAAERPGHFAGMVLISPLVLANPESATTFKVDIYNSDPLICRAGLKVCFGIQLLNAVSRVERALPKLTVPFLLLQGSADRLCDSKGAYLLMELAKSQDKTLKIYEGAYHVLHKELPEVTNSVFHEINMWVSQRTATAGTASPP

SEQ ID NO: 23533 - protein, 292 aa, Homo sapiens
MSGMEATVTIPIWQNKPHGAARSVVRRIGTNLPLKPCARASFETLPNISDLCLRDVPPVPTLADIAWIAADEEETYARVRSDTRPLRHTWKPSPLIVMQRNASVPNLRGSEERLLALKKPALPALSRTTELQDELSHLRSQIAKIVAADAASASLTPDFLSPGSSNVSSPLPCFGSSFHSTTSFVISDITEETEVEVPELPSVPLLCSASPECCKPEHKAACSSSEEDDCVSLSKASSFADMMGILKDFHRMKQSQDLNRSLLKEEDPAVLISEVLRRKFALKEEDISRKGN

SEQ ID NO: 23534 - protein, 205 aa, Homo sapiens
MSGMEATVTIPIWQNKPHGAARSVVRRIGTNLPLKPCARASFETLPNISDLCLRDVPPVPTLADIAWIAADEEETYARVRSDTRPLRHTWKPSPLIVMQRNASVPNLRGSEERLLALKKPALPALSRTTELQDELSHLRSQIAKIVAADAVTSPRRQRWRSLSFHQSPCFVLPALNVANQNTKLPAVRLKRMTASLCPRPAALQT

SEQ ID NO: 23535 - protein, 280 aa, Homo sapiens
MSGMEATVTIPIWQNKPHGAARSVVRRIGTNLPLKPCARASFETLPNISDLCLRDVPPVPTLADIAWIAADEEETYARVRSDTRPLRHTWKPSPLIVMQRNASVPNLRGSEERLLALKKPALPALSRTTELQDELSHLRSQIAKIVAADAGSSNVSSPLPCFGSSFHSTTSFVISDITEETEVEVPELPSVPLLCSASPECCKPEHKAACSSSEEDDCVSLSKASSFADMMGILKDFHRMKQSQDLNRSLLKEEDPAVLISEVLRRKFALKEEDISRKGN

SEQ ID NO: 23536 - protein, 615 aa, Homo sapiens
MGLKAAQKTLFPLRSIDDVVRLFAAELGREEPDLVLLSLVLGFVEHFLAVNRVIPTNVPELTFQPSPAPDPPGGLTYFPVADLSIIAALYARFTAQIRGAVDLSLYPREGGVSSRELVKKVSDVIWNSLSRSYFKDRAHIQSLFSFITGWSPVGTKLDSSGVAFAVVGACQALGLRDVHLALSEDHAWVVFGPNGEQTAEVTWHGKGNEDRRGQTVNAGVAERSWLYLKGSYMRCDRKMEVAFMVCAINPSIDLHTDSLELLQLQQKLLWLLYDLGHLERYPMALGNLADLEELEPTPGRPDPLTLYHKGIASAKTYYRDEHIYPYMYLAGYHCRNRNVREALQAWADTATVIQDYNYCREDEEIYKEFFEVANDVIPNLLKEAASLLEAGEERPGEQSQGTQSQGSALQDPECFAHLLRFYDGICKWEEGSPTPVLHVGWATFLVQSLGRFEGQVRQKVRIVSREAEAAEAEEPWGEEAREGRRRGPRRESKPEEPPPPKKPALDKGLGTGQGAVSGPPRKPPGTVAGTARGPEGGSTAQVPAPTASPPPEGPVLTFQSEKMKGMKELLVATKINSSAIKLQLTAQSQVQMKKQKVSTPSDYTLSFLKRQRKGL

SEQ ID NO: 23537 - protein, 610 aa, Homo sapiens
MGLKAAQKTLFPLRSIDDVVRLFAAELGREEPDLVLLSLVLGFVEHFLAVNRVIPTNVPELTFQPSPAPDPPGGLTYFPVADLSIIAALYARFTAQIRGAVDLSLYPREGGVSSRELVKKVSDVIWNSLSRSYFKDRAHIQSLFSFITGTKLDSSGVAFAVVGACQALGLRDVHLALSEDHAWVVFGPNGEQTAEVTWHGKGNEDRRGQTVNAGVAERSWLYLKGSYMRCDRKMEVAFMVCAINPSIDLHTDSLELLQLQQKLLWLLYDLGHLERYPMALGNLADLEELEPTPGRPDPLTLYHKGIASAKTYYRDEHIYPYMYLAGYHCRNRNVREALQAWADTATVIQDYNYCREDEEIYKEFFEVANDVIPNLLKEAASLLEAGEERPGEQSQGTQSQGSALQDPECFAHLLRFYDGICKWEEGSPTPVLHVGWATFLVQSLGRFEGQVRQKVRIVSREAEAAEAEEPWGEEAREGRRRGPRRESKPEEPPPPKKPALDKGLGTGQGAVSGPPRKPPGTVAGTARGPEGGSTAQVPAPTASPPPEGPVLTFQSEKMKGMKELLVATKINSSAIKLQLTAQSQVQMKKQKVSTPSDYTLSFLKRQRKGL

SEQ ID NO: 23538 - protein, 575 aa, Homo sapiens
MGLKAAQKTLFPLRSIDDVVRLFAAELGREEPDLVLLSLVLGFVEHFLAVNRVIPTNVPELTFQPSPAPDPPGGLTYFPVADLSIIAALYARFTAQIRGAVDLSLYPREGGVSSRELVKKVSDVIWNSLSRSYFKDRAHIQSLFSFITGTKLDSSGVAFAVVGACQALGLRDVHLALSEDHAWSWLYLKGSYMRCDRKMEVAFMVCAINPSIDLHTDSLELLQLQQKLLWLLYDLGHLERYPMALGNLADLEELEPTPGRPDPLTLYHKGIASAKTYYRDEHIYPYMYLAGYHCRNRNVREALQAWADTATVIQDYNYCREDEEIYKEFFEVANDVIPNLLKEAASLLEAGEERPGEQSQGTQSQGSALQDPECFAHLLRFYDGICKWEEGSPTPVLHVGWATFLVQSLGRFEGQVRQKVRIVSREAEAAEAEEPWGEEAREGRRRGPRRESKPEEPPPPKKPALDKGLGTGQGAVSGPPRKPPGTVAGTARGPEGGSTAQVPAPTASPPPEGPVLTFQSEKMKGMKELLVATKINSSAIKLQLTAQSQVQMKKQKVSTPSDYTLSFLKRQRKGL

SEQ ID NO: 23539 - protein, 454 aa, Homo sapiens
MAEFSQKRGKRRSDEGLGSMVDFLLANARLVLGVGGAAVLGIATLAVKRFIDRATSPRDEDDTKADSWKELSLLKATPHLQPRPPPAALSQPVLPLAPSSSAPEGPAETDPEVTPQLSSPAPLCLTLQERLLAFERDRVTIPAAQVALAKQLAGDIALELQAYFRSKFPELPFGAFVPGGPLYDGLQAGAADHVRLLVPLVLEPGLWSLVPGVDTVARDPRCWAVRRTQLEFCPRGSSPWDRFLVGGYLSSRVLLELLRKALAASVNWPAIGSLLGCLIRPSMASEELLLEVQHERLELTVAVLVAVPGVDADDRLLLAWPLEGLAGNLWLQDLYPVEAARLRALDDHDAGTRRRLLLLLCAVCRGCSALGQLGRGHLTQVVLRLGEDNVDWTEEALGERFLQALELLIGSLEQASLPCHFNPSVNLFSSLREEEIDDIGYALYSGLQEPEGLL

SEQ ID NO: 23540 - protein, 205 aa, Homo sapiens
MAEFSQKRGKRRSDEGLGSMVDFLLANARLVLGVGGAAVLGIATLAVKRFIDRATSPRDEDDTKADSWKELSLLKATPHLQPRPPPAALSQPVLPLAPSSSAPGEAAGLRAGPCDHPSSPGGFGQTAGWRHRPGAAGLLSEQVPGTALWGIRAWGAALRRAAGGGCGPCASPGATGAGAGPVEPGAGRGHCGEGPSLLGRAQDAA

SEQ ID NO: 23541 - protein, 465 aa, Homo sapiens
MGLSPNLDRQTMAEFSQKRGKRRSDEGLGSMVDFLLANARLVLGVGGAAVLGIATLAVKRFIDRATSPRDEDDTKADSWKELSLLKATPHLQPRPPPAALSQPVLPLAPSSSAPEGPAETDPEVTPQLSSPAPLCLTLQERLLAFERDRVTIPAAQVALAKQLAGDIALELQAYFRSKFPELPFGAFVPGGPLYDGLQAGAADHVRLLVPLVLEPGLWSLVPGVDTVARDPRCWAVRRTQLEFCPRGSSPWDRFLVGGYLSSRVLLELLRKALAASVNWPAIGSLLGCLIRPSMASEELLLEVQHERLELTVAVLVAVPGVDADDRLLLAWPLEGLAGNLWLQDLYPVEAARLRALDDHDAGTRRRLLLLLCAVCRGCSALGQLGRGHLTQVVLRLGEDNVDWTEEALGERFLQALELLIGSLEQASLPCHFNPSVNLFSSLREEEIDDIGYALYSGLQEPEGLL

SEQ ID NO: 23542 - protein, 538 aa, Homo sapiens
MAENLKRLVSNETLRTLQEKLDFWLKEYNTNTCDQNLNHCLELIEQVAKVQGQLFGILTAAAQEGGRNDGVETIKSRLLPWLEASFTAASLGKSVDSKVPSLQDTFDRERHKDPSPRDRDMQQLDSNLNSTRSQCNQVQDDLVETEKNLEESKNRSAISLLAAEEEINQLKKQLKSLQAQEDARHRNTDQRSSENRRSEPWSLEERKREQWNSLKQNADQQDTEAMSDYKKQLRNLKEEIAVLSAEKSALQGRSSRSRSPSPAPRSRSCSRSRSASPSTAVKVRRPSPNRSKLSNVARKAALLSRFSDSYSQARLDAQCLLRRCIDKAETVQRIIYIATVEAFHVAKMAFRHFKIHVRKSLTPSYVGSNDFENAVLDYVICHLDLYDSQSSVNDVIRAMNVNPKISFPPVVDFCLLSDFIQEICCIAFAMQALEPPLDIAYGADGEVFNDCKYRRSYDSDFTAPLVLYHVWPALMENDCVIMKGEAVTRRGAFWNSVRSVSRCRSRSLSPICPRSQIGLNTMSRSRSPSPIRCGLPRF

SEQ ID NO: 23543 - protein, 506 aa, Homo sapiens
MAENLKRLVSNETLRTLQEKLDFWLKEYNTNTCDQNLNHCLELIEQVAKVQGQLFGILTAAAQEGGRNDGVETIKSRLLPWLEASFTAASLGKSVDSKVPSLQDTFDRERHKDPSPRDRDMQQLDSNLNSTRSQCNQVQDELKSLQAQEDARHRNTDQRSSENRRSEPWSLEERKREQWNSLKQNADQQDTEAMSDYKKQLRNLKEEIAVLSAEKSALQGRSSRSRSPSPAPRSRSCSRSRSASPSTAVKVRRPSPNRSKLSNVARKAALLSRFSDSYSQARLDAQCLLRRCIDKAETVQRIIYIATVEAFHVAKMAFRHFKIHVRKSLTPSYVGSNDFENAVLDYVICHLDLYDSQSSVNDVIRAMNVNPKISFPPVVDFCLLSDFIQEICCIAFAMQALEPPLDIAYGADGEVFNDCKYRRSYDSDFTAPLVLYHVWPALMENDCVIMKGEAVTRRGAFWNSVRSVSRCRSRSLSPICPRSQIGLNTMSRSRSPSPIRCGLPRF

SEQ ID NO: 23544 - protein, 70 aa, Homo sapiens
MAPWSREAVLSLYRALLRQGRQLRYTDRDFYFASIRREFRKNQKLEDAEARERQLEKGLVFLNGKLGRII

SEQ ID NO: 23545 - protein, 520 aa, Homo sapiens
MPSLVVSGIMERNGGFGELGCFGGSAKDRGLLEDERALQLALDQLCLLGLGEPPAPTAGEDGGGGGGGAPAQPAAPPQPAPPPPPAAPPAAPTAAPAAQTPQPPTAPKGASDAKLCALYKEAELRLKGSSNTTECVPVPTSEHVAEIVGRQGCKIKALRAKTNTYIKTPVRGEEPVFMVTGRREDVATARREIISAAEHFSMIRASRNKSGAAFGVAPALPGQVTIRVRVPYRVVGLVVGPKGATIKRIQQQTNTYIITPSRDRDPVFEITGAPGNVERAREEIETHIAVRTGKILEYNNENDFLAGSPDAAIDSRYSDAWRVHQPGCKPLSTFRQNSLGCIGECGVDSGFEAPRLGEQGGDFGYGGYLFPGYGVGKQDVYYGVAETSPPLWAGQENATPTSVLFSSASSSSSSSAKARAGPPGAHRSPATSAGPELAGLPRRPPGEPLQGFSKLGGGGLRSPGGGRDCMVCFESEVTAALVPCGHNLFCMECAVRICERTDPECPVCHITATQAIRIFS

SEQ ID NO: 23546 - protein, 792 aa, Homo sapiens
MITVNPDGKIMVRRCLVTLRPFRLFVLGIGFFTLCFLMTSLGGQFSARRLGDSPFTIRTEVMGGPESRGVLRKMSDLLELMVKRMDALARLENSSELHRAGGDLHFPADRMPPGAGLMERIQAIAQNVSDIAVKVDQILRHSLLLHSKVSEGRRDQCEAPSDPKFPDCSGKVEWMRARWTSDPCYAFFGVDGTECSFLIYLSEVEWFCPPLPWRNQTAAQRAPKPLPKVQAVFRSNLSHLLDLMGSGKESLIFMKKRTKRLTAQWALAAQRLAQKLGATQRDQKQILVHIGFLTEESGDVFSPRVLKGGPLGEMVQWADILTALYVLGHGLRVTVSLKELQSNLGVPPGRGSCPLTMPLPFDLIYTDYHGLQQMKRHMGLSFKKYRCRIRVIDTFGTEPAYNHEEYATLHGYRTNWGYWNLNPKQFMTMFPHTPDNSFMGFVSEELNETEKRLIKGGKASNMAVVYGKEASIWKLQGKEKFLGILNKYMEIHGTVYYESQRPPEVPAFVKNHGLLPQPEFQQLLRKAKLFIGFGFPYEGPAPLEAIANGCIFLQSRFSPPHSSLNHEFFRGKPTSREVFSQHPYAENFIGKPHVWTVDYNNSEEFEAAIKAIMRTQVDPYLPYEYTCEGMLERIHAYIQHQDFCRAPDPALPEAHAPQSPFVLAPNATHLEWARNTSLAPGAWPPAHALRAWLAVPGRACTDTCLDHGLICEPSFFPFLNSQDAFLKLQVPCDSTESEMNHLYPAFAQPGQECYLQKEPLLFSCAGSNTKYRRLCPCRDFRKGQVALCQGCL

SEQ ID NO: 23547 - protein, 801 aa, Homo sapiens
MHSFVKHLCSRYVVERQGTMALPALLTRLLPLRRLFVLGIGFFTLCFLMTSLGGQFSARRLGDSPFTIRTEVMGGPESRGVLRKMSDLLELMVKRMDALARLENSSELHRAGGDLHFPADRMPPGAGLMERIQAIAQNVSDIAVKVDQILRHSLLLHSKVSEGRRDQCEAPSDPKFPDCSGKVEWMRARWTSDPCYAFFGVDGTECSFLIYLSEVEWFCPPLPWRNQTAAQRAPKPLPKVQAVFRSNLSHLLDLMGSGKESLIFMKKRTKRLTAQWALAAQRLAQKLGATQRDQKQILVHIGFLTEESGDVFSPRVLKGGPLGEMVQWADILTALYVLGHGLRVTVSLKELQSNLGVPPGRGSCPLTMPLPFDLIYTDYHGLQQMKRHMGLSFKKYRCRIRVIDTFGTEPAYNHEEYATLHGYRTNWGYWNLNPKQFMTMFPHTPDNSFMGFVSEELNETEKRLIKGGKASNMAVVYGKEASIWKGKEKFLGILNKYMEIHGTVYYESQRPPEVPAFVKNHGLLPQPEFQQLLRKAKLFIGFGFPYEGPAPLEAIANGCIFLQSRFSPPHSSLNHEFFRGKPTSREVFSQHPYAENFIGKPHVWTVDYNNSEEFEAAIKAIMRTQVDPYLPYEYTCEGMLERIHAYIQHQDFCRAPDPALPEAHAPQSPFVLAPNATHLEWARNTSLAPGAWPPAHALRAWLAVPGRACTDTCLDHGLICEPSFFPFLNSQDAFLKLQVPCDSTESEMNHLYPAFAQPGQECYLQKEPLLFSCAGSNTKYRRLCPCRDFRKGQVALCQGCL

SEQ ID NO: 23548 - protein, 790 aa, Homo sapiens
MITVNPDGKIMVRRCLVTLRPFRLFVLGIGFFTLCFLMTSLGGQFSARRLGDSPFTIRTEVMGGPESRGVLRKMSDLLELMVKRMDALARLENSSELHRAGGDLHFPADRMPPGAGLMERIQAIAQNVSDIAVKVDQILRHSLLLHSKVSEGRRDQCEAPSDPKFPDCSGKVEWMRARWTSDPCYAFFGVDGTECSFLIYLSEVEWFCPPLPWRNQTAAQRAPKPLPKVQAVFRSNLSHLLDLMGSGKESLIFMKKRTKRLTAQWALAAQRLAQKLGATQRDQKQILVHIGFLTEESGDVFSPRVLKGGPLGEMVQWADILTALYVLGHGLRVTVSLKELQSNLGVPPGRGSCPLTMPLPFDLIYTDYHGLQQMKRHMGLSFKKYRCRIRVIDTFGTEPAYNHEEYATLHGYRTNWGYWNLNPKQFMTMFPHTPDNSFMGFVSEELNETEKRLIKGGKASNMAVVYGKEASIWKGKEKFLGILNKYMEIHGTVYYESQRPPEVPAFVKNHGLLPQPEFQQLLRKAKLFIGFGFPYEGPAPLEAIANGCIFLQSRFSPPHSSLNHEFFRGKPTSREVFSQHPYAENFIGKPHVWTVDYNNSEEFEAAIKAIMRTQVDPYLPYEYTCEGMLERIHAYIQHQDFCRAPDPALPEAHAPQSPFVLAPNATHLEWARNTSLAPGAWPPAHALRAWLAVPGRACTDTCLDHGLICEPSFFPFLNSQDAFLKLQVPCDSTESEMNHLYPAFAQPGQECYLQKEPLLFSCAGSNTKYRRLCPCRDFRKGQVALCQGCL

SEQ ID NO: 23549 - protein, 659 aa, Homo sapiens
MPSGSSAALALAAAPAPLPQPPPPPPPPPPPLPPPSGGPELEGDGLLLRERLAALGLDDPSPAEPGAPALRAPAAAAQGQARRAAELSPEERAPPGRPGAPEAAELELEEDEEEGEEAELDGDLLEEEELEEAEEEDRSSLLLLSPPAATASQTQQIPGGSLGSVLLPAARFDAREAAAAAAAAGVLYGGDDAQGMMAAMLSHAYGPGGCGAAAAALNGEQAALLRRKSVNTTECVPVPSSEHVAEIVGRQGCKIKALRAKTNTYIKTPVRGEEPIFVVTGRKEDVAMAKREILSAAEHFSMIRASRNKNGPALGGLSCSPNLPGQTTVQVRVPYRVVGLVVGPKGATIKRIQQQTHTYIVTPSRDKEPVFEVTGMPENVDRAREEIEMHIAMRTGNYIELNEENDFHYNGTDVSFEGGTLGSAWLSSNPVPPSRARMISNYRNDSSSSLGSGSTDSYFGSNRLADFSPTSPFSTGNFWFGDTLPSVGSEDLAVDSPAFDSLPTSAQTIWTPFEPVNPLSGFGSDPSGNMKTQRRGSQPSTPRLSPTFPESIEHPLARRVRSDPPSTGNHVGLPIYIPAFSNGTNSYSSSNGGSTSSSPPESRRKHDCVICFENEVIAALVPCGHNLFCMECANKICEKRTPSCPVCQTAVTQAIQIHS

SEQ ID NO: 23550 - protein, 255 aa, Homo sapiens
MKALLALPLLLLLSTPPCAPQVSGIRGDALERFCLQQPLDCDDIYAQGYQSDGVYLIYPSGPSVPVPVFCDMTTEGGKWTVFQKRFNGSVSFFRGWNDYKLGFGRADGEYWLGLQNMHLLTLKQKYELRVDLEDFENNTAYAKYADFSISPNAVSAEEDGYTLFVAGFEDGGAGDSLSYHSGQKFSTFDRDQDLFVQNCAALSSGAFWFRSCHFANLNGFYLGGSHLSYANGINWAQWKGFYYSLKRTEMKIRRA

SEQ ID NO: 23551 - protein, 279 aa, Homo sapiens
MGELSPLQRPLATEGTMKAQGVLLKLALLALPLLLLLSTPPCAPQVSGIRGDALERFCLQQPLDCDDIYAQGYQSDGVYLIYPSGPSVPVPVFCDMTTEGGKWTVFQKRFNGSVSFFRGWNDYKLGFGRADGEYWLGLQNMHLLTLKQKYELRVDLEDFENNTAYAKYADFSISPNAVSAEEDGYTLFVAGFEDGGAGDSLSYHSGQKFSTFDRDQDLFVQNCAALSSGAFWFRSCHFANLNGFYLGGSHLSYANGINWAQWKGFYYSLKRTEMKIRRA

SEQ ID NO: 23552 - protein, 298 aa, Homo sapiens
MKTLQSTLLLLLLVPLIKPAPPTQQDSRIIYDYGTDNFEESIFSQDYEDKYLDGKNIKEKETVIIPNEKSLQLQKDEAITPLPPKKENDEMPTCLLCVCLSGSVYCEEVDIDAVPPLPKESAYLYARFNKIKKLTAKDFADIPNLRRLDFTGNLIEDIEDGTFSKLSLLEELSLAENQLLKLPVLPPKLTLFNAKYNKIKSRGIKANAFKKLNNLTFLYLDHNALESVPLNLPESLRVIHLQFNNIASITDDTFCKANDTSYIRDRIEEIRLEGNPIVLGKHPNSFICLKRLPIGSYF

SEQ ID NO: 23553 - protein, 33 aa, Homo sapiens
MLLAAVGDDELTDSEDESDLFHEELEDFYDLDL

SEQ ID NO: 23554 - protein, 183 aa, Homo sapiens
MRAAYLFLLFLPAGLLAQGQYDLDPLPPFPDHVQYTHYSDQIDNPDYYDYQEVTPRPSEEQFQFQSQQQVQQEVIPAPTPEPGNAELEPTEPGPLDCREEQYPCTRLYSIHRPCKQCLNEVCFYSLRRVYVINKEICVRTVCAHEELLRADLCRDKFSKCGVMASSGLCQSVAASCARSCGSC

SEQ ID NO: 23555 - protein, 182 aa, Homo sapiens
MRAAYLFLLFLPGLLAQGQYDLDPLPPFPDHVQYTHYSDQIDNPDYYDYQEVTPRPSEEQFQFQSQQQVQQEVIPAPTPEPGNAELEPTEPGPLDCREEQYPCTRLYSIHRPCKQCLNEVCFYSLRRVYVINKEICVRTVCAHEELLRADLCRDKFSKCGVMASSGLCQSVAASCARSCGSC

SEQ ID NO: 23556 - protein, 153 aa, Homo sapiens
MRAAYLFLLFLPDNPDYYDYQEVTPRPSEEQFQFQSQQQVQQEVIPAPTPEPGNAELEPTEPGPLDCREEQYPCTRLYSIHRPCKQCLNEVCFYSLRRVYVINKEICVRTVCAHEELLRADLCRDKFSKCGVMASSGLCQSVAASCARSCGSC

SEQ ID NO: 23557 - protein, 563 aa, Homo sapiens
MGSLSNYALLQLTLTAFLTILVQPQHLLAPVFRTLSILTNQSNCWLCEHLDNAEQPELVFVPASASTWWTYSGQWMYERVWYPQAEVQNHSTSSYRKVTWHWEASMEAQGLSFAQVRLLEGNFSLCVENKNGSGPFLGNIPKQYCNQILWFDSTDGTFMPSIDVTNESRNDDDDTSVCLGTRQCSWFAGCTNRTWNSSAVPLIGLPNTQDYKWVDRNSGLTWSGNDTCLYSCQNQTKGLLYQLFRNLFCSYGLTEAHGKWRCADASITNDKGHDGHRTPTWWLTGSNLTLSVNNSGLFFLCGNGVYKGFPPKWSGRCGLGYLVPSLTRYLTLNASQITNLRSFIHKVTPHRCTQGDTDNPPLYCNPKDNSTIRALFPSLGTYDLEKAILNISKAMEQEFSATKQTLEAHQSKVSSLASASRKDHVLDIPTTQRQTACGTVGKQCCLYINYSEEIKSNIQRLHEASENLKNVPLLDWQGIFAKVGDWFRSWGYVLLIVLFCLFIFVLIYVRVFRKSRRSLNSQPLNLALSPQQSAQLLVSETSCQVSNRAMKGLTTHQYDTSLL

SEQ ID NO: 23558 - protein, 171 aa, Homo sapiens
MSSKRTKTKTKKRPQRATSNVFAMFDQSQIQEFKEAFNMIDQNRDGFIDKEDLHDMLASLGKNPTDEYLDAMMNEAPGPINFTMFLTMFGEKLNGTDPEDVIRNAFACFDEEATGTIQEDYLRELLTTMGDRFTDEEVDELYREAPIDKKGNFNYIEFTRILKHGAKDKDD

SEQ ID NO: 23559 - protein, 373 aa, Homo sapiens
MWVCSTLWRVRTPARQWRGLLPASGCHGPAASSYSASAEPARVRALVYGHHGDPAKVVELKNLELAAVRGSDVRVKMLAAPINPSDINMIQGNYGFLPELPAVGGNEGVAQVVAVGSNVTGLKPGDWVIPANAGLGTWRTEAVFSEEALIQVPSDIPLQSAATLGVNPCTAYRMLMDFEQLQPGDSVIQNASNSGVGQAVIQIAAALGLRTINVVRDRPDIQKLSDRLKSLGAEHVITEEELRRPEMKNFFKDMPQPRLALNCVGGKSSTELLRQLARGGTMVTYGGMAKQPVVASVSLLIFKDLKLRGFWLSQWKKDHSPDQFKELILTLCDLIRRGQLTAPACSQVPLQDYQSALEASMKPFISSKQILTM

SEQ ID NO: 23560 - protein, 297 aa, Homo sapiens
MLAAPINPSDINMIQGNYGFLPELPAVGGNEGVAQVVAVGSNVTGLKPGDWVIPANAGLGTWRTEAVFSEEALIQVPSDIPLQSAATLGVNPCTAYRMLMDFEQLQPGDSVIQNASNSGVGQAVIQIAAALGLRTINVVRDRPDIQKLSDRLKSLGAEHVITEEELRRPEMKNFFKDMPQPRLALNCVGGKSSTELLRQLARGGTMVTYGGMAKQPVVASVSLLIFKDLKLRGFWLSQWKKDHSPDQFKELILTLCDLIRRGQLTAPACSQVPLQDYQSALEASMKPFISSKQILTM

SEQ ID NO: 23561 - protein, 877 aa, Homo sapiens
MCDLRRPAAGGMMDLAYVCEWEKWSKSTHCPSVPLACAWSCRNLIAFTMDLRSDDQDLTRMIHILDTEHPWDLHSIPSEHHEAITCLEWDQSGSRLLSADADGQIKCWSMADHLANSWESSVGSLVEGDPIVALSWLHNGVKLALHVEKSGASSFGEKFSRVKFSPSLTLFGGKPMEGWIAVTVSGLVTVSLLKPSGQVLTSTESLCRLRGRVALADIAFTGGGNIVVATADGSSASPVQFYKVCVSVVSEKCRIDTEILPSLFMRCTTDLNRKDKFPAITHLKFLARDMSEQVLLCASSQTSSIVECWSLRKEGLPVNNIFQQISPVVGDKQPTILKWRILSATNDLDRVSAVALPKLPISLTNTDLKVASDTQFYPGLGLALAFHDGSVHIVHRLSLQTMAVFYSSAAPRPVDEPAMKRPRTAGPAVHLKAMQLSWTSLALVGIDSHGKLSVLRLSPSMGHPLEVGLALRHLLFLLEYCMVTGYDWWDILLHVQPSMVQSLVEKLHEEYTRQTAALQQVLSTRILAMKASLCKLSPCTVTRVCDYHTKLFLIAISSTLKSLLRPHFLNTPDKSPGDRLTEICTKITDVDIDKVMINLKTEEFVLDMNTLQALQQLLQWVGDFVLYLLASLPNQGSLLRPGHSFLRDGTSLGMLRELMVVIRIWGLLKPSCLPVYTATSDTQDSMSLLFRLLTKLWICCRDEGPASEPDEALVDECCLLPSQLLIPSLDWLPASDGLVSRLQPKQPLRLQFGRAPTLPGSAATLQLDGLARAPGQPKIDHLRRLHLGACPTEECKACTRCGCVTMLKSPNRTTAVKQWEQRWIKNCLAVEGRGPDACVTSRASEEAPAFVQLGPQSTHHSPRTPRSLDHLHPEDRP

SEQ ID NO: 23562 - protein, 841 aa, Homo sapiens
MCDLRRPAAGGMMDLAYVCEWEKWSKSTHCPSVPLACAWSCRNLIAFTMDLRSDDQDLTRMIHILDTEHPWDLHSIPSEHHEAITCLEWDQSGSRLLSADADGQIKCWSMADHLANSWESSVGSLVEGDPIVALSWLHNGVKLALHVEKSGASSFGEKFSRVKFSPSLTLFGGKPMEGWIAVTVSGLVTVSLLKPSGQVLTSTESLCRLRGRVALADIAFTGGGNIVVATADGSSASPVQFYKVCVSVVSEKCRIDTEILPSLFMRCTTDLNRKDKFPAITHLKFLARDMSEQVLLCASSQTSSIVECWSLRKEGLPVNNIFQQISPVVGDKQPTILKWRILSATNDLDRVSAVALPKLPISLTNTDLKVASDTQFYPGLGLALAFHDGSVHIVHRLSLQTMAVFYSSAAPRPVDEPAMKRPRTAGPAVHLKAMQLSWTSLALVGIDSHGKLSVLRLSPSMGHPLEVGLALRHLLFLLEYCMVTGYDWWDILLHVQPSMVQSLVEKLHEEYTRQTAALQQVLSTRILAMKASLCKLSPCTVTRVCDYHTKLFLIAISSTLKSLLRPHFLNTPDKSPGDRLTEICTKITDVDIDKVMINLKTEEFVLDMNTLQALQQLLQWVGDFVLYLLASLPNQGSLLRPGHSFLRDGTSLGMLRELMVVIRIWGLLKPSCLPVYTATSDTQDSMSLLFRLLTKLWICCRDEGPASEPDEALVDECCLLPSQLLIPSLDWLPASDGLVSRLQPKQPLRLQFGRAPTLPGSAATLQLDGLARAPGQPKIDHLRRLHLGACPTEECKACTRCGCVTMLKSPNRTTAVKQWEQRWIKNCLCGGLWWRVPLSYP

SEQ ID NO: 23563 - protein, 860 aa, Homo sapiens
MCDLRRPAAGGMMDLAYVCEWEKWSKSTHCPSVPLACAWSCRNLIAFTMDLRSDDQDLTRMIHILDTEHPWDLHSIPSEHHEAITCLEWDQSGSRLLSADADGQIKCWSMADHLANSWESSVGSLVEGDPIVALSWLHNGVKLALHVEKSGASSFGEKFSRVKFSPSLTLFGGKPMEGWIAVTVSGLVTVSLLKPSGQVLTSTESLCRLRGRVALADIAFTGGGNIVVATADGSSASPVQFYKVCVSVVSEKCRIDTEILPSLFMRCTTDLNRKDKFPAITHLKFLARDMSEQVLLCASSQTSSIVECWSLRKEGLPVNNIFQQISPVVGDKQPTILKWRILSATNDLDRVSAVALPKLPISLTNTDLKVASDTQFYPGLGLALAFHDGSVHIVHRLSLQTMAVFYSSAAPRPVDEPAMKRPRTAGPAVHLKAMQLSWTSLALVGIDSHGKLSVLRLSPSMGHPLEVGLALRHLLFLLEYCMVTGYDWWDILLHVQPSMVQSLVEKLHEEYTRQTAALQQVLSTRILAMKASLCKLSPCTVTRVCDYHTKLFLIAISSTLKSLLRPHFLNTPDKSPGDRLTEICTKITDVDIDKVMINLKTEEFVLDMNTLQALQQLLQWVGDFVLYLLASLPNQGSLLRPGHSFLRDGTSLGMLRELMVVIRIWGLLKPSCLPVYTATSDTQDSMSLLFRLLTKLWICFPSTGPCSVWVLLGWQPLPGRDEGPASEPDEALVDECCLLPSQLLIPSLDWLPASDGLVSRLQPKQPLRLQFGRAPTLPGSAATLQLDGLARAPGQPKIDHLRRLHLGACPTEECKACTRCGCVTMLKSPNRTTAVKQWEQRWIKNCLCGGLWWRVPLSYP

SEQ ID NO: 23564 - protein, 751 aa, Homo sapiens
MCDLRRPAAGGMMDLAYVCEWEKWSKSTHCPSVPLACAWSCRNLIAFTMDLRSDDQDLTRMIHILDTEHPWDLHSIPSEHHEAITCLEWDQSGSRLLSADADGQIKCWSMADHLANSWESSVGSLVEGDPIVALSWLHNGVKLALHVEKSGASSFGEKFSRVKFSPSLTLFGGKPMEGWIAVTVSGLVTVSLLKPSGQVLTSTESLCRLRGRVALADIAFTGGGNIVVATADGSSASPVQFYKVCVSVVSEKCRIDTEILPSLFMRCTTDLNRKDKFPAITHLKFLARDMSEQVLLCASSQTSSIVECWSLRKEGLPVNNIFQQISPVVGDKQPTILKWRILSATNDLDRVSAVALPKLPISLTNTDLKVASDTQFYPGLGLALAFHDGSVHIVHRLSLQTMAVFYSSAAPRPVDEPAMKRPRTAGPAVHLKAMQLSWTSLALVGIDSHGKLSVLRLSPSMGHPLEVGLALRHLLFLLEYCMVTGYDWWDILLHVQPSMVQSLVEKLHEEYTRQTAALQQVLSTRILAMKASLCKLSPCTVTRVCDYHTKLFLIAISSTLKSLLRPHFLNTPDKSPGDRLTEICTKITDVDIDKVMINLKTEEFVLDMNTLQALQQLLQWVGDFVLYLLASLPNQVAMRAQRASRTRRWWMNAACCPASCLSPAWTGCQPATAWLAACSPSSPFVCSLAGRPRCLAVLPPCSSTASPGPQASPRSTTCGGCTLALAPRRNARPAPGAAVSPCSSRPTEPRR

SEQ ID NO: 23565 - protein, 663 aa, Homo sapiens
MCDLRRPAAGGMMDLAYVCEWEKWSKSTHCPSVPLACAWSCRNLIAFTMDLRSDDQDLTRMIHILDTEHPWDLHSIPSEHHEAITCLEWDQSGSRLLSADADGQIKCWSMADHLANSWESSVGSLVEGDPIVALSWLHNGVKLALHVEKSGASSFGEKFSRVKFSPSLTLFGGKPMEGWIAVTVSGLVTVSLLKPSGQVLTSTESLCRLRGRVALADIAFTGGGNIVVATADGSSASPVQFYKVCVSVVSEKCRIDTEILPSLFMRCTTDLNRKDKFPAITHLKFLARDMSEQVLLCASSQTSSIVECWSLRKEGLPVNNIFQQISPVVGDKQPTILKWRILSATNDLDRVSAVALPKLPISLTNTDLKVASDTQFYPGLGLALAFHDGSVHIVHRLSLQTMAVFYSSAAPRPVDEPAMKRPRTAGPAVHLKAMQLSWTSLALVGIDSHGKLSVLRLSPSMGHPLEVGLALRHLLFLLEYCMVTGYDWWDILLHVQPSMVQSLVEKLHEEYTRQTAALQQVLSTRILAMKASLCKLSPCTVTRVCDYHTKLFLIAISSTLKSLLRPHFLNTPDKSPGDRLTEICTKITDVDIDKVMINLKTEEFVLDMNTLQALQQLLQWVGDFVLYLLASLPNQPCPTSEPCPTSEPSPTSEPSPTSEPSSP

SEQ ID NO: 23566 - protein, 735 aa, Homo sapiens
MLVHLFRVGIRGGPFPGRLLPPLRFQTFSAVRNTWRNGKTGQLHKAEGEYSDGYRSSSLLRAVAHLRSQLWAHLPRAPLAPRWSPSAWCWVGGALLGPMVLSKHPHLCLVALCEAEEAPPASSTPHVVGSRFNWKLFWQFLHPHLLVLGVAVVLALGAALVNVQIPLLLGQLVEVVAKYTRDHVGSFMTESQNLSTHLLILYGVQGLLTFGYLVLLSHVGERMAVDMRRALFSSLLRQDITFFDANKTGQLVSRLTTDVQEFKSSFKLVISQGLRSCTQVAGCLVSLSMLSTRLTLLLMVATPALMGVGTLMGSGLRKLSRQCQEQIARAMGVADEALGNVRTVRAFAMEQREEERYGAELEACRCRAEELGRGIALFQGLSNIAFNCMVLGTLFIGGSLVAGQQLTGGDLMSFLVASQTVQRSMANLSVLFGQVVRGLSAGARVFEYMALNPCIPLSGGCCVPKEQLRGSVTFQNVCFSYPCRPGFEVLKDFTLTLPPGKIVALVGQSGGGKTTVASLLERFYDPTAGVVMLDGRDLRTLDPSWLRGQVVGFISQEPVLFGTTIMENIRFGKLEASDEEVYTAAREANAHEFITSFPEGYNTVVGERGTTLSGGQKQRLAIARALIKQPTVLILDEATSALDAESERVVQEALDRASAGRTVLVIAHRLSTVRGAHCIVVMADGRVWEAGTHEELLKKGGLYAELIRRQALDAPRTAAPPPKKPEGPRSHQHKS

SEQ ID NO: 23567 - protein, 718 aa, Homo sapiens
MLVHLFRVGIRGGPFPGRLLPPLRFQTFSAVRYSDGYRSSSLLRAVAHLRSQLWAHLPRAPLAPRWSPSAWCWVGGALLGPMVLSKHPHLCLVALCEAEEAPPASSTPHVVGSRFNWKLFWQFLHPHLLVLGVAVVLALGAALVNVQIPLLLGQLVEVVAKYTRDHVGSFMTESQNLSTHLLILYGVQGLLTFGYLVLLSHVGERMAVDMRRALFSSLLRQDITFFDANKTGQLVSRLTTDVQEFKSSFKLVISQGLRSCTQVAGCLVSLSMLSTRLTLLLMVATPALMGVGTLMGSGLRKLSRQCQEQIARAMGVADEALGNVRTVRAFAMEQREEERYGAELEACRCRAEELGRGIALFQGLSNIAFNCMVLGTLFIGGSLVAGQQLTGGDLMSFLVASQTVQRSMANLSVLFGQVVRGLSAGARVFEYMALNPCIPLSGGCCVPKEQLRGSVTFQNVCFSYPCRPGFEVLKDFTLTLPPGKIVALVGQSGGGKTTVASLLERFYDPTAGVVMLDGRDLRTLDPSWLRGQVVGFISQEPVLFGTTIMENIRFGKLEASDEEVYTAAREANAHEFITSFPEGYNTVVGERGTTLSGGQKQRLAIARALIKQPTVLILDEATSALDAESERVVQEALDRASAGRTVLVIAHRLSTVRGAHCIVVMADGRVWEAGTHEELLKKGGLYAELIRRQALDAPRTAAPPPKKPEGPRSHQHKS

SEQ ID NO: 23568 - protein, 693 aa, Homo sapiens
MLVHLFRVGIRGGPFPGRLLPPLRFQTFSAVRYSDGYRSSSLLRAVAHLRSQLWAHLPRAPLAPRWSPSAWCWVGGALLGPMVLSKHPHLCLVALCEAEEAPPASSTPHVVGSRFNWKLFWQFLHPHLLVLGVAVVLALGAALVNVQIPLLLGQLVEVVAKYTRDHVGSFMTESQNLSTHLLILYGVQGLLTFGYLVLLSHVGERMAVDMRRALFSSLLRQDITFFDANKTGQLVSRLTTDVQEFKSSFKLVISQGLRSCTQVAGCLVSLSMLSTRLTLLLMVATPALMGVGTLMGSGLRKLSRQCQEQIARAMGVADEALGNVRTVRAFAMEQREEERYGAELEACRCRAEELGRGIALFQGLSNIAFNCMVLGTLFIGGSLVAGQQLTGGDLMSFLVASQTVQRSMANLSVLFGQVVRGLSAGARVFEYMALNPCIPLSGGCCVPKEQLRGSVTFQNVCFSYPCRPGFEVLKDFTLTLPPGKIVALVGQSGGGKTTVASLLERFYDPTAGVVMLDGRDLRTLDPSWLRGQVVGFISQEPVLFGTTIMENIRFGKLEASDEEVYTAAREANAHEFITSFPEGYNTVVGERGTTLSGGQKQRLAIARALIKQPTVLILDEATSALDAESERVVQEALDRASAGRTVLAGTHEELLKKGGLYAELIRRQALDAPRTAAPPPKKPEGPRSHQHKS

SEQ ID NO: 23569 - protein, 630 aa, Homo sapiens
MRVKLLLPAAPVLPRQHAGAFISGRDSGWPIPRQAATAPPLPDILSCQLALGAALVNVQIPLLLGQLVEVVAKYTRDHVGSFMTESQNLSTHLLILYGVQGLLTFGYLVLLSHVGERMAVDMRRALFSSLLRQDITFFDANKTGQLVSRLTTDVQEFKSSFKLVISQGLRSCTQVAGCLVSLSMLSTRLTLLLMVATPALMGVGTLMGSGLRKLSRQCQEQIARAMGVADEALGNVRTVRAFAMEQREEERYGAELEACRCRAEELGRGIALFQGLSNIAFNCMVLGTLFIGGSLVAGQQLTGGDLMSFLVASQTVQRSMANLSVLFGQVVRGLSAGARVFEYMALNPCIPLSGGCCVPKEQLRGSVTFQNVCFSYPCRPGFEVLKDFTLTLPPGKIVALVGQSGGGKTTVASLLERFYDPTAGVVMLDGRDLRTLDPSWLRGQVVGFISQEPVLFGTTIMENIRFGKLEASDEEVYTAAREANAHEFITSFPEGYNTVVGERGTTLSGGQKQRLAIARALIKQPTVLILDEATSALDAESERVVQEALDRASAGRTVLVIAHRLSTVRGAHCIVVMADGRVWEAGTHEELLKKGGLYAELIRRQALDAPRTAAPPPKKPEGPRSHQHKS

SEQ ID NO: 23570 - protein, 548 aa, Homo sapiens
MTESQNLSTHLLILYGVQGLLTFGYLVLLSHVGERMAVDMRRALFSSLLRQDITFFDANKTGQLVSRLTTDVQEFKSSFKLVISQGLRSCTQVAGCLVSLSMLSTRLTLLLMVATPALMGVGTLMGSGLRKLSRQCQEQIARAMGVADEALGNVRTVRAFAMEQREEERYGAELEACRCRAEELGRGIALFQGLSNIAFNCMVLGTLFIGGSLVAGQQLTGGDLMSFLVASQTVQRSMANLSVLFGQVVRGLSAGARVFEYMALNPCIPLSGGCCVPKEQLRGSVTFQNVCFSYPCRPGFEVLKDFTLTLPPGKIVALVGQSGGGKTTVASLLERFYDPTAGVVMLDGRDLRTLDPSWLRGQVVGFISQEPVLFGTTIMENIRFGKLEASDEEVYTAAREANAHEFITSFPEGYNTVVGERGTTLSGGQKQRLAIARALIKQPTVLILDEATSALDAESERVVQEALDRASAGRTVLVIAHRLSTVRGAHCIVVMADGRVWEAGTHEELLKKGGLYAELIRRQALDAPRTAAPPPKKPEGPRSHQHKS

SEQ ID NO: 23571 - protein, 358 aa, Homo sapiens
MARRYDELPHYPSIADGPAALAGFPEAVPAAPGPYGPHRPPQPLPPGLDSDGLKRDKDEIYGHPLFPLLALVFEKCELATCSPRDGAGAGLGTPRGGDVCSSDSFNEDNTAFAKQVRSERPFFSSNPELDNLMIQAIQVLRFHLLELEKGKMPIDLVIEDRDGGCREDFEDYPASCLSLPDQNNIWIRDHEDSGSVHLGTPGPSSGGLASQSGDNSSDQGVGLDTSVASPSSGGEDEDLDQEPRRNKKRGIFPKVATNIMRAWLFQHLWHPYPSEEQKKQLVQDTGLTILQVNNWFINARRRMVQPMIDQSNRIGQGAAFSPEGQPIGGYTETEPHVAFRPPASVGMSLNLEGEWHYL

SEQ ID NO: 23572 - protein, 79 aa, Homo sapiens
MNGFGRLEHFSGAVYEGQFKDNMFHGLGTYTFPNGAKYTGNFNENRVEGEGEYTDIQGLEWSGNFHFTAAPDLKLKLHM

SEQ ID NO: 23573 - protein, 1044 aa, Homo sapiens
MVLSLTGLIAFSFLQATLALNPEDPNVCSHWESYAVTVQESYAHPFDQIYYTRCTDILNWFKCTRHRISYKTAYRRGLRTMYRRRSQCCPGYYESGDFCIPLCTEECVHGRCVSPDTCHCEPGWGGPDCSSGCDSDHWGPHCSNRCQCQNGALCNPITGACVCAAGFRGWRCEELCAPGTHGKGCQLPCQCRHGASCDPRAGECLCAPGYTGVYCEELCPPGSHGAHCELRCPCQNGGTCHHITGECACPPGWTGAVCAQPCPPGTFGQNCSQDCPCHHGGQCDHVTGQCHCTAGYMGDRCQEECPFGSFGFQCSQHCDCHNGGQCSPTTGACECEPGYKGPRCQERLCPEGLHGPGCTLPCPCDADNTISCHPVTGACTCQPGWSGHHCNESCPVGYYGDGCQLPCTCQNGADCHSITGGCTCAPGFMGEVCAVSCAAGTYGPNCSSICSCNNGGTCSPVDGSCTCKEGWQGLDCTLPCPSGTWGLNCNESCTCANGAACSPIDGSCSCTPGWLGDTCELPCPDGTFGLNCSEHCDCSHADGCDPVTGHCCCLAGWTGIRCDSTCPPGRWGPNCSVSCSCENGGSCSPEDGSCECAPGFRGPLCQRICPPGFYGHGCAQPCPLCVHSSRPCHHISGICECLPGFSGALCNQVCAGGYFGQDCAQLCSCANNGTCSPIDGSCQCFPGWIGKDCSQACPPGFWGPACFHACSCHNGASCSAEDGACHCTPGWTGLFCTQRCPAAFFGKDCGRVCQCQNGASCDHISGKCTCRTGFTGQHCEQRCAPGTFGYGCQQLCECMNNSTCDHVTGTCYCSPGFKGIRCDQAALMMEELNPYTKISPALGAERHSVGAVTGIMLLLFLIVVLLGLFAWHRRRQKEKGRDLAPRVSYTPAMRMTSTDYSLSGACGMDRRQNTYIMDKGFKDYMKESVCSSSTCSLNSSENPYATIKDPPILTCKLPESSYVEMKSPVHMGSPYTDVPSLSTSNKNIYEVEPTVSVVQEGCGHNSSYIQNAYDLPRNSHIPGHYDLLPVRQSPANGPSQDKQS

SEQ ID NO: 23574 - protein, 969 aa, Homo sapiens
MHTPSIRSITHDAQTSSTGSSAPGTALCTEECVHGRCVSPDTCHCEPGWGGPDCSSGCDSDHWGPHCSNRCQCQNGALCNPITGACVCAAGFRGWRCEELCAPGTHGKGCQLPCQCRHGASCDPRAGECLCAPGYTGVYCEELCPPGSHGAHCELRCPCQNGGTCHHITGECACPPGWTGAVCAQPCPPGTFGQNCSQDCPCHHGGQCDHVTGQCHCTAGYMGDRCQEECPFGSFGFQCSQHCDCHNGGQCSPTTGACECEPGYKGPRCQERLCPEGLHGPGCTLPCPCDADNTISCHPVTGACTCQPGWSGHHCNESCPVGYYGDGCQLPCTCQNGADCHSITGGCTCAPGFMGEVCAVSCAAGTYGPNCSSICSCNNGGTCSPVDGSCTCKEGWQGLDCTLPCPSGTWGLNCNESCTCANGAACSPIDGSCSCTPGWLGDTCELPCPDGTFGLNCSEHCDCSHADGCDPVTGHCCCLAGWTGIRCDSTCPPGRWGPNCSVSCSCENGGSCSPEDGSCECAPGFRGPLCQRICPPGFYGHGCAQPCPLCVHSSRPCHHISGICECLPGFSGALCNQVCAGGYFGQDCAQLCSCANNGTCSPIDGSCQCFPGWIGKDCSQACPPGFWGPACFHACSCHNGASCSAEDGACHCTPGWTGLFCTQRCPAAFFGKDCGRVCQCQNGASCDHISGKCTCRTGFTGQHCEQRCAPGTFGYGCQQLCECMNNSTCDHVTGTCYCSPGFKGIRCDQAALMMEELNPYTKISPALGAERHSVGAVTGIMLLLFLIVVLLGLFAWHRRRQKEKGRDLAPRVSYTPAMRMTSTDYSLSGACGMDRRQNTYIMDKGFKDYMKESVCSSSTCSLNSSENPYATIKDPPILTCKLPESSYVEMKSPVHMGSPYTDVPSLSTSNKNIYEVEPTVSVVQEGCGHNSSYIQNAYDLPRNSHIPGHYDLLPVRQSPANGPSQDKQS

SEQ ID NO: 23575 - protein, 875 aa, Homo sapiens
MVLSLTGLIAFSFLQATLALNPEDPNVCSHWESYAVTVQESYAHPFDQIYYTRCTDILNWFKCTRHRISYKTAYRRGLRTMYRRRSQCCPGYYESGDFCIPLCTEECVHGRCVSPDTCHCEPGWGGPDCSSGCDSDHWGPHCSNRCQCQNGALCNPITGACVCAAGFRGWRCEELCAPGTHGKGCQLPCQCRHGASCDPRAGECLCAPGYTGVYCEELCPPGSHGAHCELRCPCQNGGTCHHITGECACPPGWTGAVCAQPCPPGTFGQNCSQDCPCHHGGQCDHVTGQCHCTAGYMGDRCQEECPFGSFGFQCSQHCDCHNGGQCSPTTGACECEPGYKGPRCQERLCPEGLHGPGCTLPCPCDADNTISCHPVTGACTCQPGWSGHHCNESCPVGYYGDGCQLPCTCQNGADCHSITGGCTCAPGFMGEVCAVSCAAGTYGPNCSSICSCNNGGTCSPVDGSCTCKEGWQGLDCTLPCPSGTWGLNCNESCTCANGAACSPIDGSCSCTPGWLGDTCELPCPDGTFGLNCSEHCDCSHADGCDPVTGHCCCLAGWTGIRCDSTCPPGRWGPNCSVSCSCENGGSCSPEDGSCECAPGFRGPLCQRICPPGFYGHGCAQPCPLCVHSSRPCHHISGICECLPGFSGALCNQVCAGGYFGQDCAQLCSCANNGTCSPIDGSCQCFPGWIGKDCSQACPPGFWGPACFHACSCHNGASCSAEDGACHCTPGWTGLFCTQRKPHLLASQPLRIPCCGLLATVGIVQTSREGGMQAAPGLVVPDSCPTRTEELCRGSSRPDWIQGIDKPKVLEGQGCKAAQQHFLGRTVGAYASVRMAPAVTTSVASAPAAQASPGNTVSRDVPQEPLAMGVSSYVSA

SEQ ID NO: 23576 - protein, 137 aa, Homo sapiens
MMEELNPYTKISPALGAERHSVGAVTGIMLLLFLIVVLLGLFAWHRRRQKEKGRDLAPRVSYTPAMRMTSTDYSLSASTTPWWPVMEHLARPFSQRPRTQLSNKSLDRDTAGWTPYSYVNVLDQCPGGQVPARGLLH

SEQ ID NO: 23577 - protein, 70 aa, Homo sapiens
MFCHVDVKISSKRYTWTKLPLNVPKLVLIYLQSHFVLFFFSMCQSIWERPAIGRATTSSASWMVGYDCLL

SEQ ID NO: 23578 - protein, 32 aa, Homo sapiens
MFCHVDVKISSKRQTCLTTSQTWVFSCSLKTH

SEQ ID NO: 23579 - protein, 390 aa, Homo sapiens
MAQRYDDLPHYGGMDGVGIPSTMYGDPHAARSMQPVHHLNHGPPLHSHQYPHTAHTNAMAPSMGSSVNDALKRDKDAIYGHPLFPLLALIFEKCELATCTPREPGVAGGDVCSSESFNEDIAVFAKQIRAEKPLFSSNPELDNLMIQAIQVLRFHLLELEKVHELCDNFCHRYISCLKGKMPIDLVIDDREGGSKSDSEDITRSANLTDQPSWNRDHDDTASTRSGGTPGPSSGGHTSHSGDNSSEQGDGLDNSVASPSTGDDDDPDKDKKRHKKRGIFPKVATNIMRAWLFQHLTHPYPSEEQKKQLAQDTGLTILQVNNWFINARRRIVQPMIDQSNRAVSQGTPYNPDGQPMGGFVMDGQQHMGIRAPGPMSGMGMNMGMEGQWHYM

SEQ ID NO: 23580 - protein, 463 aa, Homo sapiens
MQYDDLPHYGGMDGVGIPSTMYGDPHAARSMQPVHHLNHGPPLHSHQYPHTAHTNAMAPSMGSSVNDALKRDKDAIYGHPLFPLLALIFEKCELATCTPREPGVAGGDVCSSESFNEDIAVFAKQIRAEKPLFSSNPELDNLMIQAIQVLRFHLLELEKVHELCDNFCHRYISCLKGKMPIDLVIDDREGGSKSDSEDITRSANLTDQPSWNRDHDDTASTRSGGTPGPSSGGHTSHSGDNSSEQGDGLDNSVASPSTGDDDDPDKDKKRHKKRGIFPKVATNIMRAWLFQHLTHPYPSEEQKKQLAQDTGLTILQVNNWFINARRRIVQPMIDQSNRAVSQGTPYNPDGQPMGGFVMDGQQHMGIRAPGLQSMPGEYVARGGPMGVSMGQPSYTQPQMPPHPAQLRHGPPMHTYIPGHPHHPTVMMHGGPPHPGMPMSASSPTVLNTGDPTMSGQVMDIHAQ

SEQ ID NO: 23581 - protein, 375 aa, Homo sapiens
MARRYDELPHYPGIVDGPAALASFPETVPAVPGPYGPHRPPQPLPPGLDSDGLKREKDEIYGHPLFPLLALVFEKCELATCSPRDGAGAGLGTPPGGDVCSSDSFNEDIAAFAKQVRSERPLFSSNPELDNLMIQAIQVLRFHLLELEKVHDLCDNFCHRYITCLKGKMPIDLVIEDRDGGCREDFEDYPASCPSLPDQNNMWIRDHEDSGSVHLGTPGPSSGGLASQSGDNSSDQGDGLDTSVASPSSGGEDEDLDQERRRNKKRGIFPKVATNIMRAWLFQHLSHPYPSEEQKKQLAQDTGLTILQVNNWFINARRRIVQPMIDQSNRTGQGAAFSPEGQPIGGYTETQPHVAVRPPGSVGMSLNLEGEWHYL

SEQ ID NO: 23582 - protein, 421 aa, Homo sapiens
MARRYDELPHYPGIVDGPAALASFPETVPAVPGPYGPHRPPQPLPPGLDSDGLKREKDEIYGHPLFPLLALVFEKCELATCSPRDGAGAGLGTPPGGDVCSSDSFNEDIAAFAKQVRSERPLFSSNPELDNLMIQAIQVLRFHLLELEKVHDLCDNFCHRYITCLKGKMPIDLVIEDRDGGCREDFEDYPASCPSLPDQNNMWIRDHEDSGSVHLGTPGPSSGGLASQSGDNSSDQGDGLDTSVASPSSGGEDEDLDQERRRNKKRGIFPKVATNIMRAWLFQHLSRRSEAPVLPDVCLGLGSPSPGPRWARPWGSDCGRPGRQSDSCWWLQHPYPSEEQKKQLAQDTGLTILQVNNWFINARRRIVQPMIDQSNRTGQGAAFSPEGQPIGGYTETQPHVAVRPPGSVGMSLNLEGEWHYL

SEQ ID NO: 23583 - protein, 358 aa, Homo sapiens
MARRYDELPHYPGIVDGPAALASFPETVPAVPGPYGPHRPPQPLPPGLDSDGLKREKDEIYGHPLFPLLALVFEKCELATCSPRDGAGAGLGTPPGGDVCSSDSFNEDIAAFAKQVRSERPLFSSNPELDNLMIQAIQVLRFHLLELEKGKMPIDLVIEDRDGGCREDFEDYPASCPSLPDQNNMWIRDHEDSGSVHLGTPGPSSGGLASQSGDNSSDQGDGLDTSVASPSSGGEDEDLDQERRRNKKRGIFPKVATNIMRAWLFQHLSHPYPSEEQKKQLAQDTGLTILQVNNWFINARRRIVQPMIDQSNRTGQGAAFSPEGQPIGGYTETQPHVAVRPPGSVGMSLNLEGEWHYL

SEQ ID NO: 23584 - protein, 708 aa, Homo sapiens
MSTADALDDENTFKILVATDIHLGFMEKDAVRGNDTFVTLDEILRLAQENEVDFILLGGDLFHENKPSRKTLHTCLELLRKYCMGDRPVQFEILSDQSVNFGFSKFPWVNYQDGNLNISIPVFSIHGNHDDPTGADALCALDILSCAGFVNHFGRSMSVEKIDISPVLLQKGSTKIALYGLGSIPDERLYRMFVNKKVTMLRPKEDENSWFNLFVIHQNRSKHGSTNFIPEQFLDDFIDLVIWGHEHECKIAPTKNEQQLFYISQPGSSVVTSLSPGEAVKKHVGLLRIKGRKMNMHKIPLHTVRQFFMEDIVLANHPDIFNPDNPKVTQAIQSFCLEKIEEMLENAERERLGNSHQPEKPLVRLRVDYSGGFEPFSVLRFSQKFVDRVANPKDIIHFFRHREQKEKTGEEINFGKLITKPSEGTTLRVEDLVKQYFQTAEKNVQLSLLTERGMGEAVQEFVDKEEKDAIEELVKYQLEKTQRFLKERHIDALEDKIDEEVRRFRETRQKNTNEEDDEVREAMTRARALRSQSEESASAFSADDLMSIDLAEQMANDSDDSISAATNKGRGRGRGRRGGRGQNSASRGGSQRGRADTGLETSTRSRNSKTAVSASRNMSIIDAFKSTRQQPSRNVTTKNYSEVIEVDESDVEEDIFPTTSKTDQRWSSTSSSKIMSQSQVSKGVDFESSEDDDDDPFMNTSSLRRNRR

SEQ ID NO: 23585 - protein, 680 aa, Homo sapiens
MSTADALDDENTFKILVATDIHLGFMEKDAVRGNDTFVTLDEILRLAQENEVDFILLGGDLFHENKPSRKTLHTCLELLRKYCMGDRPVQFEILSDQSVNFGFSKFPWVNYQDGNLNISIPVFSIHGNHDDPTGADALCALDILSCAGFVNHFGRSMSVEKIDISPVLLQKGSTKIALYGLGSIPDERLYRMFVNKKVTMLRPKEDENSWFNLFVIHQNRSKHGSTNFIPEQFLDDFIDLVIWGHEHECKIAPTKNEQQLFYISQPGSSVVTSLSPGEAVKKHVGLLRIKGRKMNMHKIPLHTVRQFFMEDIVLANHPDIFNPDNPKVTQAIQSFCLEKIEEMLENAERERLGNSHQPEKPLVRLRVDYSGGFEPFSVLRFSQKFVDRVANPKDIIHFFRHREQKEKTGEEINFGKLITKPSEGTTLRVEDLVKQYFQTAEKNVQLSLLTERGMGEAVQEFVDKEEKDAIEELVKYQLEKTQRFLKERHIDALEDKIDEEVRRFRETRQKNTNEEDDEVREAMTRARALRSQSEESASAFSADDLMSIDLAEQMANDSDDSISAATNKGRGRGRGRRGGRGQNSASRGGSQRGRAFKSTRQQPSRNVTTKNYSEVIEVDESDVEEDIFPTTSKTDQRWSSTSSSKIMSQSQVSKGVDFESSEDDDDDPFMNTSSLRRNRR

SEQ ID NO: 23586 - protein, 711 aa, Homo sapiens
MNRNISHQKGDDENTFKILVATDIHLGFMEKDAVRGNDTFVTLDEILRLAQENEVDFILLGGDLFHENKPSRKTLHTCLELLRKYCMGDRPVQFEILSDQSVNFGFSKFPWVNYQDGNLNISIPVFSIHGNHDDPTGADALCALDILSCAGFVNHFGRSMSVEKIDISPVLLQKGSTKIALYGLGSIPDERLYRMFVNKKVTMLRPKEDENSWFNLFVIHQNRSKHGSTNFIPEQFLDDFIDLVIWGHEHECKIAPTKNEQQLFYISQPGSSVVTSLSPGEAVKKHVGLLRIKGRKMNMHKIPLHTVRQFFMEDIVLANHPDIFNPDNPKVTQAIQSFCLEKIEEMLENAERERLGNSHQPEKPLVRLRVDYSGGFEPFSVLRFSQKFVDRVANPKDIIHFFRHREQKEKTGEEINFGKLITKPSEGTTLRVEDLVKQYFQTAEKNVQLSLLTERGMGEAVQEFVDKEEKDAIEELVKYQLEKTQRFLKERHIDALEDKIDEEVRRFRETRQKNTNEEDDEVREAMTRARALRSQSEESASAFSADDLMSIDLAEQMANDSDDSISAATNKGRGRGRGRRGGRGQNSASRGGSQRGRADTGLETSTRSRNSKTAVSASRNMSIIDAFKSTRQQPSRNVTTKNYSEVIEVDESDVEEDIFPTTSKTDQRWSSTSSSKIMSQSQVSKGVDFESSEDDDDDPFMNTSSLRRNRR

SEQ ID NO: 23587 - protein, 161 aa, Homo sapiens
MEYTGSKYIGEYVDGRMEGKAKYILPTETIYVGEMKDGMFHGEGTLYFPSGSQYDAIWENGLAIKGTYTFSDGLHYDEKNWHYCDGYDRRFYTEILNGLKPAGMAQLTNMDPPRKIPKGYYDCGDGFYNPVTRVVKDYRNRFLRNADDDEHEWITRTCRKG

SEQ ID NO: 23588 - protein, 175 aa, Homo sapiens
MEYTGSKYIGEYVDGRMEGKAKYILPTETIYVGEMKDGMFHGEGTLYFPSGSQYDAIWENGLAIKGTYTFSDGLHYDEKNWHYCDGYDRRFYTEILNGLKPAGMAQLTNMDPPRKIPKGYYDCGDGFYNPVTRVVKDYRNRFLRNAGRFLPTLQHVFSSPTYEYVHLYVQMYAHT

SEQ ID NO: 23589 - protein, 196 aa, Homo sapiens [sequence omitted]

SEQ ID NO: 23590 - protein, 180 aa, Homo sapiens
MEIISSKLFILLTLATSSLLTSNIFCADELVISNLHSKENYDKYSEPRGYPKGERSLNFEELKDWGPKNVIKMSTPAVNKMPHSFANLPLRFGRNVQEERSAGATANLPLRSGRNMEVSLVRRVPNLPQRFGRTTTAKSVCRMLSDLCQGSMHSPCANDLFYSMTCQHQEIQNPDQKQSR

SEQ ID NO: 23591 - protein, 608 aa, Homo sapiens
MAESIIIRVQSPDGVKRITATKRETAATFLKKVAKEFGFQNNGFSVYINRNKTGEITASSNKSLNLLKIKHGDLLFLFPSSLAGPSSEMETSVPPGFKVFGAPNVVEDEIDQYLSKQDGKIYRSRDPQLCRHGPLGKCVHCVPLEPFDEDYLNHLEPPVKHMSFHAYIRKLTGGADKGKFVALENISCKIKSGCEGHLPWPNGICTKCQPSAITLNRQKYRHVDNIMFENHTVADRFLDFWRKTGNQHFGYLYGRYTEHKDIPLGIRAEVAAIYEPPQIGTQNSLELLEDPKAEVVDEIAAKLGLRKVGWIFTDLVSEDTRKGTVRYSRNKDTYFLSSEECITAGDFQNKHPNMCRLSPDGHFGSKFVTAVATGGPDNQVHFEGYQVSNQCMALVRDECLLPCKDAPELGYAKESSSEQYVPDVFYKDVDKFGNEITQLARPLPVEYLIIDITTTFPKDPVYTFSISQNPFPIENRDVLGETQDFHSLATYLSQNTSSVFLDTISDFHLLLFLVTNEVMPLQDSISLLLEAVRTRNEELAQTWKRSEQWATIEQLCSTVGGQLPGLHEYGAVGGSTHTATAAMWACQHCTFMNQPGTGHCEMCSLPRT

SEQ ID NO: 23592 - protein, 617 aa, Homo sapiens
MAESIIIRVQSPDGVKRITATKRETAATFLKKVAKEFGFQNNGFSVYINRNKTGEITASSNKSLNLLKIKHGDLLFLFPSSLAGPSSEMETSVPPGFKVFGAPNVVEDEIDQYLSKQDGKIYRSRDPQLCRHGPLGKCVHCVPLEPFDEDYLNHLEPPVKHMSFHAYIRKLTGGADKGKFVALENISCKIKSGCEGHLPWPNGICTKCQPSAITLNRQKYRHVDNIMFENHTVADRFLDFWRKTGNQHFGYLYGRYTEHKDIPLGIRAEVAAIYEPPQIGTQNSLELLEDPKAEVVDEIAAKLGLRKVGWIFTDLVSEDTRKGTVRYSRNKDTYFLSSEECITAGDFQNKHPNMCRLSPDGHFGSKFVTAVATGGPDNQVHFEGYQVSNQCMALVRDECLLPCKDAPELGYAKESSSEQYVPDVFYKDVDKFGNEITQLARPLPVEYLIIDITTTFPKDPVYTFSISQNPFPIENRDVLGETQDFHSLATYLSQNTSSVFLDTISDFHLLLFLVTNEVMPLQDSISLLLEAVRTRNEELAQTWKRSEQWATIEQLCSEYPHPLPRHPVAGAGEQPTLHSSPLPVVPWIPHPAASWQVPSAMQRVETRPPCQARGRLR

SEQ ID NO: 23593 - protein, 375 aa, Homo sapiens
MNTSHLLALLLPKSPQGENRSKPLGTPYNFSEHCQDSVDVMVFIVTSYSIETVVGVLGNLCLMCVTVRQKEKANVTNLLIANLAFSDFLMCLLCQPLTAVYTIMDYWIFGETLCKMSAFIQCMSVTVSILSLVLVALERHQLIINPTGWKPSISQAYLGIVLIWVIACVLSLPFLANSILENVFHKNHSKALEFLADKVVCTESWPLAHHRTIYTTFLLLFQYCLPLGFILVCYARIYRRLQRQGRVFHKGTYSLRAGHMKQVNVVLVVMVVAFAVLWLPLHVFNSLEDWHHEAIPICHGNLIFLVCHLLAMASTCVNPFIYGFLNTNFKKEIKALVLTCQQSAPLEESEHLPLSTVHTEVSKGSLRLSGRSNPI

SEQ ID NO: 23594 - protein, 247 aa, Homo sapiens
MAAEADGPLKRLLVPILLPEKCYDQLFVQWDLLHVPCLKILLSKGLGLGIVAGSLLVKLPQVFKILGAKSAEGLSLQSVMLELVALTGTMVYSITNNFPFSSWGEALFLMLQTITICFLVMHYRGQTVKGVAFLACYGLVLLVLLSPLTPLTVVTLLQASNVPAVVVGRLLQAATNYHNGHTGQLSAITVFLLFGGSLARIFTSIQETGDPLMAGTFVVSSLCNGLIAAQLLFYWNAKPPHKQKKAQ

SEQ ID NO: 23595 - protein, 186 aa, Homo sapiens
MAAEADGPLKRLLVPILLPEKCYDQLFVQWDLLHVPCLKILLSKGLGLGIVAGSLLVKLPQVFKILGAKSAEGLSLQSVMLELVALTGTMVYSITNNFPFRCRFPRLLRPGPAGASLTSDALDCSHPAPGLQCACCGGGEASPGSHQLPQRAHRPALSHHSLPAVWGLPGPNLHFHSGVSIPFSQL

SEQ ID NO: 23596 - protein, 109 aa, Homo sapiens
MAGALVRKAADYVRSKDFRDYLMSTHFWGPVANWGLPIAAINDMKKSPEIISGRMTFALCCYSLTFMRFAYKVQPRNWLLFACHATNEVAQLIQGGRLIKHEMTKTASA

SEQ ID NO: 23597 - protein, 200 aa, Homo sapiens
MDSSTAHSPVFLVFPPEITASEYESTELSATTFSTQSPLQKLFARKMKILGTIQILFGIMTFSFGVIFLFTLLKPYPRFPFIFLSGYPFWGSVLFINSGAFLIAVKRKTTETLIILSRIMNFLSALGAIAGIILLTFGFILDQNYICGYSHQNSQCKAVTVLFLGILITLMTFSIIELFISLPFSILGCHSEDCDCEQCC

SEQ ID NO: 23598 - protein, 175 aa, Homo sapiens
MASRKAGTRGKVAATKQAQRGSSNVFSMFEQAQIQEFKEAFSCIDQNRDGIICKADLRETYSQLGKVSVPEEELDAMLQEGKGPINFTVFLTLFGEKLNGTDPEEAILSAFRMFDPSGKGVVNKDEFKQLLLTQADKFSPAEVEQMFALTPMDLAGNIDYKSLCYIITHGDEKEE

SEQ ID NO: 23599 - protein, 269 aa, Homo sapiens
MAASAGAGAVIAAPDSRRWLWSVLAAALGLLTAGVSALEVYTPKEIFVANGTQGKLTCKFKSTSTTGGLTSVSWSFQPEGADTTVSFFHYSQGQVYLGNYPPFKDRISWAGDLDKKDASINIENMQFIHNGTYICDVKNPPDIVVQPGHIRLYVVEKENLPVFPVWVVVGIVTAVVLGLTLLISMILAVLYRRKNSKRDYTGCSTSESLSPVKQAPRKSPSDTEGLVKSLPSGSHQGPVIYAQLDHSGGHHSDKINKSESVVYADIRKN

SEQ ID NO: 23600 - protein, 268 aa, Homo sapiens
MAASAGAGAVIAAPDSRRWLWSVLAAALGLLTAGVSALEVYPKEIFVANGTQGKLTCKFKSTSTTGGLTSVSWSFQPEGADTTVSFFHYSQGQVYLGNYPPFKDRISWAGDLDKKDASINIENMQFIHNGTYICDVKNPPDIVVQPGHIRLYVVEKENLPVFPVWVVVGIVTAVVLGLTLLISMILAVLYRRKNSKRDYTGCSTSESLSPVKQAPRKSPSDTEGLVKSLPSGSHQGPVIYAQLDHSGGHHSDKINKSESVVYADIRKN

SEQ ID NO: 23601 - protein, 209 aa, Homo sapiens
MAASAGAGAVIAAPDSRRWLWSVLAAALGLLTAGVSALEVYTPKEIFVANGTQGKLTCKFKSTSTTGGLTSVSWSFQPEGADTTVSFFHYSQGQVYLGNYPPFKDRISWAGDLDKKDASINIENMQFIHNGTYICDVKNPPDIVVQPGHIRLYVVEKENLPVFPVWVVVGIVTAVVLGLTLLISMILAVLYRRKNSKRDYTGAQSYMHS

SEQ ID NO: 23602 - protein, 145 aa, Homo sapiens
MQFIHNGTYICDVKNPPDIVVQPGHIRLYVVEKENLPVFPVWVVVGIVTAVVLGLTLLISMILAVLYRRKNSKRDYTGCSTSESLSPVKQAPRKSPSDTEGLVKSLPSGSHQGPVIYAQLDHSGGHHSDKINKSESVVYADIRKN

SEQ ID NO: 23603 - protein, 119 aa, Homo sapiens
MAASAGAGAVIAAPDSRRWLWSVLAAALGLLTAGVSALEVYTPKEIFVANGTQGKLTCKFKSTSTTGGLTSVSWSFQPEGADTTVSGPVIYAQLDHSGGHHSDKINKSESVVYADIRKN

SEQ ID NO: 23604 - protein, 196 aa, Homo sapiens
MAGWWPALSRAARRHPWPTNVLLYGSLVSAGDALQQRLQGREANWRQTRRVATLVVTFHANFNYVWLRLLERALPGRAPHALLAKLLCDQVVGAPIAVSAFYVGMSILQGKDDIFLDLKQKFWNTYLSGLMYWPFVQLTNFSLVPVQWRTAYAGVCGFLWATFICFSQQSGDGTFKSAFTILYTKGTSATEGYPKK

SEQ ID NO: 23605 - protein, 147 aa, Homo sapiens
MAGWWPALSRAARRHPWPTNVLLYGSLVSAGDALQQRLQGREANWRQTRRVATLVVTFHANFNYVWLRLLERALPGRAPHALLAKLLCDQVVGAPIAVSAFYVEWTDVLALCTADQLQPCSCSMENSLRWSLWFSLGHLHLFFPAEW

SEQ ID NO: 23606 - protein, 311 aa, Homo sapiens
MAAENSSFVTQFILAGLTDQPGVQIPLFFLFLGFYVVTVVGNLGLITLIRLNSHLHTPMYFFLYNLSFIDFCYSSVITPKMLMSFVLKKNSISYAGCMTQLFFFLFFVVSESFILSAMAYDRYVAICNPLLYMVTMSPQVCFLLLLGVYGMGFAGAMAHTACMMGVTFCANNLVNHYMCDILPLLECACTSTYVNELVVFVVVGIDIGVPTVTIFISYALILSSIFHIDSTEGRSKAFSTCSSHIIAVSLFFGSGAFMYLKPFSLLAMNQGKVSSLFYTTVVPMLNPLIYSLRNKDVKVALKKILNKNAFS

SEQ ID NO: 23607 - protein, 473 aa, Homo sapiens
MSTELFSSTREEGSSGSGPSFRSNQRKMLNLLLERDTSFTVCPDVPRTPVGKFLGDSANLSILSGGTPKRCLDLSNLSSGEITATQLTTSADLDETGHLDSSGLQEVHLAGMNHDQHLMKCSPAQLLCSTPNGLDRGHRKRDAMCSSSANKENDNGNLVDSEMKYLGSPITTVPKLDKNPNLGEDQAEEISDELMEFSLKDQEAKVSRSGLYRSPSMPENLNRPRLKQVEKFKDNTIPDKVKKKYFSGQGKLRKGLCLKKTVSLCDITITQMLEEDSNQGHLIGDFSKVCALPTVSGKHQDLKYVNPETVAALLSGKFQGLIEKFYVIDCRYPYEYLGGHIQGALNLYSQEELFNFFLKKPIVPLDTQKRIIIVFHCEFSSERGPRMCRCLREEDRSLNQYPALYYPELYILKGGYRDFFPEYMELCEPQSYCPMHHQDHKTELLRCRSQSKVQEGERQLREQIALLVKDMSP

SEQ ID NO: 23608 - protein, 443 aa, Homo sapiens
MSTELFSSTREEGSSGSGPSFRSNQRKMLNLLLERDTSFTVCPDVPRTPVGKFLGDSANLSILSGGTPKRCLDLSNLSSGEITATQLTTSADLDETGHLDSSGLQEVHLAGMNHDQHLMKCSPDNGNLVDSEMKYLGSPITTVPKLDKNPNLGEDQAEEISDELMEFSLKDQEAKVSRSGLYRSPSMPENLNRPRLKQVEKFKDNTIPDKVKKKYFSGQGKLRKGLCLKKTVSLCDITITQMLEEDSNQGHLIGDFSKVCALPTVSGKHQDLKYVNPETVAALLSGKFQGLIEKFYVIDCRYPYEYLGGHIQGALNLYSQEELFNFFLKKPIVPLDTQKRIIIVFHCEFSSERGPRMCRCLREEDRSLNQYPALYYPELYILKGGYRDFFPEYMELCEPQSYCPMHHQDHKTELLRCRSQSKVQEGERQLREQIALLVKDMSP

SEQ ID NO: 23609 - protein, 430 aa, Homo sapiens
MSTELFSSTREEGSSGSGPSFRSNQRKMLNLLLERDTSFTVCPDVPRTPVGKFLGDSANLSILSGSPGFFRTSGSAFSWDAQLLCSTPNGLDRGHRKRDAMCSSSANKENDNGNLVDSEMKYLGSPITTVPKLDKNPNLGEDQAEEISDELMEFSLKDQEAKVSRSGLYRSPSMPENLNRPRLKQVEKFKDNTIPDKVKKKYFSGQGKLRKGLCLKKTVSLCDITITQMLEEDSNQGHLIGDFSKVCALPTVSGKHQDLKYVNPETVAALLSGKFQGLIEKFYVIDCRYPYEYLGGHIQGALNLYSQEELFNFFLKKPIVPLDTQKRIIIVFHCEFSSERGPRMCRCLREEDRSLNQYPALYYPELYILKGGYRDFFPEYMELCEPQSYCPMHHQDHKTELLRCRSQSKVQEGERQLREQIALLVKDMSP

SEQ ID NO: 23610 - protein, 400 aa, Homo sapiens
MSTELFSSTREEGSSGSGPSFRSNQRKMLNLLLERDTSFTVCPDVPRTPVGKFLGDSANLSILSGSPGFFRTSGSAFSWDDNGNLVDSEMKYLGSPITTVPKLDKNPNLGEDQAEEISDELMEFSLKDQEAKVSRSGLYRSPSMPENLNRPRLKQVEKFKDNTIPDKVKKKYFSGQGKLRKGLCLKKTVSLCDITITQMLEEDSNQGHLIGDFSKVCALPTVSGKHQDLKYVNPETVAALLSGKFQGLIEKFYVIDCRYPYEYLGGHIQGALNLYSQEELFNFFLKKPIVPLDTQKRIIIVFHCEFSSERGPRMCRCLREEDRSLNQYPALYYPELYILKGGYRDFFPEYMELCEPQSYCPMHHQDHKTELLRCRSQSKVQEGERQLREQIALLVKDMSP

SEQ ID NO: 23611 - protein, 240 aa, Homo sapiens
MLLQSQTMGVSHSFTPKGITIPQREKPGHMYQNEDYLQNGLPTETTVLGTVQILCCLLISSLGAILVFAPYPSHFNPAISTTLMSGYPFLGALCFGITGSLSIISGKQSTKPFDLSSLTSNAVSSVTAGAGLFLLADSMVALRTASQHCGSEMDYLSSLPYSEYYYPIYEIKDCLLTSVSLTGVLVVMLIFTVLELLLAAYSSVFWWKQLYSNNPGSSFSSTQSQDHIQQVKKSSSRSWI

SEQ ID NO: 23612 - protein, 195 aa, Homo sapiens
MLLQSQTMGVSHSFTPKGITIPQREKPGHMYQNEDYLQNGLPTETTVLGFGITGSLSIISGKQSTKPFDLSSLTSNAVSSVTAGAGLFLLADSMVALRTASQHCGSEMDYLSSLPYSEYYYPIYEIKDCLLTSVSLTGVLVVMLIFTVLELLLAAYSSVFWWKQLYSNNPGSSFSSTQSQDHIQQVKKSSSRSWI

SEQ ID NO: 23613 - protein, 317 aa, Homo sapiens
MKSDNHSFLGDSPKAFILLGVSDRPWLELPLFVVLLLSYVLAMLGNVAIILASRVDPQLHSPMYIFLSHLSFLDLCYTTTTVPQMLVNMGSSQKTISYGGCTVQYAVFHWLGCTECIVLAAMALDRYVAICKPLHYAVLMHRALCQQLVALAWLSGFGNSFVQVVLTVQLPFCGRQVLNNFFCEVPAVIKLSCADTAVNDTILAVLVAFFVLVPLALILLSYGFIARAVLRIQSSKGRHKAFGTCSSHLMIVSLFYLPAIYMYLQPPSSYSQEQGKFISLFYSIITPTLNPFTYTLRNKDMKGALRRLLARIWRLCG

SEQ ID NO: 23614 - protein, 483 aa, Homo sapiens
MSSKHRICSQEEVVIPCAYDSDSESVDLELSNLEIIKKGSSSIELTDLDIPDIPGLHCEPLSHSPRHLTQQDPLSEAIVEKLIQSIQKVFNGELKGELEKLKFLGDLSSLSQALPYDETAKSFIHSHIADIVHTLNVLVQEERPHSLSSSMRQEVFVTIADLSYQDVHLLLGSEDRAELFSLTIKSIITLPSVRTLTQIQEIMPNGTCNTECLYRQTFQAFSEMLQSLVVKDPHLENLDTIIKLPLRFQRLGHLVALMALLCGDPQEKVAEEAAEGIHSLLHITLRLKYITHDKKDQQNLKRALTKCREFLELHSSAAKCFYNCPFRIAQVFEGFLDSNELCQFIMTTFDTLKTLKHPCIQRSAGELLLTLAKNTESQFEKVPEIMGVICAQLSIISQPRVRQQIINTVSLFISRPKYTDIVLSFLLCHPVPYNRHLAEVWRMLSVELPSTTWILWRLLRKLQKCHNEPAQEKMAYVAVAVSP

SEQ ID NO: 23615 - protein, 876 aa, Homo sapiens
MSSKHRICSQEEVVIPCAYDSDSESVDLELSNLEIIKKGSSSIELTDLDIPDIPGLHCEPLSHSPRHLTQQDPLSEAIVEKLIQSIQKVFNGELKGELEKLKFLGDLSSLSQALPYDETAKSFIHSHIADIVHTLNVLVQEERPHSLSSSMRQEVFVTIADLSYQDVHLLLGSEDRAELFSLTIKSIITLPSVRTLTQIQEIMPNGTCNTECLYRQTFQAFSEMLQSLVVKDPHLENLDTIIKLPLRFQRLGHLVALMALLCGDPQEKVAEEAAEGIHSLLHITLRLKYITHDKKDQQNLKRALTKCREFLELHSSAAKCFYNCPFRIAQVPEIMGVICAQLSIISQPRVRQQIINTVSLFISRPKYTDIVLSFLLCHPVPYNRHLAEVWRMLSVELPSTTWILWRLLRKLQKCHNEPAQEKMAYVAVAATDALYEVFLGNRLRAATFRLFPQLLMTLLIQIHHSIGLTMSDVDIPSGLYTEQEVPSEVTPLCFAMQATKTLLLRTCCLQEFNIMEKNKGWALLGGKDGHLQGLFLLANALLERNQLLAQKVMYLLVPLLNRGNDKHKLTSAGSFVELLRSPVAKRLPSIYSVARFKDWLQDGNHLFRILGLRGLYNLVGHQEMREDIKSLLPYIVDSLRETDEKIVLSAIQILLQLVRTMDFTTLAAMMRTLFSLFGDVRSDVHRFSVTLFGAAIKSVKNPDKKSIENQVLDSLVPLLLYSQDENDAVAEESRQVLTICAQFLKWKLPQEVYSKDPWHIKPTEAGTICRFFEKKCKGKINILEQTLMYSKNPKLPIRRSAVLFVGLLSKYMDHNELRRMGTDWIEDDLRDLLCDPEPSLCIIASQTLLLVQMARAEPKPKQRVNWLQKLMGRSSA

SEQ ID NO: 23616 - protein, 1773 aa, Homo sapiens
MRRGNISPAFWFLWLLLFGLLGPSSENTTAFTKGSDTTTASITGSETTMASTMASTSALTTGSKITTDSTTGSETTSASTMASTAAFTTGSETNTASTTDSGTTIASTRTFTTGSDTTTGSTAGSETIVASTTVSGTTTTFTIASTTVPETTMASSTTSTAGSEKTMASSIISETTMASTTGSETATVSTTGSETTTTSTASSEATKVSTTGSETTTASTAGSETTTTSTSMAGSEATTTSTADSKVITASSMSSETTVAPAAGSNTTTASTTGSETTTILIKASETTTASTAGSETTTPSPTGSQTTIVSISGSEITTTSTAGSENTTVSSAGSGTTTASMAGSETTVSTAGSETTTVSITGTETTMVSAMGSETTTNSTTSSETTVTSTAGSETTTVSTVGSETTTAYTADSETTAASTTGSEMTTVFTAGSETITPSTAGSETTTVSTAGSETTTVSTTGSETTTASTAHSETTAASTMGSETTKVSTAGSETTVSTAGSETTAASTEDSETNTAFTEDSKTTTASTTGFETTAASTTGSEPTMASTMGSETTMASTIGPETTKVSTASSEVTTVFAAGSETIRASTVGSETTTVSTTGSETTTASIMGSETSTDSTTGSETTTASTEGSETTTASTEGSEATTVSTTGSETTTVSITDSETTTTCTEGSEMTAVSTTVFETTTASTEGSEITIASTSDSETTTASTEGSETTTVTTAGSETKTAYTTGSETTTASNTGLETTTVFTIGSDTTTASTEGSETTAVSATGSEMTTVSTEGSENTTVSTTGSETTTVSTTGLETTTTSTEGSEMTTVSTTGAETTTDSTEGSGTTAASTAGSETTTVSTADSENTTASTADSETTSASTTGSETTTASTTSSETTTASTEGSETTTVSTTDSETTMVSTTGSERTITSTEGSETTTVSATGSETTVSTEGSGTTTVSITGSETTKVSTTGSETTTTSTEGSEITTASITGSETTTASTEGSETTTASTEGSETTSASTTGSETTTASTTSSETTMASIMGSETTMASTIGSETTKVSTASSKMTTVFTENSETTIASTTASETTTVSTAGSETIPASTAGSETTTTTSTEGSETTTASTEGSETTTASTESSETTTATTIGSETTTASTEGSETTTTSTEGSETTTASTEGSEITTVSTTGSETTTASTEGSETTTASTEGSELTTVSTTGSETITVSAEGSETTTVTTMGSETTTASTAGSETTTVSTAGSETTTASIEGSETTTVSSTGSETTTVSTTGTETTITSTEGSETTTVTTAGSETTAVYTTGSETTTTSTEGSETTTVSTTGSETTTASTADLETTTVSTSGSGTTTASTAGSETTTVYITGSKTTTASTEGSEATTVSTTSSETTTASTTGSEMTTVFTTVSETTTVSTIGSEATTSSAAGSEATTTSTEGSETTTASTAGSETTTASTAGSETTTASTSGSETNTACTTGSETSTPSSAGSETNTAFIIGSESTIASTASLEPTATSLTGSETTTVSITASGATAASTTVSSTTFVLTKATDVSIQPITNTPMSGTRTTGTRLTASSSVTMAPGMDFTASAASHTVPGIVLNTSGLGTSTMGASSTTSAHGVRTTTGSTREPTSSTFQETGPVSMGTNTVSMSHTPTNVIKPSGYLQPWAIILISLAAVVAAVGLSVGLSFCLRNLFFPLRYCGIYYPHGHSHSLGLDLNLGLGSGTFHSLGNALVHGGELEMGHGGTHGFGYGVGHGLSHIHGDGYGVNHGGHYGHGGGH

SEQ ID NO: 23617 - protein, 356 aa, Homo sapiens [sequence omitted]

SEQ ID NO: 23618 - protein, 338 aa, Homo sapiens
MEPARSAHRGGEALLRELEVLVQDVVRTSSWWERHGVDCAILALSLFALPAGFLCLRWENALVFASGITILGVCHYTLTVKGSHLATHGALTESKRWSKIWLLFFVEVCTAFTAEHATHGHVKMHHAYTNVVGLGDSSTWRLPCLNRYVYMFLAPFLLPIATPLVAVERLRKVELGTALRTLALISLGLYSHYWLLLNVSGFKNPSSALGCMFLTRSLLAHPYLHVNIFQHIGLPMFSRDNKPRRIHMMSLGVLNLARLPVLDWAFGHSIISCHVEHHLFPRLSDNMCLKVKPVVSQFLREKQLPYNEDSYLARFQLFLRRYEEFMVQAPPITELVGL

SEQ ID NO: 23619 - protein, 166 aa, Homo sapiens
MAAKDQLEVQVMAAQEMELAGKDPVSHEHEERKPVTETKEGDVTDEHGERGSFAETDEHTGVDTKELEDIAADIKEHLAAKRKRIEKIAKACSEIKNRIKNVLRTTQLKRQKRDYRISLKLPNVLEEFITDEQKDEEGDGEKEEQIKIFQEQQKRWQQDGKGTERD

SEQ ID NO: 23620 - protein, 1422 aa, Homo sapiens
MATLACRVQFLDDTDPFNSTNFPEPSRPPLFTFREDLALGTQLAGVHRLLQAPHKLDDCTLQLSHNGAYLDLEATLAEQRDELEGFQDDAGRGKKHSIILRTQLSVRVHACIEKLYNSSGRDLRRALFSLKQIFQDDKDLVHEFVVAEGLTCLIKVGAEADQNYQNYILRALGQIMLYVDGMNGVINRNETIQWLYTLIGSKFRLVVKTALKLLLVFVEYSESNAPLLIQAVTAVDTKRGVKPWSNIMEILEEKDGVDTELLVYAMTLVNKTLSGLPDQDTFYDVVDCLEELGIAAVSQRHLNKKGTDLDLVEQLNIYEVALRHEDGDETTEPPPSGCRDRRRASVCSSGGGEHRGLDRRRSRRHSVQSIKSTLSAPTSPCSQSAPSFKPNQVRDLREKYSNFGNNSYHSSRPSSGSSVPTTPTSSVSPPQEARLERSSPSGLLTSSFRQHQESLAAERERRRQEREERLQRIEREERNKFRYKYLEQLAAEEHEKELRSRSVSRGRADLSLDLTSPAAPACLAPLSHSPSSSDSQEALTVSASSPGTPHHPQASAGDPEPESEAEPEAEAGAGQVADEAGQDIASAHEGAETEVEQALEQEPEERASLSEKERQNEGVNERDNCSASSVSSSSSTLEREEKEDKLSRDRTTGLWPAGVQDAGVNGQCGDILTNKRFMLDMLYAHNRKSPDDEEKGDGEAGRTQQEAEAVASLATRISTLQANSQTQDESVRRVDVGCLDNRGSVKAFAEKFNSGDLGRGSISPDAEPNDKVPETAPVQPKTESDYIWDQLMANPRELRIQDMDFTDLGEEDDIDVLDVDLGHREAPGPPPPPPPTFLGLPPPPPPPLLDSIPPPPVPGNLLVPPPPVFNAPQGLGWSQVPRGQPTFTKKKKTIRLFWNEVRPFDWPCKNNRRCREFLWSKLEPIKVDTSRLEHLFESKSKELSVSKKTAADGKRQEIIVLDSKRSNAINIGLTVLPPPRTIKIAILNFDEYALNKEGIEKILTMIPTDEEKQKIQEAQLANPEIPLGSAEQFLLTLSSISELSARLHLWAFKMDYETTEKEVAEPLLDLKEGIDQLENNKTLGFILSTLLAIGNFLNGTNAKAFELSYLEKVPEVKDTVHKQSLLHHVCTMVVENFPDSSDLYSEIGAITRSAKVDFDQLQDNLCQMERRCKASWDHLKAIAKHEMKPVLKQRMSEFLKDCAERIIILKIVHRRIINRFHSFLLFMGHPPYAIREVNINKFCRIISEFALEYRTTRERVLQQKQKRANHRERNKTRGKMITDSGKFSGSSPAPPSQPQGLSYAEDAAEHENMKAVLKTSSPSVEDATPALGVRTRSRASRGSTSSWTMGTDDSPNVTDDAADEIMDRIVKSATQVPSQRVVPRERKRSRANRKSLRRTLKSGLTPEEARALGLVGTSELQL

SEQ ID NO: 23621 - protein, 1401 aa, Homo sapiens
MATLACRVQFLDDTDPFNSTNFPEPSRPPLFTFREDLALGTQLAGVHRLLQAPHKLDDCTLQLSHNGAYLDLEATLAEQRDELEGFQDDAGRGKKHSIILRTQLSVRVHACIEKLYNSSGRDLRRALFSLKQIFQDDKDLVHEFVVAEGLTCLIKVGAEADQNYQNYILRALGQIMLYVDGMNGVINRNETIQWLYTLIGSKFRLVVKTALKLLLVFVEYSESNAPLLIQAVTAVDTKRGVKPWSNIMEILEEKDGVDTELLVYAMTLVNKTLSGLPDQDTFYDVVDCLEELGIAAVSQRHLNKKGTDLDLVEQLNIYEVALRHEDGDETTEPPPSGCRDRRRASVCSSGGGEHRGLDRRRSRRHSVQSIKSTLSAPTSPCSQSAPSFKPNQVRDLREKSSPSGLLTSSFRQHQESLAAERERRRQEREERLQRIEREERNKFSRDYLDKREEQRQAREERYKYLEQLAAEEHEKELRSRSVSRGRADLSLDLTSPAAPACLAPLSHSPSSSDSQEALTVSASSPGTPHHPQASAGDPEPESEAEPEAEAGAGQVADEAGQDIASAHEGAETEVEQALEQEPEERASLSEKERQNEGVNERDNCSASSVSSSSSTLEREEKEDKLSRDRTTGLWPAGVQDAGVNGQCGDILTNKRFMLDMLYAHNRKSPDDEEKGDGEAGRTQQEAEAVASLATRISTLQANSQTQDESVRRVDVGCLDNRGSVKAFAEKFNSGDLGRGSISPDAEPNDKVPETAPVQPKTESDYIWDQLMANPRELRIQDMDFTDLGEEDDIDVLDVDLGHREAPGPPPPPPPTFLGLPPPPPPPLLDSIPPPPVPGNLLVPPPPVFNAPQGLGWSQVPRGQPTFTKKKKTIRLFWNEVRPFDWPCKNNRRCREFLWSKLEPIKVDTSRLEHLFESKSKELSVSKKTAADGKRQEIIVLDSKRSNAINIGLTVLPPPRTIKIAILNFDEYALNKEGIEKILTMIPTDEEKQKIQEAQLANPEIPLGSAEQFLLTLSSISELSARLHLWAFKMDYETTEKEVAEPLLDLKEGIDQLENNKTLGFILSTLLAIGNFLNGTNAKAFELSYLEKVPEVKDTVHKQSLLHHVCTMVVENFPDSSDLYSEIGAITRSAKVDFDQLQDNLCQMERRCKASWDHLKAIAKHEMKPVLKQRMSEFLKDCAERIIILKIVHRRIINRFHSFLLFMGHPPYAIREVNINKFCRIISEFALEYRTTRERVLQQKQKRANHRERNKTRGKMITDSGKFSGSSPAPPSQPQGLSYAEDAAEHENMKAVLKTSSPSVEDATPALGVRTRSRASRGSTSSWTMGTDDSPNVTDDAADEIMDRIVKSATQVPSQRVVPRERKRSRANRKSLRRTLKSGLTPEEARALGLVGTSELQL

SEQ ID NO: 23622 - protein, 1439 aa, Homo sapiens
MATLACRVQFLDDTDPFNSTNFPEPSRPPLFTFREDLALGTQLAGVHRLLQAPHKLDDCTLQLSHNGAYLDLEATLAEQRDELEGFQDDAGRGKKHSIILRTQLSVRVHACIEKLYNSSGRDLRRALFSLKQIFQDDKDLVHEFVVAEGLTCLIKVGAEADQNYQNYILRALGQIMLYVDGMNGVINRNETIQWLYTLIGSKFRLVVKTALKLLLVFVEYSESNAPLLIQAVTAVDTKRGVKPWSNIMEILEEKDGVDTELLVYAMTLVNKTLSGLPDQDTFYDVVDCLEELGIAAVSQRHLNKKGTDLDLVEQLNIYEVALRHEDGDETTEPPPSGCRDRRRASVCSSGGGEHRGLDRRRSRRHSVQSIKSTLSAPTSPCSQSAPSFKPNQVRDLREKYSNFGNNSYHSSRPSSGSSVPTTPTSSVSPPQEARLERSSPSGLLTSSFRQHQESLAAERERRRQEREERLQRIEREERNKFSRDYLDKREEQRQAREERYKYLEQLAAEEHEKELRSRSVSRGRADLSLDLTSPAAPACLAPLSHSPSSSDSQEALTVSASSPGTPHHPQASAGDPEPESEAEPEAEAGAGQVADEAGQDIASAHEGAETEVEQALEQEPEERASLSEKERQNEGVNERDNCSASSVSSSSSTLEREEKEDKLSRDRTTGLWPAGVQDAGVNGQCGDILTNKRFMLDMLYAHNRKSPDDEEKGDGEAGRTQQEAEAVASLATRISTLQANSQTQDESVRRVDVGCLDNRGSVKAFAEKFNSGDLGRGSISPDAEPNDKVPETAPVQPKTESDYIWDQLMANPRELRIQDMDFTDLGEEDDIDVLDVDLGHREAPGPPPPPPPTFLGLPPPPPPPLLDSIPPPPVPGNLLVPPPPVFNAPQGLGWSQVPRGQPTFTKKKKTIRLFWNEVRPFDWPCKNNRRCREFLWSKLEPIKVDTSRLEHLFESKSKELSVSKKTAADGKRQEIIVLDSKRSNAINIGLTVLPPPRTIKIAILNFDEYALNKEGIEKILTMIPTDEEKQKIQEAQLANPEIPLGSAEQFLLTLSSISELSARLHLWAFKMDYETTEKEVAEPLLDLKEGIDQLENNKTLGFILSTLLAIGNFLNGTNAKAFELSYLEKVPEVKDTVHKQSLLHHVCTMVVENFPDSSDLYSEIGAITRSAKVDFDQLQDNLCQMERRCKASWDHLKAIAKHEMKPVLKQRMSEFLKDCAERIIILKIVHRRIINRFHSFLLFMGHPPYAIREVNINKFCRIISEFALEYRTTRERVLQQKQKRANHRERNKTRGKMITDSGKFSGSSPAPPSQPQGLSYAEDAAEHENMKAVLKTSSPSVEDATPALGVRTRSRASRGSTSSWTMGTDDSPNVTDDAADEIMDRIVKSATQVPSQRVVPRERKRSRANRKSLRRTLKSGLTPEEARALGLVGTSELQL

SEQ ID NO: 23623 - protein, 1622 aa, Homo sapiens
MATLACRVQFLDDTDPFNSTNFPEPSRPPLFTFREDLALGTQLAGVHRLLQAPHKLDDCTLQLSHNGAYLDLEATLAEQRDELEGFQDDAGRGKKHSIILRTQLSVRVHACIEKLYNSSGRDLRRALFSLKQIFQDDKDLVHEFVVAEGLTCLIKVGAEADQNYQNYILRALGQIMLYVDGMNGVINRNETIQWLYTLIGSKFRLVVKTALKLLLVFVEYSESNAPLLIQAVTAVDTKRGVKPWSNIMEILEEKDGVDTELLVYAMTLVNKTLSGLPDQDTFYDVVDCLEELGIAAVSQRHLNKKGTDLDLVEQLNIYEVALRHEDGDETTEPPPSGCRDRRRASVCSSGGGEHRGLDRRRSRRHSVQSIKSTLSAPTSPCSQSAPSFKPNQVRDLREKEEEEEEEQPITEPSSEEEREDDASCQGKDSKVGAASGQSPTGRDAAPKSSALPAVSNASSQGKPLLVGTAGGTTWHSGSSGSEATPSALLSPPASAARPSSATPGSLKVSPTIDKLPYVPHSPFHLFSYDFEDSSLSTKEKEAESQKENSSSDSFSLSTYSASEPYHFRSFSSNRYSNFGNNSYHSSRPSSGSSVPTTPTSSVSPPQEARLERSSPSGLLTSSFRQHQESLAAERERRRQEREERLQRIEREERNKFSRDYLDKREEQRQAREERYKYLEQLAAEEHEKELRSRSVSRGRADLSLDLTSPAAPACLAPLSHSPSSSDSQEALTVSASSPGTPHHPQASAGDPEPESEAEPEAEAGAGQVADEAGQDIASAHEGAETEVEQALEQEPEERASLSEKERQNEGVNERDNCSASSVSSSSSTLEREEKEDKLSRDRTTGLWPAGVQDAGVNGQCGDILTNKRFMLDMLYAHNRKSPDDEEKGDGEAGRTQQEAEAVASLATRISTLQANSQTQDESVRRVDVGCLDNRGSVKAFAEKFNSGDLGRGSISPDAEPNDKVPETAPVQPKTESDYIWDQLMANPRELRIQDMDFTDLGEEDDIDVLDVDLGHREAPGPPPPPPPTFLGLPPPPPPPLLDSIPPPPVPGNLLVPPPPVFNAPQGLGWSQVPRGQPTFTKKKKTIRLFWNEVRPFDWPCKNNRRCREFLWSKLEPIKVDTSRLEHLFESKSKELSVSKKTAADGKRQEIIVLDSKRSNAINIGLTVLPPPRTIKIAILNFDEYALNKEGIEKILTMIPTDEEKQKIQEAQLANPEIPLGSAEQFLLTLSSISELSARLHLWAFKMDYETTEKEVAEPLLDLKEGIDQLENNKTLGFILSTLLAIGNFLNGTNAKAFELSYLEKVPEVKDTVHKQSLLHHVCTMVVENFPDSSDLYSEIGAITRSAKVDFDQLQDNLCQMERRCKASWDHLKAIAKHEMKPVLKQRMSEFLKDCAERIIILKIVHRRIINRFHSFLLFMGHPPYAIREVNINKFCRIISEFALEYRTTRERVLQQKQKRANHRERNKTRGKMITDTDEEEEVESGKFSGSSPAPPSQPQGLSYAEDAAEHENMKAVLKTSSPSVEDATPALGVRTRSRASRGSTSSWTMGTDDSPNVTDDAADEIMDRIVKSATQVPSQRVVPRERKRSRANRKSLRRTLKSGLTPEEARALGLVGTSELQL

SEQ ID NO: 23624 - protein, 667 aa, Homo sapiens
MGQTKSKTKSKYASYLSFIKILLKRGGVRVSTKNLIKLFQIIEQFCPWFPEQGTLDLKDWKRIGEELKQAGRKGNIIPLTVWNDWAIIKAALEPFQTKEDSVSVSDAPGSCVIDCNEKTGRKSQKETESLHCEYVTEPVMAQSTQNVDYNQLQGVIYPETLKLEGKGPELVGPSESKPRGPSPLPAGQVPVTLQPQTQVKENKTQPPVAYQYWPPAELQYLPPPESQYGYPGMPPALQGRAPYPQPPTVRLNPTASRSGQGGTLHAVIDEARKQGDLEAWRFLVILQLVQAGEETQVGAPARAETRCEPFTMKMLKDIKEGVKQYGSNSPYIRTLLDSIAHGNRLTPYDWESLAKSSLSSSQYLQFKTWWIDGVQEQVRKNQATKPTVNIDADQLLGTGPNWSTINQQSVMQNEAIEQVRAICLRAWGKIQDPGTAFPINSIRQGSKEPYPDFVARLQDAAQKSITDDNARKVIVELMAYENANPECQSAIKPLKGKVPAGVDVITEYVKACDGIGGAMHKAMLMAQAMRGLTLGGQVRTFGKKCYNCGQIGHLKRSCPVLNKQNIINQAITAKNKKPSGLCPKCGKGKHWANQCHSKFDKDGQPLSGNRKRGQPQAPQQTGAFPVQLFVPQGFQGQQPLQKIPPLQGVSQLQQSNSCPAPQQAAPQ

SEQ ID NO: 23625 - protein, 777 aa, Homo sapiens
MGRGSGTFERLLDKATSQLLLETDWESILQICDLIRQGDTQAKYAVNSIKKKVNDKNPHVALYALEVMESVVKNCGQTVHDEVANKQTMEELKDLLKRQVEVNVRNKILYLIQAWAHAFRNEPKYKVVQDTYQIMKVEGHVFPEFKESDAMFAAERAPDWVDAEECHRCRVQFGVMTRKHHCRACGQIFCGKCSSKYSTIPKFGIEKEVRVCEPCYEQLNRKAEGKATSTTELPPEYLTSPLSQQSQLPPKRDETALQEEEELQLALALSQSEAEEKERLRQKSTYTSYPKAEPMPSASSAPPASSLYSSPVNSSAPLAEDIDPELARYLNRNYWEKKQEEARKSPTPSAPVPLTEPAAQPGEGHAAPTNVVENPLPETDSQPIPPSGGPFSEPQFHNGESEESHEQFLKALQNAVTTFVNRMKSNHMRGRSITNDSAVLSLFQSINGMHPQLLELLNQLDERRLYYEGLQDKLAQIRDARGALSALREEHREKLRRAAEEAERQRQIQLAQKLEIMRQKKQEYLEVQRQLAIQRLQEQEKERQMRLEQQKQTVQMRAQMPAFPLPYAQLQAMPAAGGVLYQPSGPASFPSTFSPAGSVEGSPMHGVYMSQPAPAAGPYPSMPSTAADPSMVSAYMYPAGATGAQAAPQAQAGPTASPAYSSYQPTPTAGYQNVASQAPQSLPAISQPPQSSTMGYMGSQSVSMGYQPYNMQNLMTTLPSQDASLPPQQPYIAGQQPMYQQMAPSGGPPQQQPPVAQQPQAQGPPAQGSEAQLISFD

SEQ ID NO: 23626 - protein, 690 aa, Homo sapiens
MGRGSGTFERLLDKATSQLLLETDWESILQICDLIRQGDTQAKYAVNSIKKKVNDKNPHVALYALEVMESVVKNCGQTVHDEVANKQTMEELKDLLKRQVEVNVRNKILYLIQAWAHAFRNEPKYKVVQDTYQIMKVEGHVFPEFKESDAMFAAERAPDWVDAEECHRCRVQFGVMTRKHHCRACGQIFCGKCSSKYSTIPKFGIEKEVRVCEPCYEQLNRKAEGKATSTTELPPEYLTSPLSQQSQLPPKRDETALQEEEELQLALALSQSEAEEKERLRQKSTYTSYPKAEPMPSASSAPPASSLYSSPVNSSAPLAEDIDPELARYLNRNYWEKKQEEARKSPTPSAPVPLTEPAAQPGEGHAAPTNVVENPLPETDSQPIPPSGGPFSEPQFHNGESEESHEQFLKALQNAVTTFVNRMKSNHMRGRSITNDSAVLSLFQSINGMHPQLLELLNQLDERRLYYEGLQDKLAQIRDARGALSALREEHREKLRRAAEEAERQRQIQLAQKLEIMHGVYMSQPAPAAGPYPSMPSTAADPSMVSAYMYPAGATGAQAAPQAQAGPTASPAYSSYQPTPTAGYQNVASQAPQSLPAISQPPQSSTMGYMGSQSVSMGYQPYNMQNLMTTLPSQDASLPPQQPYIAGQQPMYQQMAPSGGPPQQQPPVAQQPQAQGPPAQGSEAQLISFD

SEQ ID NO: 23627 - protein, 442 aa, Homo sapiens
MYQSLAMAANHGPPPGAYEAGGPGAFMHGAGAASSPVYVPTPRVPSSVLGLSYLQGGGAGSASGGASGGSSGGAASGAGPGTQQGSPGWSQAGADGAAYTPPPVSPRFSFPGTTGSLAAAAAAAAAREAAAYSSGGGAAGAGLAGREQYGRAGFAGSYSSPYPAYMADVGASWAAAAAASAGPFDSPVLHSLPGRANPAARHPNLDMFDDFSEGRECVNCGAMSTPLWRRDGTGHYLCNACGLYHKMNGINRPLIKPQRRLSASRRVGLSCANCQTTTTTLWRRNAEGEPVCNACGLYMKLHGVPRPLAMRKEGIQTRKRKPKNLNKSKTPAAPSGSESLPPASGASSNSSNATTSSSEEMRPIKTEPGLSSHYGHSSSVSQTFSVSAMSGHGPSIHPVLSALKLSPQGYASPVSQSPQTSSKQDSWNSLVLADSHGDIITA

SEQ ID NO: 23628 - protein, 443 aa, Homo sapiens
MYQSLAMAANHGPPPGAYEAGGPGAFMHGAGAASSPVYVPTPRVPSSVLGLSYLQGGGAGSASGGASGGSSGGAASGAGPGTQQGSPGWSQAGADGAAYTPPPVSPRFSFPGTTGSLAAAAAAAAAREAAAYSSGGGAAGAGLAGREQYGRAGFAGSYSSPYPAYMADVGASWAAAAAASAGPFDSPVLHSLPGRANPAARHPNLVDMFDDFSEGRECVNCGAMSTPLWRRDGTGHYLCNACGLYHKMNGINRPLIKPQRRLSASRRVGLSCANCQTTTTTLWRRNAEGEPVCNACGLYMKLHGVPRPLAMRKEGIQTRKRKPKNLNKSKTPAAPSGSESLPPASGASSNSSNATTSSSEEMRPIKTEPGLSSHYGHSSSVSQTFSVSAMSGHGPSIHPVLSALKLSPQGYASPVSQSPQTSSKQDSWNSLVLADSHGDIITA

SEQ ID NO: 23629 - protein, 805 aa, Homo sapiens
MASSGEDISNDDDDMHPAAAGMADGVHLLGFSDEILLHILSHVPSTDLILNVRRTCRKLAALCLDKSLIHTVLLQKDYQASEDKVRQLVKEIGREIQQLSMAGCYWLPGSTVEHVARCRSLVKVNLSGCHLTSLRLSKMLSALQHLRSLAIDVSPGFDASQLSSECKATLSRVRELKQTLFTPSYGVVPCCTSLEKLLLYFEILDRTREGAILSGQLMVGQSNVPHYQNLRVFYARLAPGYINQEVVRLYLAVLSDRTPQNLHAFLISVPGSFAESGATKNLLDSMARNVVLDALQLPKSWLNGSSLLQHMKFNNPFYFSFSRCTLSGGHLIQQVINGGKDLRSLASLNLSGCVHCLSPDSLLRKAEDDIDSSILETLVASCCNLRHLNLSAAHHHSSEGLGRHLCQLLARLRHLRSLSLPVCSVADSAPRADRAPAQPAMHAVPRGFGKKVRVGVQSCPSPFSGQACPQPSSVFWSLLKNLPFLEHLELIGSNFSSAMPRNEPAIRNSLPPCSRAQSVGDSEVAAIGQLAFLRHLTLAQLPSVLTGSGLVNIGLQCQQLRSLSLANLGMMGKVVYMPALSDMLKHCKRLRDLRLEQPYFSANAQFFQALSQCPSLQRLCLVSRSGTLQPDAVLAFMARCLQVVMCHLFTGESLATCKSLQQSLLRRWGEVTGRRPQLFTELREEPSARTSRATGRRQPCLPDSGVVCCPCGRPLAVSGIILVGVSPSLVVKTTCVYRVLFKNLDYASIFFLVCLFETESHSVVQAGVQWRDLSSLQPLLSGLQPQPPEQLENELEIGFSYCFVI

SEQ ID NO: 23630 - protein, 668 aa, Homo sapiens
MASSGEDISNDDDDMHPAAAGMADGVHLLGFSDEILLHILSHVPSTDLILNVRRTCRKLAALCLDKSLIHTVLLQKDYQASEDKVRQLVKEIGREIQQLSMAGCYWLPGSTVEHVARCRSLVKVNLSGCHLTSLRLSKMLSALQHLRSLAIDVSPGFDASQLSSECKATLSRVRELKQTLFTPSYGVVPCCTSLEKLLLYFEILDRTREGAILSGQLMVGQSNVPHYQNLRVFYARLAPGYINQEVVRLYLAVLSDRTPQNLHAFLISVPGSFAESGATKNLLDSMARNVVLDALQLPKSWLNGSSLLQHMKFNNPFYFSFSRCTLSGGHLIQQVINGGKDLRSLASLNLSGCVHCLSPDSLLRKAEDDIDSSILETLVASCCNLRHLNLSAAHHHSSEGLGRHLCQLLARLRHLRSLSLPVCSVADSAPRADRAPAQPAMHAVPRGFGKKVRVGVQSCPSPFSGQACPQPSSVFWSLLKNLPFLEHLELIGSNFSSAMPRNEPAIRNSLPPCSRAQSVGDSEVAAIGQLAFLRHLTLAQLPSVLTGSGLVNIGLQCQQLRSLSLANLGMMGKVVYMPALSDMLKHCKRLRDLRLEQPYFSANAQFFQALSQCPSLQRLCLVSRSGTLQPDAVLAFMARCLQVVMCHLFTGESLATCKSLQQSLLRSR

SEQ ID NO: 23631 - protein, 365 aa, Homo sapiens
MASSGEDISNDDDDMHPAAAGMADGVHLLGFSDEILLHILSHVPSTDLILNVRRTCRKLAALCLDKSLIHTVLLQKDYQASEDKVRQLVKEIGREIQQLSMAGCYWLPGSTVEHVARCRSLVKVNLSGCHLTSLRLSKMLSALQHLRSLAIDVSPGFDASQLSSECKATLSRVRELKQTLFTPSYGVVPCCTSLEKLLLYFEILDRTREGAILSGQLMVGQSNVPHYQNLRVFYARLAPGYINQEVVRLYLAVLSDRTPQNLHAFLISVPGSFAESGATKNLLDSMARNVVLDALQLPKSWLNGSSLLQHMKFNNPFYFSFSRCTLSGGHLIQQVINGGKDLRSLASLNLSGCVHCLSPDSLLCR

SEQ ID NO: 23632 - protein, 718 aa, Homo sapiens
MASSGEDISNDDDDMHPAAAGMADGVHLLGFSDEILLHILSHVPSTDLILNVRRTCRKLAALCLDKSLIHTVLLQKDYQASEDKVRQLVKEIGREIQQLSMAGCYWLPGSTVEHVARCRSLVKVNLSGCHLTSLRLSKMLSALQHLRSLAIDVSPGFDASQLSSECKATLSRVRELKQTLFTPSYGVVPCCTSLEKLLLYFEILDRTREGAILSGQLMVGQSNVPHYQNLRVFYARLAPGYINQEVVRLYLAVLSDRTPQNLHAFLISVPGSFAESGATKNLLDSMARNVVLDALQLPKSWLNGSSLLQHMKFNNPFYFSFSRCTLSGGHLIQQVINGGKDLRSLASLNLSGCVHCLSPDSLLRKAEDDIDSSILETLVASCCNLRHLNLSAAHHHSSEGLGRHLCQLLARLRHLRSLSLPVCSVADSAPRADRAPAQPAMHAVPRGFGKKVRVGVQSCPSPFSGQACPQPSSVFWSLLKNLPFLEHLELIGSNFSSAMPRNEPAIRNSLPPCSRAQSVGDSEVAAIGQLAFLRHLTLAQLPSVLTGSGLVNIGLQCQQLRSLSLANLGMMGKVVYMPALSDMLKHCKRLRDLRLEQPYFSANAQFFQALSQCPSLQRLCLVSRSGTLQPDAVLAFMARCLQVVMCHLFTGESLATCKSLQQSLLRSFQAERPALNVVIFPLLHEGLTDVIRDVPLVHLDEITLFKSRVAEEPPNLWW

SEQ ID NO: 23633 - protein, 719 aa, Homo sapiens
MSVDKAELCGSLLTWLQTFHVPSPCASPQDLSSGLAVAYVLNQIDPSWFNEAWLQGISEDPGPNWKLKVSNLKMVLRSLVEYSQDVLAHPVSEEHLPDVSLIGEFSDPAELGKLLQLVLGCAISCEKKQDHIQRIMTLEESVQHVVMEAIQELMTKDTPDSLSPETYGNFDSQSRRYYFLSEEAEEGDELQQRCLDLERQLMLLSEEKQSLAQENAGLRERMGRPEGEGTPGLTAKKLLLLQSQLEQLQEENFRLESGREDERLRCAELEREVAELQHRNQALTSLAQEAQALKDEMDELRQSSERAGQLEATLTSCRRRLGELRELRRQVRQLEERNAGHAERTRQLEDELRRAGSLRAQLEAQRRQVQELQGQRQEEAMKAEKWLFECRNLEEKYESVTKEKERLLAERDSLREANEELRCAQLQPRGLTQADPSLDPTSTPVDNLAAEILPAELRETLLRLQLENKRLCRQEAADRERQEELQRHLEDANRARHGLETQHRLNQQQLSELRAQVEDLQKALQEQGGKTEDAISILLKRKLEEHLQKLHEADLELQRKREYIEELEPPTDSSTARRIEELQHNLQKKDADLRAMEERYRRYVDKARMVMQTMEPKQRPAAGAPPELHSLRTQLRERDVRIRHLEMDFEKSRSQREQEEKLLISAWYNMGMALQQRAGEERAPAHAQSFLAQQRLATNSRRGPLGRLASLNLRPTDKH

SEQ ID NO: 23634 - protein, 717 aa, Homo sapiens
MSVDKAELCGSLLTWLQTFHVPSPCASPQDLSSGLAVAYVLNQIDPSWFNEAWLQGISEDPGPNWKLKVSNLKMVLRSLVEYSQDVLAHPVSEEHLPDVSLIGEFSDPAELGKLLQLVLGCAISCEKKQDHIQRIMTLEESVQHVVMEAIQELMTKDTPDSLSPETYGNFDSQSRRYYFLSEEAEEGDELQQRCLDLERQLMLLSEEKQSLAQENAGLRERMGRPEGEGTPGLTAKKLLLLQSQLEQLQEENFRLESGREDERLRCAELEREVAELQHRNQALTSLAQEAQALKDEMDELRQSSERAGQLEATLTSCRRRLGELRELRRQVRQLEERNAGHAERTRQLEDELRRAGSLRAQLEAQRRQVQELQGQRQEEAMKAEKWLFECRNLEEKYESVTKEKERLLAERDSLREANEELRCAQLQPRGLTQADPSLDPTSTPVDNLAAEILPAELRETLLRLQLENKRLCRQEAADRERQEELQRHLEDANRARHGLETQHRLNQQQLSELRAQVEDLQKALQEQGGKTEDSILLKRKLEEHLQKLHEADLELQRKREYIEELEPPTDSSTARRIEELQHNLQKKDADLRAMEERYRRYVDKARMVMQTMEPKQRPAAGAPPELHSLRTQLRERDVRIRHLEMDFEKSRSQREQEEKLLISAWYNMGMALQQRAGEERAPAHAQSFLAQQRLATNSRRGPLGRLASLNLRPTDKH

SEQ ID NO: 23635 - protein, 537 aa, Homo sapiens
MAWRGAGPSVPGAPGGVGLSLGLLLQLLLLLGPARGFGDEEERRCDPIRISMCQNLGYNVTKMPNLVGHELQTDAELQLTTFTPLIQYGCSSQLQFFLCSVYVPMCTEKINIPIGPCGGMCLSVKRRCEPVLKEFGFAWPESLNCSKFPPQNDHNHMCMEGPGDEEVPLPHKTPIQPGEECHSVGTNSDQYIWVKRSLNCVLKCGYDAGLYSRSAKEFTDIWMAVWASLCFISTAFTVLTFLIDSSRFSYPERPIIFLSMCYNIYSIAYIVRLTVGRERISCDFEEAAEPVLIQEGLKNTGCAIIFLLMYFFGMASSIWWVILTLTWFLAAGLKWGHEAIEMHSSYFHIAAWAIPAVKTIVILIMRLVDADELTGLCYVGNQNLDALTGFVVAPLFTYLVIGTLFIAAGLVALFKIRSNLQKDGTKTDKLERLMVKIGVFSVLYTVPATCVIACYFYEISNWALFRYSADDSNMAVEMLKIFMSLLVGITSGMWIWSAKTLHTWQKCSNRLVNSGKVKREKRGNGWVKPGKGSETVV

SEQ ID NO: 23636 - protein, 160 aa, Homo sapiens
MTLEELVACDNAAQKMQTVTAAVEELLVAAQRQDRLTVGVYESAKLMNVDPDSVVLCLLAIDEEEEDDIALQIHFTLIQSFCCDNDINIVRVSGMQRLAQLLGEPAETQGTTEARDLHCLLVTNPHTDAWKSHGLVEVASYCEESRGNNQWVPYISLQER

SEQ ID NO: 23637 - protein, 559 aa, Homo sapiens
MRKFAYCKVVLATSLIWVLLDMFLLLYFSECNKCDEKKERGLPAGDVLEPVQKPHEGPGEMGKPVVIPKEDQEKMKEMFKINQFNLMASEMIALNRSLPDVRLEGCKTKVYPDNLPTTSVVIVFHNEAWSTLLRTVHSVINRSPRHMIEEIVLVDDASERDFLKRPLESYVKKLKVPVHVIRMEQRSGLIRARLKGAAVSKGQVITFLDAHCECTVGWLEPLLARIKHDRRTVVCPIIDVISDDTFEYMAGSDMTYGGFNWKLNFRWYPVPQREMDRRKGDRTLPVRTPTMAGGLFSIDRDYFQEIGTYDAGMDIWGGENLEISFRIWQCGGTLEIVTCSHVGHVFRKATPYTFPGGTGQIINKNNRRLAEVWMDEFKNFFYIISPGVTKVDYGDISSRVGLRHKLQCKPFSWYLENIYPDSQIPRHYFSLGEIRNVETNQCLDNMARKENEKVGIFNCHGMGGNQVFSYTANKEIRTDDLCLDVSKLNGPVTMLKCHHLKGNQLWEYDPVKLTLQHVNSNQCLDKATEEDSQVPSIRDCNGSRSQQWLLRNVTLPEIF

SEQ ID NO: 23638 - protein, 105 aa, Homo sapiens
MRKFAYCKVVLATSLIWVLLDMFLLLYFSECNKCDEKKERGLPAGDVLEPVQKPHEGPGEMGKPVVIPKEDQEKMKEMFKINQFNLMASEMIALNRSLPDVRLEG

SEQ ID NO: 23639 - protein, 694 aa, Homo sapiens
MQPAIQVWFGEDLPLSPRSPLTPRHGPGLANVCQYDEWIAVRHEATLLPMQEDLSIWLSGLLGIKVKAEKLLEELDNGVLLCQLIDVLQNMVKTCNSEESGNFPMRKVPCKKDAASGSFFARDNTANFLHWCRDIGVDETYLFESEGLVLHKDPRQVYLCLLEIGRIVSRYGVEPPVLVKLEKEIELEETLLNTSGPEDSISIPKSCCRHEELHEAVKHIAEDPPCSCSHRFSIEYLSEGRYRLGDKILFIRMLHGKHVMVRVGGGWDTLQGFLLKYDPCRILQFATLEQKILAFQKGVSNESVPDSPARTPQPPEMNPLSAVNMFQKQNSKPSVPVSIPKSKEKQGRPPGALVPASSLKGGNLGSMSVRSKLPNSPAASSHPKLKSSKGITKKPQAPSNNASSSLASLNPVGKNTSSPALPRTAPCISESPRKCISSPNTPKAKVIPAQNSADLPESTLLPNKCSGKTQPKYLKHNHISSRDNAVSHLAAHSNSSSKCPKLPKANIPVRPKPSFQSSAKMTKTSSKTIATGLGTQSQPSDGAPQAKPVPAQKLKSALNLNQPVSVSSVSPVKATQKSKDKNIVSATKKQPQNKSAFQKTGPSSLKSPGRTPLSIVSLPQSSTKTQTAPKSAQTVAKSQHSTKGPPRSGKTPASIRKPPSSVKDADSGDKKPTAKKKEDDDHYFVMTGSKKPRK

SEQ ID NO: 23640 - protein, 1395 aa, Homo sapiens
MTGAEIESGAQVKPEKKPGEEVVGGAEIENDVPLVVRPKVRTQAQIMPGARPKNKSKVMPGASTKVETSAVGGARPKSKAKAIPVSRFKEEAQMWAQPRFGAERLSKTERNSQTNIIASPLVSTDSVLVAKTKYLSEDRELVNTDTESFPRRKAHYQAGFQPSFRSKEETNMGSWCCPRPTSKQEASPNSDFKWVDKSVSSLFWSGDEVTAKFHPGNRVKDSNRSMHMANQEANTMSRSQTNQELYIASSSGSEDESVKTPWFWARDKTNTWSGPREDPNSRSRFRSKKEVYVESSSGSEHEDHLESWFGAGKEAKFRSKMRAGKEANNRARHRAKREACIDFMPGSIDVIKKESCFWPEENANTFSRPMIKKEARARAMTKEEAKTKARARAKQEARSEEEALIGTWFWATDESSMADEASIESSLQVEDESIIGSWFWTEEEASMGTGASSKSRPRTDGERIGDSLFGAREKTSMKTGAEATSESILAADDEQVIIGSWFWAGEEVNQEAEEETIFGSWFWVIDAASVESGVGVSCESRTRSEEEEVIGPWFWSGEQVDIEAGIGEEARPGAEEETIFGSWFWAENQTYMDCRAETSCDTMQGAEEEEPIIGSWFWTRVEACVEGDVNSKSSLEDKEEAMIPCFGAKEEVSMKHGTGVRCRFMAGAEETNNKSCFWAEKEPCMYPAGGGSWKSRPEEEEDIVNSWFWSRKYTKPEAIIGSWLWATEESNIDGTGEKAKLLTEEETIINSWFWKEDEAISEATDREESRPEAEEGDIIGSWFWAGEEDRLEPAAETREEDRLAAEKEGIVGSWFGAREETIRREAGSCSKSSPKAEEEEVIIGSWFWEEEASPEAVAGVGFESKPGTEEEEITVGSWFWPEEEASIQAGSQAVEEMESETEEETIFGSWFWDGKEVSEEAGPCCVSKPEDDEEMIVESWFWSRDKAIKETGTVATCESKPENEEGAIVGSWFEAEDEVDNRTDNGSNCGSRTLADEDEAIVGSWFWAGDEAHFESNPSPVFRAICRSTCSVEQEPDPSRRPQSWEEVTVQFKPGPWGRVGFPSISPFRFPKEAASLFCEMFGGKPRNMVLSPEGEDQESLLQPDQPSPEFPFQYDPSYRSVQEIREHLRAKESTEPESSSCNCIQCELKIGSEEFEELLLLMEKIRDPFIHEISKIAMGMRSASQFTRDFIRDSGVVSLIETLLNYPSSRVRTSFLENMIRMAPPYPNLNIIQTYICKVCEETLAYSVDSPEQLSGIRMIRHLTTTTDYHTLVANYMSGFLSLLATGNAKTRFHVLKMLLNLSENLFMTKELLSAEAVSEFIGLFNREETNDNIQIVLAIFENIGNNIKKETVFSDDDFNIEPLISAFHKVEKFAKELQGKTDNQNDPEGDQEN

SEQ ID NO: 23641 - protein, 395 aa, Homo sapiens
MSLVDLGKKLLEAARAGQDDEVRILMANGAPFTTDWLGTSPLHLAAQYGHYSTTEVLLRAGVSRDARTKVDRTPLHMAASEGHASIVEVLLKHGADVNAKDMLKMTALHWATEHNHQEVVELLIKYGADVHTQSKFCKTAFDISIDNGNEDLAEILQIAMQNQINTNPESPDTVTIHAATPQFIIGPGGVVNLTGLVSSENSSKATDETGVSAVQFGNSSTSVLATLAALAEASAPLSNSSETPVVATEEVVTAESVDGAIQQVVSSGGQQVITIVTDGIQLGNLHSIPTSGIGQPIIVTMPDGQQVLTVPATDIAEETVISEEPPAKRQCIEIIENRVESAEIEEREALQKQLDEANREAQKYRQQLLKKEQEAEAYRQKLEAMTRLQTNKEAV

SEQ ID NO: 23642 - protein, 383 aa, Homo sapiens
MSLVDLGKKLLEAARAGQDDEVRILMANGAPFTTDWLGTSPLHLAAQYGHYSTTEVLLRAGVSRDARTKVDRTPLHMAASEGHASIVEVLLKHGADVNAKDMLKMTALHWATEHNHQEVVELLIKYGADVHTQSKFCKTAFDISIDNGNEDLAEILQIAMQNQINTNPESPDTVTIHAATPQFIIGPGGVVNLTDETGVSAVQFGNSSTSVLATLAALAEASAPLSNSSETPVVATEEVVTAESVDGAIQQVVSSGGQQVITIVTDGIQLGNLHSIPTSGIGQPIIVTMPDGQQVLTVPATDIAEETVISEEPPAKRQCIEIIENRVESAEIEEREALQKQLDEANREAQKYRQQLLKKEQEAEAYRQKLEAMTRLQTNKEAV

SEQ ID NO: 23643 - protein, 360 aa, Homo sapiens
MSLVDLGKKLLEAARAGQDDEVRILMANGAPFTTDWLGTSPLHLAAQYGHYSTTEVLLRAGVSRDARTKVDRTPLHMAASEGHASIVEVLLKHGADVNAKDMLKMTALHWATEHNHQEVVELLIKYGADVHTQSKFCKTAFDISIDNGNEDLAEILQIAMQNQINTNPESPDTVTIHAATPQFIIGPGGVVNLTGLVSSENSSKATDETGVSAVQFGNSSTSVLATLAALAEASAPLSNSSETPVVATEEVVTAESVDGAIQQVVSSGGQQVITIVTDGIQLGNLHSIPTSGIGQPIIVTMPDGQQVLTVPATDIAEETVISEEPPAKRQCIEIIENRVESAEIEVRSLLPGVLCRSHPK

SEQ ID NO: 23644 - protein, 348 aa, Homo sapiens
MSLVDLGKKLLEAARAGQDDEVRILMANGAPFTTDWLGTSPLHLAAQYGHYSTTEVLLRAGVSRDARTKVDRTPLHMAASEGHASIVEVLLKHGADVNAKDMLKMTALHWATEHNHQEVVELLIKYGADVHTQSKFCKTAFDISIDNGNEDLAEILQIAMQNQINTNPESPDTVTIHAATPQFIIGPGGVVNLTDETGVSAVQFGNSSTSVLATLAALAEASAPLSNSSETPVVATEEVVTAESVDGAIQQVVSSGGQQVITIVTDGIQLGNLHSIPTSGIGQPIIVTMPDGQQVLTVPATDIAEETVISEEPPAKRQCIEIIENRVESAEIEVRSLLPGVLCRSHPK

SEQ ID NO: 23645 - protein, 472 aa, Homo sapiens
MLGTVKMEGHETSDWNSYYADTQEAYSSVPVSNMNSGLGSMNSMNTYMTMNTMTTSGNMTPASFNMSYANPGLGAGLSPGAVAGMPGGSAGAMNSMTAAGVTAMGTALSPSGMGAMGAQQAASMNGLGPYAAAMNPCMSPMAYAPSNLGRSRAGGGGDAKTFKRSYPHAKPPYSYISLITMAIQQAPSKMLTLSEIYQWIMDLFPYYRQNQQRWQNSIRHSLSFNDCFVKVARSPDKPGKGSYWTLHPDSGNMFENGCYLRRQKRFKCEKQPGAGGGGGSGSGGSGAKGGPESRKDPSGASNPSADSPLHRGVHGKTGQLEGAPAPGPAASPQTLDHSGATATGGASELKTPASSTAPPISSGPGALASVPASHPAHGLAPHESQLHLKGDPHYSFNHPFSINNLMSSSEQQHKLDFKAYEQALQYSPYGSTLPASLPLGSASVTTRSPIEPSALEPAYYQGVYSRPVLNTS

SEQ ID NO: 23646 - protein, 439 aa, Homo sapiens
MNSGLGSMNSMNTYMTMNTMTTSGNMTPASFNMSYANPGLGAGLSPGAVAGMPGGSAGAMNSMTAAGVTAMGTALSPSGMGAMGAQQAASMNGLGPYAAAMNPCMSPMAYAPSNLGRSRAGGGGDAKTFKRSYPHAKPPYSYISLITMAIQQAPSKMLTLSEIYQWIMDLFPYYRQNQQRWQNSIRHSLSFNDCFVKVARSPDKPGKGSYWTLHPDSGNMFENGCYLRRQKRFKCEKQPGAGGGGGSGSGGSGAKGGPESRKDPSGASNPSADSPLHRGVHGKTGQLEGAPAPGPAASPQTLDHSGATATGGASELKTPASSTAPPISSGPGALASVPASHPAHGLAPHESQLHLKGDPHYSFNHPFSINNLMSSSEQQHKLDFKAYEQALQYSPYGSTLPASLPLGSASVTTRSPIEPSALEPAYYQGVYSRPVLNTS

SEQ ID NO: 23647 - protein, 379 aa, Homo sapiens
MSSAPEKQQPPHGGGGGGGGGGGAAMDPASSGPSKAKKTNAGIRRPEKPPYSYIALIVMAIQSSPTKRLTLSEIYQFLQSRFPFFRGSYQGWKNSVRHNLSLNECFIKLPKGLGRPGKGHYWTIDPASEFMFEEGSFRRRPRGFRRKCQALKPMYSMMNGLGFNHLPDTYGFQGSAGGLSCPPNSLALEGGLGMMNGHLPGNVDGMALPSHSVPHLPSNGGHSYMGGCGGAAAGEYPHHDSSVPASPLLPTGAGGVMEPHAVYSGSAAAWPPSASAALNSGASYIKQQPLSPCNPAANPLSGSLSTHSLEQPYLHQNSHNAPAELQGIPRYHSQSPSMCDRKEFVFSFNAMASSSMHSAGGGSYYHQQVTYQDIKPCVM

SEQ ID NO: 23648 - protein, 282 aa, Homo sapiens
MGKGNEDPDLHCSSIQCSTDQPPFQQISFTEKGSDEKKPFKGKGKTAFSHSSEKHTQRQAGSDPNPNKENSEETKLKAGNSTAGSEPESSSYQENCRKRKISSKDICQDRAGNCPEEECNLTLNKKSRSSTAVHNSEIQETCDAHHRGSSRACTGRSKRHRSRALEVQTPSLRKSLVTSVRAMSEAVYQDLAQVWAQQIHSPLTCEQLTLLTRLRGPLCAQVQTLYSMATQAAYVFPAESWLVPATLPGPGDSALDREAHPFPGQEITEPVSGSDEAKLGAP

SEQ ID NO: 23649 - protein, 278 aa, Homo sapiens
MGKGNEDSDLHCSSIQCSTDQPPFQQISFTEKGSDEKKPFKEKGKTAFSHSSEKHIQRQGSEPNPNKENSEETKLKAGNSTAGSEPESSSYRENCRKRKMSSKDSCQDTAGNCPEKECSLSLNKKSRSSTAVHNSEIQETCDAHHRGHSRACTGHSKRHRSRALGVQTPSIRKSLVTSVRAMSEAVYQDLAQVWAQQIHSPLTCEQLTLLTRLRGPLCAQVQTLYSMATQAAYVFPAESWLVPATLPGPGESALDREAHPFPGQEITETVSGSDEAKL

SEQ ID NO: 23650 - protein, 279 aa, Homo sapiens
MGKGNEDSDLHCSSIQCSTDQPPFQQISFTEKGSDEKKPFKEKGKTAFSHSSEKHIQRQAGSEPNPNKENSEETKLKAGNSTAGSEPESSSYRENCRKRKMSSKDSCQDTAGNCPEKECSLSLNKKSRSSTAVHNSEIQETCDAHHRGHSRACTGHSKRHRSRALGVQTPSIRKSLVTSVRAMSEAVYQDLAQVWAQQIHSPLTCEQLTLLTRLRGPLCAQVQTLYSMATQAAYVFPAESWLVPATLPGPGESALDREAHPFPGQEITETVSGSDEAKL

SEQ ID NO: 23651 - protein, 439 aa, Homo sapiens
MNLPRAERLRSTPQRSLRDSDGEDGKIDVLGEEEDEDEEEAASQQFLEQSLQPGLQVARWGGVALPREHIEGGGGPSDPSEFGTEFRAPPRSAAASEDARQPAKPPSSYIALITMAILQSPHKRLTLSGICAFISDRFPYYRRKFPAWQNSIRHNLSLNDCFVKIPREPGRPGKGNYWSLDPASQDMFDNGSFLRRRKRFQRHQPTPGAHLPHPFPLPAAHAALHNPRPGPLLGAPAPPQPVPGAYPNTGPGRRPYALLHPHPPRYLLLSAPAYAGAPKKAEGADLATPAPFPCCSPHLVLSLGRRARVWRRHREADASLSALRVSCKGSGERVQGLRRVCPRPRGATAPCSSDRQACRTILQQQQRHQEEDCANGCAPTKGAVLGGHLSAASALLRYQAVAEGSGLTSLAAPLGGEGTSPVFLVSPTPSSLAESAGPS

SEQ ID NO: 23652 - protein, 1794 aa, Homo sapiens
MFSPLKSRARALAHGDPFQVSRAQDFQVGVTVLEAQKLVGVNINPYVAVQVGGQRRVTATQRGTSCPFYNEYFLFEFHDTRLRLQDLLLEITAFHSQTLPFMATRIGTFRMDLGIILDQPDGQFYQRWVPLHDPRDTRAGTKGFIKVTLSVRARGDLPPPMLPPAPGHCSDIEKNLLLPRGVPAERPWARLRVRLYRAEGLPALRLGLLGSLVRALHDQRVLVEPYVRVSFLGQEGETSVSAEAAAPEWNEQLSFVELFPPLTRSLRLQLRDDAPLVDAALATHVPDLRRISHPGRAAGFNPTFGPAWVPLYGSPPGAGLRDSLQGLNEGVGQGIWFRGRLLLAVSMQVLEGRAEPEPPQAQQGSTLSRLTRKKKKKARRDQTPKAVPQHLDASPGAEGPEIPRAMEVEVEELLPLPENVLAPCEDFLLFGVLFEATMIDPTVASQPISFEISIGRAGRLEEQLGRGSRAGEGTEGAAVEAQPLLGARPEEEKEEEELGTHAQRPEPMDGSGPYFCLPLCHCKPCMHVWSCWEDHTWRLQSSNCVRKVAERLDQGLQEVERLQRKPGPGACAQLKQALEVLVAGSRQFCHGAERRTMTRPNALDRCRGKLLVHSLNLLAKQGLRLLRGLRRRNVQKKVALAKKLLAKLRFLAEEPQPPLPDVLVWMLSGQRRVAWARIPAQDVLFSVVEEERGRDCGKIQSLMLTAPGAAPGEVCAKLELFLRLGLGKQAKACTSELPPDLLPEPSAGLPSSLHRDDFSYFQLRAHLYQARGVLAADDSGLSDPFARVLISTQCQTTRVLEQTLSPLWDELLVFEQLIVDGRREHLQEEPPLVIINVFDHNKFGPPVFLGRALAAPRVKLMEDPYQRPELQFFPLRKGPWAAGELIAAFQLIELDYSGRLEPSVPSEVEPQDLAPLVEPHSGRLSLPPNVCPVLREFRVEVLFWGLRGLGRVHLLEVEQPQVVLEVAGQGVESEVLASYRESPNFTELVRHLTVDLPEQPYLQPPLSILVIERRAFGHTVLVGSHIVPHMLRFTFRGHEDPPEEEGEMEETGDMMPKGPQGQKSLDPFLAEAGISRQLLKPPLKKLPLGGLLNQGPGLEEDIPDPEELDWGSKYYASLQELQGQHNFDEDEMDDPGDSDGVNLISMVGEIQDQGEAEVKGTVSPKKAVATLKIYNRSLKEEFNHFEDWLNVFPLYRGQGGQDGGGEEEGSGHLVGKFKGSFLIYPESEAVLFSEPQISRGIPQNRPIKLLVRVYVVKATNLAPADPNGKADPYVVVSAGRERQDTKERYIPKQLNPIFGEILELSISLPAETELTVAVFDHDLVGSDDLIGETHIDLENRFYSHHRANCGLASQYEVDGYNAWRDAFWPSQILAGLCQRCGLPAPEYRAGAVKVGSKVFLTPPETLPPGSSSPTVASGDPEEAQALLVLRRWQEMPGFGIQLVPEHVETRPLYHPHSPGLLQGSLHMWIDIFPQDVPAPPPVDIKPRQPISYELRVVIWNTEDVVLDDENPLTGEMSSDIYVKSWVKGLEHDKQETDVHFNSLTGEGNFNWRFVFRFDYLPTEREVSVWRRSGPFALEEAEFRQPAVLVLQVWDYDRISANDFLGSLELQLPDMVRGARGPELCSVQLARNGAGPRCNLFRCRRLRGWWPVVKLKEAEDVEREAQEAQAGKKKRKQRRRKGRPEDLEFTDMGGNVYILTGKVEAEFELLTVEEAEKRPVGKGRKQPEPLEKPSRPKTSFNWFVNPLKTFVFFIWRRYWRTLVLLLLVLLTVFLLLVFYTIPGQISQVIFRPLHK

SEQ ID NO: 23653 - protein, 328 aa, Homo sapiens [sequence omitted]

SEQ ID NO: 23654 - protein, 1367 aa, Homo sapiens
MFSPLKSRARALAHGDPFQVSRAQDFQVGVTVLEAQKLVGVNINPYVAVQVGGQRRVTATQRGTSCPFYNEYFLFEFHDTRLRLQDLLLEITAFHSQTLPFMATRIGTFRMDLGIILDQPDGQFYQRWVPLHDPRDTRAGTKGFIKVTLSVRARGDLPPPMLPPAPGHCSDIEKNLLLPRGVPAERPWARLRVRLYRAEGLPALRLGLLGSLVRALHDQRVLVEPYVRVSFLGQEGETSVSAEAAAPEWNEQLSFVELFPPLTRSLRLQLRDDAPLVDAALATHVPDLRRISHPGRAAGFNPTFGPAWVPLYGSPPGAGLRDSLQGLNEGVGQGIWFRGRLLLAVSMQVLEGRAEPEPPQAQQGSTLSRLTRKKKKKARRDQTPKAVPQHLDASPGAEGPEIPRAMEVEVEELLPLPENVLAPCEDFLLFGVLFEATMIDPTVASQPISFEISIGRAGRLEEQLGRGSRAGEGTEGAAVEAQPLLGARPEEEKEEEELGTHAQRPEPMDGSGPYFCLPLCHCKPCMHVWSCWEDHTWRLQSSNCVRKVAERLDQGLQEVERLQRKPGPGACAQLKQALEVLVAGSRQFCHGAERRTMTRPNALDRCRGKLLVHSLNLLAKQGLRLLRGLRRRNVQKKVALAKKLLAKLRFLAEEPQPPLPDVLVWMLSGQRRVAWARIPAQDVLFSVVEEERGRDCGKIQSLMLTAPGAAPGEVCAKLELFLRLGLGKQAKACTSELPPDLLPEPSAGLPSSLHRDDFSYFQLRAHLYQARGVLAADDSGLSDPFARVLISTQCQTTRVLEQTLSPLWDELLVFEQLIVDGRREHLQEEPPLVIINVFDHNKFGPPVFLGRALAAPRVKLMEDPYQRPELQFFPLRKGPWAAGELIAAFQLIELDYSGRLEPSVPSEVEPQDLAPLVEPHSGRLSLPPNVCPVLREFRVEVLFWGLRGLGRVHLLEVEQPQVVLEVAGQGVESEVLASYRESPNFTELVRHLTVDLPEQPYLQPPLSILVIERRAFGHTVLVGSHIVPHMLRFTFRGHEDPPEEEGEMEETGDMMPKGPQGQKSLDPFLAEAGISRQLLKPPLKKLPLGGLLNQGPGLEEDIPDPEELDWGSKYYASLQELQGQHNFDEDEMDDPGDSDGVNLISMVGEIQDQGEAEVKGTVSPKKAVATLKIYNRSLKEEFNHFEDWLNVFPLYRGQGGQDGGGEEEGSGHLVGKFKGSFLIYPESEAVLFSEPQISRGIPQNRPIKLLVRVYVVKATNLAPADPNGKADPYVVVSAGRERQDTKERYIPKQLNPIFGEILELSISLPAETELTVAVFDHDLVGSDDLIGETHIDLENRFYSHHRANCGLASQYEVWVQQGPQEPF

SEQ ID NO: 23655 - protein, 154 aa, Homo sapiens
MFSPLKSRARALAHGDPFQVSRAQDFQVGVTVLEAQKLVGVNINPYVAVQVGGQRRVTATQRGTSCPFYNEYFLFEFHDTRLRLQDLLLEITVSGVGVTSVLQRRGDEKAAGLTPPSPKAFHSQTLPFMATRIGTFRMDLGIILDQPGMESSPY

SEQ ID NO: 23656 - protein, 279 aa, Homo sapiens
MPCRREEEEEAGEEAEGEEEEEDSFLLLQQSVALGSSGEVDRLVAQIGETLQLDAAQHSPASPCGPPGAPLRAPGPLAAAVPADKARSPAVPLLLPPALAETVGPAPPGVLRCALGDRGRVRGRAAPYCVAELATGPSALSPLPPQADLDGPPGAGKQGIPQPLSGPCRRGWLRGAAASRRLQQRRGSQPETRTGDDDPHRLLQQLVLSGNLIKEAVRRLHSRRLQLRAKLPQRPLLGPLSAPVHEPPSPRSPRAACSDPGASGRAQLRTGDGVLVPGS

SEQ ID NO: 23657 - protein, 750 aa, Homo sapiens
MWNLLHETDSAVATARRPRWLCAGALVLAGGFFLLGFLFGWFIKSSNEATNITPKHNMKAFLDELKAENIKKFLYNFTQIPHLAGTEQNFQLAKQIQSQWKEFGLDSVELAHYDVLLSYPNKTHPNYISIINEDGNEIFNTSLFEPPPPGYENVSDIVPPFSAFSPQGMPEGDLVYVNYARTEDFFKLERDMKINCSGKIVIARYGKVFRGNKVKNAQLAGAKGVILYSDPADYFAPGVKSYPDGWNLPGGGVQRGNILNLNGAGDPLTPGYPANEYAYRRGIAEAVGLPSIPVHPIGYYDAQKLLEKMGGSAPPDSSWRGSLKVPYNVGPGFTGNFSTQKVKMHIHSTNEVTRIYNVIGTLRGAVEPDRYVILGGHRDSWVFGGIDPQSGAAVVHEIVRSFGTLKKEGWRPRRTILFASWDAEEFGLLGSTEWAEENSRLLQERGVAYINADSSIEGNYTLRVDCTPLMYSLVHNLTKELKSPDEGFEGKSLYESWTKKSPSPEFSGMPRISKLGSGNDFEVFFQRLGIASGRARYTKNWETNKFSGYPLYHSVYETYELVEKFYDPMFKYHLTVAQVRGGMVFELANSIVLPFDCRDYAVVLRKYADKIYSISMKHPQEMKTYSVSFDSLFSAVKNFTEIASKFSERLQDFDKSNPIVLRMMNDQLMFLERAFIDPLGLPDRPFYRHVIYAPSSHNKYAGESFPGIYDALFDIESKVDPSKAWGEVKRQIYVAAFTVQAAAETLSEVA

SEQ ID NO: 23658 - protein, 110 aa, Homo sapiens
ELANSIVLPFDCRDYAVVLRKYADKIYSISMKHPQEMKTYSVSFDSLFSAVKNFTEIASKFSERLQDFDKSMSSMLQAATTSMQGSHSQEFMMLCLILKAKWTLPRPGEK

SEQ ID NO: 23659 - protein, 84 aa, Homo sapiens
PFSAFSPQGMPEGDLVYVNYARTEDFFKLERDMKINCSGKIVIARYGKVFRGNKNMLIGVELQRLLVFQVFLFIQLDTMMHRSS

SEQ ID NO: 23660 - protein, 693 aa, Homo sapiens
MKAFLDELKAENIKKFLYNFTQIPHLAGTEQNFQLAKQIQSQWKEFGLDSVELAHYDVLLSYPNKTHPNYISIINEDGNEIFNTSLFEPPPPGYENVSDIVPPFSAFSPQGMPEGDLVYVNYARTEDFFKLERDMKINCSGKIVIARYGKVFRGNKVKNAQLAGAKGVILYSDPADYFAPGVKSYPDGWNLPGGGVQRGNILNLNGAGDPLTPGYPANEYAYRRGIAEAVGLPSIPVHPIGYYDAQKLLEKMGGSAPPDSSWRGSLKVPYNVGPGFTGNFSTQKVKMHIHSTNEVTRIYNVIGTLRGAVEPDRYVILGGHRDSWVFGGIDPQSGAAVVHEIVRSFGTLKKEGWRPRRTILFASWDAEEFGLLGSTEWAEENSRLLQERGVAYINADSSIEGNYTLRVDCTPLMYSLVHNLTKELKSPDEGFEGKSLYESWTKKSPSPEFSGMPRISKLGSGNDFEVFFQRLGIASGRARYTKNWETNKFSGYPLYHSVYETYELVEKFYDPMFKYHLTVAQVRGGMVFELANSIVLPFDCRDYAVVLRKYADKIYSISMKHPQEMKTYSVSFDSLFSAVKNFTEIASKFSERLQDFDKSNPIVLRMMNDQLMFLERAFIDPLGLPDRPFYRHVIYAPSSHNKYAGESFPGIYDALFDIESKVDPSKAWGEVKRQIYVAAFTVQAAAETLSEVA

SEQ ID NO: 23661 - protein, 735 aa, Homo sapiens
MTAGSSYPLFLAAYACTGCLAERLGWFIKSSNEATNITPKHNMKAFLDELKAENIKKFLYNFTQIPHLAGTEQNFQLAKQIQSQWKEFGLDSVELAHYDVLLSYPNKTHPNYISIINEDGNEIFNTSLFEPPPPGYENVSDIVPPFSAFSPQGMPEGDLVYVNYARTEDFFKLERDMKINCSGKIVIARYGKVFRGNKVKNAQLAGAKGVILYSDPADYFAPGVKSYPDGWNLPGGGVQRGNILNLNGAGDPLTPGYPANEYAYRRGIAEAVGLPSIPVHPIGYYDAQKLLEKMGGSAPPDSSWRGSLKVPYNVGPGFTGNFSTQKVKMHIHSTNEVTRIYNVIGTLRGAVEPDRYVILGGHRDSWVFGGIDPQSGAAVVHEIVRSFGTLKKEGWRPRRTILFASWDAEEFGLLGSTEWAEENSRLLQERGVAYINADSSIEGNYTLRVDCTPLMYSLVHNLTKELKSPDEGFEGKSLYESWTKKSPSPEFSGMPRISKLGSGNDFEVFFQRLGIASGRARYTKNWETNKFSGYPLYHSVYETYELVEKFYDPMFKYHLTVAQVRGGMVFELANSIVLPFDCRDYAVVLRKYADKIYSISMKHPQEMKTYSVSFDSLFSAVKNFTEIASKFSERLQDFDKSNPIVLRMMNDQLMFLERAFIDPLGLPDRPFYRHVIYAPSSHNKYAGESFPGIYDALFDIESKVDPSKAWGEVKRQIYVAAFTVQAAAETLSEVA

SEQ ID NO: 23662 - protein, 719 aa, Homo sapiens
MWNLLHETDSAVATARRPRWLCAGALVLAGGFFLLGFLFGWFIKSSNEATNITPKHNMKAFLDELKAENIKKFLYNFTQIPHLAGTEQNFQLAKQIQSQWKEFGLDSVELAHYDVLLSYPNKTHPNYISIINEDGNEIFNTSLFEPPPPGYENVSDIVPPFSAFSPQGMPEGDLVYVNYARTEDFFKLERDMKINCSGKIVIARYGKVFRGNKVKNAQLAGAKGVILYSDPADYFAPGVKSYPDGWNLPGGGVQRGNILNLNGAGDPLTPGYPANEYAYRRGIAEAVGLPSIPVHPIGYYDAQKLLEKMGGSAPPDSSWRGSLKVPYNVGPGFTGNFSTQKVKMHIHSTNEVTRIYNVIGTLRGAVEPDRYVILGGHRDSWVFGGIDPQSGAAVVHEIVRSFGTLKKEGWRPRRTILFASWDAEEFGLLGSTEWAEENSRLLQERGVAYINADSSIEGNYTLRVDCTPLMYSLVHNLTKELKSPDEGFEGKSLYESWTKKSPSPEFSGMPRISKLGSGNDFEVFFQRLGIASGRARYTKNWETNKFSGYPLYHSVYETYELVEKFYDPMFKYHLTVAQVRGGMVFELANSIVLPFDCRDYAVVLRKYADKIYSISMKHPQEMKTYSVSFDSLFSAVKNFTEIASKFSERLQDFDKSKHVIYAPSSHNKYAGESFPGIYDALFDIESKVDPSKAWGEVKRQIYVAAFTVQAAAETLSEVA

SEQ ID NO: 23663 - protein, 704 aa, Homo sapiens
MTAGSSYPLFLAAYACTGCLAERLGWFIKSSNEATNITPKHNMKAFLDELKAENIKKFLYNFTQIPHLAGTEQNFQLAKQIQSQWKEFGLDSVELAHYDVLLSYPNKTHPNYISIINEDGNEIFNTSLFEPPPPGYENVSDIVPPFSAFSPQGMPEGDLVYVNYARTEDFFKLERDMKINCSGKIVIARYGKVFRGNKVKNAQLAGAKGVILYSDPADYFAPGVKSYPDGWNLPGGGVQRGNILNLNGAGDPLTPGYPANEYAYRRGIAEAVGLPSIPVHPIGYYDAQKLLEKMGGSAPPDSSWRGSLKVPYNVGPGFTGNFSTQKVKMHIHSTNEVTRIYNVIGTLRGAVEPDRYVILGGHRDSWVFGGIDPQSGAAVVHEIVRSFGTLKKEGWRPRRTILFASWDAEEFGLLGSTEWAEENSRLLQERGVAYINADSSIEGNYTLRVDCTPLMYSLVHNLTKELKSPDEGFEGKSLYESWTKKSPSPEFSGMPRISKLGSGNDFEVFFQRLGIASGRARYTKNWETNKFSGYPLYHSVYETYELVEKFYDPMFKYHLTVAQVRGGMVFELANSIVLPFDCRDYAVVLRKYADKIYSISMKHPQEMKTYSVSFDSLFSAVKNFTEIASKFSERLQDFDKSKHVIYAPSSHNKYAGESFPGIYDALFDIESKVDPSKAWGEVKRQIYVAAFTVQAAAETLSEVA

SEQ ID NO: 23664 - protein, 442 aa, Homo sapiens
MGGSAPPDSSWRGSLKVPYNVGPGFTGNFSTQKVKMHIHSTNEVTRIYNVIGTLRGAVEPDRYVILGGHRDSWVFGGIDPQSGAAVVHEIVRSFGTLKKEGWRPRRTILFASWDAEEFGLLGSTEWAEENSRLLQERGVAYINADSSIEGNYTLRVDCTPLMYSLVHNLTKELKSPDEGFEGKSLYESWTKKSPSPEFSGMPRISKLGSGNDFEVFFQRLGIASGRARYTKNWETNKFSGYPLYHSVYETYELVEKFYDPMFKYHLTVAQVRGGMVFELANSIVLPFDCRDYAVVLRKYADKIYSISMKHPQEMKTYSVSFDSLFSAVKNFTEIASKFSERLQDFDKSNPIVLRMMNDQLMFLERAFIDPLGLPDRPFYRHVIYAPSSHNKYAGESFPGIYDALFDIESKVDPSKAWGEVKRQIYVAAFTVQAAAETLSEVA

SEQ ID NO: 23665 - protein, 369 aa, Homo sapiens
MDGTEGSVGQPGPTERSHRSSVSSVGARAADVLVYLADDTVVPLAVENLPSLRAHELHCAVREVLKLPDIALDVFALWLVSPLLEVQLKPKNQPYKLGRQWPELLLRFTSAPDDDVAMDEPFLQFRRNVFFPKGRELQIPDEEVLRLLYEEAKGNVLAARYLCDVEDCEALGALVCRVQLVTYQPDWPAACDLREKLDSFLPAHLCKRGQGLFAALRGRGARAGPGEQSLLNAYRKVQEVSSDGGCEAALGTHYRAYLLKCHKLPFYGCAFFHGEVDKPAQGFLHRGGRKSVSVAISLEGVHVVDSREKHVLLGLCFQELSWDHTSPEEEEPILWLEFDRDSGVTPVNKLLKIYSKQAELMSSLIEYCI

SEQ ID NO: 23666 - protein, 41 aa, Homo sapiens
MEEQPECREEKRGSLHVWKSELVEVEDDVYLRHSSSLTYRL

SEQ ID NO: 23667 - protein, 24 aa, Homo sapiens
MATRRFSCLLLSTSEIDLSVKRRI

SEQ ID NO: 23668 - protein, 28 aa, Homo sapiens
MATQGFSCLLLSVSEIDLSMKRQYKQIR

SEQ ID NO: 23669 - protein, 419 aa, Homo sapiens
MPLSRWLRSVGVFLLPAPYWAPRERWLGSLRRPSLVHGYPVLAWHSARCWCQAWTEEPRALCSSLRMNGDQNSDVYAQEKQDFVQHFSQIVRVLTEDEMGHPEIGDAIARLKEVLEYNAIGGKYNRGLTVVVAFRELVEPRKQDADSLQRAWTVGWCVELLQAFFLVADDIMDSSLTRRGQICWYQKPGVGLDAINDANLLEACIYRLLKLYCREQPYYLNLIELFLQSSYQTEIGQTLDLLTAPQGNVDLVRFTEKRYKSIVKYKTAFYSFYLPIAAAMYMAGIDGEKEHANAKKILLEMGEFFQIQDDYLDLFGDPSVTGKIGTDIQDNKCSWLVVQCLQRATPEQYQILKENYGQKEAEKVARVKALYEELDLPAVFLQYEEDSYSHIMALIEQYAAPLPPAVFLGLARKIYKRRK

SEQ ID NO: 23670 - protein, 353 aa, Homo sapiens
MNGDQNSDVYAQEKQDFVQHFSQIVRVLTEDEMGHPEIGDAIARLKEVLEYNAIGGKYNRGLTVVVAFRELVEPRKQDADSLQRAWTVGWCVELLQAFFLVADDIMDSSLTRRGQICWYQKPGVGLDAINDANLLEACIYRLLKLYCREQPYYLNLIELFLQSSYQTEIGQTLDLLTAPQGNVDLVRFTEKRYKSIVKYKTAFYSFYLPIAAAMYMAGIDGEKEHANAKKILLEMGEFFQIQDDYLDLFGDPSVTGKIGTDIQDNKCSWLVVQCLQRATPEQYQILKENYGQKEAEKVARVKALYEELDLPAVFLQYEEDSYSHIMALIEQYAAPLPPAVFLGLARKIYKRRK

SEQ ID NO: 23671 - protein, 24 aa, Homo sapiens
MATPGFSCLLLSTSEIDLPMKRRV

SEQ ID NO: 23672 - protein, 24 aa, Homo sapiens
MAPRGFSCLLLSTSEIDLPVKRRA

SEQ ID NO: 23673 - protein, 211 aa, Homo sapiens
MKLWDVVAVCLVLLHTASAFPLPAGKRPPEAPAEDRSLGRRRAPFALSSDSNMPEDYPDQFDDVMDFIQATIKRLKRSPDKQMAVLPRRERNRQAAAANPENSRGKGRRGQRGKNRGCVLTAIHLNVTDLGLGYETKEELIFRYCSGSCDAAETTYDKILKNLSRNRRLVSDKVGQACCRPIAFDDDLSFLDDNLVYHILRKHSAKRCGCI

SEQ ID NO: 23674 - protein, 185 aa, Homo sapiens
MKLWDVVAVCLVLLHTASAFPLPAANMPEDYPDQFDDVMDFIQATIKRLKRSPDKQMAVLPRRERNRQAAAANPENSRGKGRRGQRGKNRGCVLTAIHLNVTDLGLGYETKEELIFRYCSGSCDAAETTYDKILKNLSRNRRLVSDKVGQACCRPIAFDDDLSFLDDNLVYHILRKHSAKRCGCI

SEQ ID NO: 23675 - protein, 228 aa, Homo sapiens
MQSLPNSNGAAAGRDFKMKLWDVVAVCLVLLHTASAFPLPAGKRPPEAPAEDRSLGRRRAPFALSSDSNMPEDYPDQFDDVMDFIQATIKRLKRSPDKQMAVLPRRERNRQAAAANPENSRGKGRRGQRGKNRGCVLTAIHLNVTDLGLGYETKEELIFRYCSGSCDAAETTYDKILKNLSRNRRLVSDKVGQACCRPIAFDDDLSFLDDNLVYHILRKHSAKRCGCI

SEQ ID NO: 23676 - protein, 202 aa, Homo sapiens
MQSLPNSNGAAAGRDFKMKLWDVVAVCLVLLHTASAFPLPAANMPEDYPDQFDDVMDFIQATIKRLKRSPDKQMAVLPRRERNRQAAAANPENSRGKGRRGQRGKNRGCVLTAIHLNVTDLGLGYETKEELIFRYCSGSCDAAETTYDKILKNLSRNRRLVSDKVGQACCRPIAFDDDLSFLDDNLVYHILRKHSAKRCGCI

SEQ ID NO: 23677 - protein, 159 aa, Homo sapiens
MPEDYPDQFDDVMDFIQATIKRLKRSPDKQMAVLPRRERNRQAAAANPENSRGKGRRGQRGKNRGCVLTAIHLNVTDLGLGYETKEELIFRYCSGSCDAAETTYDKILKNLSRNRRLVSDKVGQACCRPIAFDDDLSFLDDNLVYHILRKHSAKRCGCI

SEQ ID NO: 23678 - protein, 908 aa, Homo sapiens
MGVNDLWQILEPVKQHIPLRNLGGKTIAVDLSLWVCEAQTVKKMMGSVMKPHLRNLFFRISYLTQMDVKLVFVMEGEPPKLKADVISKRNQSRYGSSGKSWSQKTGRSHFKSVLRECLHMLECLGIPWVQAAGEAEAMCAYLNAGGHVDGCLTNDGDTFLYGAQTVYRNFTMNTKDPHVDCYTMSSIKSKLGLDRDALVGLAILLGCDYLPKGVPGVGKEQALKLIQILKGQSLLQRFNRWNETSCNSSPQLLVTKKLAHCSVCSHPGSPKDHERNGCRLCKSDKYCEPHDYEYCCPCEWHRTEHDRQLSEVENNIKKKACCCEGFPFHEVIQEFLLNKDKLVKVIRYQRPDLLLFQRFTLEKMEWPNHYACEKLLVLLTHYDMIERKLGSRNSNQLQPIRIVKTRIRNGVHCFEIEWEKPEHYAMEDKQHGEFALLTIEEESLFEAAYPEIVAVYQKQKLEIKGKKQKRIKPKENNLPEPDEVMSFQSHMTLKPTCEIFHKQNSKLNSGISPDPTLPQESISASLNSLLLPKNTPCLNAQEQFMSSLRPLAIQQIKAVSKSLISESSQPNTSSHNISVIADLHLSTIDWEGTSFSNSPAIQRNTFSHDLKSEVESELSAIPDGFENIPEQLSCESERYTANIKKVLDEDSDGISPEEHLLSGITDLCLQDLPLKERIFTKLSYPQDNLQPDVNLKTLSILSVKESCIANSGSDCTSHLSKDLPGIPLQNESRDSKILKGDQLLQEDYKVNTSVPYSVSNTVVKTCNVRPPNTALDHSRKVDMQTTRKILMKKSVCLDRHSSDEQSAPVFGKAKYTTQRMKHSSQKHNSSHFKESGHNKLSSPKIHIKETEQCVRSYETAENEESCFPDSTKSSLSSLQCHKKENNSGTCLDSPLPLRQRLKLRFQST

SEQ ID NO: 23679 - protein, 748 aa, Homo sapiens
MLGTLRAMEGEDVEDDQLLQKLRASRRRFQRRMQRLIEKYNQPFEDTPVVQMATLTYETPQGLRIWGGRLIKERNEGEIQDSSMKPADRTDGSVQAAAWGPELPSHRTVLGADSKSGEVDATSDQEESVAWALAPAVPQSPLKNELRRKYLTQVDILLQGAEYFECAGNRAGRDVRVTPLPSLASPAVPAPGYCSRISRKSPGDPAKPASSPREWDPLHPSSTDMALVPRNDSLSLQETSSSSFLSSQPFEDDDICNVTISDLYAGMLHSMSRLLSTKPSSIISTKTFIMQNWNSRRRHRYKSRMNKTYCKGARRSQRSSKENFIPCSEPVKGTGALRDCKNVLDVSCRKTGLKLEKAFLEVNRPQIHKLDPSWKERKVTPSKYSSLIYFDSSATYNLDEENRFRTLKWLISPVKIVSRPTIRQGHGENRQREIEIRFDQLHREYCLSPRNQPRRMCLPDSWAMNMYRGGPASPGGLQGLETRRLSLPSSKAKAKSLSEAFENLGKRSLEAGRCLPKSDSSSSLPKTNPTHSATRPQQTSDLHVQGNSSGIFRKSVSPSKTLSVPDKEVPGHGRNRYDEIKEEFDKLHQKYCLKSPGQMTVPLCIGVSTDKASMEVRYQTEGFLGKLNPDPHFQGFQKLPSSPLGCRKSLLGSTAIEAPSSTCVARAITRDGTRDHQFPAKRPRLSEPQGSGRQGNSLGASDGVDNTVRPGDQGSSSQPNSEERGENTSYRMEEKSDFMLEKLETKSV

SEQ ID NO: 23680 - protein, 694 aa, Homo sapiens
MLGTLRAMEGEDVEDDQLLQKLRASRRRFQRRMQRLIEKYNQPFEDTPVVQMATLTYETPQGLRIWGGRLIKERNEGEIQPAVPQSPLKNELRRKYLTQVDILLQGAEYFECAGNRAGRDVRVTPLPSLASPAVPAPGYCSRISRKSPGDPAKPASSPREWDPLHPSSTDMALVPRNDSLSLQETSSSSFLSSQPFEDDDICNVTISDLYAGMLHSMSRLLSTKPSSIISTKTFIMQNWNSRRRHRYKSRMNKTYCKGARRSQRSSKENFIPCSEPVKGTGALRDCKNVLDVSCRKTGLKLEKAFLEVNRPQIHKLDPSWKERKVTPSKYSSLIYFDSSATYNLDEENRFRTLKWLISPVKIVSRPTIRQGHGENRQREIEIRFDQLHREYCLSPRNQPRRMCLPDSWAMNMYRGGPASPGGLQGLETRRLSLPSSKAKAKSLSEAFENLGKRSLEAGRCLPKSDSSSSLPKTNPTHSATRPQQTSDLHVQGNSSGIFRKSVSPSKTLSVPDKEVPGHGRNRYDEIKEEFDKLHQKYCLKSPGQMTVPLCIGVSTDKASMEVRYQTEGFLGKLNPDPHFQGFQKLPSSPLGCRKSLLGSTAIEAPSSTCVARAITRDGTRDHQFPAKRPRLSEPQGSGRQGNSLGASDGVDNTVRPGDQGSSSQPNSEERGENTSYRMEEKSDFMLEKLETKSV

SEQ ID NO: 23681 - protein, 663 aa, Homo sapiens
MLGTLRAMEGEDVEDDQLLQKLRASRRRFQRRMQRLIEKYNQPFEDTPVVQMATLTYETPQGLRIWGGRLIKERNEGEIQCAGNRAGRDVRVTPLPSLASPAVPAPGYCSRISRKSPGDPAKPASSPREWDPLHPSSTDMALVPRNDSLSLQETSSSSFLSSQPFEDDDICNVTISDLYAGMLHSMSRLLSTKPSSIISTKTFIMQNWNSRRRHRYKSRMNKTYCKGARRSQRSSKENFIPCSEPVKGTGALRDCKNVLDVSCRKTGLKLEKAFLEVNRPQIHKLDPSWKERKVTPSKYSSLIYFDSSATYNLDEENRFRTLKWLISPVKIVSRPTIRQGHGENRQREIEIRFDQLHREYCLSPRNQPRRMCLPDSWAMNMYRGGPASPGGLQGLETRRLSLPSSKAKAKSLSEAFENLGKRSLEAGRCLPKSDSSSSLPKTNPTHSATRPQQTSDLHVQGNSSGIFRKSVSPSKTLSVPDKEVPGHGRNRYDEIKEEFDKLHQKYCLKSPGQMTVPLCIGVSTDKASMEVRYQTEGFLGKLNPDPHFQGFQKLPSSPLGCRKSLLGSTAIEAPSSTCVARAITRDGTRDHQFPAKRPRLSEPQGSGRQGNSLGASDGVDNTVRPGDQGSSSQPNSEERGENTSYRMEEKSDFMLEKLETKSV

SEQ ID NO: 23682 - protein, 888 aa, Homo sapiens [sequence omitted]

SEQ ID NO: 23683 - protein, 835 aa, Homo sapiens
MLSRLFRMHGLFVASHPWEVIVGTVTLTICMMSMNMFTGNNKICGWNYECPKFEEDVLSSDIIILTITRCIAILYIYFQFQNLRQLGSKYILGIAGLFTIFSSFVFSTVVIHFLDKELTGLNEALPFFLLLIDLSRASTLAKFALSSNSQDEVRENIARGMAILGPTFTLDALVECLVIGVGTMSGVRQLEIMCCFGCMSVLANYFVFMTFFPACVSLVLELSRESREGRPIWQLSHFARVLEEEENKPNPVTQRVKMIMSLGLVLVHAHSRWIADPSPQNSTADTSKVSLGLDENVSKRIEPSVSLWQFYLSKMISMDIEQVITLSLALLLAVKYIFFEQTETESTLSLKNPITSPVVTQKKVPDNCCRREPMLVRNNQKCDSVEEETGINRERKVEVIKPLVAETDTPNRATFVVGNSSLLDTSSVLVTQEPEIELPREPRPNEECLQILGNAEKGAKFLSDAEIIQLVNAKHIPAYKLETLMETHERGVSIRRQLLSKKLSEPSSLQYLPYRDYNYSLLGGGASSRVLADGMTRGPVVRLPRACDSAEVKAWLETSEGFAVIKEAFDSTSRFARLQKLHTSIAGRNLYIRFQSRSGDAMGMNMISKGTEKALSKLHEYFPEMQILAVSGNYCTDKKPAAINWIEGRGKSVVCEAVIPAKVVREVLKTTTEAMIEVNINKNLVGSAMAGSIGGYNAHAANIVTAIYIACGQDAAQNVGSSNCITLMEASGPTNEDLYISCTMPSIEIGTVGGGTNLLPQQACLQMLGVQGACKDNPGENARQLARIVCGTVMAGELSLMAALAAGHLVKSHMIHNRSKINLQDLQGACTKKTA

SEQ ID NO: 23684 - protein, 908 aa, Homo sapiens
MQWMSHTRERDAGSKDSVATMLSRLFRMHGLFVASHPWEVIVGTVTLTICMMSMNMFTGNNKICGWNYECPKFEEDVLSSDIIILTITRCIAILYIYFQFQNLRQLGSKYILGIAGLFTIFSSFVFSTVVIHFLDKELTGLNEALPFFLLLIDLSRASTLAKFALSSNSQDEVRENIARGMAILGPTFTLDALVECLVIGVGTMSGVRQLEIMCCFGCMSVLANYFVFMTFFPACVSLVLELSRESREGRPIWQLSHFARVLEEEENKPNPVTQRVKMIMSLGLVLVHAHSRWIADPSPQNSTADTSKVSLGLDENVSKRIEPSVSLWQFYLSKMISMDIEQVITLSLALLLAVKYIFFEQTETESTLSLKNPITSPVVTQKKVPDNCCRREPMLVRNNQKCDSVEEETGINRERKVEVIKPLVAETDTPNRATFVVGNSSLLDTSSVLVTQEPEIELPREPRPNEECLQILGNAEKGAKFLSDAEIIQLVNAKHIPAYKLETLMETHERGVSIRRQLLSKKLSEPSSLQYLPYRDYNYSLVMGACCENVIGYMPIPVGVAGPLCLDEKEFQVPMATTEGCLVASTNRGCRAIGLGGGASSRVLADGMTRGPVVRLPRACDSAEVKAWLETSEGFAVIKEAFDSTSRFARLQKLHTSIAGRNLYIRFQSRSGDAMGMNMISKGTEKALSKLHEYFPEMQILAVSGNYCTDKKPAAINWIEGRGKSVVCEAVIPAKVVREVLKTTTEAMIEVNINKNLVGSAMAGSIGGYNAHAANIVTAIYIACGQDAAQNVGSSNCITLMEASGPTNEDLYISCTMPSIEIGTVGGGTNLLPQQACLQMLGVQGACKDNPGENARQLARIVCGTVMAGELSLMAALAAGHLVKSHMIHNRSKINLQDLQGACTKKTA

SEQ ID NO: 23685 - protein, 917 aa, Homo sapiens
MFAVHLMAFYFSKLKEDQIKKVDRFLYHMRLSDDTLLDIMRRFRAEMEKGLAKDTNPTAAVKMLPTFVRAIPDGSENGEFLSLDLGGSKFRVLKVQVAEEGKRHVQMESQFYPTPNEIIRGNGTELFEYVADCLADFMKTKDLKHKKLPLGLTFSFPCRQTKLEEGVLLSWTKKFKARGVQDTDVVSRLTKAMRRHKDMDVDILALVNDTVGTMMTCAYDDPYCEVGVIIGTGTNACYMEDMSNIDLVEGDEGRMCINTEWGAFGDDGALEDIRTEFDRELDLGSLNPGKQLFEKMISGLYLGELVRLILLKMAKAGLLFGGEKSSALHTKGKIETRHVAAMEKYKEGLANTREILVDLGLEPSEADCIAVQHVCTIVSFRSANLCAAALAAILTRLRENKKVERLRTTVGMDGTLYKIHPQYPKRLHKVVRKLVPSCDVRFLLSESGSTKGAAMVTAVASRVQAQRKQIDRVLALFQLTREQLVDVQAKMRAELEYGLKKKSHGLATVRMLPTYVCGLPDGTEKGKFLALDLGGTNFRVLLVKIRSGRRSVRMYNKIFAIPLEIMQGTGEELFDHIVQCIADFLDYMGLKGASLPLGFTFSFPCRQMSIDKGTLIGWTKGFKATDCEGEDVVDMLREAIKRRNEFDLDIVAVVNDTVGTMMTCGYEDPNCEIGLIAGTGSNMCYMEDMRNIEMVEGGEGKMCINTEWGGFGDNGCIDDIWTRYDTEVDEGSLNPGKQRYEKMTSGMYLGEIVRQILIDLTKQGLLFRGQISERLRTRGIFETKFLSQIESDRLALLQVRRILQQLGLDSTCEDSIVVKEVCGAVSRRAAQLCGAGLAAIVEKRREDQGLEHLRITVGVDGTLYKLHPHFSRILQETVKELAPRCDVTFMLSEDGSGKGAALITAVAKRLQQAQKEN

SEQ ID NO: 23686 - protein, 806 aa, Homo sapiens
MFAVHLMAFYFSKLKEDQIKKVDRFLYHMRLSDDTLLDIMRRFRAEMEKGLAKDTNPTAAVKMLPTFVRAIPDGSENGEFLSLDLGGSKFRVLKVQVAEEGKRHVQMESQFYPTPNEIIRGNGTELFEYVADCLADFMKTKDLKHKKLPLGLTFSFPCRQTKLEEGVLLSWTKKFKARGVQDTDVVSRLTKAMRRHKDMDVDILALVNDTVGTMMTCAYDDPYCEVGVIIGTGTNACYMEDMSNIDLVEGDEGRMCINTEWGAFGDDGALEDIRTEFDRELDLGSLNPGKQLFEKMISGLYLGELVRLILLKMAKAGLLFGGEKSSALHTKGKIETRHVAAMEKYKEGLANTREILVDLGLEPSEADCIAVQHVCTIVSFRSANLCAAALAAILTRLRENKKVERLRTTVGMDGTLYKIHPQYPKRLHKVVRKLVPSCDVRFLLSESGSTKGAAMVTAVASRVQAQRKQIDRVLALFQLTREQLVDVQAKMRAELEYGLKKKSHGLATVRMLPTYVCGLPDGTEKGKFLALDLGGTNFRVLLVKIRSGRRSVRMYNKIFAIPLEIMQGTGEELFDHIVQCIADFLDYMGLKGASLPLGFTFSFPCRQMSIDKGTLIGWTKGFKATDCEGEDVVDMLREAIKRRNEFDLDIVAVVNDTVGTMMTCGYEDPNCEIGLIAGTGSNMCYMEDMRNIEMVEGGEGKMCINTEWGGFGDNGCIDDIWTRYDTEVDEGSLNPGKQRYEKMTSGMYLGEIVRQILIDLTKQGLLFRGQISERLRTRGIFETKFLSQIERMLSVIDAYCLDLLFH

SEQ ID NO: 23687 - protein, 736 aa, Homo sapiens
MFAVHLMAFYFSKLKEDQIKKVDRFLYHMRLSDDTLLDIMRRFRAEMEKGLAKDTNPTAAVKMLPTFVRAIPDGSENGEFLSLDLGGSKFRVLKVQVAEEGKRHVQMESQFYPTPNEIIRGNGTELFEYVADCLADFMKTKDLKHKKLPLGLTFSFPCRQTKLEEGVLLSWTKKFKARGVQDTDVVSRLTKAMRRHKDMDVDILALVNDTVGTMMTCAYDDPYCEVGVIIGTGTNACYMEDMSNIDLVEGDEGRMCINTEWGAFGDDGALEDIRTEFDRELDLGSLNPGKQLFEKMISGLYLGELVRLILLKMAKAGLLFGGEKSSALHTKGKIETRHVAAMEKYKEGLANTREILVDLGLEPSEADCIAVQHVCTIVSFRSANLCAAALAAILTRLRENKKVERLRTTVGMDGTLYKIHPQYPKRLHKVVRKLVPSCDVRFLLSESGSTKGAAMVTAVASRVQAQRKQIDRVLALFQLTREQLVDVQAKMRAELEYGLKKKSHGLATVRMLPTYVCGLPDGTEKGKFLALDLGGTNFRVLLVKIRSGRRSVRMYNKIFAIPLEIMQGTGEELFDHIVQCIADFLDYMGLKGASLPLGFTFSFPCRQMSIDKGTLIGWTKGFKATDCEGEDVVDMLREAIKRRNEFDLDIVAVVNDTVGTMMTCGYEDPNCEIGLIAGTGSNMCYMEDMRNIEMVEGGEGKMCICFSFCLWFVLQVLIVVLRIVRYRKSSKLIKKF

SEQ ID NO: 23688 - protein, 539 aa, Homo sapiens
MAESPGCCSVWARCLHCLYSCHWRKCPRERMQTSKCDCIWFGLLFLTFLLSLSWLYIGLVLLNDLHNFNEFLFRRWGHWMDWSLAFLLVISLLVTYASLLLVLALLLRLCRQPLHLHSLHKVLLLLIMLLVAAGLVGLDIQWQQEWHSLRVSLQATAPFLHIGAAAGIALLAWPVADTFYRIHRRGPKILLLLLFFGVVLVIYLAPLCISSPCIMEPRDLPPKPGLVGHRGAPMLAPENTLMSLRKTAECGATVFETDVMVSSDGVPFLMHDEHLSRTTNVASVFPTRITAHSSDFSWTELKRLNAGSWFLERRPFWGAKPLAGPDQKEAESQTVPALEELLEEAAALNLSIMFDLRRPPQNHTYYDTFVIQTLETVLNARVPQAMVFWLPDEDRANVQRRAPGMRQIYGRQGGNRTERPQFLNLPYQDLPLLDIKALHKDNVSVNLFVVNKPWLFSLLWCAGVDSVTTNDCQLLQQMRYPIWLITPQTYLIIWVITNCVSTMLLLWTFLLQRRFVKKRGKTGLETAVLLTRINNFMME

SEQ ID NO: 23689 - protein, 460 aa, Homo sapiens
MDWSLAFLLVISLLVTYASLLLVLALLLRLCRQPLHLHSLHKVLLLLIMLLVAAGLVGLDIQWQQEWHSLRVSLQATAPFLHIGAAAGIALLAWPVADTFYRIHRRGPKILLLLLFFGVVLVIYLAPLCISSPCIMEPRDLPPKPGLVGHRGAPMLAPENTLMSLRKTAECGATVFETDVMVSSDGVPFLMHDEHLSRTTNVASVFPTRITAHSSDFSWTELKRLNAGSWFLERRPFWGAKPLAGPDQKEAESQTVPALEELLEEAAALNLSIMFDLRRPPQNHTYYDTFVIQTLETVLNARVPQAMVFWLPDEDRANVQRRAPGMRQIYGRQGGNRTERPQFLNLPYQDLPLLDIKALHKDNVSVNLFVVNKPWLFSLLWCAGVDSVTTNDCQLLQQMRYPIWLITPQTYLIIWVITNCVSTMLLLWTFLLQRRFVKKRGKTGLETAVLLTRINNFMME

SEQ ID NO: 23690 - protein, 590 aa, Homo sapiens
MAESPGCCSVWARCLHCLYSCHWRKCPRERMQTSKCDCIWFGLLFLTFLLSLSWLYIGLVLLNDLHNFNEFLFRRWGHWMDWSLAFLLVISLLVTYASLLLVLALLLRLCRQPLHLHSLHKVLLLLIMLLVAAGLVGLDIQWQQEWHSLRVSLQATAPFLHIGAAAGIALLAWPVADTFYRIHRRGPKILLLLLFFGVVLVIYLAPLCISSPCIMEPRDLPPKPGLVGHRGAPMLAPENTLMSLRKTAECGATVFETDVMVSSDGVPFLMHDEHLSRTTNVASVFPTRITAHSSDFSWTELKRLNAGSWFLERRPFWGAKPLAGPDQKEAESQTVPALEELLEEAAALNLSIMFDLRRPPQNHTYYDTFVIQTLETVLNARVPQAMVFWLPDEDRANVQRRAPGMRQIYGRQGGNRTERPQFLNLPYQDLPLLDIKDRFLLPAQAGLKLLASSNLPASASQSAGITGLSHCPPQPPGYKHELSHLAMALHKDNVSVNLFVVNKPWLFSLLWCAGVDSVTTNDCQLLQQMRYPIWLITPQTYLIIWVITNCVSTMLLLWTFLLQRRFVKKRGKTGLETAVLLTRINNFMME

SEQ ID NO: 23691 - protein, 999 aa, Homo sapiens
MADKVRRQRPRRRVCWALVAVLLADLLALSDTLAVMSVDLGSESMKVAIVKPGVPMEIVLNKESRRKTPVIVTLKENERFFGDSAASMAIKNPKATLRYFQHLLGKQADNPHVALYQARFPEHELTFDPQRQTVHFQISSQLQFSPEEVLGMVLNYSRSLAEDFAEQPIKDAVITVPVFFNQAERRAVLQAARMAGLKVLQLINDNTATALSYGVFRRKDINTTAQNIMFYDMGSGSTVCTIVTYQMVKTKEAGMQPQLQIRGVGFDRTLGGLEMELRLRERLAGLFNEQRKGQRAKDVRENPRAMAKLLREANRLKTVLSANADHMAQIEGLMDDVDFKAKVTRVEFEELCADLFERVPGPVQQALQSAEMSLDEIEQVILVGGATRVPRVQEVLLKAVGKEELGKNINADEAAAMGAVYQAAALSKAFKVKPFVVRDAVVYPILVEFTREVEEEPGIHSLKHNKRVLFSRMGPYPQRKVITFNRYSHDFNFHINYGDLGFLGPEDLRVFGSQNLTTVKLKGVGDSFKKYPDYESKGIKAHFNLDESGVLSLDRVESVFETLVEDSAEEESTLTKLGNTISSLFGGGTTPDAKENGTDTVQEEEESPAEGSKDEPGEQVELKEEAEAPVEDGSQPPPPEPKGDATPEGEKATEKENGDKSEAQKPSEKAEAGPEGVAPAPEGEKKQKPARKRRMVEEIGVELVVLDLPDLPEDKLAQSVQKLQDLTLRDLEKQEREKAANSLEAFIFETQDKLYQPEYQEVSTEEQREEISGKLSAASTWLEDEGVGATTVMLKEKLAELRKLCQGLFFRVEERKKWPERLSALDNLLNHSSMFLKGARLIPEMDQIFTEVEMTTLEKVINETWAWKNATLAEQAKLPATEKPVLLSKDIEAKMMALDREVQYLLNKAKFTKPRPRPKDKNGTRAEPPLNASASDQGEKVIPPAGQTEDAEPISEPEKVETGSEPGDTEPLELGGPGAEPEQKEQSTGQKRPLKNDEL

SEQ ID NO: 23692 - protein, 559 aa, Homo sapiens
MAIKNPKATLRYFQHLLGKQADNPHVALYQARFPEHELTFDPQRQTVHFQISSQLQFSPEEVLGMVLNYSRSLAEDFAEQPIKDAVITVPVFFNQAERRAVLQAARMAGLKVLQLINDNTATALSYGVFRRKDINTTAQNIMFYDMGSGSTVCTIVTYQMVKTKEAGMQPQLQIRGVGFDRTLGGLEMELRLRERLAGLFNEQRKGQRAKDVRENPRAMAKLLREANRLKTVLSANADHMAQIEGLMDDVDFKAKVTRVEFEELCADLFERVPGPVQQALQSAEMSLDEIEQVILVGGATRVPRVQEVLLKAVGKEELGKNINADEAAAMGAVYQAAALSKAFKVKPFVVRDAVVYPILVEFTREVEEEPGIHSLKHNKRVLFSRMGPYPQRKVITFNRYSHDFNFHINYGDLGFLGPEDLRVFGSQNLTTVKLKGVGDSFKKYPDYESKGIKAHFNLDESGVLSLDRVESVFETLVEDSAEEESTLTKLGNTISSLFGGGTTPDAKENGTDTVQMLFLCPARLPQSKQAIDRFHTAVTCMEPPWGRRCRARPAWRLCS

SEQ ID NO: 23693 - protein, 188 aa, Homo sapiens
MAFPGQSDTKMQWPEVPALPLLSSLCMAMVRKSSALGKEVGRRSEGNGDAGGPFPAVKFPIKDIQFSESGEGTRFLHGARLSPLSRNIKARLLLYVRASPLFYESRITLKKPSNRHEVKRNRCNRKTAKQMLMTTLFNELEPTRKYGITEDCTSLNRVLFSANRKCLHKSLYKKDCFKAAPFSMFSFR

SEQ ID NO: 23694 - protein, 345 aa, Homo sapiens
MLAARLVCLRTLPSRVFHPAFTKASPVVKNSITKNQWLLTPSREYATKTRIGIRRGRTGQELKEAALEPSMEKIFKIDQMGRWFVAGGAAVGLGALCYYGLGLSNEIGAIEKAVIWPQYVKDRIHSTYMYLAGSIGLTALSAIAISRTPVLMNFMMRGSWVTIGVTFAAMVGAGMLVRSIPYDQSPGPKHLAWLLHSGVMGAVVAPLTILGGPLLIRAAWYTAGIVGGLSTVAMCAPSEKFLNMGAPLGVGLGLVFVSSLGSMFLPPTTVAGATLYSVAMYGGLVLFSMFLLYDTQKVIKRAEVSPMYGVQKYDPINSMLSIYMDTLNIFMRVATMLATGGNRKK

SEQ ID NO: 23695 - protein, 371 aa, Homo sapiens
MSFRKVNIIILVLAVALFLLVLHHNFLSLSSLLRNEVTDSGIVGPQPIDFVPNALRHAVDGRQEEIPVVIAASEDRLGGAIAAINSIQHNTRSNVIFYIVTLNNTADHLRSWLNSDSLKSIRYKIVNFDPKLLEGKVKEDPDQGESMKPLTFARFYLPILVPSAKKAIYMDDDVIVQGDILALYNTALKPGHAAAFSEDCDSASTKVVIRGAGNQYNYIGYLDYKKERIRKLSMKASTCSFNPGVFVANLTEWKRQNITNQLEKWMKLNVEEGLYSRTLAGSITTPPLLIVFYQQHSTIDPMWNVRHLGSSAGKRYSPQFVKAAKLLHWNGHLKPWGRTASYTDVWEKWYIPDPTGKFNLIRRYTEISNIK

SEQ ID NO: 23696 - protein, 259 aa, Homo sapiens
MSFRKVNIIILVLAVALFLLVLHHNFLSLSSLLRNEVTDSGIVGPQPIDFVPNALRHAVDGRQEEIPVVIAASEDRLGGAIAAINSIQHNTRSNVIFYIVTLNNTADHLRSWLNSDSLKSIRYKIVNFDPKLLEGKVKEDPDQGESMKPLTFARFYLPILVPSAKKAIYMDDDVIVQGDILALYNTALKPGHAAAFSEDCDSASTKVVIRGAGNQVNCLPNTPLPTILFNGKRLQIQGTLLLQFTLPNHFIPNLKPAFL

SEQ ID NO: 23697 - protein, 300 aa, Homo sapiens [sequence omitted]

SEQ ID NO: 23698 - protein, 246 aa, Homo sapiens
MLHNASLLIDDIEDNSKLRRGFPVAHSIYGIPSVINSANYVYFLGLEKVLTLDHPDAVKLFTRQLLELHQGQGLDIYWRDNYTCPTEEEYKAMVLQKTGGLFGLAVGLMQLFSDYKEDLKPLLNTLGLFFQIRDDYANLHSKEYSENKSFCEDLTEGKFSFPTIHAIWSRPESTQVQNILRQRTENIDIKKYCVHYLEDVGSFEYTRNTLKELEAKAYKQIDARGGNPELVALVKHLSKMFKEENE

SEQ ID NO: 23699 - protein, 377 aa, Homo sapiens
ASTKGPSVFPLAPCSRSTSGGTAALGCLVKDYFPEPVTVSWNSGALTSGVHTFPAVLQSSGLYSLSSVVTVPSSSLGTQTYTCNVNHKPSNTKVDKRVELKTPLGDTTHTCPRCPEPKSCDTPPPCPRCPEPKSCDTPPPCPRCPEPKSCDTPPPCPRCPAPELLGGPSVFLFPPKPKDTLMISRTPEVTCVVVDVSHEDPEVQFKWYVDGVEVHNAKTKPREEQYNSTFRVVSVLTVLHQDWLNGKEYKCKVSNKALPAPIEKTISKTKGQPREPQVYTLPPSREEMTKNQVSLTCLVKGFYPSDIAVEWESSGQPENNYNTTPPMLDSDGSFFLYSKLTVDKSRWQQGNIFSCSVMHEALHNRFTQKSLSLSPGK

SEQ ID NO: 23700 - protein, 620 aa, Homo sapiens
MAEARTSLSAHCRGPLATGLHPDLDLPGRSLATPAPSCYLLGSEPSSGLGLQPETHLPEGSLKRCCVLGLPPTSPASSSPCASSDVTSIIRSSQTSLVTCVNGLRSPPLTGDLGGPSKRARPGPASTDSHEGSLQLEACRKASFLKQEPADEFSELFGPHQQGLPPPYPLSQLPPGPSLGGLGLGLAGRVVAGRQACRWVDCCAAYEQQEELVRHIEKSHIDQRKGEDFTCFWAGCVRRYKPFNARYKLLIHMRVHSGEKPNKCMFEGCSKAFSRLENLKIHLRSHTGEKPYLCQHPGCQKAFSNSSDRAKHQRTHLDTKPYACQIPGCSKRYTDPSSLRKHVKAHSAKEQQVRKKLHAGPDTEADVLTECLVLQQLHTSTQLAASDGKGGCGLGQELLPGVYPGSITPHNGLASGLLPPAHDVPSRHHPLDATTSSHHHLSPLPMAESTRDGLGPGLLSPIVSPLKGLGPPPLPPSSQSHSPGGQPFPTLPSKPSYPPFQSPPPPPLPSPQGYQGSFHSIQSCFPYGDCYRMAEPAAGGDGLVGETHGFNPLRPNGYHSLSTPLPATGYEALAEASCPTALPQQPSEDVVSSGPEDCGFFPNGAFDHCLGHIPSIYTDT

SEQ ID NO: 23701 - protein, 214 aa, Homo sapiens
MRPKTGQVGCETPEELGPGPRQRWPLLLLGLAMVAHGLLRPMVAPQSGDPDPGASVGSSRSSLRSLWGRLLLQPSPQRADPRCWPRGFWSEPQSLCYVFGTGTKVTVLGQPKANPTVTLFPPSSEELQANKATLVCLISDFYPGAVTVAWKADGSPVKAGVETTKPSKQSNNKYAASSYLSLTPEQWKSHRSYSCQVTHEGSTVEKTVAPTECS

SEQ ID NO: 23702 - protein, 84 aa, Homo sapiens
MRPKTGQVGCETPEELGPGPRQRWPLLLLGLAMVAHGLLRPMVAPQSGDPDPGASVGSSRSSLRSLWGRSAQGQPHCHSVPALL

SEQ ID NO: 23703 - protein, 117 aa, Homo sapiens
MSEKKNCKNSSTNNNQTQDPSRNELQVPRSFVDRVVQDERDVQSQSSSTINTLLTLLDCLADYIMERVGLEASNNGSMRNTSQDREREVDNNREPHSAESDVTRFLFDEMPKSRKND

SEQ ID NO: 23704 - protein, 1508 aa, Homo sapiens
MGQEPRTLPPSPNWYCARCSDAVPGGLFGFAARTSVFLVRVGPGAGESPGTPPFRVIGELVGHTERVSGFTFSHHPGQYNLCATSSDDGTVKIWDVETKTVVTEHALHQHTISTLHWSPRVKDLIVSGDEKGVVFCYWFNRNDSQHLFIEPRTIFCLTCSPHHEDLVAIGYKDGIVVIIDISKKGEVIHRLRGHDDEIHSIAWCPLPGEDCLSINQEETSEEAEITNGNAVAQAPVTKGCYLATGSKDQTIRIWSCSRGRGVMILKLPFLKRRGGGIDPTVKERLWLTLHWPSNQPTQLVSSCFGGELLQWDLTQSWRRKYTLFSASSEGQNHSRIVFNLCPLQTEDDKQLLLSTSMDRDVKCWDIATLECSWTLPSLGGFAYSLAFSSVDIGSLAIGVGDGMIRVWNTLSIKNNYDVKNFWQGVKSKVTALCWHPTKEGCLAFGTDDGKVGLYDTYSNKPPQISSTYHKKTVYTLAWGPPVPPMSLGGEGDRPSLALYSCGGEGIVLQHNPWKLSGEAFDINKLIRDTNSIKYKLPVHTEISWKADGKIMALGNEDGSIEIFQIPNLKLICTIQQHHKLVNTISWHHEHGSQPELSYLMASGSNNAVIYVHNLKTVIESSPESPVTITEPYRTLSGHTAKITSVAWSPHHDGRLVSASYDGTAQVWDALREEPLCNFRGHRGRLLCVAWSPLDPDCIYSGADDFCVHKWLTSMQDHSRPPQGKKSIELEKKRLSQPKAKPKKKKKPTLRTPVKLESIDGNEEESMKENSGPVENGVSDQEGEEQAREPELPCGLAPAVSREPVICTPVSSGFEKSKVTINNKVILLKKEPPKEKPETLIKKRKARSLLPLSTSLDHRSKEELHQDCLVLATAKHSRELNEDVSADVEERFHLGLFTDRATLYRMIDIEGKGHLENGHPELFHQLMLWKGDLKGVLQTAAERGELTDNLVAMAPAAGYHVWLWAVEAFAKQLCFQDQYVKAASHLLSIHKVYEAVELLKSNHFYREAIAIAKARLRPEDPVLKDLYLSWGTVLERDGHYAVAAKCYLGATCAYDAAKVLAKKGDAASLRTAAELAAIVGEDELSASLALRCAQELLLANNWVGAQEALQLHESLQGQRLVFCLLELLSRHLEEKQLSEGKSSSSYHTWNTGTEGPFVERVTAVWKSIFSLDTPEQYQEAFQKLQNIKYPSATNNTPAKQLLLHICHDLTLAVLSQQMASWDEAVQALLRAVVRSYDSGSFTIMQEVYSAFLPDGCDHLRDKLGDHQSPATPAFKSLEAFFLYGRLYEFWWSLSRPCPNSSVWVRAGHRTLSVEPSQQLDTASTEETDPETSQPEPNRPSELDLRLTEEGERMLSTFKELFSEKHASLQNSQRTVAEVQETLAEMIRQHQKSQLCKSTANGPDKNEPEVEAEQPLCSSQSQCKEEKNEPLSLPELTKRLTEANQRMAKFPESIKAWPFPDVLECCLVLLLIRSHFPGCLAQEMQQQAQELLQKYGNTKTYRRHCQTFCM

SEQ ID NO: 23705 - protein, 250 aa, Homo sapiens
MIQSSQPMSLKLTCSAFRLQRALRFLLGRLPWRVASGARRFRRWLNRYSYTVLSSWPERALISLKNRSRFLVRPNTRNRAFSWTCRAARSKPRPRRSTALPRSQASSSRHSWAEFLKFRKSFQMSNTSQPDPSRPGTERTSSKEAGCRPLGQLDSFSWAARPPPGAAGLAVSEGFFRKIRSSAPSSPSFSRALMSNTYLCFLTTGPRSSRENTQKSFPATSPREPVTSRLRGKAPALSPSRELSFTSAPF

SEQ ID NO: 23706 - protein, 315 aa, Homo sapiens
MPGLSCRFYQHKFPEVEDVVMVNVRSIAEMGAYVSLLEYNNIEGMILLSELSRRRIRSINKLIRIGRNECVVVIRVDKEKGYIDLSKRRVSPEEAIKCEDKFTKSKTVYSILRHVAEVLEYTKDEQLESLFQRTAWVFDDKYKRPGYGAYDAFKHAVSDPSILDSLDLNEDEREVLINNINRRLTPQAVKIRADIEVACYGYEGIDAVKEALRAGLNCSTENMPIKINLIAPPRYVMTTTTLERTEGLSVLSQAMAVIKEKIEEKRGVFNVQMEPKVVTDTDETELARQMERLERENAEVDGDDDAEEMEAKAED

SEQ ID NO: 23707 - protein, 242 aa, Homo sapiens
MAAVKASTSKATRPWYSHPVYARYWQHYHQAMAWMQSHHNAYRKAVESCFNLPWYLPSALLPQSSYDNEAAYPQSFYDHHVAWQDYPCSSSHFRRSGQHPRYSSRIQASTKEDQALSKEEEMETESDAEVECDLSNMEITEELRQYFAETERHREERRRQQQLDAERLDSYVNADHDLYCNTRRSVEAPTERPGERRQAEMKRLYGDSAAKIQAMEAAVQLSFDKHCDRKQPKYWPVIPLKF

SEQ ID NO: 23708 - protein, 340 aa, Homo sapiens [sequence omitted]

SEQ ID NO: 23709 - protein, 297 aa, Homo sapiens
MGEMEQLRQEAEQLKKQIADARKACADVTLAELVSGLEVVGRVQMRTRRTLRGHLAKIYAMHWATDSKLLVSASQDGKLIVWDSYTTNKVHAIPLRSSWVMTCAYAPSGNFVACGGLDNMCSIYNLKSREGNVKVSRELSAHTGYLSCCRFLDDNNIVTSSGDTTCALWDIETGQQKTVFVGHTGDCMSLAVSPDFNLFISGACDASAKLWDVREGTCRQTFTGHESDINAICFFSLSGRLLFAGYDDFNCNVWDSMKSERVGILSGHDNRVSCLGVTADGMAVATGSWDSFLKIWN

SEQ ID NO: 23710 - protein, 372 aa, Homo sapiens
MPPPQQGPCGHHLLLLLALLLPSLPLTRAPVPPGPAAALLQALGLRDEPQGAPRLRPVPPVMWRLFRRRDPQETRSGSRRTSPGVTLQPCHVEELGVAGNIVRHIPDRGAPTRASEPASAAGHCPEWTVVFDLSAVEPAERPSRARLELRFAAAAAAAPEGGWELSVAQAGQGAGADPGPVLLRQLVPALGPPVRAELLGAAWARNASWPRSLRLALALRPRAPAACARLAEASLLLVTLDPRLCHPLARPRRDAEPVLGGGPGGACRARRLYVSFREVGWHRWVIAPRGFLANYCQGQCALPVALSGSGGPPALNHAVLRALMHAAAPGAADLPCCVPARLSPISVLFFDNSDNVVLRQYEDMVVDECGCR

SEQ ID NO: 23711 - protein, 278 aa, Homo sapiens
MAALFLKRLTLQTVKSENSCIRCFGKHILQKTAPAQLSPIASAPRLSFLIHAKAFSTAEDTQNEGKKTKKNKTAFSNVGRKISQRVIHLFDEKGNDLGNMHRANVIRLMDERDLRLVQRNTSTEPAEYQLMTGLQILQERQRLREMEKANPKTGPTLRKELILSSNIGQHDLDTKTKQIQQWIKKKHLVQITIKKGKNVDVSENEMEEIFHQILQTMPGIATFSSRPQAVQGGKALMCVLRAFSKNEEKAYKETQETQERDTLNKDHGNDKESNVLHQ

SEQ ID NO: 23712 - protein, 292 aa, Homo sapiens
MEEEEYEQIPQENPPEELSQDPVLELSGGLREKEQKTPRRLRLILMGKTGSGKSATGNSILGRDVFESKLSTRPVTKTSQRRSREWAGKELEVIDTPNILSPQVSPEVADAICQAIVLSAPGPHAVLLVTQLGRFTDEDQQVVRRLQEVFGVGVLGHTILVFTRKEDLAGGSLEDYVRETNNQALAWLDVTLARRHCGFNNRAQGEEQEAQLRELMEKVEAIMWENEGDYYSNKAYQYTQQNFRLKELQERQVSQGQGSEDVPGEESWLEGLSQIQKESEEAHRCLLGKADL

SEQ ID NO: 23713 - protein, 212 aa, Homo sapiens
MNKFPRRIPQKSCPRILCWSCQEVSPEVADAICQAIVLSAPGPHAVLLVTQLGRFTDEDQQVVRRLQEVFGVGVLGHTILVFTRKEDLAGGSLEDYVRETNNQALAWLDVTLARRHCGFNNRAQGEEQEAQLRELMEKVEAIMWENEGDYYSNKAYQYTQQNFRLKELQERQVSQGQGSEDVPGEESWLEGLSQIQKESEEAHRCLLGKADL

SEQ ID NO: 23714 - protein, 62 aa, Homo sapiens
MEEEEYEQIPQENPPEELSQDPVLELSGGLARGGRRYLPSHRLIRPRAPRRAPGDTTGPVHG

SEQ ID NO: 23715 - protein, 447 aa, Homo sapiens [sequence omitted]

SEQ ID NO: 23716 - protein, 68 aa, Homo sapiens
MSGSSSVAAMKKVVQQLRLEAGLNRVKVSQAAADLKQFCLQNAQHDPLLTGVSSSTNPFRPQKVCSFL

SEQ ID NO: 23717 - protein, 154 aa, Homo sapiens
MADDLDFETGDAGASATFPMQCSALRKNGFVVLKGRPCKIVEMSTSKTGKHGHAKVHLVGIDIFTGKKYEDICPSTHNMDVPNIKRNDFQLIGIQDGYLSLLQDSGEVREDLRLPEGDLGKEIEQKYDCGEEILITVLSAMTEEAAVAIKAMAK

SEQ ID NO: 23718 - protein, 184 aa, Homo sapiens
MCGTGGTDSKTRRPPHRASFLKRLESKPLKMADDLDFETGDAGASATFPMQCSALRKNGFVVLKGRPCKIVEMSTSKTGKHGHAKVHLVGIDIFTGKKYEDICPSTHNMDVPNIKRNDFQLIGIQDGYLSLLQDSGEVREDLRLPEGDLGKEIEQKYDCGEEILITVLSAMTEEAAVAIKAMAK

SEQ ID NO: 23719 - protein, 474 aa, Homo sapiens
MWTVQNRESLGLLSFPVMITMVCCAHSTNEPSNMSYVKETVDRLLKGYDIRLRPDFGGPPVDVGMRIDVASIDMVSEVNMDYTLTMYFQQSWKDKRLSYSGIPLNLTLDNRVADQLWVPDTYFLNDKKSFVHGVTVKNRMIRLHPDGTVLYGLRITTTAACMMDLRRYPLDEQNCTLEIESYGYTTDDIEFYWNGGEGAVTGVNKIELPQFSIVDYKMVSKKVEFTTGAYPRLSLSFRLKRNIGYFILQTYMPSTLITILSWVSFWINYDASAARVALGITTVLTMTTISTHLRETLPKIPYVKAIDIYLMGCFVFVFLALLEYAFVNYIFFGKGPQKKGASKQDQSANEKNKLEMNKVQVDAHGNILLSTLEIRNETSGSEVLTSVSDPKATMYSYDSASIQYRKPLSSREAYGRALDRHGVPSKGRIRRRASQLKVKIPDLTDVNSIDKWSRMFFPITFSLFNVVYWLYYVH

SEQ ID NO: 23720 - protein, 87 aa, Homo sapiens
MWTVQNRESLGLLSFPVMITMVCCAHSTNEPSNMSYVKETVDRLLKGYDIRLRPDFGGLYTHHVFPAVLERQKAFLFWNPTEPHPRQ

SEQ ID NO: 23721 - protein, 440 aa, Homo sapiens
MNYSLHLAFVCLSLFTERMCIQGSQFNVEVGRSDKLSLPGFENLTAGYNKFLRPNFGGEPVQIALTLDIASISSISESNMDYTATIYLRQRWMDQRLVFEGNKSFTLDARLVEFLWVPDTYIVESKKSFLHEVTVGNRLIRLFSNGTVLYALRITTTVACNMDLSKYPMDTQTCKLQLESWGYDGNDVEFTWLRGNDSVRGLEHLRLAQYTIERYFTLVTRSQQETGNYTRLVLQFELRRNVLYFILETYVPSTFLVVLSWVSFWISLDSVPARTCIGVTTVLSMTTLMIGSRTSLPNTNCFIKAIDVYLGICFSFVFGALLEYAVAHYSSLQQMAAKDRGTTKEVEEVSITNIINSSISSFKRKISFASIEISSDNVDYSDLTMKTSDKFKFVFREKMGRIVDYFTIQNPSNVDHYSKLLFPLIFMLANVFYWAYYMYF

SEQ ID NO: 23722 - protein, 410 aa, Homo sapiens
MSARKGYLLPSPNYPTTMSCSESPAANSFLVDSLISSGRGEAGGGGGGAGGGGGGGYYAHGGVYLPPAADLPYGLQSCGLFPTLGGKRNEAASPGSGGGGGGLGPGAHGYGPSPIDLWLDAPRSCRMEPPDGPPPPPQQQPPPPPQPPQPAPQATSCSFAQNIKEESSYCLYDSADKCPKVSATAAELAPFPRGPPPDGCALGTSSGVPVPGYFRLSQAYGTAKGYGSGGGGAQQLGAGPFPAQPPGRGFDLPPALASGSADAARKERALDSPPPPTLACGSGGGSQGDEEAHASSSAAEELSPAPSESSKASPEKDSLGNSKGENAANWLTAKSGRKKRCPYTKHQTLELEKEFLFNMYLTRERRLEISRSVHLTDRQVKIWFQNRRMKLKKMNRENRIRELTANFNFS

SEQ ID NO: 23723 - protein, 94 aa, Homo sapiens
MCQGNSKGENAANWLTAKSGRKKRCPYTKHQTLELEKEFLFNMYLTRERRLEISRSVHLTDRQVKIWFQNRRMKLKKMNRENRIRELTANFNFS

SEQ ID NO: 23724 - protein, 443 aa, Homo sapiens
MQKATYYDSSAIYGGYPYQAANGFAYNANQQPYPASAALGADGEYHRPACSLQSPSSAGGHPKAHELSEACLRTLSAPPSQPPSLGEPPLHPPPPQAAPPAPQPPQPAPQPPAPTPAAPPPPSSASPPQNASNNPTPANAAKSPLLNSPTVAKQIFPWMKESRQNTKQKTSSSSSGESCAGDKSPPGQASSKRARTAYTSAQLVELEKEFHFNRYLCRPRRVEMANLLNLTERQIKIWFQNRRMKYKKDQKGKGMLTSSGGQSPSRSPVPPGAGGYLNSMHSLVNSVPYEPQSPPPFSKPPQGTYGLPPASYPASLPSCAPPPPPQKRYTAAGAGAGGTPDYDPHAHGLQGNGSYGTPHIQGSPVFVGGSYVEPMSNSGPALFGLTHLPHAASGAMDYGGAGPLGSGHHHGPGPGEPHPTYTDLTGHHPSQGRIQEAPKLTHL

SEQ ID NO: 23725 - protein, 1684 aa, Homo sapiens
MEDLVQDGVASPATPGTGKSKLETLPKEDLIKFAKKQMMLIQKAKSRCTELEKEIEELRSKPVTEGTGDIIKALTERLDALLLEKAETEQQCLSLKKENIKMKQEVEDSVTKMGDAHKELEQSHINYVKEIENLKNELMAVRSKYSEDKANLQKQLEEAMNTQLELSEQLKFQNNSEDNVKKLQEEIEKIRPGFEEQILYLQKQLDATTDEKKETVTQLQNIIEANSQHYQKNINSLQEELLQLKAIHQEEVKELMCQIEASAKEHEAEINKLNELKENLVKQCEASEKNIQKKYECELENLRKATSNANQDNQICSILLQENTFVEQVVNEKVKHLEDTLKELESQHSILKDEVTYMNNLKLKLEMDAQHIKDEFFHEREDLEFKINELLLAKEEQGCVIEKLKSELAGLNKQFCYTVEQHNREVQSLKEQHQKEISELNETFLSDSEKEKLTLMFEIQGLKEQCENLQQEKQEAILNYESLREIMEILQTELGESAGKISQEFESMKQQQASDVHELQQKLRTAFTEKDALLETVNRLQGENEKLLSQQELVPELENTIKNLQEKNGVYLLSLSQRDTMLKELEGKINSLTEEKDDFINKLKNSHEEMDNFHKKCEREERLILELGKKVEQTIQYNSELEQKVNELTGGLEETLKEKDQNDQKLEKLMVQMKVLSEDKEVLSAEVKSLYEENNKLSSEKKQLSRDLEVFLSQKEDVILKEHITQLEKKLQLMVEEQDNLNKLLENEQVQKLFVKTQLYGFLKEMGSEVSEDSEEKDVVNVLQAVGESLAKINEEKCNLAFQRDEKVLELEKEIKCLQEESVVQCEELKSLLRDYEQEKVLLRKELEEIQSEKEALQSDLLEMKNANEKTRLENQNLLIQVEEVSQTCSKSEIHNEKEKCFIKEHENLKPLLEQKELRDRRAELILLKDSLAKSPSVKNDPLSSVKELEEKIENLEKECKEKEEKINKIKLVAVKAKKELDSSRKETQTVKEELESLRSEKDQLSASMRDLIQGAESYKNLLLEYEKQSEQLDVEKERANNFEHRIEDLTRQLRNSTLQCETINSDNEDLLARIETLQSNAKLLEVQILEVQRAKAMVDKELEAEKLQKEQKIKEHATTVNELEELQVQLQKQKKQLQKTMQELELVKKDAQQTTLMNMEIADYERLMKELNQKLTNKNNKIEDLEQEIKIQKQKQETLQEEITSLQSSVQQYEEKNTKIKQLLVKTKKELADSKQAETDHLILQASLKGELEASQQQVEVYKIQLAEITSEKHKIHEHLKTSAEQHQRTLSAYQQRVTALQEECRAAKAEQATVTSEFESYKVRVHNVLKQQKNKSMSQAETEGAKQEREHLEMLIDQLKIKLQDSQNNLQINVSELQTLQSEHDTLLERHNKMLQETVSKEAELREKLCSIQSENMMMKSEHTQTVSQLTSQNEVLRNSFRDQVRHLQEEHRKTVETLQQQLSKMEAQLFQLKNEPTTRSPVSSQQSLKNLRERRNTDLPLLDMHTVTREEGEGMETTDTESVSSASTYTQSLEQLLNSPETKLEPPLWHAEFTKEELVQKLSSTTKSADHLNGLLRETEATNAILMEQIKLLKSEIRRLERNQEREKSAANLEYLKNVLLQFIFLKPGSERERLLPVINTMLQLSPEEKGKLAAVAQGEEENASRSSGWASYLHSWSGLR

SEQ ID NO: 23726 - protein, 45 aa, Homo sapiens
MEDLVQDGVASPATPGTGKSKNWRKKLKNSDQNLLLKELVILLRH

SEQ ID NO: 23727 - protein, 479 aa, Homo sapiens
MLAVPNMRFGIFLLWWGWVLATESRMHWPGREVHEMSKKGRPQRQRREVHEDAHKQVSPILRRSPDITKSPLTKSEQLLRIDDHDFSMRPGFGGPAIPVGVDVQVESLDSISEVDMDFTMTLYLRHYWKDERLSFPSTNNLSMTFDGRLVKKIWVPDMFFVHSKRSFIHDTTTDNVMLRVQPDGKVLYSLRVTVTAMCNMDFSRFPLDTQTCSLEIESYAYTEDDLMLYWKKGNDSLKTDERISLSQFLIQEFHTTTKLAFYSSTGWYNRLYINFTLRRHIFFFLLQTYFPATLMVMLSWVSFWIDRRAVPARVPLGITTVLTMSTIITGVNASMPRVSYIKAVDIYLWVSFVFVFLSVLEYAAVNYLTTVQERKEQKLREKLPCTSGLPPPRTAMLDGNYSDGEVNDLDNYMPENGEKPDRMMVQLTLASERSSPQRKSQRSSYVSMRIDTHAIDKYSRIIFPAAYILFNLIYWSIFS

SEQ ID NO: 23728 - protein, 462 aa, Homo sapiens
MLAVPNMRFGIFLLWWGWVLATESRMHWPGREVHEMSKKGSPILRRSPDITKSPLTKSEQLLRIDDHDFSMRPGFGGPAIPVGVDVQVESLDSISEVDMDFTMTLYLRHYWKDERLSFPSTNNLSMTFDGRLVKKIWVPDMFFVHSKRSFIHDTTTDNVMLRVQPDGKVLYSLRVTVTAMCNMDFSRFPLDTQTCSLEIESYAYTEDDLMLYWKKGNDSLKTDERISLSQFLIQEFHTTTKLAFYSSTGWYNRLYINFTLRRHIFFFLLQTYFPATLMVMLSWVSFWIDRRAVPARVPLGITTVLTMSTIITGVNASMPRVSYIKAVDIYLWVSFVFVFLSVLEYAAVNYLTTVQERKEQKLREKLPCTSGLPPPRTAMLDGNYSDGEVNDLDNYMPENGEKPDRMMVQLTLASERSSPQRKSQRSSYVSMRIDTHAIDKYSRIIFPAAYILFNLIYWSIFS

SEQ ID NO: 23729 - protein, 392 aa, Homo sapiens
MRPGFGGPAIPVGVDVQVESLDSISEVDMDFTMTLYLRHYWKDERLSFPSTNNLSMTFDGRLVKKIWVPDMFFVHSKRSFIHDTTTDNVMLRVQPDGKVLYSLRVTVTAMCNMDFSRFPLDTQTCSLEIESYAYTEDDLMLYWKKGNDSLKTDERISLSQFLIQEFHTTTKLAFYSSTGWYNRLYINFTLRRHIFFFLLQTYFPATLMVMLSWVSFWIDRRAVPARVPLGITTVLTMSTIITGVNASMPRVSYIKAVDIYLWVSFVFVFLSVLEYAAVNYLTTVQERKEQKLREKLPCTSGLPPPRTAMLDGNYSDGEVNDLDNYMPENGEKPDRMMVQLTLASERSSPQRKSQRSSYVSMRIDTHAIDKYSRIIFPAAYILFNLIYWSIFS

SEQ ID NO: 23730 - protein, 1002 aa, Homo sapiens
MWPQPRLPPRPAMSEETRQSKLAAAKKKLREYQQRNSPGVPTGAKKKKKIKNGSNPETTTSGGCHSPEDTPKDNAATLQPSDDTVLPGGVPSPGASLTSMAASQNHDADNVPNLMDETKTFSSTESLRQLSQQLNGLVCESATCVNGEGPASSANLKDLESRYQQLAVALDSSYVTNKQLNITIEKLKQQNQEITDQLEEEKKECHQKQGALREQLQVHIQTIGILVSEKAELQTALAHTQHAARQKEGESEDLASRLQYSRRRVGELERALSAVSTQQKKADRYNKELTKERDALRLELYKNTQSNEDLKQEKSELEEKLRVLVTEKAGMQLNLEELQKKLEMTELLLQQFSSRCEAPDANQQLQQAMEERAQLEAHLGQVMESVRQLQMERDKYAENLKGESAMWRQRMQQMSEQVHTLREEKECSMSRVQELETSLAELRNQMAEPPPPEPPAGPSEVEQQLQAEAEHLRKELEGLAGQLQAQVQDNEGLSRLNREQEERLLELERAAELWGEQAEARRQILETMQNDRTTISRALSQNRELKEQLAELQSGFVKLTNENMEITSALQSEQHVKRELGKKLGELQEKLSELKETVELKSQEAQSLQQQRDQYLGHLQQYVAAYQQLTSEKEVLHNQLLLQTQLVDQLQQQEAQGKAVAEMARQELQETQERLEAATQQNQQLRAQLSLMAHPGEGDGLDREEEEDEEEEEEEAVAVPQPMPSIPEDLESREAMVAFFNSAVASAEEEQARLRGQLKEQRVRCRRLAHLLASAQKEPEAAAPAPGTGGDSVCGETHRALQGAMEKLQSRFMELMQEKADLKERVEELEHRCIQLSGETDTIGEYIALYQSQRAVLKERHREKEEYISRLAQDKEEMKVKLLELQELVLRLVGDRNEWHGRFLAAAQNPADEPTSGAPAPQELGAANQQGDLCEVSLAGSVEPAQGEAREGSPRDNPTAQQIMQLLREMQNPRERPGLGSNPCIPFFYRADENDEVKITVI

SEQ ID NO: 23731 - protein, 620 aa, Homo sapiens
MESVRQLQMERDKYAENLKGESAMWRQRMQQMSEQVHTLREEKECSMSRVQELETSLAELRNQMAEPPPPEPPAGPSEVEQQLQAEAEHLRKELEGLAGQLQAQVQDNEGLSRLNREQEERLLELERAAELWGEQAEARRQILETMQNDRTTISRALSQNRELKEQLAELQSGFVKLTNENMEITSALQSEQHVKRELGKKLGELQEKLSELKETVELKSQEAQSLQQQRDQYLGHLQQYVAAYQQLTSEKEVLHNQLLLQTQLVDQLQQQEAQGKAVAEMARQELQETQERLEAATQQNQQLRAQLSLMAHPGEGDGLDREEEEDEEEEEEEAVAVPQPMPSIPEDLESREAMVAFFNSAVASAEEEQARLRGQLKEQRVRCRRLAHLLASAQKEPEAAAPAPGTGGDSVCGETHRALQGAMEKLQSRFMELMQEKADLKERVEELEHRCIQLSGETDTIGEYIALYQSQRAVLKERHREKEEYISRLAQDKEEMKVKLLELQELVLRLVGDRNEWHGRFLAAAQNPADEPTSGAPAPQELGAANQQGDLCEVSLAGSVEPAQGEAREGSPRDNPTAQQIMQLLREMQNPRERPGLGSNPCIPFFYRADENDEVKITVI

SEQ ID NO: 23732 - protein, 731 aa, Homo sapiens
MSWFVDLAGKAEDLLNRVDQGAATALSRKDNASNIYSKNTDYTELHQQNTDLIYQTGPKSTYISSAADNIRNQKATILAGTANVKVGSRTPVEASHPVENASVPRPSSHFVRRKKSEPDDELLFDFLNSSQKEPTGRVEIRKEKGKTPVFQSSQTSSVSSVNPSVTTIKTIEENSFGSQTHEAASNSDSSHEGQEESSKENVSSNAACPDHTPTPNDDGKSHELSNLRLENQLLRNEVQSLNQEMASLLQRSKETQEELNKARARVEKWNADHSKSDRMTRGLRAQVDDLTEAVAAKDSQLAVLKVRLQEADQLLSTRTEALEALQSEKSRIMQDQSEGNSLQNQALQTFQERLHEADATLKREQESYKQMQSEFAARLNKVEMERQNLAEAITLAERKYSDEKKRVDELQQQVKLYKLNLESSKQELIDYKQKATRILQSKEKLINSLKEGSGFEGLDSSTASSMELEELRHEKEMQREEIQKLMGQIHQLRSELQDMEAQQVNEAESAREQLQDLHDQIAGQKASKQELETELERLKQEFHYIEEDLYRTKNTLQSRIKDRDEEIQKLRNQLTNKTLSNSSQSELENRLHQLTETLIQKQTMLESLSTEKNSLVFQLERLEQQMNSASGSSSNGSSINMSGIDNGEGTRLRNVPVLFNDTETNLAGMYGKVRKAASSIDQFSIRLGIFLRRYPIARVFVIIYMALLHLWVMIVLLTYTPEMHHDQPYGK

SEQ ID NO: 23733 - protein, 691 aa, Homo sapiens
MSWFVDLAGKAEDLLNRVDQGAATALSRKDNASNIYSKNTDYTELHQQNTDLIYQTGPKSTYISSAADNIRNQKATILAGTANVKVGSRTPVEASHPVENASVPRPSSHFVRRKKSEPDDELLFDFLNSSQKEPTGRVEIRKEKGKTPVFQSSQTSSVSSVNPSVTTIKTIEENSFGSQTHEAASNSDSSHEGQEESSKENVSSNAACPDHTPTPNDDGKSHELSNLRLENQLLRNEVQSLNQEMASLLQRSKETQEELNKARARVEKWNADHSKSDRMTRGLRAQVDDLTEAVAAKDSQLAVLKVRLQEADQLLSTRTEALEALQSEKSRIMQDQSEGNSLQNQALQTFQERLHEADATLKREQESYKQMQSEFAARLNKVEMERQNLAEAITLAERKYSDEKKRVDELQQQVKLYKLNLESSKQELIDYKQKATRILQSKEKLINSLKEGSGFEGLDSSTASSMELEELRHEKEMQREEIQKLMGQIHQLRSELQDMEAQQVNEAESAREQLQDLHDQIAGQKASKQELETELERLKQEFHYIEEDLYRTKNTLQSRIKDRDEEIQKLRNQLTNKTLSNSSQSELENRLHQLTETLIQKQTMLESLSTEKNSLVFQLERLEQQMNSASGSSSNGSSINMSGIDNGEGTRLRNVPVLFNDTETNLAGMYGKVRKAASSIDQFRLCFTSGS

SEQ ID NO: 23734 - protein, 209 aa, Homo sapiens
MGNGKSIAGDQKAVPTQETHVWYRTFMMEYPSGLQTLHEFKTLLGLQGLNQKANKHIDQVYNTFDTNKDGFVDFLEFIAAVNLIMQEKMEQKLKWYFKLYDADGNGSIDKNELLDMFMAVQALNGQQTLSPEEFINLVFHKIDINNDGELTLEEFINGMAKDQDLLEIVYKSFDFSNVLRVICNGKQPDMETDSSKSPDKAGLGKVKMK

SEQ ID NO: 23735 - protein, 196 aa, Homo sapiens
MGNGKSIAGDQKAVPTQETHVWYRTFMMEYPSGLQTLHEFKTLLGLQGLNQKANKHIDQVYNTFDTNKDGFVDFLEFIAAVNLIMQEKMEQKLKWYFKLYDADGNGSIDKNELLDMFMAVQALNGQQTLSPEEFINLVFHKIDINNDGNGATLYWITFPTKGIDFRRIYQWHGKRSGSPGDCSQELRLLQCAESNL

SEQ ID NO: 23736 - protein, 147 aa, Homo sapiens
MGHFTEEDKATITSLWGKVNVEDAGGETLGRLLVVYPWTQRFFDSFGNLSSASAIMGNPKVKAHGKKVLTSLGDAIKHLDDLKGTFAQLSELHCDKLHVDPENFKLLGNVLVTVLAIHFGKEFTPEVQASWQKMVTAVASALSSRYH

SEQ ID NO: 23737 - protein, 215 aa, Homo sapiens
MSETVPPAPAASAAPEKPLAGKKAKKPAKAAAASKKKPAGPSVSELIVQAASSSKERGGVSLAALKKALAAAGYDVEKNNSRIKLGIKSLVSKGTLVQTKGTGASGSFKLNKKASSVETKPGASKVATKTKATGASKKLKKATGASKKSVKTPKKAKKPAATRKSSKNPKKPKTVKPKKVAKSPAKAKAVKPKAAKARVTKPKTAKPKKAAPKKK

SEQ ID NO: 23738 - protein, 127 aa, Homo sapiens
MPEVSSKGATISKKGFKKAVVKTQKKEGKKRKRTRKESYSIYIYKVLKQVHPDTGISSKAMSIMNSFVTDIFERIASEASRLAHYSKRSTISSREIQTAVRLLLPGELAKHAVSEGTKAVTKYTSSK

SEQ ID NO: 23739 - protein, 136 aa, Homo sapiens
MQSDIYHPGHSFPSWVLCWVHSCGHEGHLRETAEIRKTHQNGDLQIRGGRGRRESTEIFQVASVTEGEESPPAICMEVFLFLWFIAPIYACVCRIFKIQVRNTVKNSSTASLAPSISTSEERQIRIERHHYHLYGQ

SEQ ID NO: 23740 - protein, 126 aa, Homo sapiens
MPDPAKSAPAPKKGSKKAVTKVQKKDGKKRKRSRKESYSVYVYKVLKQVHPDTGISSKAMGIMNSFVNDIFERIAGEASRLAHYNKRSTITSREIQTAVRLLLPGELAKHAVSEGTKAVTKYTSSK

SEQ ID NO: 23741 - protein, 134 aa, Homo sapiens
MPDPAKSAPAPKKGSKKAVTKVQKKDGKKRKRSRKESYSVYVYKVLKQVHPDTGISSKAMGIMNSFVNDIFERIAGEASRLAHYNKRSTITSREIQTAVRLLLPGELAKHAVSEGTKAVTKYTSSKLIGPILWK

SEQ ID NO: 23742 - protein, 207 aa, Homo sapiens
MSETVPAASASAGVAAMEKLPTKKRGRKPAGLISASRKVPNLSVSKLITEALSVSQERVGMSLVALKKALAAAGYDVEKNNSRIKLSLKSLVNKGILVQTRGTGASGSFKLSKKVIPKSTRSKAKKSVSAKTKKLVLSRDSKSPKTAKTNKRAKKPRATTPKTVRSGRKAKGAKGKQQQKSPVKARASKSKLTQHHEVNVRKATSKK

SEQ ID NO: 23743 - protein, 480 aa, Homo sapiens
MSFPQLGYPQYLSAAGPGAYGGERPGVLAAAAAAAAAASSGRPGAAELGGGAGAAAVTSVLGMYAAAGPYAGAPNYSAFLPYAADLSLFSQMGSQYELKDNPGVHPATFAAHTAPAYYPYGQFQYGDPGRPKNATRESTSTLKAWLNEHRKNPYPTKGEKIMLAIITKMTLTQVSTWFANARRRLKKENKVTWGARSKDQEDGALFGSDTEGDPEKAEDDEEIDLESIDIDKIDEHDGDQSNEDDEDKAEAPHAPAAPSALARDQGSPLAAADVLKPQDSPLGLAKEAPEPGSTRLLSPGAAAGGLQGAPHGKPKIWSLAETATSPDGAPKASPPPPAGHPGAHGPSAGAPLQHPAFLPSHGLYTCHIGKFSNWTNSAFLAQGSLLNMRSFLGVGAPHAAPHGPHLPAPPPPQPPVAIAPGALNGDKASVRSSPTLPERDLVPRPDSPAQQLKSPFQPVRDNSLAPQEGTPRILAALPSA

SEQ ID NO: 23744 - protein, 909 aa, Homo sapiens
MERAMEQLNRLTRSLRRARTVELPEDNETAVYTLMPMVMADQHRSVSELLSNSKFDVNYAFGRVKRSLLHIAANCGSVECLVLLLKKGANPNYQDISGCTPLHLAARNGQKKCMSKLLEYSADVNICNNEGLTAIHWLAVNGRTELLHDLVQHVSDVDVEDAMGQTALHVACQNGHKTTVQCLLDSGADINRPNVSGATPLYFACSHGQRDTAQILLLRGAKYLPDKNGVTPLDLCVQGGYGETCEVLIQYHPRLFQTIIQMTQNEDLRENMLRQVLEHLSQQSESQYLKILTSLAEVATTNGHKLLSLSSNYDAQMKSLLRIVRMFCHVFRIGPSSPSNGIDMGYNGNKTPRSQVFKPLELLWHSLDEWLVLIATELMKNKRDSTEITSILLKQKGQDQDAASIPPFEPPGPGSYENLSTGTRESKPDALAGRQEASADCQDVISMTANRLSAVIQAFYMCCSCQMPPGMTSPRFIEFVCKHDEVLKCFVNRNPKIIFDHFHFLLECPELMSRFMHIIKAQPFKDRCEWFYEHLHSGQPDSDMVHRPVNENDILLVHRDSIFRSSCEVVSKANCAKLKQGIAVRFHGEEGMGQGVVREWFDILSNEIVNPDYALFTQSADGTTFQPNSNSYVNPDHLNYFRFAGQILGLALNHRQLVNIYFTRSFYKHILGIPVNYQDVASIDPEYAKNLQWILDNDISDLGLELTFSVETDVFGAMEEVPLKPGGGSILVTQNNKAEYVQLVTELRMTRAIQPQINAFLQGFHMFIPPSLIQLFDEYELELLLSGMPEIDVSDWIKNTEYTSGYEREDPVIQWFWEVVEDITQEERVLLLQFVTGSSRVPHGGFANIMGGSGLQNFTIAAVPYTPNLLPTSSTCINMLKLPEYPSKEILKDRLLVALHCGSYGYTMA

SEQ ID NO: 23745 - protein, 318 aa, Homo sapiens
MGQGVVREWFDILSNEIVNPDYALFTQSADGTTFQPNSNSYVNPDHLNYFRFAGQILGLALNHRQLVNIYFTRSFYKHILGIPVNYQDVASIDPEYAKNLQWILDNDISDLGLELTFSVETDVFGAMEEVPLKPGGGSILVTQNNKAEYVQLVTELRMTRAIQPQINAFLQGFHMFIPPSLIQLFDEYELELLLSGMPEIDVSDWIKNTEYTSGYEREDPVIQWFWEVVEDITQEERVLLLQFVTGSSRVPHGGFANIMGGSGLQNFTIAAVPYTPNLLPTSSTCINMLKLPEYPSKEILKDRLLVALHCGSYGYTMA

SEQ ID NO: 23746 - protein, 562 aa, Homo sapiens
MMFKKHFCFSQPLELLWHSLDEWLVLIATELMKNKRDSTEITSILLKQKGQDQDAASIPPFEPPGPGSYENLSTGTRESKPDALAGRQEASADCQDVISMTANRLSAVIQAFYMCCSCQMPPGMTSPRFIEFVCKHDEVLKCFVNRNPKIIFDHFHFLLECPELMSRFMHIIKAQPFKDRCEWFYEHLHSGQPDSDMVHRPVNENDILLVHRDSIFRSSCEVVSKANCAKLKQGIAVRFHGEEGMGQGVVREWFDILSNEIVNPDYALFTQSADGTTFQPNSNSYVNPDHLNYFRFAGQILGLALNHRQLVNIYFTRSFYKHILGIPVNYQDVASIDPEYAKNLQWILDNDISDLGLELTFSVETDVFGAMEEVPLKPGGGSILVTQNNKAEYVQLVTELRMTRAIQPQINAFLQGFHMFIPPSLIQLFDEYELELLLSGMPEIDVSDWIKNTEYTSGYEREDPVIQWFWEVVEDITQEERVLLLQFVTGSSRVPHGGFANIMGGSGLQNFTIAAVPYTPNLLPTSSTCINMLKLPEYPSKEILKDRLLVALHCGSYGYTMA

SEQ ID NO: 23747 - protein, 694 aa, Homo sapiens
MERAMEQLNRLTRSLRRARTVELPEDNETAVYTLMPMVMADQHRSVSELLSNSKFDVNYAFGRVKRSLLHIAANCGSVECLVLLLKKGANPNYQDISGCTPLHLAARNGQKKCMSKLLEYSADVNICNNEGLTAIHWLAVNGRTELLHDLVQHVSDVDVEDAMGQTALHVACQNGHKTTVQCLLDSGADINRPNVSGATPLYFACSHGQRDTAQILLLRGAKYLPDKNGVTPLDLCVQGGYGETCEVLIQYHPRLFQTIIQMTQNEDLRENMLRQVLEHLSQQSESQYLKILTSLAEVATTNGHKLLSLSSNYDAQMKSLLRIVRMFCHVFRIGPSSPSNGIDMGYNGNKTPRSQVFKPLELLWHSLDEWLVLIATELMKNKRDSTEITSILLKQKGQDQDAASIPPFEPPGPGSYENLSTGTRESKPDALAGRQEASADCQDVISMTANRLSAVIQAFYMCCSCQMPPGMTSPRFIEFVCKHDEVLKCFVNRNPKIIFDHFHFLLECPELMSRFMHIIKAQAEYVQLVTELRMTRAIQPQINAFLQGFHMFIPPSLIQLFDEYELELLLSGMPEIDVSDWIKNTEYTSGYEREDPVIQWFWEVVEDITQEERVLLLQFVTGSSRVPHGGFANIMGGSGLQNFTIAAVPYTPNLLPTSSTCINMLKLPEYPSKEILKDRLLVALHCGSYGYTMA

SEQ ID NO: 23748 - protein, 501 aa, Homo sapiens
MEQQDQSMKEGRLTLVLALATLIAAFGSSFQYGYNVAAVNSPALLMQQFYNETYYGRTGEFMEDFPLTLLWSVTVSMFPFGGFIGSLLVGPLVNKFGRKGALLFNNIFSIVPAILMGCSRVATSFELIIISRLLVGICAGVSSNVVPMYLGELAPKNLRGALGVVPQLFITVGILVAQIFGLRNLLANVDGWPILLGLTGVPAALQLLLLPFFPESPRYLLIQKKDEAAAKKALQTLRGWDSVDREVAEIRQEDEAEKAAGFISVLKLFRMRSLRWQLLSIIVLMGGQQLSGVNAIYYYADQIYLSAGVPEEHVQYVTAGTGAVNVVMTFCAVFVVELLGRRLLLLLGFSICLIACCVLTAALALQDTVSWMPYISIVCVISYVIGHALGPSPIPALLITEIFLQSSRPSAFMVGGSVHWLSNFTVGLIFPFIQEGLGPYSFIVFAVICLLTTIYIFLIVPETKAKTFIEINQIFTKMNKVSEVYPEKEELKELPPVTSEQ

SEQ ID NO: 23749 - protein, 244 aa, Homo sapiens
MEQQDQSMKEGRLTLVLALATLIAAFGSSFQYGYNVAAVNSPALLMQQFYNETYYGRTGEFMEDFPLTLLWSVTVSMFPFGGFIGSLLVGPLVNKFGRKGALLFNNIFSIVPAILMGCSRVATSFELIIISRLLVGICAGVSSNVVPMYLGELAPKNLRGALGVVPQLFITVGILVAQIFGLRNLLANVDGEFRTSREHPHPFTTTLGPLLVFQSHHHRTGLSADWSLLTGWMSLGGPSCPEPT

SEQ ID NO: 23750 - protein, 135 aa, Homo sapiens
MARTKQTARKSTGGKAPRKQLATKAARKSTPSTCGVKPHRYRPGTVALREIRRYQKSTELLIRKLPFQRLVREIAQDFNTDLRFQSAAVGALQEASEAYLVGLLEDTNLCAIHAKRVTIMPKDIQLARRIRGERA

SEQ ID NO: 23751 - protein, 512 aa, Homo sapiens
MENKEAGTPPPIPSREGRLQPTLLLATLSAAFGSAFQYGYNLSVVNTPHKVFKSFYNETYFERHATFMDGKLMLLLWSCTVSMFPLGGLLGSLLVGLLVDSCGRKGTLLINNIFAIIPAILMGVSKVAKAFELIVFSRVVLGVCAGISYSALPMYLGELAPKNLRGMVGTMTEVFVIVGVFLAQIFSLQAILGNPAGWPVLLALTGVPALLQLLTLPFFPESPRYSLIQKGDEATARQALRRLRGHTDMEAELEDMRAEARAERAEGHLSVLHLCALRSLRWQLLSIIVLMAGQQLSGINAINYYADTIYTSAGVEAAHSQYVTVGSGVVNIVMTITSAVLVERLGRRHLLLAGYGICGSACLVLTVVLLFQNRVPELSYLGIICVFAYIAGHSIGPSPVPSVVRTEIFLQSSRRAAFMVDGAVHWLTNFIIGFLFPSIQEAIGAYSFIIFAGICLLTAIYIYVVIPETKGKTFVEINRIFAKRNRVKLPEEKEETIDAGPPTASPAKETSF

SEQ ID NO: 23752 - protein, 1009 aa, Homo sapiens
MEALTLWLLPWICQCVSVRADSIIHIGAIFEENAAKDDRVFQLAVSDLSLNDDILQSEKITYSIKVIEANNPFQAVQEACDLMTQGILALVTSTGCASANALQSLTDAMHIPHLFVQRNPGGSPRTACHLNPSPDGEAYTLASRPPVRLNDVMLRLVTELRWQKFVMFYDSEYDIRGLQSFLDQASRLGLDVSLQKVDKNISHVFTSLFTTMKTEELNRYRDTLRRAILLLSPQGAHSFINEAVETNLASKDSHWVFVNEEISDPEILDLVHSALGRMTVVRQIFPSAKDNQKCTRNNHRISSLLCDPQEGYLQMLQISNLYLYDSVLMLANAFHRKLEDRKWHSMASLNCIRKSTKPWNGGRSMLDTIKKGHITGLTGVMEFREDSSNPYVQFEILGTTYSETFGKDMRKLATWDSEKGLNGSLQERPMGSRLQGLTLKVVTVLEEPFVMVAENILGQPKRYKGFSIDVLDALAKALGFKYEIYQAPDGRYGHQLHNTSWNGMIGELISKRADLAISAITITPERESVVDFSKRYMDYSVGILIKKPEEKISIFSLFAPFDFAVWACIAAAIPVVGVLIFVLNRIQAVRAQSAAQPRPSASATLHSAIWIVYGAFVQQGGESSVNSMAMRIVMGSWWLFTLIVCSSYTANLAAFLTVSRMDNPIRTFQDLSKQVEMSYGTVRDSAVYEYFRAKGTNPLEQDSTFAELWRTISKNGGADNCVSSPSEGIRKAKKGNYAFLWDVAVVEYAALTDDDCSVTVIGNSISSKGYGIALQHGSPYRDLFSQRILELQDTGDLDVLKQKWWPHMGRCDLTSHASAQADGKSLKLHSFAGVFCILAIGLLLACLVAALELWWNSNRCHQETPKEDKEVNLEQVHRRMNSLMDEDIAHKQISPASIELSALEMGGLAPTQTLEPTREYQNTQLSVSTFLPEQSSHGTSRTLSSGPSSNLPLPLSSSATMPSMQCKHRSPNGGLFRQSPVKTPIPMSFQPVPGGVLPEALDTSHGTSI

SEQ ID NO: 23753 - protein, 580 aa, Homo sapiens
MGSRLQGLTLKVVTVLEEPFVMVAENILGQPKRYKGFSIDVLDALAKALGFKYEIYQAPDGRYGHQLHNTSWNGMIGELISKRADLAISAITITPERESVVDFSKRYMDYSVGILIKKPEEKISIFSLFAPFDFAVWACIAAAIPVVGVLIFVLNRIQAVRAQSAAQPRPSASATLHSAIWIVYGAFVQQGGESSVNSMAMRIVMGSWWLFTLIVCSSYTANLAAFLTVSRMDNPIRTFQDLSKQVEMSYGTVRDSAVYEYFRAKGTNPLEQDSTFAELWRTISKNGGADNCVSSPSEGIRKAKKGNYAFLWDVAVVEYAALTDDDCSVTVIGNSISSKGYGIALQHGSPYRDLFSQRILELQDTGDLDVLKQKWWPHMGRCDLTSHASAQADGKSLKLHSFAGVFCILAIGLLLACLVAALELWWNSNRCHQETPKEDKEVNLEQVHRRMNSLMDEDIAHKQISPASIELSALEMGGLAPTQTLEPTREYQNTQLSVSTFLPEQSSHGTSRTLSSGPSSNLPLPLSSSATMPSMQCKHRSPNGGLFRQSPVKTPIPMSFQPVPGGVLPEALDTSHGTSI

SEQ ID NO: 23754 - protein, 293 aa, Homo sapiens
MDRAKQQQALLLLPVCLALTFSLTAVVSSHWCEGTRRVVKPLCQDQPGGQHCIHFKRDNSSNGRMDNNSQAVLYIWELGDDKFIQRGFHVGLWQSCEESLNGEDEKCRSFRSVVPAEEQGVLWLSIGGEVLDIVLILTSAILLGSRVSCRSPGFHWLRVDALVAIFMVLAGLLGMVAHMMYTTIFQITVNLGPEDWKPQTWDYGWSYCLAWGSFALCLAVSVSAMSRFTAARLEFTEKQQAQNGSRHSQHSFLEPEASESIWKTGAAPCPAEQAFRNVSGHLPPGAPGKVSIC

SEQ ID NO: 23755 - protein, 894 aa, Homo sapiens
MARQKKMGQSVLRAVFFLVLGLLGHSHGGFPNTISIGGLFMRNTVQEHSAFRFAVQLYNTNQNTTEKPFHLNYHVDHLDSSNSFSVTNAFCSQFSRGVYAIFGFYDQMSMNTLTSFCGALHTSFVTPSFPTDADVQFVIQMRPALKGAILSLLGHYKWEKFVYLYDTERGFSILQAIMEAAVQNNWQVTARSVGNIKDVQEFRRIIEEMDRRQEKRYLIDCEVERINTILEQVVILGKHSRGYHYMLANLGFTDILLERVMHGGANITGFQIVNNENPMVQQFIQRWVRLDEREFPEAKNAPLKYTSALTHDAILVIAEAFRYLRRQRVDVSRRGSAGDCLANPAVPWSQGIDIERALKMVQVQGMTGNIQFDTYGRRTNYTIDVYEMKVSGSRKAGYWNEYERFVPFSDQQISNDSASSENRTIVVTTILESPYVMYKKNHEQLEGNERYEGYCVDLAYEIAKHVRIKYKLSIVGDGKYGARDPETKIWNGMVGELVYGRADIAVAPLTITLVREEVIDFSKPFMSLGISIMIKKPQKSKPGVFSFLDPLAYEIWMCIVFAYIGVSVVLFLVSRFSPYEWHLEDNNEEPRDPQSPPDPPNEFGIFNSLWFSLGAFMQQGCDISPRSLSGRIVGGVWWFFTLIIISSYTANLAAFLTVERMVSPIESAEDLAKQTEIAYGTLDSGSTKEFFRRSKIAVYEKMWSYMKSAEPSVFTKTTADGVARVRKSKGKFAFLLESTMNEYIEQRKPCDTMKVGGNLDSKGYGVATPKGSALRNAVNLAVLKLNEQGLLDKLKNKWWYDKGECGSGGGDSKDKTSALSLSNVAGVFYILVGGLGLAMMVALIEFCYKSRAESKRMKLTKNTQNFKPAPATNTQNYATYREGYNVYGTESVKI

SEQ ID NO: 23756 - protein, 894 aa, Homo sapiens
MARQKKMGQSVLRAVFFLVLGLLGHSHGGFPNTISIGGLFMRNTVQEHSAFRFAVQLYNTNQNTTEKPFHLNYHVDHLDSSNSFSVTNAFCSQFSRGVYAIFGFYDQMSMNTLTSFCGALHTSFVTPSFPTDADVQFVIQMRPALKGAILSLLGHYKWEKFVYLYDTERGFSILQAIMEAAVQNNWQVTARSVGNIKDVQEFRRIIEEMDRRQEKRYLIDCEVERINTILEQVVILGKHSRGYHYMLANLGFTDILLERVMHGGANITGFQIVNNENPMVQQFIQRWVRLDEREFPEAKNAPLKYTSALTHDAILVIAEAFRYLRRQRVDVSRRGSAGDCLANPAVPWSQGIDIERALKMVQVQGMTGNIQFDTYGRRTNYTIDVYEMKVSGSRKAGYWNEYERFVPFSDQQISNDSASSENRTIVVTTILESPYVMYKKNHEQLEGNERYEGYCVDLAYEIAKHVRIKYKLSIVGDGKYGARDPETKIWNGMVGELVYGRADIAVAPLTITLVREEVIDFSKPFMSLGISIMIKKPQKSKPGVFSFLDPLAYEIWMCIVFAYIGVSVVLFLVSRFSPYEWHLEDNNEEPRDPQSPPDPPNEFGIFNSLWFSLGAFMQQGCDISPRSLSGRIVGGVWWFFTLIIISSYTANLAAFLTVERMVSPIESAEDLAKQTEIAYGTLDSGSTKEFFRRSKIAVYEKMWSYMKSAEPSVFTKTTADGVARVRKSKGKFAFLLESTMNEYIEQRKPCDTMKVGGNLDSKGYGVATPKGSALRTPVNLAVLKLSEQGILDKLKNKWWYDKGECGAKDSGSKDKTSALSLSNVAGVFYILVGGLGLAMMVALIEFCYKSRAESKRMKLTKNTQNFKPAPATNTQNYATYREGYNVYGTESVKI

SEQ ID NO: 23757 - protein, 1024 aa, Homo sapiens
MERRSRRKSRRNGRSTAGKAAATQPAKSPGAQLWLFPSAAGLHRALLRRVEVTRQLCCSPGRLAVLERGGAGVQVHQLLAGSGGARTPKCIKLGKNMKIHSVDQGAEHMLILSSDGKPFEYDNYSMKHLRFESILQEKKIIQITCGDYHSLALSKGGELFAWGQNLHGQLGVGRKFPSTTTPQIVEHLAGVPLAQISAGEAHSMALSMSGNIYSWGKNECGQLGLGHTESKDDPSLIEGLDNQKVEFVACGGSHSALLTQDGLLFTFGAGKHGQLGHNSTQNELRPCLVAELVGYRVTQIACGRWHTLAYVSDLGKVFSFGSGKDGQLGNGGTRDQLMPLPVKVSSSEELKLESHTSEKELIMIAGGNQSILLWIKKENSYVNLKRTIPTLNEGTVKRWIADVETKRWQSTKREIQEIFSSPACLTGSFLRKRRTTEMMPVYLDLNKARNIFKELTQKDWITNMITTCLKDNLLKRLPFHSPPQEALEIFFLLPECPMMHISNNWESLVVPFAKVVCKMSDQSSLVLEEYWATLQESTFSKLVQMFKTAVICQLDYWDESAEENGNVQALLEMLKKLHRVNQVKCQLPESIFQVDELLHRLNFFVEVCRRYLWKMTVDASENVQCCVIFSHFPFIFNNLSKIKLLHTDTLLKIESKKHKAYLRSAAIEEERESEFALRPTFDLTVRRNHLIEDVLNQLSQFENEDLRKELWVSFSGEIGYDLGGVKKEFFYCLFAEMIQPEYGMFMYPEGASCMWFPVKPKFEKKRYFFFGVLCGLSLFNCNVANLPFPLALFKKLLDQMPSLEDLKELSPDLGKNLQTLLDDEGDNFEEVFYIHFNVHWDRNDTNLIPNGSSITVNQTNKRDYVSKYINYIFNDSVKAVYEEFRRGFYKMCDEDIIKLFHPEELKDVIVGNTDYDWKTFEKNARYEPGYNSSHPTIVMFWKAFHKLTLEEKKKFLVFLTGTDRLQMKDLNNMKITFCCPESWNERDPIRALTCFSVLFLPKYSTMETVEEALQEAINNNRGFG

SEQ ID NO: 23758 - protein, 587 aa, Homo sapiens
MVTAAMLLQCCPVLARGPTSLLGKVVKTHQFLFGIGRCPILATQGPNCSQIHLKATKAGGDSPSWAKGHCPFMLSELQDGKSKIVQKAAPEVQEDVKAFKTDLPSSLVSVSLRKPFSGPQEQEQISGKVTHLIQNNMPGNYVFSYDQFFRDKIMEKKQDHTYRVFKTVNRWADAYPFAQHFSEASVASKDVSVWCSNDYLGMSRHPQVLQATQETLQRHGAGAGGTRNISGTSKFHVELEQELAELHQKDSALLFSSCFVANDSTLFTLAKILPGCEIYSDAGNHASMIQGIRNSGAAKFVFRHNDPDHLKKLLEKSNPKIPKIVAFETVHSMDGAICPLEELCDVSHQYGALTFVDEVHAVGLYGSRGAGIGERDGIMHKIDIISGTLGKAFGCVGGYIASTRDLVDMVRSYAAGFIFTTSLPPMVLSGALESVRLLKGEEGQALRRAHQRNVKHMRQLLMDRGLPVIPCPSHIIPIRVGNAALNSKLCDLLLSKHGIYVQAINYPTVPRGEELLRLAPSPHHSPQMMEDFVEKLLLAWTAVGLPLQDVSVAACNFCRRPVHFELMSEWERSYFGNMGPQYVTTYA

SEQ ID NO: 23759 - protein, 550 aa, Homo sapiens
MVTAAMLLQCCPVLARGPTSLLGKVVKTHQFLFGIGRCPILATQGPNCSQIHLKATKAGGDSPSWAKGHCPFMLSELQDGKSKIVQKAAPEVQEDVKAFKTGNYVFSYDQFFRDKIMEKKQDHTYRVFKTVNRWADAYPFAQHFSEASVASKDVSVWCSNDYLGMSRHPQVLQATQETLQRHGAGAGGTRNISGTSKFHVELEQELAELHQKDSALLFSSCFVANDSTLFTLAKILPGCEIYSDAGNHASMIQGIRNSGAAKFVFRHNDPDHLKKLLEKSNPKIPKIVAFETVHSMDGAICPLEELCDVSHQYGALTFVDEVHAVGLYGSRGAGIGERDGIMHKIDIISGTLGKAFGCVGGYIASTRDLVDMVRSYAAGFIFTTSLPPMVLSGALESVRLLKGEEGQALRRAHQRNVKHMRQLLMDRGLPVIPCPSHIIPIRVGNAALNSKLCDLLLSKHGIYVQAINYPTVPRGEELLRLAPSPHHSPQMMEDFVEKLLLAWTAVGLPLQDVSVAACNFCRRPVHFELMSEWERSYFGNMGPQYVTTYA

SEQ ID NO: 23760 - protein, 445 aa, Homo sapiens
MSYDQFFRDKIMEKKQDHTYRVFKTVNRWADAYPFAQHFSEASVASKDVSVWCSNDYLGMSRHPQVLQATQETLQRHGAGAGGTRNISGTSKFHVELEQELAELHQKDSALLFSSCFVANDSTLFTLAKILPGCEIYSDAGNHASMIQGIRNSGAAKFVFRHNDPDHLKKLLEKSNPKIPKIVAFETVHSMDGAICPLEELCDVSHQYGALTFVDEVHAVGLYGSRGAGIGERDGIMHKIDIISGTLGKAFGCVGGYIASTRDLVDMVRSYAAGFIFTTSLPPMVLSGALESVRLLKGEEGQALRRAHQRNVKHMRQLLMDRGLPVIPCPSHIIPIRVGNAALNSKLCDLLLSKHGIYVQAINYPTVPRGEELLRLAPSPHHSPQMMEDFVEKLLLAWTAVGLPLQDVSVAACNFCRRPVHFELMSEWERSYFGNMGPQYVTTYA

SEQ ID NO: 23761 - protein, 574 aa, Homo sapiens
MRGGEVALGWNKKKRLFCEDFRFKMVTAAMLLQCCPVLARGPTSLLGKVVKTHQFLFGIGRCPILATQGPNCSQIHLKATKAGGDSPSWAKGHCPFMLSELQDGKSKIVQKAAPEVQEDVKAFKTGNYVFSYDQFFRDKIMEKKQDHTYRVFKTVNRWADAYPFAQHFSEASVASKDVSVWCSNDYLGMSRHPQVLQATQETLQRHGAGAGGTRNISGTSKFHVELEQELAELHQKDSALLFSSCFVANDSTLFTLAKILPGCEIYSDAGNHASMIQGIRNSGAAKFVFRHNDPDHLKKLLEKSNPKIPKIVAFETVHSMDGAICPLEELCDVSHQYGALTFVDEVHAVGLYGSRGAGIGERDGIMHKIDIISGTLGKAFGCVGGYIASTRDLVDMVRSYAAGFIFTTSLPPMVLSGALESVRLLKGEEGQALRRAHQRNVKHMRQLLMDRGLPVIPCPSHIIPIRVGNAALNSKLCDLLLSKHGIYVQAINYPTVPRGEELLRLAPSPHHSPQMMEDFVEKLLLAWTAVGLPLQDVSVAACNFCRRPVHFELMSEWERSYFGNMGPQYVTTYA

SEQ ID NO: 23762 - protein, 423 aa, Homo sapiens
MRSLGANMAAALRAAGVLLRDPLASSSWRVCQPWRWKSGAAAAAVTTETAQHAQGAKPQVQPQKRKPKTGILMLNMGGPETLGDVHDFLLRLFLDRDLMTLPIQNKLAPFIAKRRTPKIQEQYRRIGGGSPIKIWTSKQGEGMVKLLDELSPNTAPHKYYIGFRYVHPLTEEAIEEMERDGLERAIAFTQYPQYSCSTTGSSLNAIYRYYNQVGRKPTMKWSTIDRWPTHHLLIQCFADHILKELDHFPLEKRSEVVILFSAHSLPMSVVNRGDPYPQEVSATVQKVMERLEYCNPYRLVWQSKVGPMPWLGPQTDESIKGLCERGRKNILLVPIAFTSDHIETLYELDIEYSQVLAKECGVENIRRAESLNGNPLFSKALADLVHSHIQSNELCSKQLTLSCPLCVNPVCRETKSFFTSQQL

SEQ ID NO: 23763 - protein, 429 aa, Homo sapiens
MRSLGANMAAALRAAGVLLRDPLASSSWRVCQPWRWKSGAAAAAVTTETAQHAQGAKPQVQPQKRYESNIRKPKTGILMLNMGGPETLGDVHDFLLRLFLDRDLMTLPIQNKLAPFIAKRRTPKIQEQYRRIGGGSPIKIWTSKQGEGMVKLLDELSPNTAPHKYYIGFRYVHPLTEEAIEEMERDGLERAIAFTQYPQYSCSTTGSSLNAIYRYYNQVGRKPTMKWSTIDRWPTHHLLIQCFADHILKELDHFPLEKRSEVVILFSAHSLPMSVVNRGDPYPQEVSATVQKVMERLEYCNPYRLVWQSKVGPMPWLGPQTDESIKGLCERGRKNILLVPIAFTSDHIETLYELDIEYSQVLAKECGVENIRRAESLNGNPLFSKALADLVHSHIQSNELCSKQLTLSCPLCVNPVCRETKSFFTSQQL

SEQ ID NO: 23764 - protein, 286 aa, Homo sapiens
MMATPNQTACNAESPVALEEAKTSGAPGSPQTPPERHDSGGSLPLTPRMESHSEDEDLAGAVGGLGWNSRSPRTQSPGGCSAEAVLARKKHRRRPSKRKRHWRPYLELSWAEKQQRDERQSQRASRVREEMFAKGQPVAPYNTTQFLMNDRDPEEPNLDVPHGISHPGSSGESEAGDSDGRGRAHGEFQRKDFSETYERFHTESLQGRSKQELVRDYLELEKRLSQAEEETRRLQQLQACTGQQSCRQVEELAAEVQRLRTENQRLRQENQMWNREGCRCDEEPGT

SEQ ID NO: 23765 - protein, 120 aa, Homo sapiens
MRLPAQLLGLLMLWVPGSSGDVVMTQSPLSLPVTLGQPASISCRSSQSLVYSDGNTYLNWFQQRPGQSPRRLIYKVSNRDSGVPDRFSGSGSGTDFTLKISRVEAEDVGVYYCMQGTHWP

SEQ ID NO: 23766 - protein, 115 aa, Homo sapiens
MVSPLQFLRLLLLWVPASRGDVVMTQSPAFLSVTPGEKVTITCQASEGIGNYLYWYQQKPDQAPKLLIKYASQSISGVPSRFSGSGSGTDFTFTISSLEAEDAATYYCQQGNKHP

SEQ ID NO: 23767 - protein, 259 aa, Homo sapiens
MAACRALKAVLVDLSGTLHIEDAAVPGAQEALKRLRGASVIIRFVTNTTKESKQDLLERLRKLEFDISEDEIFTSLTAARSLLERKQVRPMLLVDDRALPDFKGIQTSDPNAVVMGLAPEHFHYQILNQAFRLLLDGAPLIAIHKARYYKRKDGLALGPGPFVTALEYATDTKATVVGKPEKTFFLEALRGTGCEPEEAVMIGDDCRDDVGGAQDVGMLGILVKTGKYRASDEEKINPPPYLTCESFPHAVDHILQHLL

SEQ ID NO: 23768 - protein, 169 aa, Homo sapiens
MLLVDDRALPDFKGIQTSDPNAVVMGLAPEHFHYQILNQAFRLLLDGAPLIAIHKARYYKRKDGLALGPGPFVTALEYATDTKATVVGKPEKTFFLEALRGTGCEPEEAVMIGDDCRDDVGGAQDVGMLGILVKTGKYRASDEEKINPPPYLTCESFPHAVDHILQHLL

SEQ ID NO: 23769 - protein, 462 aa, Homo sapiens
MGQDAFMEPFGDTLGVFQCKIYLLLFGACSGLKVTVPSHTVHGVRGQALYLPVHYGFHTPASDIQIIWLFERPHTMPKYLLGSVNKSVVPDLEYQHKFTMMPPNASLLINPLQFPDEGNYIVKVNIQGNGTLSASQKIQVTVDDPVTKPVVQIHPPSGAVEYVGNMTLTCHVEGGTRLAYQWLKNGRPVHTSSTYSFSPQNNTLHIAPVTKEDIGNYSCLVRNPVSEMESDIIMPIIYYGPYGLQVNSDKGLKVGEVFTVDLGEAILFDCSADSHPPNTYSWIRRTDNTTYIIKHGPRLEVASEKVAQKTMDYVCCAYNNITGRQDETHFTVIITSVGLEKLAQKGKSLSPLASITGISLFLIISMCLLFLWKKYQPYKVIKQKLEGRPETEYRKAQTFSGHEDALDDFGIYEFVAFPDVSGVSRIPSRSVPASDCVSGQDLHSTVYEVIQHIPAQQQDHPE

SEQ ID NO: 23770 - protein, 450 aa, Homo sapiens
MWLKVFTTFLSFATGACSGLKVTVPSHTVHGVRGQALYLPVHYGFHTPASDIQIIWLFERPHTMPKYLLGSVNKSVVPDLEYQHKFTMMPPNASLLINPLQFPDEGNYIVKVNIQGNGTLSASQKIQVTVDDPVTKPVVQIHPPSGAVEYVGNMTLTCHVEGGTRLAYQWLKNGRPVHTSSTYSFSPQNNTLHIAPVTKEDIGNYSCLVRNPVSEMESDIIMPIIYYGPYGLQVNSDKGLKVGEVFTVDLGEAILFDCSADSHPPNTYSWIRRTDNTTYIIKHGPRLEVASEKVAQKTMDYVCCAYNNITGRQDETHFTVIITSVGLEKLAQKGKSLSPLASITGISLFLIISMCLLFLWKKYQPYKVIKQKLEGRPETEYRKAQTFSGHEDALDDFGIYEFVAFPDVSGVSRIPSRSVPASDCVSGQDLHSTVYEVIQHIPAQQQDHPE

SEQ ID NO: 23771 - protein, 485 aa, Homo sapiens
MGQDAFMEPFGDTLGVFQCKIYLLLFDIVANCLLLRFKLSVSSYEIWKKGACSGLKVTVPSHTVHGVRGQALYLPVHYGFHTPASDIQIIWLFERPHTMPKYLLGSVNKSVVPDLEYQHKFTMMPPNASLLINPLQFPDEGNYIVKVNIQGNGTLSASQKIQVTVDDPVTKPVVQIHPPSGAVEYVGNMTLTCHVEGGTRLAYQWLKNGRPVHTSSTYSFSPQNNTLHIAPVTKEDIGNYSCLVRNPVSEMESDIIMPIIYYGPYGLQVNSDKGLKVGEVFTVDLGEAILFDCSADSHPPNTYSWIRRTDNTTYIIKHGPRLEVASEKVAQKTMDYVCCAYNNITGRQDETHFTVIITSVGLEKLAQKGKSLSPLASITGISLFLIISMCLLFLWKKYQPYKVIKQKLEGRPETEYRKAQTFSGHEDALDDFGIYEFVAFPDVSGVSRIPSRSVPASDCVSGQDLHSTVYEVIQHIPAQQQDHPE

SEQ ID NO: 23772 - protein, 1037 aa, Homo sapiens
MDRMASSMKQVPNPLPKVLSRRGVGAGLEAAERESFERTQTVSINKAINTQEVAVKEKHARTCILGTHHEKGAQTFWSVVNRLPLSSNAVLCWKFCHVFHKLLRDGHPNVLKDSLRYRNELSDMSRMWGHLSEGYGQLCSIYLKLLRTKMEYHTKNPRFPGNLQMSDRQLDEAGESDVNNFFQLTVEMFDYLECELNLFQTVFNSLDMSRSVSVTAAGQCRLAPLIQVILDCSHLYDYTVKLLFKLHSCLPADTLQGHRDRFMEQFTKLKDLFYRSSNLQYFKRLIQIPQLPENPPNFLRASALSEHISPVVVIPAEASSPDSEPVLEKDDLMDMDASQQNLFDNKFDDIFGSSFSSDPFNFNSQNGVNKDEKDHLIERLYREISGLKAQLENMKTESQRVVLQLKGHVSELEADLAEQQHLRQQAADDCEFLRAELDELRRQREDTEKAQRSLSEIERKAQANEQRYSKLKEKYSELVQNHADLLRKNAEVTKQVSMARQAQVDLEREKKELEDSLERISDQGQRKTQEQLEVLESLKQELATSQRELQVLQGSLETSAQSEANWAAEFAELEKERDSLVSGAAHREEELSALRKELQDTQLKLASTEESMCQLAKDQRKMLLVGSRKAAEQVIQDALNQLEEPPLISCAGSADHLLSTVTSISSCIEQLEKSWSQYLACPEDISGLLHSITLLAHLTSDAIAHGATTCLRAPPEPADSLTEACKQYGRETLAYLASLEEEGSLENADSTAMRNCLSKIKAIGEELLPRGLDIKQEELGDLVDKEMAATSAAIETATARIEEMLSKSRAGDTGVKLEVNERILGCCTSLMQAIQVLIVASKDLQREIVESGRGTASPKEFYAKNSRWTEGLISASKAVGWGATVMVDAADLVVQGRGKFEELMVCSHEIAASTAQLVAASKVKADKDSPNLAQLQQASRGVNQATAGVVASTISGKSQIEETDNMDFSSMTLTQIKRQEMDSQVRVLELENELQKERQKLGELRKKHYELAGVAEGWEEGTEASPPTLQEVVTEKE

SEQ ID NO: 23773 - protein, 986 aa, Homo sapiens
MDRMASSMKQVPNPLPKVLSRRGVGAGLEAAERESFERTQTVSINKAINTQEVAVKEKHARTCILGTHHEKGAQTFWSVVNRLPLSSNAVLCWKFCHVFHKLLRDGHPNVLKDSLRYRNELSDMSRMWGHLSEGYGQLCSIYLKLLRTKMEYHTKNPRFPGNLQMSDRQLDEAGESDVNNFFQLTVEMFDYLECELNLFQTVFNSLDMSRSVSVTAAGQCRLAPLIQVILDCSHLYDYTVKLLFKLHSCLPADTLQGHRDRFMEQFTKLKDLFYRSSNLQYFKRLIQIPQLPENPPNFLRASALSEHISPVVVIPAEASSPDSEPVLEKDDLMDMDASQQNLFDNKFDDIFGSSFSSDPFNFNSQNGVNKDEKDHLIERLYREISGLKAQLENMKTESQRVVLQLKGHVSELEADLAEQQHLRQQAADDCEFLRAELDELRRQREDTEKAQRSLSEIERKAQANEQRYSKLKEKYSELVQNHADLLRKNAEVTKQVSMARQAQVDLEREKKELEDSLERISDQGQRKTQEQLEVLESLKQELATSQRELQVLQGSLETSAQSEANWAAEFAELEKERDSLVSGAAHREEELSALRKELQDTQLKLASTEESMCQLAKDQRKMLLVGSRKAAEQVIQDALNQLEEPPLISCAGSADHLLSTVTSISSCIEQLEKSWSQYLACPEDISGLLHSITLLAHLTSDAIAHGATTCLRAPPEPADSLTEACKQYGRETLAYLASLEEEGSLENADSTAMRNCLSKIKAIGEELLPRGLDIKQEELGDLVDKEMAATSAAIETATARIEGTASPKEFYAKNSRWTEGLISASKAVGWGATVMVDAADLVVQGRGKFEELMVCSHEIAASTAQLVAASKVKADKDSPNLAQLQQASRGVNQATAGVVASTISGKSQIEETDNMDFSSMTLTQIKRQEMDSQVRVLELENELQKERQKLGELRKKHYELAGVAEGWEEGTEASPPTLQEVVTEKE

SEQ ID NO: 23774 - protein, 1008 aa, Homo sapiens
MMFPNPEPPPETVSINKAINTQEVAVKEKHARTCILGTHHEKGAQTFWSVVNRLPLSSNAVLCWKFCHVFHKLLRDGHPNVLKDSLRYRNELSDMSRMWGHLSEGYGQLCSIYLKLLRTKMEYHTKNPRFPGNLQMSDRQLDEAGESDVNNFFQLTVEMFDYLECELNLFQTVFNSLDMSRSVSVTAAGQCRLAPLIQVILDCSHLYDYTVKLLFKLHSCLPADTLQGHRDRFMEQFTKLKDLFYRSSNLQYFKRLIQIPQLPENPPNFLRASALSEHISPVVVIPAEASSPDSEPVLEKDDLMDMDASQQNLFDNKFDDIFGSSFSSDPFNFNSQNGVNKDEKDHLIERLYREISGLKAQLENMKTESQRVVLQLKGHVSELEADLAEQQHLRQQAADDCEFLRAELDELRRQREDTEKAQRSLSEIERKAQANEQRYSKLKEKYSELVQNHADLLRKNAEVTKQVSMARQAQVDLEREKKELEDSLERISDQGQRKTQEQLEVLESLKQELATSQRELQVLQGSLETSAQSEANWAAEFAELEKERDSLVSGAAHREEELSALRKELQDTQLKLASTEESMCQLAKDQRKMLLVGSRKAAEQVIQDALNQLEEPPLISCAGSADHLLSTVTSISSCIEQLEKSWSQYLACPEDISGLLHSITLLAHLTSDAIAHGATTCLRAPPEPADSLTEACKQYGRETLAYLASLEEEGSLENADSTAMRNCLSKIKAIGEELLPRGLDIKQEELGDLVDKEMAATSAAIETATARIEEMLSKSRAGDTGVKLEVNERILGCCTSLMQAIQVLIVASKDLQREIVESGRGTASPKEFYAKNSRWTEGLISASKAVGWGATVMVDAADLVVQGRGKFEELMVCSHEIAASTAQLVAASKVKADKDSPNLAQLQQASRGVNQATAGVVASTISGKSQIEETDNMDFSSMTLTQIKRQEMDSQVRVLELENELQKERQKLGELRKKHYELAGVAEGWEEGTEASPPTLQEVVTEKE

SEQ ID NO: 23775 - protein, 1572 aa, Homo sapiens
MASSAREHLLFVRRRNPQMRYTLSPENLQSLAAQSSMPENMTLQRANSDTDLVTSESRSSLTASMYEYTLGQAQNLIIFWDIKEEVDPSDWIGLYHIDENSPANFWDSKNRGVTGTQKGQIVWRIEPGPYFMEPEIKICFKYYHGISGALRATTPCITVKNPAVMMGAEGMEGGASGNLHSRKLVSFTLSDLRAVGLKKGMFFNPDPYLKMSIQPGKKSSFPTCAHHGQERRSTIISNTTNPIWHREKYSFFALLTDVLEIEIKDKFAKSRPIIKRFLGKLTIPVQRLLERQAIGDQMLSYNLGRRLPADHVSGYLQFKVEVTSSVHEDASPEAVGTILGVNSVNGDLGSPSDDEDMPGSHHDSQVCSNGPVSEDSAADGTPKHSFRTSSTLEIDTEELTSTSSRTSPPRGRQDSLNDYLDAIEHNGHSRPGTATCSERSMGASPKLRSSFPTDTRLNAMLHIDSDEEDHEFQQDLGYPSSLEEEGGLIMFSRASRADDGSLTSQTKLEDNPVENEEASTHEAASFEDKPENLPELAESSLPAGPAPEEGEGGPEPQPSADQGSAELCGSQEVDQPTSGADTGTSDASGGSRRAVSETESLDQGSEPSQVSSETEPSDPARTESVSEASTRPEGESDLECADSSCNESVTTQLSSVDTRCSSLESARFPETPAFSSQEEEDGACAAEPTSSGPAEGSQESVCTAGSLPVVQVPSGEDEGPGAESATVPDQEELGEVWQRRGSLEGAAAAAESPPQEEGSAGEAQGTCEGATAQEEGATGGSQANGHQPLRSLPSVRQDVSRYQRVDEALPPNWEARIDSHGRIFYVDHVNRTTTWQRPTAPPAPQVLQRSNSIQQMEQLNRRYQSIRRTMTNERPEENTNAIDGAGEEADFHQASADFRRENILPHSTSRSRITLLLQSPPVKFLISPEFFTVLHSNPSAYRMFTNNTCLKHMITKVRRDTHHFERYQHNRDLVGFLNMFANKQLELPRGWEMKHDHQGKAFFVDHNSRTTTFIDPRLPLQSSRPTSALVHRQHLTRQRSHSAGEVGEDSRHAGPPVLPRPSSTFNTVSRPQYQDMVPVAYNDKIVAFLRQPNIFEILQERQPDLTRNHSLREKIQFIRTEGTPGLVRLSSDADLVMLLSLFEEEIMSYVPPHALLHPSYCQSPRGSPVSSPQNSPGTQRANARAPAPYKRDFEAKLRNFYRKLETKGYGQGPGKLKLIIRRDHLLEDAFNQIMGYSRKDLQRNKLYVTFVGEEGLDYSGPSREFFFLVSRELFNPYYGLFEYSANDTYTVQISPMSAFVDNHHEWFRFSGRILGLALIHQYLLDAFFTRPFYKALLRILCDLSDLEYLDEEFHQSLQWMKDNDIHDILDLTFTVNEEVFGQITERELKPGGANIPVTEKNKKEYIERMVKWRIERGVVQQTESLVRGFYEVVDARLVSVFDARELELVIAGTAEIDLSDWRNNTEYRGGYHDNHIVIRWFWAAVERFNNEQRLRLLQFVTGTSSIPYEGFASLRGSNGPRRFCVEKWGKITALPRAHTCFNRLDLPPYPSFSMLYEKLLTAVEETSTFGLE

SEQ ID NO: 23776 - protein, 82 aa, Homo sapiens
MEPEIKICFKYYHGISGALRATTPCITVKNPAVMMGAEGMEGGASGNLHSRKLVSFTLSARKEEQFPHLCPPRAGETVYYHQ

SEQ ID NO: 23777 - protein, 3996 aa, Homo sapiens
MPANHLPIGSTMSTVHLSSDGTYFYWIWSPASLNEKTPKGHSVFMDIFELVVENGVFVANPLQERTILMRKEGESAKSINEMLLSRLSRYRASPSATLAALTGSTISNTLKEDQAANTSCGLPLKMLRKTPIYTCGTYLVMLVPPPGGSGSSATRSLFGGTSGLSSLKRACYDTVNNMLWTCSNDYIDQWCNPGNQAFHYVCQRLGVSHIITEPKEEAITTNEVINQLLHHVGAMCIHQLNLLATNPNLPITSVLGKQHPIEAHHLSSICDIMEKAMVNGDTCIIRCILVVFQVVFKFFFSPQTERNRDIIRRSGLLLWQLLMAPKDQICPEIQKEVCLAISSGLNILYPGETEINNLLKLVLTEGERNSGLSQLRDVILTNLAEQLQNNRFGSDEDDHYRLNDELLHYILKIVVRESCILITKCQTVSKDDFQKLLSTVPAASSCLRYLMAVQNHLLSNTILIKPDENDDSDSSLQGETLKVQELKVSILALATQILTGCDEVLEMLQQVTTALINSDIADREQRLKGLEQVTKATMLGHLLPVLLTSLMHPNLQTLIMADALMPQLVQLVLYTSQTALLLKTQCPVFAEVGCSPCGAPDQKCRLFPDERMLEEKEEPGFLTGLKIPAPWAAGKTVETVHPVRDNYKFKETVHIPGARCLYLRFDSRCSSQYDYDKLVIYAGPNTNSRKVAEYGGNTLGYGSRSVLGTGWPKDLVKCISPPSLNFKVEGDTVTFSFEMRSGREHNTPDKAMWGFACTVRAQESSEDVSGGLPFLVDLALGLSVLACSMLRILYNGPEITKEEEACQELLRSKLLQRCQWQVEANGVISPALTPSPSPLPLTIEEDREFTYPSDVLVPPVGNYFDLPRIRLPPGIMIKLREISGRARPQFRPSIKEVIQPDVMEEMVVSCVIKHLNLVDALQSLINFQYQEEHAEEYDLLCKIMGETFKKLNAMERQLQSVAELEQKWQSEVDDAMQGKLENNMPFFYDYHFNENKMKELELLCSMKEVSFDGNDLENMVLSLREKFLQEVNSLIQKPSHPLAKTKTLVKSLMNRAELLLHVTIAAQSGLTRSISGTPAETPACKSASETKVISHAVRQPVFLRSMSAPSDLEMIGNEDLEFTRANQRRRHVTSHRSSSFTLLQSLAIEDSRDKPTYSVLLGQLFAFIGTNPDQAVSSSSFLLAAQTRWRRGNTRKQALVHMRELLTAAVRVGGVTHLVGPVTMVLQGGPRIEELTCGGMVEQVQEAFGETMTSVVSLCARYPIACANSIGLLCTIPYTRSEEKCLVRSGLVQLMDRLCSLSNQTESSSSEKQTKKQKVATMAWAAFQVLANRCVEWEKEEGGSTEAVHSGLARQVSSLLTNHLARATECCGNQAAGNDALQDVLSLLNDLSRSHIGKAILSQPACVSKLLSLLLDQRPSPKLVLIILQLCRAALPLMSVEDCGNVELPPWSYSVPSLNSEQEDPSDPASKIASLLLAKLADYVVPGCQTVLSPTASEPDTTLTKTSPKNSLKGDKDPGEESEAVDGKLSIFIHKREDQSSHEVLQPLLSSSEGRPFRLGTGANMEKVVKMDRDMTKGGCCEVITEEAAAALRKATKWAQSGLIVSIGPPVESINPETVSGLSTGDKKKTAQTSICRERNSELARTDPVRPFISGHVANSMAAEVIALLHSLLMAPESNAAQIWTTTAEKVLSRALMYIPQLGKYAESILENGSSSGRKLAKLQRIARQAVAALCALGGFKETIKIGSEVQVLGRGISGSIGVVASINEQEGIATVRFPPIDCRKTSQASDTLTIPLSRLCVPRSEALPLHKLSITEKVVQAVQSMLLPQEGSLSIHTSLPATGDGSAPVMAVVRLLAEIRTRACLVMAQLLEDSLFCEEFIQQCPAAVEVLNLVAQECSAGERLAVVEVQCERLRMLYRDCARPPPPPLQADRRQPKEITWSPSRVFPPVRACMFSSHLTSVTFLADPSAGGGLPRGTFIYATSPLPVQAPSFYWEIEIVSYGDTDDDTGPIVSFGFTTEAEKRDGAWTNPVGTCLFHNNGRAVHYNGSSLLQWKSVRLDVTLSPGDVAGIGWERTEGTPPPPGQPAKGRVYFTYCGQRLSPYLEDVSGGMWPVVHIQKKNTKTRANFGSRPFAYAEGQAHRNAADLCTDLAEEISANFEALPFAMASDSDNDAGTSIASDPGTHGPPCRIAAVATAQQQYDSDTSCHYKVELSYENFITSGPDPHPPPIADDESDDDDDDDIPQEDHYALLVKAWETKVFPTIRRRFRNEAERKSGLDQIKGALQLGMVDIARQTVEFLYEENGGIPRDLYLPTIEDIKDEANKFTIDKVRKGLTVVTRSPDSNNVASSAVGTALPKFAIRGMLKTFGLHGVVLDVDSVNELVQVETYLRSEGVLVRYWYPIDMLERPPAGYRRTATNGLVTLDNTNLQIHRELLRCEAALARLYCRMALLNIFAPKLPHLFTRLFHIPAIRDITLEHLQLLSNQLLAPPLPDGTISSSSILLAQSLQHCIHSQNCSATDLFYQGNSQTVREWLNVAITRTLHQGEESLLELTKQICSFLQTAPEQFPSEEFPISESKVNMDVNFPGAAFVVVSCKESQSGFRKDSSLYKAPWARVLVYGLGHKVKRNGQLNLIEAACYPRDASPANTGLAPPPTADQYPSVVLSTDRVHIKLGVSPPPGAVLVLHSLPLEFPLAMAFAEQLLSWKSEDSEGKSEDEPDTIPTSVLLQVVELLGNFLWTTDMAACVKELVFHLLAELLRTVHTLEQRRHPAGLSSSIALQLNPCLAMLMALQSELHKLYDEETQNWVSGGACGGSGGAAAGDQGRFSTYFHALMEGCLAVAEVTLPTNMSVTASGVTSATAPNLSDSSSSSSSSPGQTPQSPSLLSKRKKVKMKREKASSSGKRQSSRTVDSDPTVLSIGGSKPEDMLWFHRALTLLIILRHLTRKDPQGLGVTSDAIADACQALVGPTAHSRLLVISGIPTHLDEGVVRGAIRKACNAHGGVFKDEIYIPLQEEDTKKPKDKAEGGDGKVEPEKTLAFPGTDSMEVSTSSSLTPAMSISASASTSQASICSSQGISQTVSDLSVDPLPAGLELPIPPGLLEPHAVSSQESLDISLCSTGSLGSLGSLGEPLDNAETASVSDMGSMYTVTSLDNQPLAARPIKGFAVVEIRSRAKIEKIRASLFNNNDLIGLSSLDGEDELMEMSTEEILTVSVVNQSLFDTQGSPGLEDYFNDKSIKGEKLVPGAREVLTEIFKSCAHSEQTLSLTPAKPIRVSDIYLSKEQINSQTPGNLLHLFFTNVRPPKKVLEDQLTQILRKYGVPKPKFDKSKYSKAGKEQHPVKVVSTKRPITKPPAKDKAVLNSVSRTALSEKKPTVKPKSPEKSKPDEKDPEKSPTKKQEVPEEKYLTLEGFHKFVIDRARQDIRSVWRAILSCGYDLHFERCACIDVRHAQKASRKWTLEMDVALVQYINQLCRHLAITPARLHPHEVYLDPADAADPRVACLLNVPIESLRLRFALLQSLNTTLETFFLPLVELRQTPMYTHSIAALLKEAKGLIFYDTKVTVMNRVLNATVQRTADHAAPEITLDPLEIVGGEIRASENSYFCQAARQLASVPSSQLCVKLASGGDPTYAFNIRFTGEEVHGTSGSFRHFLWQVCKELQSSSLSLLLLCPSSAVNKNKGKYILTPSPITYGEEQLLHFLGQLLGIAIRADVPLPLDLLPSFWKTLVGEPLDPEQDLQEADILTYNYVKKFESINDETELEALCAEIASQHLATESPDSPNKPCCRFTYLTMTGEEVELCSRGRHILVAWENKDIYAAAIRSLRLRELQNVECVTAVRAGLGSIIPLQLLTMLSPLEMELRTCGLPYINLEFLKAHTMYQVGLMETDQHIEFFWGALEMFTQEELCKFIKFACNQERIPFTCPCKDGGPDTAHVPPYPMKIAPPDGTAGSPDSRYIRVETCMFMIKLPQYSSLEIMLEKLRCAIHYREDPLSG

SEQ ID NO: 23778 - protein, 2386 aa, Homo sapiens
MPANHLPIGSTMSTVHLSSDGTYFYWIWSPASLNEKTPKGHSVFMDIFELVVENGVFVANPLQERTILMRKEGESAKSINEMLLSRLSRYRASPSATLAALTGSTISNTLKEDQAANTSCGLPLKMLRKTPIYTCGTYLVMLVPPPGGSGSSATRSLFGGTSGLSSLKRACYDTVNNMLWTCSNDYIDQWCNPGNQAFHYVCQRLGVSHIITEPKEEAITTNEVINQLLHHVGAMCIHQLNLLATNPNLPITSVLGKQHPIEAHHLSSICDIMEKAMVNGDTCIIRCILVVFQVVFKFFFSPQTERNRDIIRRSGLLLWQLLMAPKDQICPEIQKEVCLAISSGLNILYPGETEINNLLKLVLTEGERNSGLSQLRDVILTNLAEQLQNNRFGSDEDDHYRLNDELLHYILKIVVRESCILITKCQTVSKDDFQKLLSTVPAASSCLRYLMAVQNHLLSNTILIKPDENDDSDSSLQGETLKVQELKVSILALATQILTGCDEVLEMLQQVTTALINSDIADREQRLKGLEQVTKATMLGHLLPVLLTSLMHPNLQTLIMADALMPQLVQLVLYTSQTALLLKTQCPVFAEVGCSPCGAPDQKCRLFPDERMLEEKEEPGFLTGLKIPAPWAAGKTVETVHPVRDNYKFKETVHIPGARCLYLRFDSRCSSQYDYDKLVIYAGPNTNSRKVAEYGGNTLGYGSRSVLGTGWPKDLVKCISPPSLNFKVEGDTVTFSFEMRSGREHNTPDKAMWGFACTVRAQESSEDVSGGLPFLVDLALGLSVLACSMLRILYNGPEITKEEEACQELLRSKLLQRCQWQVEANGVISPALTPSPSPLPLTIEEDREFTYPSDVLVPPVGNYFDLPRIRLPPGIMIKLREISGRARPQFRPSIKEVIQPDVMEEMVVSCVIKHLNLVDALQSLINFQYQEEHAEEYDLLCKIMGETFKKLNAMERQLQSVAELEQKWQSEVDDAMQGKLENNMPFFYDYHFNENKMKELELLCSMKEVSFDGNDLENMVLSLREKFLQEVNSLIQKPSHPLAKTKTLVKSLMNRAELLLHVTIAAQSGLTRSISGTPAETPACKSASETKVISHAVRQPVFLRSMSAPSDLEMIGNEDLEFTRANQRRRHVTSHRSSSFTLLQSLAIEDSRDKPTYSVLLGQLFAFIGTNPDQAVSSSSFLLAAQTRWRRGNTRKQALVHMRELLTAAVRVGGVTHLVGPVTMVLQGGPRIEELTCGGMVEQVQEAFGETMTSVVSLCARYPIACANSIGLLCTIPYTRSEEKCLVRSGLVQLMDRLCSLSNQTESSSSEKQTKKQKVATMAWAAFQVLANRCVEWEKEEGGSTEAVHSGLARQVSSLLTNHLARATECCGNQAAGNDALQDVLSLLNDLSRSHIGKAILSQPACVSKLLSLLLDQRPSPKLVLIILQLCRAALPLMSVEDCGNVELPPWSYSVPSLNSEQEDPSDPASKIASLLLAKLADYVVPGCQTVLSPTASEPDTTLTKTSPKNSLKGDKDPGEESEAVDGKLSIFIHKREDQSSHEVLQPLLSSSEGRPFRLGTGANMEKVVKMDRDMTKGGCCEVITEEAAAALRKATKWAQSGLIVSIGPPVESINPETVSGLSTGDKKKTAQTSICRERNSELARTDPVRPFISGHVANSMAAEVIALLHSLLMAPESNAAQIWTTTAEKVLSRALMYIPQLGKYAESILENGSSSGRKLAKLQRIARQAVAALCALGGFKETIKIGSEVQVLGRGISGSIGVVASINEQEGIATVRFPPIDCRKTSQASDTLTIPLSRLCVPRSEALPLHKLSITEKVVQAVQSMLLPQEGSLSIHTSLPATGDGSAPVMAVVRLLAEIRTRACLVMAQLLEDSLFCEEFIQQCPAAVEVLNLVAQECSAGERLAVVEVQCERLRMLYRDCARPPPPPLQADRRQPKEITWSPSRVFPPVRACMFSSHLTSVTFLADPSAGGGLPRGTFIYATSPLPVQAPSFYWEIEIVSYGDTDDDTGPIVSFGFTTEAEKRDGAWTNPVGTCLFHNNGRAVHYNGSSLLQWKSVRLDVTLSPGDVAGIGWERTEGTPPPPGQPAKGRVYFTYCGQRLSPYLEDVSGGMWPVVHIQKKNTKTRANFGSRPFAYAEGQAHRNAADLCTDLAEEISANFEALPFAMASDSDNDAGTSIASDPGTHGPPCRIAAVATAQQQYDSDTSCHYKVELSYENFITSGPDPHPPPIADDESDDDDDDDIPQEDHYALLVKAWETKVFPTIRRRFRNEAERKSGLDQIKGALQLGMVDIARQTVEFLYEENGGIPRDLYLPTIEDIKDEANKFTIDKVRKGLTVVTRSPDSNNVASSAVGTALPKFAIRGMLKTFGLHGVVLDVDSVSEQPF

SEQ ID NO: 23779 - protein, 889 aa, Homo sapiens
MPANHLPIGSTMSTVHLSSDGTYFYWIWSPASLNEKTPKGHSVFMDIFELVVENGVFVANPLQERTILMRKEGESAKSINEMLLSRLSRYRASPSATLAALTGSTISNTLKEDQAANTSCGLPLKMLRKTPIYTCGTYLVMLVPPPGGSGSSATRSLFGGTSGLSSLKRACYDTVNNMLWTCSNDYIDQWCNPGNQAFHYVCQRLGVSHIITEPKEEAITTNEVINQLLHHVGAMCIHQLNLLATNPNLPITSVLGKQHPIEAHHLSSICDIMEKAMVNGDTCIIRCILVVFQVVFKFFFSPQTERNRDIIRRSGLLLWQLLMAPKDQICPEIQKEVCLAISSGLNILYPGETEINNLLKLVLTEGERNSGLSQLRDVILTNLAEQLQNNRFGSDEDDHYRLNDELLHYILKIVVRESCILITKCQTVSKDDFQKLLSTVPAASSCLRYLMAVQNHLLSNTILIKPDENDDSDSSLQGETLKVQELKVSILALATQILTGCDEVLEMLQQVTTALINSDIADREQRLKGLEQVTKATMLGHLLPVLLTSLMHPNLQTLIMADALMPQLVQLVLYTSQTALLLKTQCPVFAEVGCSPCGAPDQKCRLFPDERMLEEKEEPGFLTGLKIPAPWAAGKTVETVHPVRDNYKFKETVHIPGARCLYLRFDSRCSSQYDYDKLVIYAGPNTNSRKVAEYGGNTLGYGSRSVLGTGWPKDLVKVEGDTVTFSFEMRSGREHNTPDKAMWGFACTVRAQESSEDVSGGLPFLVDLALGLSVLACSMLRILYNGPEITKEEEACQELLRSKLLQRCQWQVEANGVISPALTPSPSPLPLTIEEDREFTYPSDVLVPPVGNYFDLPRIRLPPGIMIKLREISGRARPQFRPSIKYVAV

SEQ ID NO: 23780 - protein, 3984 aa, Homo sapiens
MPANHLPIGSTMSTVHLSSDGTYFYWIWSPASLNEKTPKGHSVFMDIFELVVENGVFVANPLQERTILMRKEGESAKSINEMLLSRLSRYRASPSATLAALTGSTISNTLKEDQAANTSCGLPLKMLRKTPIYTCGTYLVMLVPPPGGSGSSATRSLFGGTSGLSSLKRACYDTVNNMLWTCSNDYIDQWCNPGNQAFHYVCQRLGVSHIITEPKEEAITTNEVINQLLHHVGAMCIHQLNLLATNPNLPITSVLGKQHPIEAHHLSSICDIMEKAMVNGDTCIIRCILVVFQVVFKFFFSPQTERNRDIIRRSGLLLWQLLMAPKDQICPEIQKEVCLAISSGLNILYPGETEINNLLKLVLTEGERNSGLSQLRDVILTNLAEQLQNNRFGSDEDDHYRLNDELLHYILKIVVRESCILITKCQTVSKDDFQKLLSTVPAASSCLRYLMAVQNHLLSNTILIKPDENDDSDSSLQGETLKELKVSILALATQILTGCDEVLEMLQQVTTALINSDIADREQRLKGLEQVTKATMLGHLLPVLLTSLMHPNLQTLIMADALMPQLVQLVLYTSQTALLLKTQCPVFAEVGCSPCGAPDQKCRLFPDERMLEEKEEPGFLTGLKIPAPWAAGKTVETVHPVRDNYKFKETVHIPGARCLYLRFDSRCSSQYDYDKLVIYAGPNTNSRKVAEYGGNTLGYGSRSVLGTGWPKDLVKVEGDTVTFSFEMRSGREHNTPDKAMWGFACTVRAQESSEDVSGGLPFLVDLALGLSVLACSMLRILYNGPEITKEEEACQELLRSKLLQRCQWQVEANGVISPALTPSPSPLPLTIEEDREFTYPSDVLVPPVGNYFDLPRIRLPPGIMIKLREISGRARPQFRPSIKEVIQPDVMEEMVVSCVIKHLNLVDALQSLINFQYQEEHAEEYDLLCKIMGETFKKLNAMERQLQSVAELEQKWQSEVDDAMQGKLENNMPFFYDYHFNENKMKELELLCSMKEVSFDGNDLENMVLSLREKFLQEVNSLIQKPSHPLAKTKTLVKSLMNRAELLLHVTIAAQSGLTRSISGTPAETPACKSASETKVISHAVRQPVFLRSMSAPSDLEMIGNEDLEFTRANQRRRHVTSHRSSSFTLLQSLAIEDSRDKPTYSVLLGQLFAFIGTNPDQAVSSSSFLLAAQTRWRRGNTRKQALVHMRELLTAAVRVGGVTHLVGPVTMVLQGGPRIEELTCGGMVEQVQEAFGETMTSVVSLCARYPIACANSIGLLCTIPYTRSEEKCLVRSGLVQLMDRLCSLSNQTESSSSEKQTKKQKVATMAWAAFQVLANRCVEWEKEEGGSTEAVHSGLARQVSSLLTNHLARATECCGNQAAGNDALQDVLSLLNDLSRSHIGKAILSQPACVSKLLSLLLDQRPSPKLVLIILQLCRAALPLMSVEDCGNVELPPWSYSVPSLNSEQEDPSDPASKIASLLLAKLADYVVPGCQTVLSPTASEPDTTLTKTSPKNSLKGDKDPGEESEAVDGKLSIFIHKREDQSSHEVLQPLLSSSEGRPFRLGTGANMEKVVKMDRDMTKGGCCEVITEEAAAALRKATKWAQSGLIVSIGPPVESINPETVSGLSTGDKKKTAQTSICRERNSELARTDPVRPFISGHVANSMAAEVIALLHSLLMAPESNAAQIWTTTAEKVLSRALMYIPQLGKYAESILENGSSSGRKLAKLQRIARQAVAALCALGGFKETIKIGSEVQVLGRGISGSIGVVASINEQEGIATVRFPPIDCRKTSQASDTLTIPLSRLCVPRSEALPLHKLSITEKVVQAVQSMLLPQEGSLSIHTSLPATGDGSAPVMAVVRLLAEIRTRACLVMAQLLEDSLFCEEFIQQCPAAVEVLNLVAQECSAGERLAVVEVQCERLRMLYRDCARPPPPPLQADRRQPKEITWSPSRVFPPVRACMFSSHLTSVTFLADPSAGGGLPRGTFIYATSPLPVQAPSFYWEIEIVSYGDTDDDTGPIVSFGFTTEAEKRDGAWTNPVGTCLFHNNGRAVHYNGSSLLQWKSVRLDVTLSPGDVAGIGWERTEGTPPPPGQPAKGRVYFTYCGQRLSPYLEDVSGGMWPVVHIQKKNTKTRANFGSRPFAYAEGQAHRNAADLCTDLAEEISANFEALPFAMASDSDNDAGTSIASDPGTHGPPCRIAAVATAQQQYDSDTSCHYKVELSYENFITSGPDPHPPPIADDESDDDDDDDIPQEDHYALLVKAWETKVFPTIRRRFRNEAERKSGLDQIKGALQLGMVDIARQTVEFLYEENGGIPRDLYLPTIEDIKDEANKFTIDKVRKGLTVVTRSPDSNNVASSAVGTALPKFAIRGMLKTFGLHGVVLDVDSVNELVQVETYLRSEGVLVRYWYPIDMLERPPAGYRRTATNGLVTLDNTNLQIHRELLRCEAALARLYCRMALLNIFAPKLPHLFTRLFHIPAIRDITLEHLQLLSNQLLAPPLPDGTISSSSILLAQSLQHCIHSQNCSATDLFYQGNSQTVREWLNVAITRTLHQGEESLLELTKQICSFLQTAPEQFPSEEFPISESKVNMDVNFPGAAFVVVSCKESQSGFRKDSSLYKAPWARVLVYGLGHKVKRNGQLNLIEAACYPRDASPANTGLAPPPTADQYPSVVLSTDRVHIKLGVSPPPGAVLVLHSLPLEFPLAMAFAEQLLSWKSEDSEGKSEDEPDTIPTSVLLQVVELLGNFLWTTDMAACVKELVFHLLAELLRTVHTLEQRRHPAGLSSSIALQLNPCLAMLMALQSELHKLYDEETQNWVSGGACGGSGGAAAGDQGRFSTYFHALMEGCLAVAEVTLPTNMSVTASGVTSATAPNLSDSSSSSSSSPGQTPQSPSLLSKRKKVKMKREKASSSGKRQSSRTVDSDPTVLSIGGSKPEDMLWFHRALTLLIILRHLTRKDPQGLGVTSDAIADACQALVGPTAHSRLLVISGIPTHLDEGVVRGAIRKACNAHGGVFKDEIYIPLQEEDTKKPKDKAEGGDGKVEPEKTLAFPGTDSMEVSTSSSLTPAMSISASASTSQASICSSQGISQTVSDLSVDPLPAGLELPIPPGLLEPHAVSSQESLDISLCSTGSLGSLGSLGEPLDNAETASVSDMGSMYTVTSLDNQPLAARPIKGFAVVEIRSRAKIEKIRASLFNNNDLIGLSSLDGEDELMEMSTEEILTVSVVNQSLFDTQGSPGLEDYFNDKSIKGEKLVPGAREVLTEIFKSCAHSEQTLSLTPAKPIRVSDIYLSKEQINSQTPGNLLHLFFTNVRPPKKVLEDQLTQILRKYGVPKPKFDKSKYSKAGKEQHPVKVVSTKRPITKPPAKDKAVLNSVSRTALSEKKPTVKPKSPEKSKPDEKDPEKSPTKKQEVPEEKYLTLEGFHKFVIDRARQDIRSVWRAILSCGYDLHFERCACIDVRHAQKASRKWTLEMDVALVQYINQLCRHLAITPARLHPHEVYLDPADAADPRVACLLNVPIESLRLRFALLQSLNTTLETFFLPLVELRQTPMYTHSIAALLKEAKGLIFYDTKVTVMNRVLNATVQRTADHAAPEITLDPLEIVGGEIRASENSYFCQAARQLASVPSSQLCVKLASGGDPTYAFNIRFTGEEVHGTSGSFRHFLWQVCKELQSSSLSLLLLCPSSAVNKNKGKYILTPSPITYGEEQLLHFLGQLLGIAIRADVPLPLDLLPSFWKTLVGEPLDPEQDLQEADILTYNYVKKFESINDETELEALCAEIASQHLATESPDSPNKPCCRFTYLTMTGEEVELCSRGRHILVAWENKDIYAAAIRSLRLRELQNVECVTAVRAGLGSIIPLQLLTMLSPLEMELRTCGLPYINLEFLKAHTMYQVGLMETDQHIEFFWGALEMFTQEELCKFIKFACNQERIPFTCPCKDGGPDTAHVPPYPMKIAPPDGTAGSPDSRYIRVETCMFMIKLPQYSSLEIMLEKLRCAIHYREDPLSG

SEQ ID NO: 23781 - protein, 1321 aa, Homo sapiens
MGSSAAAAAAAAAAADSAQWLSVKEETIFLHDGLIRVTDLAELPSEILGAPEAADTDLEILTFETKNPSELAERLRSVCGNQSNAYARLLEYRLNALRGLWNAQRQLALEEQHERESSGDEETLALLKRQGLLQQPEQAPFTSRMGLLLVFPLIQSQSRTDPSLCNITAEVLLNCLRDCQPLSLTKEPADCLNGIETLLCSWLEETSDTGRHIPHKQKENAAAALVALACARGSLKTFVHTVHLLQKQTDLGSLPVADVLYRLLLLEGGPGSPSCLLGGKHIVSWGYEDMLPAPDSNTGSSSENKDADLGRCLTADGLYLYTTNSVGRGVSKLGSGLHGTLRGFVYCRNEELEPGWVAFGSGSLLHRPVSFDNKPHSLFQVIDQNTLQVCQVVPMPANHLPIGSTMSTVHLSSDGTYFYWIWSPASLNEKTPKGHSVFMDIFELVVENGVFVANPLQERTILMRKEGESAKSINEMLLSRLSRYRASPSATLAALTGSTISNTLKEDQAANTSCGLPLKMLRKTPIYTCGTYLVMLVPPPGGSGSSATRSLFGGTSGLSSLKILASSLVYNISDGQFTSRADLIDAAGSSLGRGALVPGLGACYDTVNNMLWTCSNDYIDQWCNPGNQAFHYVCQRLGVSHIITEPKEEAITTNEVINQLLHHVGAMCIHQLNLLATNPNLPITSVLGKQHPIEAHHLSSICDIMEKAMVNGDTCIIRCILVVFQVVFKFFFSPQTERNRDIIRRSGLLLWQLLMAPKDQICPEIQKEVCLAISSGLNILYPGETEINNLLKLVLTEGERNSGLSQLRDVILTNLAEQLQNNRFGSDEDDHYRLNDELLHYILKIVVRESCILITKCQTVSKDDFQKLLSTVPAASSCLRYLMAVQNHLLSNTILIKPDENDDSDSSLQGETLKVQELKVSILALATQILTGCDEVLEMLQQVTTALINSDIADREQRLKGLEQVTKATMLGHLLPVLLTSLMHPNLQTLIMADALMPQLVQLVLYTSQTALLLKTQCPVFAEVGCSPCGAPDQKCRLFPDERMLEEKEEPGFLTGLKIPAPWAAGKTVETVHPVRDNYKFKETVHIPGARCLYLRFDSRCSSQYDYDKLVIYAGPNTNSRKVAEYGGNTLGYGSRSVLGTGWPKDLVKVEGDTVTFSFEMRSGREHNTPDKAMWGFACTVRAQESSEDVSGGLPFLVDLALGLSVLACSMLRILYNGPEITKEEEACQELLRSKLLQRCQWQVEANGVISPALTPSPSPLPLTIEEDREFTYPSDVLVPPVGNYFDLPRIRLPPGIMIKLREISGRARPQFRPSIKYVAV

SEQ ID NO: 23782 - protein, 728 aa, Homo sapiens
MWVTKLLPALLLQHVLLHLLLLPIAIPYAEGQRKRRNTIHEFKKSAKTTLIKIDPALKIKTKKVNTADQCANRCTRNKGLPFTCKAFVFDKARKQCLWFPFNSMSSGVKKEFGHEFDLYENKDYIRNCIIGKGRSYKGTVSITKSGIKCQPWSSMIPHEHSFLPSSYRGKDLQENYCRNPRGEEGGPWCFTSNPEVRYEVCDIPQCSEVECMTCNGESYRGLMDHTESGKICQRWDHQTPHRHKFLPERYPDKGFDDNYCRNPDGQPRPWCYTLDPHTRWEYCAIKTCADNTMNDTDVPLETTECIQGQGEGYRGTVNTIWNGIPCQRWDSQYPHEHDMTPENFKCKDLRENYCRNPDGSESPWCFTTDPNIRVGYCSQIPNCDMSHGQDCYRGNGKNYMGNLSQTRSGLTCSMWDKNMEDLHRHIFWEPDASKLNENYCRNPDDDAHGPWCYTGNPLIPWDYCPISRCEGDTTPTIVNLDHPVISCAKTKQLRVVNGIPTRTNIGWMVSLRYRNKHICGGSLIKESWVLTARQCFPSRDLKDYEAWLGIHDVHGRGDEKCKQVLNVSQLVYGPEGSDLVLMKLARPAVLDDFVSTIDLPNYGCTIPEKTSCSVYGWGYTGLINYDGLLRVAHLYIMGNEKCSQHHRGKVTLNESEICAGAEKIGSGPCEGDYGGPLVCEQHKMRMVLGVIVPGRGCAIPNRPGIFVRVAYYAKWIHKIILTYKVPQS

SEQ ID NO: 23783 - protein, 290 aa, Homo sapiens
MWVTKLLPALLLQHVLLHLLLLPIAIPYAEGQRKRRNTIHEFKKSAKTTLIKIDPALKIKTKKVNTADQCANRCTRNKGLPFTCKAFVFDKARKQCLWFPFNSMSSGVKKEFGHEFDLYENKDYIRNCIIGKGRSYKGTVSITKSGIKCQPWSSMIPHEHSFLPSSYRGKDLQENYCRNPRGEEGGPWCFTSNPEVRYEVCDIPQCSEVECMTCNGESYRGLMDHTESGKICQRWDHQTPHRHKFLPERYPDKGFDDNYCRNPDGQPRPWCYTLDPHTRWEYCAIKTCET

SEQ ID NO: 23784 - protein, 723 aa, Homo sapiens
MWVTKLLPALLLQHVLLHLLLLPIAIPYAEGQRKRRNTIHEFKKSAKTTLIKIDPALKIKTKKVNTADQCANRCTRNKGLPFTCKAFVFDKARKQCLWFPFNSMSSGVKKEFGHEFDLYENKDYIRNCIIGKGRSYKGTVSITKSGIKCQPWSSMIPHEHSYRGKDLQENYCRNPRGEEGGPWCFTSNPEVRYEVCDIPQCSEVECMTCNGESYRGLMDHTESGKICQRWDHQTPHRHKFLPERYPDKGFDDNYCRNPDGQPRPWCYTLDPHTRWEYCAIKTCADNTMNDTDVPLETTECIQGQGEGYRGTVNTIWNGIPCQRWDSQYPHEHDMTPENFKCKDLRENYCRNPDGSESPWCFTTDPNIRVGYCSQIPNCDMSHGQDCYRGNGKNYMGNLSQTRSGLTCSMWDKNMEDLHRHIFWEPDASKLNENYCRNPDDDAHGPWCYTGNPLIPWDYCPISRCEGDTTPTIVNLDHPVISCAKTKQLRVVNGIPTRTNIGWMVSLRYRNKHICGGSLIKESWVLTARQCFPSRDLKDYEAWLGIHDVHGRGDEKCKQVLNVSQLVYGPEGSDLVLMKLARPAVLDDFVSTIDLPNYGCTIPEKTSCSVYGWGYTGLINYDGLLRVAHLYIMGNEKCSQHHRGKVTLNESEICAGAEKIGSGPCEGDYGGPLVCEQHKMRMVLGVIVPGRGCAIPNRPGIFVRVAYYAKWIHKIILTYKVPQS

SEQ ID NO: 23785 - protein, 296 aa, Homo sapiens
MWVTKLLPALLLQHVLLHLLLLPIAIPYAEGQRKRRNTIHEFKKSAKTTLIKIDPALKIKTKKVNTADQCANRCTRNKGLPFTCKAFVFDKARKQCLWFPFNSMSSGVKKEFGHEFDLYENKDYIRNCIIGKGRSYKGTVSITKSGIKCQPWSSMIPHEHSFLPSSYRGKDLQENYCRNPRGEEGGPWCFTSNPEVRYEVCDIPQCSEVECMTCNGESYRGLMDHTESGKICQRWDHQTPHRHKFLPERYPDKGFDDNYCRNPDGQPRPWCYTLDPHTRWEYCAIKNMRDITWALN

SEQ ID NO: 23786 - protein, 285 aa, Homo sapiens
MWVTKLLPALLLQHVLLHLLLLPIAIPYAEGQRKRRNTIHEFKKSAKTTLIKIDPALKIKTKKVNTADQCANRCTRNKGLPFTCKAFVFDKARKQCLWFPFNSMSSGVKKEFGHEFDLYENKDYIRNCIIGKGRSYKGTVSITKSGIKCQPWSSMIPHEHSYRGKDLQENYCRNPRGEEGGPWCFTSNPEVRYEVCDIPQCSEVECMTCNGESYRGLMDHTESGKICQRWDHQTPHRHKFLPERYPDKGFDDNYCRNPDGQPRPWCYTLDPHTRWEYCAIKTCET

SEQ ID NO: 23787 - protein, 210 aa, Homo sapiens
MWVTKLLPALLLQHVLLHLLLLPIAIPYAEGQRKRRNTIHEFKKSAKTTLIKIDPALKIKTKKVNTADQCANRCTRNKGLPFTCKAFVFDKARKQCLWFPFNSMSSGVKKEFGHEFDLYENKDYIRNCIIGKGRSYKGTVSITKSGIKCQPWSSMIPHEHSFLPSSYRGKDLQENYCRNPRGEEGGPWCFTSNPEVRYEVCDIPQCSEGK

SEQ ID NO: 23788 - protein, 525 aa, Homo sapiens
MWEAQFLGLLFLQPLWVAPVKPLQPGAEVPVVWAQEGAPAQLPCSPTIPLQDLSLLRRAGVTWQHQPDSGPPAAAPGHPLAPGPHPAAPSSWGPRPRRYTVLSVGPGGLRSGRLPLQPRVQLDERGRQRGDFSLWLRPARRADAGEYRAAVHLRDRALSCRLRLRLGQASMTASPPGSLRASDWVILNCSFSRPDRPASVHWFRNRGQGRVPVRESPHHHLAESFLFLPQVSPMDSGPWGCILTYRDGFNVSIMYNLTVLGLEPPTPLTVYAGAGSRVGLPCRLPAGVGTRSFLTAKWTPPGGGPDLLVTGDNGDFTLRLEDVSQAQAGTYTCHIHLQEQQLNATVTLAIITVTPKSFGSPGSLGKLLCEVTPVSGQERFVWSSLDTPSQRSFSGPWLEAQEAQLLSQPWQCQLYQGERLLGAAVYFTELSSPGAQRSGRAPGALPAGHLLLFLILGVLSLLLLVTGAFGFHLWRRQWRPRRFSALEQGIHPPQAQSKIEELEQEPEPEPEPEPEPEPEPEPEQL

SEQ ID NO: 23789 - protein, 360 aa, Homo sapiens
MWEAQFLGLLFLQPLWVAPVKPLQPGAEVPVVWAQEGAPAQLPCSPTIPLQDLSLLRRAGVTWQHQPDSGPPAAAPGHPLAPGPHPAAPSSWGPRPRRYTVLSVGPGGLRSGRLPLQPRVQLDERGRQRGDFSLWLRPARRADAGEYRAAVHLRDRALSCRLRLRLGQASMTASPPGSLRASDWVILNCSFSRPDRPASVHWFRNRGQGRVPVRESPHHHLAESFLFLPQVSPMDSGPWGCILTYRDGFNVSIMYNLTVLGLEPPTPLTVYAGAGSRVGLPCRLPAGVGTRSFLTAKWTPPGGGPDLLVTGDNGDFTLRLEDVSQAQAGTYTCHIHLQEQQLNATVTLAIITGQPQVGKE

SEQ ID NO: 23790 - protein, 349 aa, Homo sapiens
MAATAAEAVASGSGEPREEAGALGPAWDESQLRSYSFPTRPIPRLSQSDPRAEELIENEEPVVLTDTNLVYPALKWDLEYLQENIGNGDFSVYSASTHKFLYYDEKKMANFQNFKPRSNREEMKFHEFVEKLQDIQQRGGEERLYLQQTLNDTVGRKIVMDFLGFNWNWINKQQGKRGWGQLTSNLLLIGMEGNVTPAHYDEQQNFFAQIKGYKRCILFPPDQFECLYPYPVHHPCDRQSQVDFDNPDYERFPNFQNVVGYETVVGPGDVLYIPMYWWHHIESLLNGGITITVNFWYKGAPTPKRIEYPLKAHQKVAIMRNIEKMLGEALGNPQEVGPLLNTMIKGRYN

SEQ ID NO: 23791 - protein, 184 aa, Homo sapiens
MMSFLLGAILTLLWAPTAQAEVLLQPDFNAEKFSGLWYVVSMASDCRVFLGKKDHLSMSTRAIRPTEEGGLHVHMEFPGADGCNQVDAEYLKVGSEGHFRVPALGYLDVRIVDTDYSSFAVLYIYKELEGALSTMVQLYSRTQDVSPQALKSFQDFYPTLGLPKDMMVMLPQSDACNPESKEAP

SEQ ID NO: 23792 - protein, 163 aa, Homo sapiens
MGGLLLAAFLALVSVPRAQAVWLGRLDPEQLLGPWYVLAVASREKGFAMEKDMKNVVGVVVTLTPENNLRTLSSQHGLGGCDQSVMDLIKRNSGWVFENPSIGVLELWVLATNFRDYAIIFTQLEFGDEPFNTVELYSLTETASQEAMGLFTKWSRSLGFLSQ

SEQ ID NO: 23793 - protein, 287 aa, Homo sapiens
MSPHPTALLGLVLCLAQTIHTQEEDLPRPSISAEPGTVIPLGSHVTFVCRGPVGVQTFRLERESRSTYNDTEDVSQASPSESEARFRIDSVSEGNAGPYRCIYYKPPKWSEQSDYLELLVKETSGGPDSPDTEPGSSAGPTQRPSDNSHNEHAPASQGLKAEHLYILIGVSVVFLFCLLLLVLFCLHRQNQIKQGPPRSKDEEQKPQQRPDLAVDVLERTADKATVNGLPEKDRETDTSALAAGSSQEVTYAQLDHWALTQRTARAVSPQSTKPMAESITYAAVARH

SEQ ID NO: 23794 - protein, 270 aa, Homo sapiens
MSPHPTALLGLVLCLAQTIHTQEEDLPRPSISAEPGTVIPLGSHVTFVCRGPVGVQTFRLERESRSTYNDTEDVSQASPSESEARFRIDSVSEGNAGPYRCIYYKPPKWSEQSDYLELLVKGPTQRPSDNSHNEHAPASQGLKAEHLYILIGVSVVFLFCLLLLVLFCLHRQNQIKQGPPRSKDEEQKPQQRPDLAVDVLERTADKATVNGLPEKDRETDTSALAAGSSQEVTYAQLDHWALTQRTARAVSPQSTKPMAESITYAAVARH

SEQ ID NO: 23795 - protein, 269 aa, Homo sapiens
MSPHPTALLGLVLCLAQTIHTQEDLPRPSISAEPGTVIPLGSHVTFVCRGPVGVQTFRLERESRSTYNDTEDVSQASPSESEARFRIDSVSEGNAGPYRCIYYKPPKWSEQSDYLELLVKGPTQRPSDNSHNEHAPASQGLKAEHLYILIGVSVVFLFCLLLLVLFCLHRQNQIKQGPPRSKDEEQKPQQRPDLAVDVLERTADKATVNGLPEKDRETDTSALAAGSSQEVTYAQLDHWALTQRTARAVSPQSTKPMAESITYAAVARH

SEQ ID NO: 23796 - protein, 209 aa, Homo sapiens
MSPHPTALLGLVLCLAQTIHTQEEDLPRPSISAEPGTVIPLGSHVTFVCRGPVGVQTFRLERESRSTYNDTEDVSQASPSESEARFRIDSVSEGNAGPYRCIYYKPPKWSEQSDYLELLVKETSGGPDSPDTEPGSSAGPTQRPSDNSHNEHAPASQGLKAEHLYILIGVSVVFLFCLLLLVLFCLHRQNQIKQGPPRSKDEEQKPQQR

SEQ ID NO: 23797 - protein, 175 aa, Homo sapiens
MPGAAEALPTVTVTLVAGAVPPASGALTAHCIGGFWREVGVASDQSLVLTAPKRVEGLFLTLSGSNLTVKVAYNSSGSCEIEKIVGSEIDSTGKFAFPGHREIHVLDTDYEGYAILRVSLMWRGRNFRVLKYFTRSLEDKDRLGFWKFRELTADTGLYLAARPGRCAELLKEELI

SEQ ID NO: 23798 - protein, 152 aa, Homo sapiens
MEELDRQKIGGFWREVGVASDQSLVLTAPKRVEGLFLTLSGSNLTVKVAYNSSGSCEIEKIVGSEIDSTGKFAFPGHREIHVLDTDYEGYAILRVSLMWRGRNFRVLKYFTRSLEDKDRLGFWKFRELTADTGLYLAARPGRCAELLKEELI

SEQ ID NO: 23799 - protein, 176 aa, Homo sapiens
MALLLLSLGLSLIAAQEFDPHTVMQRNYNVARVSGVWYSIFMASDDLNRIKENGDLRVFVRNIEHLKNGSLIFDFEYMVQGECVAVVVVCEKTEKNGEYSINYEGQNTVAVSETDYRLFITFHLQNFRNGTETHTLALYETCEKYGLGSQNIIDLTNKDPCYSKHYRSPPRPPMRW

SEQ ID NO: 23800 - protein, 152 aa, Homo sapiens
MSPHLTALLGLVLCLAQTIHTQEGALPRPSISAEPGTVISPGSHVTFMCRGPVGVQTFRLEREDRAKYKDSYNVFRLGPSESEARFHIDSVSEGNAGLYRCLYYKPPGWSEHSDFLELLVKESSGGPDSPDTEPGSSAGTVPGTEASGFDAP

SEQ ID NO: 23801 - protein, 135 aa, Homo sapiens
MSPHLTALLGLVLCLAQTIHTQEGALPRPSISAEPGTVISPGSHVTFMCRGPVGVQTFRLEREDRAKYKDSYNVFRLGPSESEARFHIDSVSEGNAGLYRCLYYKPPGWSEHSDFLELLVKGTVPGTEASGFDAP

SEQ ID NO: 23802 - protein, 414 aa, Homo sapiens
MKLHCEVEVISRHLPALGLRNRGKGVRAVLSLCQQTSRSQPPVRAFLLISTLKDKRGTRYELRENIEQFFTKFVDEGKATVRLKEPPVDICLSKAISSSLKGFLSAMRLAHRGCNVDTPVSTLTPVKTSEFENFKTKMVITSKKDYPLSKNFPYSLEHLQTSYCGLVRVDMRMLCLKSLRKLDLSHNHIKKLPATIGDLIHLQELNLNDNHLESFSVALCHSTLQKSLRSLDLSKNKIKALPVQFCQLQELKNLKLDDNELIQFPCKIGQLINLRFLSAARNKLPFLPSEFRNLSLEYLDLFGNTFEQPKVLPVIKLQAPLTLLESSARTILHNRIPYGSHIIPFHLCQDLDTAKICVCGRFCLNSFIQGTTTMNLHSVAHTVVLVDNLGGTEAPIISYFCSLGCYVNSSDMLK

SEQ ID NO: 23803 - protein, 146 aa, Homo sapiens
MKLHCEVEVISRHLPALGLRNRGKGVRAVLSLCQQTSRSQPPVRAFLLISTLKDKRGTRYELRENIEQFFTKFVDEGKATVRLKEPPVDICLSKDSIWLSYHSIPSLPRFGYRKNLCLWKILSELFHSRNYYHESAFCCPHCGLSR

SEQ ID NO: 23804 - protein, 773 aa, Homo sapiens
MSSPAVARTSPGGSREMAPAPQGRGRFWEVGGGSGHRLERAAAESERWELLLRRGELLALGGHLKGALEAFAAALRRGAPARPECLGALVDCLVFNYRLRHGLGWSAAPVAGADGGAGGLLRCLGCRGFLSEPVTVPCGHSYCRRCLRRELRARCRLCRDRLPPATASATDAEGTAPRPPPLAAAIAASDFRTSVVLNHLAEKWFPGQRERARAAGRLGELLHQGRYREALAAACEALRAEPSDLIVKIYRAESYAGLQEFKAAIEDLNAVLFQLPDWPEVYFRKGKVLCDAGFLGDALQLFLQCLALDEDFAPAKLQVQKILCDLLLPENLKEGLKESSWSSLPCTKNRPFDFHSVMEESQSLNEPSPKQSEEIPEVTSEPVKGSLNRAQSAQSINSTEMPAREDCLKRVSSEPVLSVQEKGVLLKRKLSLLEQDVIVNEDGRNKLKKQGETPNEVCMFSLAYGDIPEELIDVSDFECSLCMRLFFEPVTTPCGHSFCKNCLERCLDHAPYCPLCKESLKEYLADRRYCVTQLLEELIVKYLPDELSERKKIYDEETAELSHLTKNVPIFVCTMAYPTVPCPLHVFEPRYRLMIRRSIQTGTKQFGMCVSDTQNSFADYGCMLQIRNVHFLPDGRSVVDTVGGKRFRVLKRGMKDGYCTADIEYLEDVKVENEDEIKNLRELHDLVYSQACSWFQNLRDRFRSQILQHFGSMPEREENLQAAPNGPAWCWWLLAVLPVDPRYQLSVLSMKSLKERLTKIQHILTYFSRDQSK

SEQ ID NO: 23805 - protein, 762 aa, Homo sapiens
MSSPAVARTSPGGSREMAPAPQGRGRFWEVGGGSGHRLERAAAESERWELLLRRGELLALGGHLKGALEAFAAALRRGAPARPECLGALVDCLVFNYRLRHGLGWSAAPVAGADGGAGGLLRCLGCRGFLSEPVTVPCGHSYCRRCLRRELRARCRLCRDRLPPATASATDAEGTAPRPPPLAAAIAASDFRTSVVLNHLAEKWFPGQRERARAAGRLGELLHQGRYREALAAACEALRAEPSDLIVKIYRAESYAGLQEFKAAIEDLNAVLFQLPDWPEVYFRKGKVLCDAGFLGDALQLFLQCLALDEDFAPAKLQVQKILCDLLLPENLKEGLKESSWSSLPCTKNRPFDFHSVMEESQSLNEPSPKQSEEIPEVTSEPVKGSLNRAQSAQSINSTEMPAREDCLKRVSSEPVLSVQEKGVLLKRKLSLLEQDVIVNEDGRNKLKKQGAYGDIPEELIDVSDFECSLCMRLFFEPVTTPCGHSFCKNCLERCLDHAPYCPLCKESLKEYLADRRYCVTQLLEELIVKYLPDELSERKKIYDEETAELSHLTKNVPIFVCTMAYPTVPCPLHVFEPRYRLMIRRSIQTGTKQFGMCVSDTQNSFADYGCMLQIRNVHFLPDGRSVVDTVGGKRFRVLKRGMKDGYCTADIEYLEDVKVENEDEIKNLRELHDLVYSQACSWFQNLRDRFRSQILQHFGSMPEREENLQAAPNGPAWCWWLLAVLPVDPRYQLSVLSMKSLKERLTKIQHILTYFSRDQSK

SEQ ID NO: 23806 - protein, 754 aa, Homo sapiens
MSPEPVPPPPPPQCPGCDRAEPIAQRLEEGDEAFRAGDYEMAAELFRSMLAGLAQPDRGLCLRLGDALARAGRLPEALGAFRGAARLGALRPEELEELAGGLVRAVGLRDRPLSAENPGGEPEAPGEGGPAPEPRAPRDLLGCPRCRRLLHKPVTLPCGLTVCKRCVEPGPARPQVRRVNVVLSGLLEKCFPAECRLRRLAGQARSLQRQQQPEAALLRCDQALELAPDDNSLLLLRAELYLTMKNYEQALQDASAACQNEPLLIKGHQVKAQALSGLGRSKEVLKEFLYCLALNPECNSVKKEAQKVMCEVLFSATANVHENLTSSIQSRLKAQGHSHMNAQALLEEGDAGSSENSSEKSDMLGNTNSSVLYFILGLHFEEDKKALESILPTAPSAGLKRQFPDDVEDAPDLNAPGKIPKKDLSLQRSPNSETEESQGLSLDVTDFECALCMRLLFEPVTTPCGHTFCLKCLERCLDHAPHCPLCKDKLSELLASRNFNITVLAEELIFRYLPDELSDRKRIYDEEMSELSNLTRDVPIFVCAMAFPTVPCPLHVFEPRYRLMIRRCMETGTKRFGMCLSAEHAGLSEYGCMLEIKDVRTFPDGSSVVDAIGISRFRVLSHRHRDGYNTADIEYLEDEKVEGPEYEELAALHDSVHQQSVSWFASLQDRMKEQILSHFGVMPDREPEPQSNPSGPAWSWWILAVLPLERKAQLAILGMTSLKERLLAIRRILVIITRKMNSRQELANARERNN

SEQ ID NO: 23807 - protein, 511 aa, Homo sapiens
MKNYEQALQDASAACQNEPLLIKGHQVKAQALSGLGRSKEVLKEFLYCLALNPECNSVKKEAQKVMCEVLFSATANVHENLTSSIQSRLKAQGHSHMNAQALLEEGDAGSSENSSEKSDMLGNTNSSVLYFILGLHFEEDKKALESILPTAPSAGLKRQFPDDVEDAPDLNAPGKIPKKDLSLQRSPNSETEESQGLSLDVTDFECALCMRLLFEPVTTPCGHTFCLKCLERCLDHAPHCPLCKDKLSELLASRNFNITVLAEELIFRYLPDELSDRKRIYDEEMSELSNLTRDVPIFVCAMAFPTVPCPLHVFEPRYRLMIRRCMETGTKRFGMCLSAEHAGLSEYGCMLEIKDVRTFPDGSSVVDAIGISRFRVLSHRHRDGYNTADIEYLEDEKVEGPEYEELAALHDSVHQQSVSWFASLQDRMKEQILSHFGVMPDREPEPQSNPSGPAWSWWILAVLPLERKAQLAILGMTSLKERLLAIRRILVIITRKMNSRQELANARERNN

SEQ ID NO: 23808 - protein, 759 aa, Homo sapiens
MESVRIEQMLSLPAEVSSDNLESAERGASAAQVDMGPHPKVAAEGPAPLPTREPEQEQSPGTSTPESKVLLTQADALASRGRIREALEVYRQLSERQQLVAEQLEQLVRCLAEKVPQGEALAPAPPDEGSTASGTVAAEETGAAAAAAATEVWDGFKCRKCHGFLSDPVSLSCGHTFCKLCLERGRAADRRCALCGVKLSALMVATGRARGARRAGQQPPPPLRVNVVLSGLLGKLFPGPARASQLRHEGNRLYRERQVEAALLKYNEAVKLAPNDHLLYSNRSQIYFTLESHENALHDAEIACKLRPMGFKAHFRKAQALATLGKVEEALREFLYCVSLDGKNKRARCEAQRDNLELPHCSSQEEAAARGDGSSLMDPAKVKGDGQQHHMKDQEEEEEKWDATSPKAASSKTGKCQEKKRKHCQIESQEETGMPNKASKQDPPTDQGDKPALSLPLASFDASDLECALCMRLFYEPVTTPCGHTFCLKCLERCLDHNAKCPLCKDGLSQCLASRKYSKNVIMEELIAKFLPEELKERRKLYEEEMEELSNLNKNVPIFVCTMAYPTVPCPLHIFEPCYRLMIRRCIETGTRQFGMCLGDPVKGFAEYGCILEIRNVQFFADGRSVVDSIGKRRFRVLHQSQRDGYNTADIEYIEDQKVQGEDCAELMGLHNCVYQQASLWFHSLKLSLKNRILNHFGPMPEKDADPQMNPNGPAWCWWMLAVLPLESRAQLPFLAMRSLKDRLNGIRRVLAFISRNQN

SEQ ID NO: 23809 - protein, 718 aa, Homo sapiens
MESVRIEQMLSLPAEVSSDNLESAERGASAAQVDMGPHPKVAAEGPAPLPTREPEQEQSPGTSTPESKVLLTQADALASRGRIREALEVYRQLSERQQLVAEQLEQLVRCLAEKVPQGEALAPAPPDEGSTASGTVAAEETGAAAAAAATEVWDGFKCRKCHGFLSDPVSLSCGHTFCKLCLERGRAADRRCALCGVKLSALMVATGRARGARRAGQQPPPPLRVNVVLSGLLGKLFPGPARASQLRHEGNRLYRERQVEAALLKYNEAVKLAPNDHLLYSNRSQIYFTLESHENALHDAEIACKLRPMGFKDNLELPHCSSQEEAAARGDGSSLMDPAKVKGDGQQHHMKDQEEEEEKWDATSPKAASSKTGKCQEKKRKHCQIESQEETGMPNKASKQDPPTDQGDKPALSLPLASFDASDLECALCMRLFYEPVTTPCGHTFCLKCLERCLDHNAKCPLCKDGLSQCLASRKYSKNVIMEELIAKFLPEELKERRKLYEEEMEELSNLNKNVPIFVCTMAYPTVPCPLHIFEPCYRLMIRRCIETGTRQFGMCLGDPVKGFAEYGCILEIRNVQFFADGRSVVDSIGKRRFRVLHQSQRDGYNTADIEYIEDQKVQGEDCAELMGLHNCVYQQASLWFHSLKLSLKNRILNHFGPMPEKDADPQMNPNGPAWCWWMLAVLPLESRAQLPFLAMRSLKDRLNGIRRVLAFISRNQN

SEQ ID NO: 23810 - protein, 610 aa, Homo sapiens
MESVRIEQMLSLPAEVSSDNLESAERGASAAQVDMGPHPKVAAEGPAPLPTREPEQEQSPGTSTPESKVLLTQADALASRGRIREALEVYRQLSERQQLVAEQLEQLVRCLAEKVPQGEALAPAPPDEGSTASGTVAAEETGAAAAAAATEVWDGFKCRKCHGFLSDPVSLSCGHTFCKLCLERGRAADRRCALCGVKLSALMVATGRARGARRAGQQPPPPLRVNVVLSGLLGKLFPGPARASQLRHEGNRLYRERQVEAALLKYNEAVKLAPNDHLLYSNRSQIYFTLESHENALHDAEIACKLRPMGFKAHFRKAQALATLGKVEEALREFLYCVSLDGKNKRARCEAQRDNLELPHCSSQEEAAARGDGSSLMDPAKVKGDGQQHHMKDQEEEEEKWDATSPKAASSKTGKCQEKKRKHCQIESQEETGMPNKASKQDPPTDQGDKPALSLPLASFDASDLECALCMRLFYEPVTTPCGHTFCLKCLERCLDHNAKCPLCKDGLSQCLASRKYSKNVIMEELIAKFLPEELKERRKLYEEEMEELSNLNKNVPIFVCTMAYPTVPCPLHIFEPCYRLMIRRCIETGTRQFGMCLGDPVKGHCLLCN

SEQ ID NO: 23811 - protein, 2850 aa, Homo sapiens
MPKLLQGVITVIDVFYQYATQHGEYDTLNKAELKELLENEFHQILKNPNDPDTVDIILQSLDRDHNKKVDFTEYLLMIFKLVQARNKIIGKDYCQVSGSKLRDDTHQHQEEQEETEKEENKRQESSFSHSSWSAGENDSYSRNVRGSLKPGTESISRRLSFQRDFSGQHNSYSGQSSSYGEQNSDSHQSSGRGQCGSGSGQSPNYGQHGSGSGQSSSNDTHGSGSGQSSGFSQHKSSSGQSSGYSQHGSGSGHSSGYGQHGSRSGQSSRGERHRSSSGSSSSYGQHGSGSRQSLGHGRQGSGSRQSPSHVRHGSGSGHSSSHGQHGSGSSYSYSRGHYESGSGQTSGFGQHESGSGQSSGYSKHGSGSGHSSSQGQHGSTSGQASSSGQHGSSSRQSSSYGQHESASRHSSGRGQHSSGSGQSPGHGQRGSGSGQSPSSGQHGTGFGRSSSSGPYVSGSGYSSGFGHHESSSEHSSGYTQHGSGSGHSSGHGQHGSRSGQSSRGERQGSSAGSSSSYGQHGSGSRQSLGHSRHGSGSGQSPSPSRGRHESGSRQSSSYGPHGYGSGRSSSRGPYESGSGHSSGLGHQESRSGQSSGYGQHGSSSGHSSTHGQHGSTSGQSSSCGQHGATSGQSSSHGQHGSGSSQSSRYGQQGSGSGQSPSRGRHGSDFGHSSSYGQHGSGSGWSSSNGPHGSVSGQSSGFGHKSGSGQSSGYSQHGSGSSHSSGYRKHGSRSGQSSRSEQHGSSSGLSSSYGQHGSGSHQSSGHGRQGSGSGHSPSRVRHGSSSGHSSSHGQHGSGTSCSSSCGHYESGSGQASGFGQHESGSGQGYSQHGSASGHFSSQGRHGSTSGQSSSSGQHDSSSGQSSSYGQHESASHHASGRGRHGSGSGQSPGHGQRGSGSGQSPSYGRHGSGSGRSSSSGRHGSGSGQSSGFGHKSSSGQSSGYTQHGSGSGHSSSYEQHGSRSGQSSRSEQHGSSSGSSSSYGQHGSGSRQSLGHGQHGSGSGQSPSPSRGRHGSGSGQSSSYGPYRSGSGWSSSRGPYESGSGHSSGLGHRESRSGQSSGYGQHGSSSGHSSTHGQHGSTSGQSSSCGQHGASSGQSSSHGQHGSGSSQSSGYGRQGSGSGQSPGHGQRGSGSRQSPSYGRHGSGSGRSSSSGQHGSGLGESSGFGHHESSSGQSSSYSQHGSGSGHSSGYGQHGSRSGQSSRGERHGSSSGSSSHYGQHGSGSRQSSGHGRQGSGSGHSPSRGRHGSGLGHSSSHGQHGSGSGRSSSRGPYESRSGHSSVFGQHESGSGHSSAYSQHGSGSGHFCSQGQHGSTSGQSSTFDQEGSSTGQSSSYGHRGSGSSQSSGYGRHGAGSGQSPSRGRHGSGSGHSSSYGQHGSGSGWSSSSGRHGSGSGQSSGFGHHESSSWQSSGCTQHGSGSGHSSSYEQHGSRSGQSSRGERHGSSSGSSSSYGQHGSGSRQSLGHGQHGSGSGQSPSPSRGRHGSGSGQSSSYSPYGSGSGWSSSRGPYESGSSHSSGLGHRESRSGQSSGYGQHGSSSGHSSTHGQHGSTSGQSSSCGQHGASSGQSSSHGQHGSGSSQSSGYGRQGSGSGQSPGHGQRGSGSRQSPSYGRHGSGSGRSSSSGQHGSGLGESSGFGHHESSSGQSSSYSQHGSGSGHSSGYGQHGSRSGQSSRGERHGSSSRSSSRYGQHGSGSRQSSGHGRQGSGSGQSPSRGRHGSGLGHSSSHGQHGSGSGRSSSRGPYESRSGHSSVFGQHESGSGHSSAYSQHGSGSGHFCSQGQHGSTSGQSSTFDQEGSSTGQSSSHGQHGSGSSQSSSYGQQGSGSGQSPSRGRHGSGSGHSSSYGQHGSGSGWSSSSGRHGSGSGQSSGFGHHESSSWQSSGYTQHGSGSGHSSSYEQHGSRSGQSSRGEQHGSSSGSSSSYGQHGSGSRQSLGHGQHGSGSGQSPSPSRGRHGSGSGQSSSYGPYGSGSGWSSSRGPYESGSGHSSGLGHRESRSGQSSGYGQHGSSSGHSSTHGQHGSASGQSSSCGQHGASSGQSSSHGQHGSGSSQSSGYGRQGSGSGQSPGHGQRGSGSRQSPSYGRHGSGSGRSSSSGQHGPGLGESSGFGHHESSSGQSSSYSQHGSGSGHSSGYGQHGSRSGQSSRGERHGSSSGSSSRYGQHGSGSRQSSGHGRQGSGSGHSPSRGRHGSGSGHSSSHGQHGSGSGRSSSRGPYESRSGHSSVFGQHESGSGHSSAYSQHGSGSGHFCSQGQHGSTSGQSSTFDQEGSSTGQSSSHGQHGSGSSQSSSYGQQGSGSGQSPSRGRHGSGSGHSSSYGQHGSGSGWSSSSGRHGSGSGQSSGFGHHESSSWQSSGYTQHGSGSGHSSSYEQHGSRSGQSSRGERHGSSSGSSSSYGQHGSGSRQSLGHGQHGSGSGQSPSPSRGRHGSGSGQSSSYSPYGSGSGWSSSRGPYESGSGHSSGLGHRESRSGQSSGYGQHGSSSGHSSTHGQHGSTSGQSSSCGQHGASSGQSSSHGQHGSGSSQSSGYGRQGSGSGQSPGHGQRGSGSRQSPSYGRHGSGSGRSSSSGQHGSGLGESSGFGHHESSSGQSSSYSQHGSGSGHSSGYGQHGSRSGQSSRGERHGSSSGSSSHYGQHGSGSRQSSGHGRQGSGSGQSPSRGRHGSGLGHSSSHGQHGSGSGRSSSRGPYESRLGHSSVFGQHESGSGHSSAYSQHGSGSGHFCSQGQHGSTSGQSSTFDQEGSSTGQSSSYGHRGSGSSQSSGYGRHGAGSGQSLSHGRHGSGSGQSSSYGQHGSGSGQSSGYSQHGSGSGQDGYSYCKGGSNHDGGSSGSYFLSFPSSTSPYEYVQEQRCYFYQ

SEQ ID NO: 23812 - protein, 724 aa, Homo sapiens
MPEEVHHGEEEVETFAFQAEIAQLMSLIINTFYSNKEIFLRELISNASDALDKIRYESLTDPSKLDSGKELKIDIIPNPQERTLTLVDTGIGMTKADLINNLGTIAKSGTKAFMEALQAGADISMIGQFGVGFYSAYLVAEKVVVITKHNDDEQYAWESSAGGSFTVRADHGEPIGRGTKVILHLKEDQTEYLEERRVKEVVKKHSQFIGYPITLYLEKEREKEISDDEAEEEKGEKEEEDKDDEEKPKIEDVGSDEEDDSGKDKKKKTKKIKEKYIDQEELNKTKPIWTRNPDDITQEEYGEFYKSLTNDWEDHLAVKHFSVEGQLEFRALLFIPRRAPFDLFENKKKKNNIKLYVRRVFIMDSCDELIPEYLNFIRGVVDSEDLPLNISREMLQQSKILKVIRKNIVKKCLELFSELAEDKENYKKFYEAFSKNLKLGIHEDSTNRRRLSELLRYHTSQSGDEMTSLSEYVSRMKETQKSIYYITGESKEQVANSAFVERVRKRGFEVVYMTEPIDEYCVQQLKEFDGKSLVSVTKEGLELPEDEEEKKKMEESKAKFENLCKLMKEILDKKVEKVTISNRLVSSPCCIVTSTYGWTANMERIMKAQALRDNSTMGYMMAKKHLEINPDHPIVETLRQKAEADKNDKAVKDLVVLLFETALLSSGFSLEDPQTHSNRIYRMIKLGLGIDEDEVAAEEPNAAVPDEIPPLEGDEDASRMEEVD

SEQ ID NO: 23813 - protein, 453 aa, Homo sapiens
MQARALLLAALAALALAREPPAAPCPARCDVSRCPSPRCPGGYVPDLCNCCLVCAASEGEPCGGPLDSPCGESLECVRGLCRCRWSHAVCGTDGHTYANVCALQAASRRALQLSGTPVRQLQKGACPLGLHQLSSPRYKFNFIADVVEKIAPAVVHIELFLRHPLFGRNVPLSSGSGFIMSEAGLIITNAHVVSSNSAAPGRQQLKVQLQNGDSYEATIKDIDKKSDIATIKIHPKKKLPVLLLGHSADLRPGEFVVAIGSPFALQNTVTTGIVSTAQREGRELGLRDSDMDYIQTDAIINYGNSGGPLVNLDGEVIGINTLKVTAGISFAIPSDRITRFLTEFQDKQIKDWKKRFIGIRMRTITPSLVDELKASNPDFPEVSSGIYVQEVAPNSPSQRGGIQDGDIIVKVNGRPLVDSSELQEAVLTESPLLLEVRRGNDDLLFSIAPEVVM

SEQ ID NO: 23814 - protein, 357 aa, Homo sapiens
MQARALLLAALAALALAREPPAAPCPARCDVSRCPSPRCPGGYVPDLCNCCLVCAASEGEPCGGPLDSPCGESLECVRGLCRCRWSHAVCGTDGHTYANVCALQAASRRALQLSGTPVRQLQKGACPLGLHQLSSPRYKFNFIADVVEKIAPAVVHIELFLRHPLFGRNVPLSSGSGFIMSEAGLIITNAHVVSSNSAAPGRQQLKVQLQNGDSYEATIKDIDKKSDIATIKIHPKKKLPVLLLGHSADLRPGEFVVAIGSPFALQNTVTTGIVSTAQREGRELGLRDSDMDYIQTDAIINYGNSGGPLVNLDGEVIGINTLKVTAGISFAIPSDRITRFLTEFQDKQIKAPSLAVH

SEQ ID NO: 23815 - protein, 91 aa, Homo sapiens
MCPCPLHRGRGPPAVCACSAGRLGLRSSAAQLTAARLKALGDELHQRTMWRRRARSRRAPAPGALPTYWPWLCAAAQVAALAAWLLGRRNL

SEQ ID NO: 23816 - protein, 458 aa, Homo sapiens
MAAPRAGRGAGWSLRAWRALGGIRWGRRPRLTPDLRALLTSGTSDPRARVTYGTPSLWARLSVGVTEPRACLTSGTPGPRAQLTAVTPDTRTREASENSGTRSRAWLAVALGAGGAVLLLLWGGGRGPPAVLAAVPSPPPASPRSQYNFIADVVEKTAPAVVYIEILDRHPFLGREVPISNGSGFVVAADGLIVTNAHVVADRRRVRVRLLSGDTYEAVVTAVDPVADIATLRIQTKEPLPTLPLGRSADVRQGEFVVAMGSPFALQNTITSGIVSSAQRPARDLGLPQTNVEYIQTDAAIDFGNSGGPLVNLDGEVIGVNTMKVTAGISFAIPSDRLREFLHRGEKKNSSSGISGSQRRYIGVMMLTLSPSILAELQLREPSFPDVQHGVLIHKVILGSPAHRAGLRPGDVILAIGEQMVQNAEDVYEAVRTQSQLAVQIRRGRETLTLYVTPEVTE

SEQ ID NO: 23817 - protein, 361 aa, Homo sapiens
MAAPRAGRGAGWSLRAWRALGGIRWGRRPRLTPDLRALLTSGTSDPRARVTYGTPSLWARLSVGVTEPRACLTSGTPGPRAQLTAVTPDTRTREASENSGTRSRAWLAVALGAGGAVLLLLWGGGRGPPAVLAAVPSPPPASPRSQYNFIADVVEKTAPAVVYIEILDRHPFLGREVPISNGSGFVVAADGLIVTNAHVVADRRRVRVRLLSGDTYEAVVTAVDPVADIATLRIQTKFGNSGGPLVNLDGEVIGVNTMKVTAGISFAIPSDRLREFLHRGEKKNSSSGISGSQRRYIGVMMLTLSPRAGLRPGDVILAIGEQMVQNAEDVYEAVRTQSQLAVQIRRGRETLTLYVTPEVTE

SEQ ID NO: 23818 - protein, 436 aa, Homo sapiens
MAAPRAGRGAGWSLRAWRALGGIRWGRRPRLTPDLRALLTSGTSDPRARVTYGTPSLWARLSVGVTEPRACLTSGTPGPRAQLTAVTPDTRTREASENSGTRSRAWLAVALGAGGAVLLLLWGGGRGPPAVLAAVPSPPPASPRSQYNFIADVVEKTAPAVVYIEILDRHPFLGREVPISNGSGFVVAADGLIVTNAHVVADRRRVRVRLLSGDTYEAVVTAVDPVADIATLRIQTKEPLPTLPLGRSADVRQGEFVVAMGSPFALQNTITSGIVSSAQRPARDLGLPQTNVEYIQTDAAIDFGNSGGPLVNLARELGAVSLQDGEVIGVNTMKVTAGISFAIPSDRLREFLHRGEKKNSSSGISGSQRRYIGVMMLTLSPRAGLRPGDVILAIGEQMVQNAEDVYEAVRTQSQLAVQIRRGRETLTLYVTPEVTE

SEQ ID NO: 23819 - protein, 377 aa, Homo sapiens
MAAPRAGRGAGWSLRAWRALGGIRWGRRPRLTPDLRALLTSGTSDPRARVTYGTPSLWARLSVGVTEPRACLTSGTPGPRAQLTAVTPDTRTREASENSGTRSRAWLAVALGAGGAVLLLLWGGGRGPPAVLAAVPSPPPASPRSQYNFIADVVEKTAPAVVYIEILDRHPFLGREVPISNGSGFVVAADGLIVTNAHVVADRRRVRVRLLSGDTYEAVVTAVDPVADIATLRIQTKEPLPTLPLGRSADVRQGEFVVAMGSPFALQNTITSGIVSSAQRPARDLGLPQTNVEYIQTDAAIDFGNSGGPLVNLVSETSFLPRIPAPGQCGKGRFPLIQGCLVKFLSSSLLAISQYPTRSPQHLLVLLFGCPHPLLFV

SEQ ID NO: 23820 - protein, 352 aa, Homo sapiens
MTEAGKLPLPLPPRLDWFVHTQMGQLAQDGVPEWFHGAISREDAENLLESQPLGSFLIRVSHSHVGYTLSYKAQSSCCHFMVKLLDDGTFMIPGEKVAHTSLDALVTFHQQKPIEPRRELLTQPCRQKDPANVDYEDLFLYSNAVAEEAACPVSAPEEASPKPVLCHQSKERKPSAEMNRITTKEATSSCPPKSPLGETRQKLWRSLKMLPERGQRVRQQLKSHLATVNLSSLLDVRRSTVISGPGTGKGSQDHSGDPTSGDRGYTDPCVATSLKSPSQPQAPKDRKVPTRKAERSVSCIEVTPGDRSWHQMVVRALSSQESKPEHQGLAEPENDQLPEEYQQPPPFAPGYC

SEQ ID NO: 23821 - protein, 295 aa, Homo sapiens
MRGSRMSQPPQCLRRAQSSCCHFMVKLLDDGTFMIPGEKVAHTSLDALVTFHQQKPIEPRRELLTQPCRQKDPANVDYEDLFLYSNAVAEEAACPVSAPEEASPKPVLCHQSKERKPSAEMNRITTKEATSSCPPKSPLGETRQKLWRSLKMLPERGQRVRQQLKSHLATVNLSSLLDVRRSTVISGPGTGKGSQDHSGDPTSGDRGYTDPCVATSLKSPSQPQAPKDRKVPTRKAERSVSCIEVTPGDRSWHQMVVRALSSQESKPEHQGLAEPENDQLPEEYQQPPPFAPGYC

SEQ ID NO: 23822 - protein, 235 aa, Homo sapiens
MWRGRAGALLRVWGFWPTGVPRRRPLSCDAASQAGSNYPRCWNCGGPWGPGREDRFFCPQCRALQAPDPTRDYFSLMDCNRSFRVDTAKLQHRYQQLQRLVHPDFFSQRSQTEKDFSEKHSTLVNDAYKTLLAPLSRGLYLLKLHGIEIPERTDYEMDRQFLIEIMEINEKLAEAESEAAMKEIESIVKAKQKEFTDNVSSAFEQDDFEEAKEILTKMRYFSNIEEKIKLKKIPL

SEQ ID NO: 23823 - protein, 456 aa, Homo sapiens
MARWPAPPPPPPPPPPLAAPPPPGASAKGPPARKLLFMCTLSLSVTYLCYSLLGGSGSLQFPLALQESPGAAAEPPPSPPPPSLLPTPVRLGAPSQPPAPPPLDNASHGEPPEPPEQPAAPGTDGWGLPSGGGGAQDAWLRTPLAPSEMITAQSALPEREAQESSTTDEDLAGRRAANGSSERGGAVSTPDYGEKKLPQALIIGVKKGGTRALLEAIRVHPDVRAVGVEPHFFDRNYEKGLEWYRNVMPKTLDGQITMEKTPSYFVTNEAPKRIHSMAKDIKLIVVVRNPVTRAISDYTQTLSKKPEIPTFEVLAFKNRTLGLIDASWSAIRIGIYALHLENWLQYFPLSQILFVSGERLIVDPAGEMAKVQDFLGLKRVVTEKHFYFNKTKGFPCLKKPEDSSAPRCLGKSKGRTHPRIDPDVIHRLRKFYKPFNLMFYQMTGQDFQWEQEEGDK

SEQ ID NO: 23824 - protein, 307 aa, Homo sapiens
MAALLLGAVLLVAQPQLVPSRPAELGQQELLRKAGTLQDDVRDGVAPNGSAQQLPQTIIIGVRKGGTRALLEMLSLHPDVAAAENEVHFFDWEEHYSHGLGWYLSQMPFSWPHQLTVEKTPAYFTSPKVPERVYSMNPSIRLLLILRDPSERVLSDYTQVFYNHMQKHKPYPSIEEFLVRDGRLNVDYKALNRSLYHVHMQNWLRFFPLRHIHIVDGDRLIRDPFPEIQKVERFLKLSPQINASNFYFNKTKGFYCLRDSGRDRCLHESKGRAHPQVDPKLLNKLHEYFHEPNKKFFELVGRTFDWH

SEQ ID NO: 23825 - protein, 371 aa, Homo sapiens
MAAPALRLCHIAFHVPAGQPLARNLQRLFGFQPLASREVDGWRQLALRSGDAVFLVNEGAGSGEPLYGLDPRHAVPSATNLCFDVADAGAATRELAALGCSVPVPPVRVRDAQGAATYAVVSSPAGILSLTLLERAGYRGPFLPGFRPVSSAPGPGWVSRVDHLTLACTPGSSPTLLRWFHDCLGFCHLPLSPGEDPELGLEMTAGFGLGGLRLTALQAQPGSIVPTLVLAESLPGATTRQDQVEQFLARHKGPGLQHVGLYTPNIVEATEGVATAGGQFLAPPGAYYQQPGKERQIRAAGHEPHLLARQGILLDGDKGKFLLQVFTKSLFTEDTFFLELIQRQGATGFGQGNIRALWQSVQEQSARSQEA

SEQ ID NO: 23826 - protein, 641 aa, Homo sapiens
MAKAAAIGIDLGTTYSCVGVFQHGKVEIIANDQGNRTTPSYVAFTDTERLIGDAAKNQVALNPQNTVFDAKRLIGRKFGDPVVQSDMKHWPFQVINDGDKPKVQVSYKGETKAFYPEEISSMVLTKMKEIAEAYLGYPVTNAVITVPAYFNDSQRQATKDAGVIAGLNVLRIINEPTAAAIAYGLDRTGKGERNVLIFDLGGGTFDVSILTIDDGIFEVKATAGDTHLGGEDFDNRLVNHFVEEFKRKHKKDISQNKRAVRRLRTACERAKRTLSSSTQASLEIDSLFEGIDFYTSITRARFEELCSDLFRSTLEPVEKALRDAKLDKAQIHDLVLVGGSTRIPKVQKLLQDFFNGRDLNKSINPDEAVAYGAAVQAAILMGDKSENVQDLLLLDVAPLSLGLETAGGVMTALIKRNSTIPTKQTQIFTTYSDNQPGVLIQVYEGERAMTKDNNLLGRFELSGIPPAPRGVPQIEVTFDIDANGILNVTATDKSTGKANKITITNDKGRLSKEEIERMVQEAEKYKAEDEVQRERVSAKNALESYAFNMKSAVEDEGLKGKISEADKKKVLDKCQEVISWLDANTLAEKDEFEHKRKELEQVCNPIISGLYQGAGGPGPGGFGAQGPKGGSGSGPTIEEVD

SEQ ID NO: 23827 - protein, 586 aa, Homo sapiens
MAKAAAIGIDLGTTYSCVGVFQHGKVEIIANDQGNRTTPSYVAFTDTERLIGDAAKNQVALNPQNTVFDAKRLIGRKFGDPVVQSDMKHWPFQVINDSQRQATKDAGVIAGLNVLRIINEPTAAAIAYGLDRTGKGERNVLIFDLGGGTFDVSILTIDDGIFEVKATAGDTHLGGEDFDNRLVNHFVEEFKRKHKKDISQNKRAVRRLRTACERAKRTLSSSTQASLEIDSLFEGIDFYTSITRARFEELCSDLFRSTLEPVEKALRDAKLDKAQIHDLVLVGGSTRIPKVQKLLQDFFNGRDLNKSINPDEAVAYGAAVQAAILMGDKSENVQDLLLLDVAPLSLGLETAGGVMTALIKRNSTIPTKQTQIFTTYSDNQPGVLIQVYEGERAMTKDNNLLGRFELSGIPPAPRGVPQIEVTFDIDANGILNVTATDKSTGKANKITITNDKGRLSKEEIERMVQEAEKYKAEDEVQRERVSAKNALESYAFNMKSAVEDEGLKGKISEADKKKVLDKCQEVISWLDANTLAEKDEFEHKRKELEQVCNPIISGLYQGAGGPGPGGFGAQGPKGGSGSGPTIEEVD

SEQ ID NO: 23828 - protein, 631 aa, Homo sapiens
MVSKLSQLQTELLAALLESGLSKEALIQALGEPGPYLLAGEGPLDKGESCGGGRGELAELPNGLGETRGSEDETDDDGEDFTPPILKELENLSPEEAAHQKAVVETLLQEDPWRVAKMVKSYLQQHNIPQREVVDTTGLNQSHLSQHLNKGTPMKTQKRAALYTWYVRKQREVAQQFTHAGQGGLIEEPTGDELPTKKGRRNRFKWGPASQQILFQAYERQKNPSKEERETLVEECNRAECIQRGVSPSQAQGLGSNLVTEVRVYNWFANRRKEEAFRHKLAMDTYSGPPPGPGPGPALPAHSSPGLPPPALSPSKVHGVRYGQPATSETAEVPSSSGGPLVTVSTPLHQVSPTGLEPSHSLLSTEAKLVSAAGGPLPPVSTLTALHSLEQTSPGLNQQPQNLIMASLPGVMTIGPGEPASLGPTFTNTGASTLVIGLASTQAQSVPVINSMGSSLTTLQPVQFSQPLHPSYQQPLMPPVQSHVTQSPFMATMAQLQSPHALYSHKPEVAQYTHTGLLPQTMLITDTTNLSALASLTPTKQVFTSDTEASSESGLHTPASQATTLHVPSQDPAGIQHLQPAHRLSASPTVSSSSLVLYQSSDSSNGQSHLLPSNHSVIETFISTQMASSSQ

SEQ ID NO: 23829 - protein, 572 aa, Homo sapiens
MVSKLSQLQTELLAALLESGLSKEALIQALGEPGPYLLAGEGPLDKGESCGGGRGELAELPNGLGETRGSEDETDDDGEDFTPPILKELENLSPEEAAHQKAVVETLLQEDPWRVAKMVKSYLQQHNIPQREVVDTTGLNQSHLSQHLNKGTPMKTQKRAALYTWYVRKQREVAQQFTHAGQGGLIEEPTGDELPTKKGRRNRFKWGPASQQILFQAYERQKNPSKEERETLVEECNRAECIQRGVSPSQAQGLGSNLVTEVRVYNWFANRRKEEAFRHKLAMDTYSGPPPGPGPGPALPAHSSPGLPPPALSPSKVHGVRYGQPATSETAEVPSSSGGPLVTVSTPLHQVSPTGLEPSHSLLSTEAKLVSAAGGPLPPVSTLTALHSLEQTSPGLNQQPQNLIMASLPGVMTIGPGEPASLGPTFTNTGASTLVIGLASTQAQSVPVINSMGSSLTTLQPVQFSQPLHPSYQQPLMPPVQSHVTQSPFMATMAQLQSPHGEHPVPHTAGDDDRGWLSMDAGERGAWQALQSACVSGTSVFPDSSNGQSHLLPSNHSVIETFISTQMASSSQ

SEQ ID NO: 23830 - protein, 524 aa, Homo sapiens
MVSKLSQLQTELLAALLESGLSKEALIQALGEPGPYLLAGEGPLDKGESCGGGRGELAELPNGLGETRGSEDETDDDGEDFTPPILKELENLSPEEAAHQKAVVETLLQEDPWRVAKMVKSYLQQHNIPQREVVDTTGLNQSHLSQHLNKGTPMKTQKRAALYTWYVRKQREVAQQFTHAGQGGLIEEPTGDELPTKKGRRNRFKWGPASQQILFQAYERQKNPSKEERETLVEECNRAECIQRGVSPSQAQGLGSNLVTEVRVYNWFANRRKEEAFRHKLAMDTYSGPPPGPGPGPALPAHSSPGLPPPALSPSKVHGVRYGQPATSETAEVPSSSGGPLVTVSTPLHQVSPTGLEPSHSLLSTEAKLVSAAGGPLPPVSTLTALHSLEQTSPGLNQQPQNLIMASLPGVMTIGPGEPASLGPTFTNTGASTLVIGKLVGMGGHLGGRLMGQPQNPGAGRATGTHSFIHSFIQHVFIQCLLWTSHCATSVIPGDSSNGQSHLLPSNHSVIETFISTQMASSSQ

SEQ ID NO: 23831 - protein, 278 aa, Homo sapiens
MVSKLSQLQTELLAALLESGLSKEALIQALGEPGPYLLAGEGPLDKGESCGGGRGELAELPNGLGETRGSEDETDDDGEDFTPPILKELENLSPEEAAHQKAVVETLLQEDPWRVAKMVKSYLQQHNIPQREVVDTTGLNQSHLSQHLNKGTPMKTQKRAALYTWYVRKQREVAQRRNASREGCPHHRHRGWAPTSSRRCVSTTGLPTGAKKKPSGTSWPWTRTAGPPQGQARDLRCPLTAPLACLHLPSPPVRSTVCAMDSLRPVRLQKYPQAAAVP

SEQ ID NO: 23832 - protein, 247 aa, Homo sapiens
MVSKLSQLQTELLAALLESGLSKEALIQALGEPGPYLLAGEGPLDKGESCGGGRGELAELPNGLGETRGSEDETDDDGEDFTPPILKELENLSPEEAAHQKAVVETLLQEDPWRVAKMVKSYLQQHNIPQREVVDTTGLNQSHLSQHLNKGTPMKTQKRAALYTWYVRKQREVAQQFTHAGQGGLIEEPTGDELPTKKGRRNRFKWGPASQQILFQAYERQKNPSKEERETLVEECNRCALWTACDQ

SEQ ID NO: 23833 - protein, 403 aa, Homo sapiens
MVKSYLQQHNIPQREVVDTTGLNQSHLSQHLNKGTPMKTQKRAALYTWYVRKQREVAQQFTHAGQGGLIEEPTGDELPTKKGRRNRFKWGPASQQILFQAYERQKNPSKEERETLVEECNRAECIQRGVSPSQAQGLGSNLVTEVRVYNWFANRRKEEAFRHKLAMDTYSGPPPGPGPGPALPAHSSPGLPPPALSPSKVHGVRYGQPATSETAEVPSSSGGPLVTVSTPLHQVSPTGLEPSHSLLSTEAKLVSAAGGPLPPVSTLTALHSLEQTSPGLNQQPQNLIMASLPGVMTIGPGEPASLGPTFTNTGASTLVIGKLVGMGGHLGGRLMGQPQNPGAGRATGTHSFIHTTCIYPVPTLDQSLCYISDTWVNQTDQNLSNSSREAGTKHNTSILWYLRR

SEQ ID NO: 23834 - protein, 662 aa, Homo sapiens
MVSKLSQLQTELLAALLESGLSKEALIQALGEPGPYLLAGEGPLDKGESCGGGRGELAELPNGLGETRGSEDETDDDGEDFTPPILKELENLSPEEAAHQKAVVETLLQEDPWRVAKMVKSYLQQHNIPQREVVDTTGLNQSHLSQHLNKGTPMKTQKRAALYTWYVRKQREVAQQFTHAGQGGLIEEPTGDELPTKKGRRNRFKWGPASQQILFQAYERQKNPSKEERETLVEECNRAECIQRGVSPSQAQGLGSNLVTEVRVYNWFANRRKEEAFRHKLAMDTYSGPPPGPGPGPALPAHSSPGLPPPALSPSKVHGVRYGQPATSETAEVPSSSGGPLVTVSTPLHQVSPTGLEPSHSLLSTEAKLVSAAGGPLPPVSTLTALHSLEQTSPGLNQQPQNLIMASLPGVMTIGPGEPASLGPTFTNTGASTLVIGLASTQAQSVPVINSMGSSLTTLQPVQFSQPLHPSYQQPLMPPVQSHVTQSPFMATMAQLQSPHALYSHKPEVAQYTHTGLLPQTMLITDTTNLSALASLTPTKQVRSRPAGPPLACDRAPHPHIPRAQEAALLPQVFTSDTEASSESGLHTPASQATTLHVPSQDPAGIQHLQPAHRLSASPTVSSSSLVLYQSSDSSNGQSHLLPSNHSVIETFISTQMASSSQ

SEQ ID NO: 23835 - protein, 119 aa, Homo sapiens
MVSKLSQLQTELLAALLESGLSKEALIQALGEPGPYLLAGEGPLDKGESCGGGRGELAELPNGLGETRGSEDETDDDGEDFTPPILKELENLSPEEAAHQKAVVETLLQVHPCRAGRAD

SEQ ID NO: 23836 - protein, 465 aa, Homo sapiens
MNAQLTMEAIGELHGVSHEPVPAPADLLGGSPHARSSVAHRGSHLPPAHPRSMGMASLLDGGSGGGDYHHHHRAPEHSLAGPLHPTMTMACETPPGMSMPTTYTTLTPLQPLPPISTVSDKFPHHHHHHHHHHHPHHHQRLAGNVSGSFTLMRDERGLASMNNLYTPYHKDVAGMGQSLSPLSSSGLGSIHNSQQGLPHYAHPGAAMPTDKMLTPNGFEAHHPAMLGRHGEQHLTPTSAGMVPINGLPPHHPHAHLNAQGHGQLLGTAREPNPSVTGAQVSNGSNSGQMEEINTKEVAQRITTELKRYSIPQAIFAQRVLCRSQGTLSDLLRNPKPWSKLKSGRETFRRMWKWLQEPEFQRMSALRLAACKRKEQEHGKDRGNTPKKPRLVFTDVQRRTLHAIFKENKRPSKELQITISQQLGLELSTVSNFFMNARRRSLDKWQDEGSSNSGNSSSSSSTCTKA

SEQ ID NO: 23837 - protein, 293 aa, Homo sapiens
MASNVTNKMDPHSMNSRVFIGNLNTLVVKKSDVEAIFSKYGKIAGCSVHKGFAFVQYDKEKNARAAVAGEDGRMIASQVVDINLAAEPKVNRGNAGVKRSAAEMYGSSFDLDYNLQRDYYGGMYSFPARVPPPPPIALAVVPSKRQRISGNTSRRGKSGFNSKSGKRGSSKSGKLKGDDLQAIKQELTQIKQKVDSLLENLEKIEKEHCKQGVEVKNAKSEEEQTSSSSKKDKTHVKMESEGGADDSVEEGDLLCDDDNEDQGDNQLELIKDDEKGAEEGEDDRDRANGQDDS

SEQ ID NO: 23838 - protein, 306 aa, Homo sapiens
MASNVTNKTDPRSMNSRVFIGNLNTLVVKKSDVEAIFSKYGKIVGCSVHKGFAFVQYVNERNARAAVAGEDGRMIAGQVLDINLAAEPKVNRGKAGVKRSAAEMYGSVTEHPSPSPLLSSSFDLDYDFQRDYYDRMYSYPARVPPPPPIARAVVPSKRQRVSGNTSRRGKSGFNSKSGQRGSSKSGKLKGDDLQAIKKELTQIKQKVDSLLENLEKIEKEQSKQAVEMKNDKSEEEQSSSSVKKDETNVKMESEGGADDSAEEGDLLDDDDNEDRGDDQLELIKDDEKEAEEGEDDRDSANGEDDS

SEQ ID NO: 23839 - protein, 293 aa, Homo sapiens
MASNVTNKTDPRSMNSRVFIGNLNTLVVKKSDVEAIFSKYGKIVGCSVHKGFAFVQYVNERNARAAVAGEDGRMIAGQVLDINLAAEPKVNRGKAGVKRSAAEMYGSSFDLDYDFQRDYYDRMYSYPARVPPPPPIARAVVPSKRQRVSGNTSRRGKSGFNSKSGQRGSSKSGKLKGDDLQAIKKELTQIKQKVDSLLENLEKIEKEQSKQAVEMKNDKSEEEQSSSSVKKDETNVKMESEGGADDSAEEGDLLDDDDNEDRGDDQLELIKDDEKEAEEGEDDRDSANGEDDS

SEQ ID NO: 23840 - protein, 226 aa, Homo sapiens
MASNVTNKTDPRSMNSRVFIGNLNTLVVKKSDVEAIFSNSSFDLDYDFQRDYYDRMYSYPARVPPPPPIARAVVPSKRQRVSGNTSRRGKSGFNSKSGQRGSSKSGKLKGDDLQAIKKELTQIKQKVDSLLENLEKIEKEQSKQAVEMKNDKSEEEQSSSSVKKDETNVKMESEGGADDSAEEGDLLDDDDNEDRGDDQLELIKDDEKEAEEGEDDRDSANGEDDS

SEQ ID NO: 23841 - protein, 250 aa, Homo sapiens
MASNVTNKTDPRSMNSRVFIGNLNTLVVKKSDVEAIFSKYGKIVGCSVHKGFAFVQYVNERNARAAVAGEDGRMIAGQVLDINLAAEPKVNRGKAGVKRSAAEMYGSSFDLDYDFQRDYYDRMYSYPARVPPPPPIARAIKKELTQIKQKVDSLLENLEKIEKEQSKQAVEMKNDKSEEEQSSSSVKKDETNVKMESEGGADDSAEEGDLLDDDDNEDRGDDQLELIKDDEKEAEEGEDDRDSANGEDDS

SEQ ID NO: 23842 - protein, 633 aa, Homo sapiens
MANQVNGNAVQLKEEEEPMDTSSVTHTEHYKTLIEAGLPQKVAERLDEIFQTGLVAYVDLDERAIDALREFNEEGALSVLQQFKESDLSHVQNKSAFLCGVMKTYRQREKQGSKVQESTKGPDEAKIKALLERTGYTLDVTTGQRKYGGPPPDSVYSGVQPGIGTEVFVGKIPRDLYEDELVPLFEKAGPIWDLRLMMDPLSGQNRGYAFITFCGKEAAQEAVKLCDSYEIRPGKHLGVCISVANNRLFVGSIPKNKTKENILEEFSKVTEGLVDVILYHQPDDKKKNRGFCFLEYEDHKSAAQARRRLMSGKVKVWGNVVTVEWADPVEEPDPEVMAKVKVLFVRNLATTVTEEILEKSFSEFGKLERVKKLKDYAFVHFEDRGAAVKAMDEMNGKEIEGEEIEIVLAKPPDKKRKERQAARQASRSTAYEDYYYHPPPRMPPPIRGRGRGGGRGGYGYPPDYYGYEDYYDDYYGYDYHDYRGGYEDPYYGYDDGYAVRGRGGGRGGRGAPPPPRGRGAPPPRGRAGYSQRGAPLGPPRGSRGGRGGPAQQQRGRGSRGSRGNRGGNVGGKRKADGYNQPDSKRRQTNNQQNWGSQPIAQQPLQQGGDYSGNYGYNNDNQEFYQDTYGQQWK

SEQ ID NO: 23843 - protein, 636 aa, Homo sapiens
MANQVNGNAVQLKEEEEPMDTSSVTHTEHYKTLIEAGLPQKVAERLDEIFQTGLVAYVDLDERAIDALREFNEEGALSVLQQFKESDLSHVQNKSAFLCGVMKTYRQREKQGSKVQESTKGPDEAKIKALLERTGYTLDVTTGQRKYGGPPPDSVYSGVQPGIGTEVFVGKIPRDLYEDELVPLFEKAGPIWDLRLMMDPLSGQNRGYAFITFCGKEAAQEAVKLCDSYEIRPGKHLGVCISVANNRLFVGSIPKNKTKENILEEFSKVTGLTEGLVDVILYHQPDDKKKNRGFCFLEYEDHKSAAQARRRLMSGKVKVWGNVVTVEWADPVEEPDPEVMAKVKVLFVRNLATTVTEEILEKSFSEFGKLERVKKLKDYAFVHFEDRGAAVKAMDEMNGKEIEGEEIEIVLAKPPDKKRKERQAARQASRSTAYEDYYYHPPPRMPPPIRGRGRGGGRGGYGYPPDYYGYEDYYDDYYGYDYHDYRGGYEDPYYGYDDGYAVRGRGGGRGGRGAPPPPRGRGAPPPRGRAGYSQRGAPLGPPRGSRGGRGGPAQQQRGRGSRGSRGNRGGNVGGKRKADGYNQPDSKRRQTNNQQNWGSQPIAQQPLQQGGDYSGNYGYNNDNQEFYQDTYGQQWK

SEQ ID NO: 23844 - protein, 595 aa, Homo sapiens
MANQVNGNAVQLKEEEEPMDTSSVTHTEHYKTLIEAGLPQKVAERLDEIFQTGLVAYVDLDERAIDALREFNEEGALSVLQQFKESDLSHVQNKSAFLCGVMKTYRQREKQGSKVQESTKGPDEAKIKVFVGKIPRDLYEDELVPLFEKAGPIWDLRLMMDPLSGQNRGYAFITFCGKEAAQEAVKLCDSYEIRPGKHLGVCISVANNRLFVGSIPKNKTKENILEEFSKVTEGLVDVILYHQPDDKKKNRGFCFLEYEDHKSAAQARRRLMSGKVKVWGNVVTVEWADPVEEPDPEVMAKVKVLFVRNLATTVTEEILEKSFSEFGKLERVKKLKDYAFVHFEDRGAAVKAMDEMNGKEIEGEEIEIVLAKPPDKKRKERQAARQASRSTAYEDYYYHPPPRMPPPIRGRGRGGGRGGYGYPPDYYGYEDYYDDYYGYDYHDYRGGYEDPYYGYDDGYAVRGRGGGRGGRGAPPPPRGRGAPPPRGRAGYSQRGAPLGPPRGSRGGRGGPAQQQRGRGSRGSRGNRGGNVGGKRKADGYNQPDSKRRQTNNQQNWGSQPIAQQPLQQGGDYSGNYGYNNDNQEFYQDTYGQQWK

SEQ ID NO: 23845 - protein, 535 aa, Homo sapiens
MKTYRQREKQGSKVQESTKGPDEAKIKALLERTGYTLDVTTGQRKYGGPPPDSVYSGVQPGIGTEVFVGKIPRDLYEDELVPLFEKAGPIWDLRLMMDPLSGQNRGYAFITFCGKEAAQEAVKLCDSYEIRPGKHLGVCISVANNRLFVGSIPKNKTKENILEEFSKVTGLTEGLVDVILYHQPDDKKKNRGFCFLEYEDHKSAAQARRRLMSGKVKVWGNVVTVEWADPVEEPDPEVMAKVKVLFVRNLATTVTEEILEKSFSEFGKLERVKKLKDYAFVHFEDRGAAVKAMDEMNGKEIEGEEIEIVLAKPPDKKRKERQAARQASRSTAYEDYYYHPPPRMPPPIRGRGRGGGRGGYGYPPDYYGYEDYYDDYYGYDYHDYRGGYEDPYYGYDDGYAVRGRGGGRGGRGAPPPPRGRGAPPPRGRAGYSQRGAPLGPPRGSRGGRGGPAQQQRGRGSRGSRGNRGGNVGGKRKADGYNQPDSKRRQTNNQQNWGSQPIAQQPLQQGGDYSGNYGYNNDNQEFYQDTYGQQWK

SEQ ID NO: 23846 - protein, 196 aa, Homo sapiens
MADGQMPFSCHYPSRLRRDPFRDSPLSSRLLDDGFGMDPFPDDLTASWPDWALPRLSSAWPGTLRSGMVPRGPTATARFGVPAEGRTPPPFPGEPWKVCVNVHSFKPEELMVKTKDGYVEVSGKHEEKQQEGGIVSKNFTKKIQLPAEVDPVTVFASLSPEGLLIIEAPQVPPYSTFGESSFNNELPQDSQEVTCT

SEQ ID NO: 23847 - protein, 825 aa, Homo sapiens
MSSSPVNVKKLKVSELKEELKKRRLSDKGLKAELMERLQAALDDEEAGGRPAMEPGNGSLDLGGDSAGRSGAGLEQEAAAGGDEEEEEEEEEEEGISALDGDQMELGEENGAAGAADSGPMEEEEAASEDENGDDQGFQEGEDELGDEEEGAGDENGHGEQQPQPPATQQQQPQQQRGAAKEAAGKSSGPTSLFAVTVAPPGARQGQQQAGGKKKAEGGGGGGRPGAPAAGDGKTEQKGGDKKRGVKRPREDHGRGYFEYIEENKYSRAKSPQPPVEEEDEHFDDTVVCLDTYNCDLHFKISRDRLSASSLTMESFAFLWAGGRASYGVSKGKVCFEMKVTEKIPVRHLYTKDIDIHEVRIGWSLTTSGMLLGEEEFSYGYSLKGIKTCNCETEDYGEKFDENDVITCFANFESDEVELSYAKNGQDLGVAFKISKEVLAGRPLFPHVLCHNCAVEFNFGQKEKPYFPIPEEYTFIQNVPLEDRVRGPKGPEEKKDCEVVMMIGLPGAGKTTWVTKHAAENPGKYNILGTNTIMDKMMVAGFKKQMADTGKLNTLLQRAPQCLGKFIEIAARKKRNFILDQTNVSAAAQRRKMCLFAGFQRKAVVVCPKDEDYKQRTQKKAEVEGKDLPEHAVLKMKGNFTLPEVAECFDEITYVELQKEEAQKLLEQYKEESKKALPPEKKQNTGSKKSNKNKSGKNQFNRGGGHRGRGGFNMRGGNFRGGAPGNRGGYNRRGNMPQRGGGGGGSGGIGYPYPRAPVFPGRGSYSNRGNYNRGGMPNRGNYNQNFRGRGNNRGYKNQSQGYNQWQQGQFWGQKPWSQHYHQGYY

SEQ ID NO: 23848 - protein, 806 aa, Homo sapiens
MSSSPVNVKKLKVSELKEELKKRRLSDKGLKAELMERLQAALDDEEAGGRPAMEPGNGSLDLGGDSAGRSGAGLEQEAAAGGDEEEEEEEEEEEGISALDGDQMELGEENGAAGAADSGPMEEEEAASEDENGDDQGFQEGEDELGDEEEGAGDENGHGEQQPQPPATQQQQPQQQRGAAKEAAGKSSGPTSLFAVTVAPPGARQGQQQAGGDGKTEQKGGDKKRGVKRPREDHGRGYFEYIEENKYSRAKSPQPPVEEEDEHFDDTVVCLDTYNCDLHFKISRDRLSASSLTMESFAFLWAGGRASYGVSKGKVCFEMKVTEKIPVRHLYTKDIDIHEVRIGWSLTTSGMLLGEEEFSYGYSLKGIKTCNCETEDYGEKFDENDVITCFANFESDEVELSYAKNGQDLGVAFKISKEVLAGRPLFPHVLCHNCAVEFNFGQKEKPYFPIPEEYTFIQNVPLEDRVRGPKGPEEKKDCEVVMMIGLPGAGKTTWVTKHAAENPGKYNILGTNTIMDKMMVAGFKKQMADTGKLNTLLQRAPQCLGKFIEIAARKKRNFILDQTNVSAAAQRRKMCLFAGFQRKAVVVCPKDEDYKQRTQKKAEVEGKDLPEHAVLKMKGNFTLPEVAECFDEITYVELQKEEAQKLLEQYKEESKKALPPEKKQNTGSKKSNKNKSGKNQFNRGGGHRGRGGFNMRGGNFRGGAPGNRGGYNRRGNMPQRGGGGGGSGGIGYPYPRAPVFPGRGSYSNRGNYNRGGMPNRGNYNQNFRGRGNNRGYKNQSQGYNQWQQGQFWGQKPWSQHYHQGYY

SEQ ID NO: 23849 - protein, 719 aa, Homo sapiens
MEKILFYLFLIGIAVKAQICPKRCVCQILSPNLATLCAKKGLLFVPPNIDRRTVELRLADNFVTNIKRKDFANMTSLVDLTLSRNTISFITPHAFADLRNLRALHLNSNRLTKITNDMFSGLSNLHHLILNNNQLTLISSTAFDDVFALEELDLSYNNLETIPWDAVEKMVSLHTLSLDHNMIDNIPKGTFSHLHKMTRLDVTSNKLQKLPPDPLFQRAQVLATSGIISPSTFALSFGGNPLHCNCELLWLRRLSREDDLETCASPPLLTGRYFWSIPEEEFLCEPPLITRHTHEMRVLEGQRATLRCKARGDPEPAIHWISPEGKLISNATRSLVYDNGTLDILITTVKDTGAFTCIASNPAGEATQIVDLHIIKLPHLLNSTNHIHEPDPGSSDISTSTKSGSNTSSSNGDTKLSQDKIVVAEATSSTALLKFNFQRNIPGIRMFQIQYNGTYDDTLVYRMIPPTSKTFLVNNLAAGTMYDLCVLAIYDDGITSLTATRVVGCIQFTTEQDYVRCHFMQSQFLGGTMIIIIGGIIVASVLVFIIILMIRYKVCNNNGQHKVTKVSNVYSQTNGAQIQGCSVTLPQSVSKQAVGHEENAQCCKATSDNVIQSSETCSSQDSSTTTSALPPSWTSSTSVSQKQKRKTGTKPSTEPQNEAVTNVESQNTNRNNSTALQLASRPPDSVTEGPTSKRAHIKPNALLTNVDQIVQETQRLELI

SEQ ID NO: 23850 - protein, 397 aa, Homo sapiens
MEIVGCRAEDNSCPFRPPAMLFHGISGGHIQGIMEEMERRSKTEARLAKGAQLNGRDAGMPPLSPEKPALCAGCGGKISDRYYLLAVDKQWHLRCLKCCECKLALESELTCFAKDGSIYCKEDYYRRFSVQRCARCHLGISASEMVMRARDSVYHLSCFTCSTCNKTLTTGDHFGMKDSLVYCRAHFETLLQGEYPPQLSYTELAAKSGGLALPYFNGTGTVQKGRPRKRKSPALGVDIVNYNSGCNENEADHLDRDQQPYPPSQKTKRMRTSFKHHQLRTMKSYFAINHNPDAKDLKQLAQKTGLTKRVLQVWFQNARAKFRRNLLRQENGGVDKADGTSLPAPPSADSGALTPPGTATTLTDLTNPTITVVTSVTSNMDSHESGSPSQTTLTNLF

SEQ ID NO: 23851 - protein, 388 aa, Homo sapiens
MLNGTTLEAAMLFHGISGGHIQGIMEEMERRSKTEARLAKGAQLNGRDAGMPPLSPEKPALCAGCGGKISDRYYLLAVDKQWHLRCLKCCECKLALESELTCFAKDGSIYCKEDYYRRFSVQRCARCHLGISASEMVMRARDSVYHLSCFTCSTCNKTLTTGDHFGMKDSLVYCRAHFETLLQGEYPPQLSYTELAAKSGGLALPYFNGTGTVQKGRPRKRKSPALGVDIVNYNSGCNENEADHLDRDQQPYPPSQKTKRMRTSFKHHQLRTMKSYFAINHNPDAKDLKQLAQKTGLTKRVLQVWFQNARAKFRRNLLRQENGGVDKADGTSLPAPPSADSGALTPPGTATTLTDLTNPTITVVTSVTSNMDSHESGSPSQTTLTNLF

SEQ ID NO: 23852 - protein, 321 aa, Homo sapiens
MLNGTTLEAAMLFHGISGGHIQGIMEEMERRSKTEARLAKGAQLNGRDAGMPPLSPEKPALCAGCGGKISDRYYLLAVDKQWHLRCLKCCECKLALESELTCFAKDGSIYCKEDYYRRFSVQRCARCHLGISASEMVMRARDSVYHLSCFTCSTCNKTLTTGDHFGMKDSLVYCRAHFETLLQGEYPPQLSYTELAAKSGGLALPYFNGTGTVQKGRPRKRKSPALGVDIVNYNSGCNENEADHLDRDQQPYPPSQKTKRMRTSFKHHQLRTMKSYFAINHNPDAKDLKQLAQKTGLTKRVLQGEQILGHYSQTSRRLKIP

SEQ ID NO: 23853 - protein, 330 aa, Homo sapiens
MEIVGCRAEDNSCPFRPPAMLFHGISGGHIQGIMEEMERRSKTEARLAKGAQLNGRDAGMPPLSPEKPALCAGCGGKISDRYYLLAVDKQWHLRCLKCCECKLALESELTCFAKDGSIYCKEDYYRRFSVQRCARCHLGISASEMVMRARDSVYHLSCFTCSTCNKTLTTGDHFGMKDSLVYCRAHFETLLQGEYPPQLSYTELAAKSGGLALPYFNGTGTVQKGRPRKRKSPALGVDIVNYNSGCNENEADHLDRDQQPYPPSQKTKRMRTSFKHHQLRTMKSYFAINHNPDAKDLKQLAQKTGLTKRVLQGEQILGHYSQTSRRLKIP

SEQ ID NO: 23854 - protein, 180 aa, Homo sapiens
MGIPMGKSMLVLLTFLAFASCCIAAYRPSETLCGGELVDTLQFVCGDRGFYFSRPASRVSRRSRGIVEECCFRSCDLALLETYCATPAKSERDVSTPPTVLPDNFPRYPVGKFFQYDTWKQSTQRLRRGLPALLRARRGHVLAKELEAFREAKRHRPLIALPTQDPAHGGAPPEMASNRK

SEQ ID NO: 23855 - protein, 183 aa, Homo sapiens
MGIPMGKSMLVLLTFLAFASCCIAAYRPSETLCGGELVDTLQFVCGDRGFYFRLPGRPASRVSRRSRGIVEECCFRSCDLALLETYCATPAKSERDVSTPPTVLPDNFPRYPVGKFFQYDTWKQSTQRLRRGLPALLRARRGHVLAKELEAFREAKRHRPLIALPTQDPAHGGAPPEMASNRK

SEQ ID NO: 23856 - protein, 236 aa, Homo sapiens
MVSPDPQIIVVAPETELASMQVQRTEDGVTIIQIFWVGRKGELLRRTPVSSAMQTPMGIPMGKSMLVLLTFLAFASCCIAAYRPSETLCGGELVDTLQFVCGDRGFYFSRPASRVSRRSRGIVEECCFRSCDLALLETYCATPAKSERDVSTPPTVLPDNFPRYPVGKFFQYDTWKQSTQRLRRGLPALLRARRGHVLAKELEAFREAKRHRPLIALPTQDPAHGGAPPEMASNRK

SEQ ID NO: 23857 - protein, 159 aa, Homo sapiens
MKNHLLFWGVLAVFIKAVHVKAQEDERIVLVDNKCKCARITSRIIRSSEDPNEDIVERNIRIIVPLNNRENISDPTSPLRTRFVYHLSDLCKKCDPTEVELDNQIVTATQSNICDEDSATETCYTYDRNKCYTAVVPLVYGGETKMVETALTPDACYPD

SEQ ID NO: 23858 - protein, 517 aa, Homo sapiens
MVNSLLFGEMALAFGCPPGGGGGGCPGGGGGGGGAGPGPSPVTAALRDDLGSNIHLLKGLNVRFRCFLAKVHELERRNRLLEKQLEQQQSERERRLRYKTFSREQAVQTGPELLRPPAPGGGHGLSSGAAAGANANAVALGGLPPGGGSHPQHYGRLPGTIWSYTQVRRTGGGGVETVQGPGVSWVHPDGVGVQIDTITPEIRALYNVLAKVKRERDEYKRRWEEELAKRMNLQTMVDTLQEAAQEADAIQEEMNEKIERLKAELVVFKGLMSDPMTDLDTKIQEKAMKVDMDICRRIDITAKLCDVAQQRNSEDVSKIFQVVPKKKERKVASDDDISEQDGEVNRFSDDEVGSMNITDEMKRMFNQLRETFDFDDDCDSLTWEENEDTLLLWEDFTNCNPTIDLQGEQEENLGNLIHETESFFKTRDKEYQETIGQIELELATAKSDMNRHLHEYMEMCSMKRGLDVQMETCRRLIKGSADRNSPSPSSVASSDSGSTDEIQDEFEREADVEPMVS

SEQ ID NO: 23859 - protein, 4655 aa, Homo sapiens
MDRGPAAVACTLLLALVACLAPASGQECDSAHFRCGSGHCIPADWRCDGTKDCSDDADEIGCAVVTCQQGYFKCQSEGQCIPNSWVCDQDQDCDDGSDERQDCSQSTCSSHQITCSNGQCIPSEYRCDHVRDCPDGADENDCQYPTCEQLTCDNGACYNTSQKCDWKVDCRDSSDEINCTEICLHNEFSCGNGECIPRAYVCDHDNDCQDGSDEHACNYPTCGGYQFTCPSGRCIYQNWVCDGEDDCKDNGDEDGCESGPHDVHKCSPREWSCPESGRCISIYKVCDGILDCPGREDENNTSTGKYCSMTLCSALNCQYQCHETPYGGACFCPPGYIINHNDSRTCVEFDDCQIWGICDQKCESRPGRHLCHCEEGYILERGQYCKANDSFGEASIIFSNGRDLLIGDIHGRSFRILVESQNRGVAVGVAFHYHLQRVFWTDTVQNKVFSVDINGLNIQEVLNVSVETPENLAVDWVNNKIYLVETKVNRIDMVNLDGSYRVTLITENLGHPRGIAVDPTVGYLFFSDWESLSGEPKLERAFMDGSNRKDLVKTKLGWPAGVTLDMISKRVYWVDSRFDYIETVTYDGIQRKTVVHGGSLIPHPFGVSLFEGQVFFTDWTKMAVLKANKFTETNPQVYYQASLRPYGVTVYHSLRQPYATNPCKDNNGGCEQVCVLSHRTDNDGLGFRCKCTFGFQLDTDERHCIAVQNFLIFSSQVAIRGIPFTLSTQEDVMVPVSGNPSFFVGIDFDAQDSTIFFSDMSKHMIFKQKIDGTGREILAANRVENVESLAFDWISKNLYWTDSHYKSISVMRLADKTRRTVVQYLNNPRSVVVHPFAGYLFFTDWFRPAKIMRAWSDGSHLLPVINTTLGWPNGLAIDWAASRLYWVDAYFDKIEHSTFDGLDRRRLGHIEQMTHPFGLAIFGEHLFFTDWRLGAIIRVRKADGGEMTVIRSGIAYILHLKSYDVNIQTGSNACNQPTHPNGDCSHFCFPVPNFQRVCGCPYGMRLASNHLTCEGDPTNEPPTEQCGLFSFPCKNGRCVPNYYLCDGVDDCHDNSDEQLCGTLNNTCSSSAFTCGHGECIPAHWRCDKRNDCVDGSDEHNCPTHAPASCLDTQYTCDNHQCISKNWVCDTDNDCGDGSDEKNCNSTETCQPSQFNCPNHRCIDLSFVCDGDKDCVDGSDEVGCVLNCTASQFKCASGDKCIGVTNRCDGVFDCSDNSDEAGCPTRPPGMCHSDEFQCQEDGICIPNFWECDGHPDCLYGSDEHNACVPKTCPSSYFHCDNGNCIHRAWLCDRDNDCGDMSDEKDCPTQPFRCPSWQWQCLGHNICVNLSVVCDGIFDCPNGTDESPLCNGNSCSDFNGGCTHECVQEPFGAKCLCPLGFLLANDSKTCEDIDECDILGSCSQHCYNMRGSFRCSCDTGYMLESDGRTCKVTASESLLLLVASQNKIIADSVTSQVHNIYSLVENGSYIVAVDFDSISGRIFWSDATQGKTWSAFQNGTDRRVVFDSSIILTETIAIDWVGRNLYWTDYALETIEVSKIDGSHRTVLISKNLTNPRGLALDPRMNEHLLFWSDWGHHPRIERASMDGSMRTVIVQDKIFWPCGLTIDYPNRLLYFMDSYLDYMDFCDYNGHHRRQVIASDLIIRHPYALTLFEDSVYWTDRATRRVMRANKWHGGNQSVVMYNIQWPLGIVAVHPSKQPNSVNPCAFSRCSHLCLLSSQGPHFYSCVCPSGWSLSPDLLNCLRDDQPFLITVRQHIIFGISLNPEVKSNDAMVPIAGIQNGLDVEFDDAEQYIYWVENPGEIHRVKTDGTNRTVFASISMVGPSMNLALDWISRNLYSTNPRTQSIEVLTLHGDIRYRKTLIANDGTALGVGFPIGITVDPARGKLYWSDQGTDSGVPAKIASANMDGTSVKTLFTGNLEHLECVTLDIEEQKLYWAVTGRGVIERGNVDGTDRMILVHQLSHPWGIAVHDSFLYYTDEQYEVIERVDKATGANKIVLRDNVPNLRGLQVYHRRNAAESSNGCSNNMNACQQICLPVPGGLFSCACATGFKLNPDNRSCSPYNSFIVVSMLSAIRGFSLELSDHSETMVPVAGQGRNALHVDVDVSSGFIYWCDFSSSVASDNAIRRIKPDGSSLMNIVTHGIGENGVRGIAVDWVAGNLYFTNAFVSETLIEVLRINTTYRRVLLKVTVDMPRHIVVDPKNRYLFWADYGQRPKIERSFLDCTNRTVLVSEGIVTPRGLAVDRSDGYVYWVDDSLDIIARIRINGENSEVIRYGSRYPTPYGITVFENSIIWVDRNLKKIFQASKEPENTEPPTVIRDNINWLRDVTIFDKQVQPRSPAEVNNNPCLENNGGCSHLCFALPGLHTPKCDCAFGTLQSDGKNCAISTENFLIFALSNSLRSLHLDPENHSPPFQTINVERTVMSLDYDSVSDRIYFTQNLASGVGQISYATLSSGIHTPTVIASGIGTADGIAFDWITRRIYYSDYLNQMINSMAEDGSNRTVIARVPKPRAIVLDPCQGYLYWADWDTHAKIERATLGGNFRVPIVNSSLVMPSGLTLDYEEDLLYWVDASLQRIERSTLTGVDREVIVNAAVHAFGLTLYGQYIYWTDLYTQRIYRANKYDGSGQIAMTTNLLSQPRGINTVVKNQKQQCNNPCEQFNGGCSHICAPGPNGAECQCPHEGNWYLANNRKHCIVDNGERCGASSFTCSNGRCISEEWKCDNDNDCGDGSDEMESVCALHTCSPTAFTCANGRCVQYSYRCDYYNDCGDGSDEAGCLFRDCNATTEFMCNNRRCIPREFICNGVDNCHDNNTSDEKNCPDRTCQSGYTKCHNSNICIPRVYLCDGDNDCGDNSDENPTYCTTHTCSSSEFQCASGRCIPQHWYCDQETDCFDASDEPASCGHSERTCLADEFKCDGGRCIPSEWICDGDNDCGDMSDEDKRHQCQNQNCSDSEFLCVNDRPPDRRCIPQSWVCDGDVDCTDGYDENQNCTRRTCSENEFTCGYGLCIPKIFRCDRHNDCGDYSDERGCLYQTCQQNQFTCQNGRCISKTFVCDEDNDCGDGSDELMHLCHTPEPTCPPHEFKCDNGRCIEMMKLCNHLDDCLDNSDEKGCGINECHDPSISGCDHNCTDTLTSFYCSCRPGYKLMSDKRTCVDIDECTEMPFVCSQKCENVIGSYICKCAPGYLREPDGKTCRQNSNIEPYLIFSNRYYLRNLTIDGYFYSLILEGLDNVVALDFDRVEKRLYWIDTQRQVIERMFLNKTNKETIINHRLPAAESLAVDWVSRKLYWLDARLDGLFVSDLNGGHRRMLAQHCVDANNTFCFDNPRGLALHPQYGYLYWADWGHRAYIGRVGMDGTNKSVIISTKLEWPNGITIDYTNDLLYWADAHLGYIEYSDLEGHHRHTVYDGALPHPFAITIFEDTIYWTDWNTRTVEKGNKYDGSNRQTLVNTTHRPFDIHVYHPYRQPIVSNPCGTNNGGCSHLCLIKPGGKGFTCECPDDFRTLQLSGSTYCMPMCSSTQFLCANNEKCIPIWWKCDGQKDCSDGSDELALCPQRFCRLGQFQCSDGNCTSPQTLCNAHQNCPDGSDEDRLLCENHHCDSNEWQCANKRCIPESWQCDTFNDCEDNSDEDSSHCASRTCRPGQFRCANGRCIPQAWKCDVDNDCGDHSDEPIEECMSSAHLCDNFTEFSCKTNYRCIPKWAVCNGVDDCRDNSDEQGCEERTCHPVGDFRCKNHHCIPLRWQCDGQNDCGDNSDEENCAPRECTESEFRCVNQQCIPSRWICDHYNDCGDNSDERDCEMRTCHPEYFQCTSGHCVHSELKCDGSADCLDASDEADCPTRFPDGAYCQATMFECKNHVCIPPYWKCDGDDDCGDGSDEELHLCLDVPCNSPNRFRCDNNRCIYSHEVCNGVDDCGDGTDETEEHCRKPTPKPCTEYEYKCGNGHCIPHDNVCDDADDCGDWSDELGCNKGKERTCAENICEQNCTQLNEGGFICSCTAGFETNVFDRTSCLDINECEQFGTCPQHCRNTKGSYECVCADGFTSMSDRPGKRCAAEGSSPLLLLPDNVRIRKYNLSSERFSEYLQDEEYIQAVDYDWDPKDIGLSVVYYTVRGEGSRFGAIKRAYIPNFESGRNNLVQEVDLKLKYVMQPDGIAVDWVGRHIYWSDVKNKRIEVAKLDGRYRKWLISTDLDQPAAIAVNPKLGLMFWTDWGKEPKIESAWMNGEDRNILVFEDLGWPTGLSIDYLNNDRIYWSDFKEDVIETIKYDGTDRRVIAKEAMNPYSLDIFEDQLYWISKEKGEVWKQNKFGQGKKEKTLVVNPWLTQVRIFHQLRYNKSVPNLCKQICSHLCLLRPGGYSCACPQGSSFIEGSTTECDAAIELPINLPPPCRCMHGGNCYFDETDLPKCKCPSGYTGKYCEMAFSKGISPGTTAVAVLLTILLIVVIGALAIAGFFHYRRTGSLLPALPKLPSLSSLVKPSENGNGVTFRSGADLNMDIGVSGFGPETAIDRSMAMSEDFVMEMGKQPIIFENPMYSARDSAVKVVQPIQVTVSENVDNKNYGSPINPSEIVPETNPTSPAADGTQVTKWNLFKRKSKQTTNFENPIYAQMENEQKESVAATPPPSPSLPAKPKPPSRRDPTPTYSATEDTFKDTANLVKEDSEV

SEQ ID NO: 23860 - protein, 536 aa, Homo sapiens
MSPRVVSNSSVLASQSVGITNVRTVFSNVFNNTTAFPILRGSNCHKITAPGLGKGQLVNLLPPENLPWCGGSQGPRMLRTCYVLCSQAGPPSRGWQSLSFDGGAFHLKGTGELTRALLVLRLCAWPPLVTHGLLLQAWSRRLLGSRLSGAFLRASVYGQFVAGETAEEVKGCVQQLRTLSLRPLLAVPTEEEPDSAAKSGEAWYEGNLGAMLRCVDLSRGLLEPPSLAEASLMQLKVTALTSTRLCKELASWVRRPGASLELSPERLAEAMDSGQNLQVSCLNAEQNQHLRASLSRLHRVAQYARAQHVRLLVDAEYTSLNPALSLLVAALAVRWNSPGEGGPWVWNTYQACLKDTFERLGRDAEAAHRAGLAFGVKLVRGAYLDKERAVAQLHGMEDPTQPDYEATSQSYSRCLELMLTHVARHGPMCHLMVASHNEESVRQATKRMWELGIPLDGTVCFGQLLGMCDHVSLALGQAGYVVYKSIPYGSLEEVIPYLIRRAQENRSVLQGARREQELLSQELWRRLLPGCRRIPH

SEQ ID NO: 23861 - protein, 72 aa, Homo sapiens
MPVQAVCPYCGNRIITVTTFVPGALTWLLCTTLFLFGYVLGCCFLAFCIRSLMDVKHSCPVCQRELFYYHRL

SEQ ID NO: 23862 - protein, 161 aa, Homo sapiens
MSVPGPYQAATGPSSAPSAPPSYEETVAVNSYYPTPPAPMPGPTTGLVTGPDGKGMNPPSYYTQPAPIPNNNPITVQTVYVQHPITFLDRPIQMCCPSCNKMIVSQLSYNAGALTWLSCGSLCLLGCIAGCCFIPFCVDALQDVDHYCPNCRALLGTYKRL

SEQ ID NO: 23863 - protein, 228 aa, Homo sapiens
MSVPGPYQAATGPSSAPSAPPSYEETVAVNSYYPTPPAPMPGPTTGLVTGPDGKGMNPPSYYTQPAPIPNNNPITVQTVYVQHPITFLDRPIQMCCPSCNKMIVSQLSYNAGALTWLSCGSLCLLGVHSGLLLHPLLRGCPAGRGPLLSQLQSSPGHLQAFVGLSQTWREPGAAGSPFHLSSSFTPGGGSALVVSPLQGAHLHVFFWGEYVAKLTNLQTPEIAAWSRA

SEQ ID NO: 23864 - protein, 152 aa, Homo sapiens
MSVPGPYQAATGPSSAPSAPPSYEETVAVNSYYPTPPAPMPGPTTGLVTGPDGKGMNPPSYYTQPAPIPNNNPITVQTVYVQHPITFLDRPIQMCCPSCNKMIVSQLSYNAGALTWLSCGSLCLLGQECSGTIVALRSFDLLGSCNPPSSAS

SEQ ID NO: 23865 - protein, 770 aa, Homo sapiens
MEKRAAAGLEGAPGARAQLAVVCLVNIFLTGRLSSAVPALAACSGKLEQHTERRGVIYSPAWPLNYPPGTNCSWYIQGDRGDMITISFRNFDVEESHQCSLDWLLLGPAAPPRQEAFRLCGSAIPPAFISARDHVWIFFHSDASSSGQAQGFRLSYIRGKLGQASCQADEFRCDNGKCLPGPWQCNTVDECGDGSDEGNCSAPASEPPGSLCPGGTFPCSGARSTRCLPVERRCDGLQDCGDGSDEAGCPDLACGRRLGSFYGSFASPDLFGAARGPSDLHCTWLVDTQDSRRVLLQLELRLGYDDYVQVYEGLGERGDRLLQTLSYRSNHRPVSLEAAQGRLTVAYHARARSAGHGFNATYQVKGYCLPWEQPCGSSSDSDGGSLGDQGCFSEPQRCDGWWHCASGRDEQGCPACPPDQYPCEGGSGLCYTPADRCNNQKSCPDGADEKNCFSCQPGTFHCGTNLCIFETWRCDGQEDCQDGSDEHGCLAAVPRKVITAALIGSLVCGLLLVIALGCAFKLYSLRTQEYRAFETQMTRLEAEFVRREAPPSYGQLIAQGLIPPVEDFPVYSASQASVLQNLRTAMRRQMRRHASRRGPSRRRLGRLWNRLFHRPRAPRGQIPLLTAARPSQTVLGDGFLQPAPGAAPDPPAPLMDTGSTRAAGDRPPSAPGRAPEVGPSGPPLPSGLRDPECRPVDKDRKVCREPLVDGPAPADAPREPCSAQDPHPQVSTASSTLGPHSPEPLGVCRNPPPPCSPMLEASDDEALLVC

SEQ ID NO: 23866 - protein, 865 aa, Homo sapiens
MSDVSTSVQSKFARLAKKKENITYMKREQLTETDKDIAPVLDLKCKDVSAIMNKFKVLMEIQDLMFEEMRETLKNDLKAVLGGKATIPEVKNSENSSSRTEFQQIINLALQKTGMVGKIEGENSKIGDDNENLTFKLEVNELSGKLDNTNEYNSNDGKKLPQGESRSYEVMGSMEETLCNIDDRDGNRNVHLEFTERESRKDGEDEFVKEMREERKFQKLKNKEEVLKASREEKVLMDEGAVLTLVADLSSATLDISKQWSNVFNILRENDFEPKFLCEVKLAFKCDGEIKTFSDLQSLRKFASQKSSVKELLKDVLPQKEEINQGGRKYGIQEKRDKTLIDSKHRAGEITSDGLSFLFLKEVKVAKPEEMKNLETQEEEFSELEELDEEASGMEDDEDTSGLEEEEEEPSGLEEEEEEEASGLEEDEASGLEEEEEQTSEQDSTFQGHTLVDAKHEVEITSDGMETTFIDSVEDSESEEEEEGKSSETGKVKTTSLTEKKASRRQKEIPFSYLVGDSGKKKLVKHQVVHKTQEEEETAVPTSQGTGTPCLTLCLASPSKSLEMSHDEHKKHSHTNLSISTGVTKLKKTEEKKHRTLHTEELTSKEADLTEETEENLRSSVINSIREIKEEIGNLKSSHSGVLEIENSVDDLSSRMDILEERIDSLEDQIEEFSKDTMQMTKQIISKERQRDIEERSRSCNIRLIGIPEKESYENRAEDIIKEIIDENFAELKKGSSLEIVSACRVPSKIDEKRLTPRHILVKFWNSSDKEKIIRASRERREITYQGTRIRLTADLSLDTLDARSKWSNVFKVLLEKGFNPRILYPAKMAFDFRGKTKVFLSIEEFRDYVLHMPTLRELLGNNIP

SEQ ID NO: 23867 - protein, 1905 aa, Homo sapiens
MRRQWGALLLGALLCAHGLASSPECACGRSHFTCAVSALGECTCIPAQWQCDGDNDCGDHSDEDGCILPTCSPLDFHCDNGKCIRRSWVCDGDNDCEDDSDEQDCPPRECEEDEFPCQNGYCIRSLWHCDGDNDCGDNSDEQCDMRKCSDKEFRCSDGSCIAEHWYCDGDTDCKDGSDEENCPSAVPAPPCNLEEFQCAYGRCILDIYHCDGDDDCGDWSDESDCSSHQPCRSGEFMCDSGLCINAGWRCDGDADCDDQSDERNCTTSMCTAEQFRCHSGRCVRLSWRCDGEDDCADNSDEENCENTGSPQCALDQFLCWNGRCIGQRKLCNGVNDCGDNSDESPQQNCRPRTGEENCNVNNGGCAQKCQMVRGAVQCTCHTGYRLTEDGHTCQDVNECAEEGYCSQGCTNSEGAFQCWCETGYELRPDRRSCKALGPEPVLLFANRIDIRQVLPHRSEYTLLLNNLENAIALDFHHRRELVFWSDVTLDRILRANLNGSNVEEVVSTGLESPGGLAVDWVHDKLYWTDSGTSRIEVANLDGAHRKVLLWQNLEKPRAIALHPMEGTIYWTDWGNTPRIEASSMDGSGRRIIADTHLFWPNGLTIDYAGRRMYWVDAKHHVIERANLDGSHRKAVISQGLPHPFAITVFEDSLYWTDWHTKSINSANKFTGKNQEIIRNKLHFPMDIHTLHPQRQPAGKNRCGDNNGGCTHLCLPSGQNYTCACPTGFRKISSHACAQSLDKFLLFARRMDIRRISFDTEDLSDDVIPLADVRSAVALDWDSRDDHVYWTDVSTDTISRAKWDGTGQEVVVDTSLESPAGLAIDWVTNKLYWTDAGTDRIEVANTDGSMRTVLIWENLDRPRDIVVEPMGGYMYWTDWGASPKIERAGMDASGRQVIISSNLTWPNGLAIDYGSQRLYWADAGMKTIEFAGLDGSKRKVLIGSQLPHPFGLTLYGERIYWTDWQTKSIQSADRLTGLDRETLQENLENLMDIHVFHRRRPPVSTPCAMENGGCSHLCLRSPNPSGFSCTCPTGINLLSDGKTCSPGMNSFLIFARRIDIRMVSLDIPYFADVVVPINITMKNTIAIGVDPQEGKVYWSDSTLHRISRANLDGSQHEDIITTGLQTTDGLAVDAIGRKVYWTDTGTNRIEVGNLDGSMRKVLVWQNLDSPRAIVLYHEMGFMYWTDWGENAKLERSGMDGSDRAVLINNNLGWPNGLTVDKASSQLLWADAHTERIEAADLNGANRHTLVSPVQHPYGLTLLDSYIYWTDWQTRSIHRADKGTGSNVILVRSNLPGLMDMQAVDRAQPLGFNKCGSRNGGCSHLCLPRPSGFSCACPTGIQLKGDGKTCDPSPETYLLFSSRGSIRRISLDTSDHTDVHVPVPELNNVISLDYDSVDGKVYYTDVFLDVIRRADLNGSNMETVIGRGLKTTDGLAVDWVARNLYWTDTGRNTIEASRLDGSCRKVLINNSLDEPRAIAVFPRKGYLFWTDWGHIAKIERANLDGSERKVLINTDLGWPNGLTLDYDTRRIYWVDAHLDRIESADLNGKLRQVLVSHVSHPFALTQQDRWIYWTDWQTKSIQRVDKYSGRNKETVLANVEGLMDIIVVSPQRQTGTNACGVNNGGCTHLCFARASDFVCACPDEPDSRPCSLVPGLVPPAPRATGMSEKSPVLPNTPPTTLYSSTTRTRTSLEEVEGRCSERDARLGLCARSNDAVPAAPGEGLHISYAIGGLLSILLILVVIAALMLYRHKKSKFTDPGMGNLTYSNPSYRTSTQEVKIEAIPKPAMYNQLCYKKEGGPDHNYTKEKIKIVEGICLLSGDDAEWDDLKQLRSSRGGLLRDHVCMKTDTVSIQASSGSLDDTETEQLLQEEQSECSSVHTAATPERRGSLPDTGWKHERKLSSESQV

SEQ ID NO: 23868 - protein, 252 aa, Homo sapiens
MEGHVYWTDDEVWAIRRAYLDGSGAQTLINTKINDPDDIAVNWVARSLYWTHTGTEHIEVTCLNSTSHKILVSEDMDEPRAIALHPEMGLTYWIDWGENPEIKRANLDRQELRVLVNASLGWPNGLALDLQEGKLYWGDAKTDKIEAISVDETKRQTLLKDKLPHIFRFTLLGDFIYWTAWQHHSIKRVHKVKANRDVIIDQLPDLMGLKAVNVDKVVGTNPHADRNGGAATCASSRPTQPGLAAPSRAWNC

SEQ ID NO: 23869 - protein, 224 aa, Homo sapiens
MEGHVYWTDDEVWAIRRAYLDGSGAQTLINTKINDPDDIAVNWVARSLYWTHTGTEHIEVTCLNSTSHKILVSEDMDEPRAIALHPEMGLTYWIDWGENPEIKRANLDRQELRVLVNASLGWPNGLALDLQEGKLYWGDAKTDKIEAISVDETKRQTLLKDKLPHIFRFTLLGDFIYWTAWQHHSIKRVHKVKANRDVIIDQLPDLMGLKAVNVDKVVGPGTAE

SEQ ID NO: 23870 - protein, 1615 aa, Homo sapiens
MEAAPPGPPWPLLLLLLLLLALCGCPAPAAASPLLLFANRRDVRLVDAGGVKLESTIVVSGLEDAAAVDFQFSKGAVYWTDVSEEAIKQTYLNQTGAAVQNVVISGLVSPDGLACDWVGKKLYWTDSETNRIEVANLNGTSRKVLFWQDLDQPRAIALDPAHGYMYWTDWGETPRIERAGMDGSTRKIIVDSDIYWPNGLTIDLEEQKLYWADAKLSFIHRANLDGSFRQKVVEGSLTHPFALTLSGDTLYWTDWQTRSIHACNKRTGGKRKEILSALYSPMDIQVLSQERQPFFHTRCEEDNGGCSHLCLLSPSEPFYTCACPTGVQLQDNGRTCKAGAEEVLLLARRTDLRRISLDTPDFTDIVLQVDDIRHAIAIDYDPLEGYVYWTDDEVRAIRRAYLDGSGAQTLVNTEINDPDGIAVDWVARNLYWTDTGTDRIEVTRLNGTSRKILVSEDLDEPRAIALHPVMGLMYWTDWGENPKIECANLDGQERRVLVNASLGWPNGLALDLQEGKLYWGDAKTDKIEVINVDGTKRRTLLEDKLPHIFGFTLLGDFIYWTDWQRRSIERVHKVKASRDVIIDQLPDLMGLKAVNVAKVVGTNPCADRNGGCSHLCFFTPHATRCGCPIGLELLSDMKTCIVPEAFLVFTSRAAIHRISLETNNNDVAIPLTGVKEASALDFDVSNNHIYWTDVSLKTISRAFMNGSSVEHVVEFGLDYPEGMAVDWMGKNLYWADTGTNRIEVARLDGQFRQVLVWRDLDNPRSLALDPTKGYIYWTEWGGKPRIVRAFMDGTNCMTLVDKVGRANDLTIDYADQRLYWTDLDTNMIESSNMLGQERVVIADDLPHPFGLTQYSDYIYWTDWNLHSIERADKTSGRNRTLIQGHLDFVMDILVFHSSRQDGLNDCMHNNGQCGQLCLAIPGGHRCGCASHYTLDPSSRNCSPPTTFLLFSQKSAISRMIPDDQHSPDLILPLHGLRNVKAIDYDPLDKFIYWVDGRQNIKRAKDDGTQPFVLTSLSQGQNPDRQPHDLSIDIYSRTLFWTCEATNTINVHRLSGEAMGVVLRGDRDKPRAIVVNAERGYLYFTNMQDRAAKIERAALDGTEREVLFTTGLIRPVALVVDNTLGKLFWVDADLKRIESCDLSGANRLTLEDANIVQPLGLTILGKHLYWIDRQQQMIERVEKTTGDKRTRIQGRVAHLTGIHAVEEVSLEEFSAHPCARDNGGCSHICIAKGDGTPRCSCPVHLVLLQNLLTCGEPPTCSPDQFACATGEIDCIPGAWRCDGFPECDDQSDEEGCPVCSAAQFPCARGQCVDLRLRCDGEADCQDRSDEADCDAICLPNQFRCASGQCVLIKQQCDSFPDCIDGSDELMCEITKPPSDDSPAHSSAIGPVIGIILSLFVMGGVYFVCQRVVCQRYAGANGPFPHEYVSGTPHVPLNFIAPGGSQHGPFTGIACGKSMMSSVSLMGGRGGVPLYDRNHVTGASSSSSSSTKATLYPPILNPPPSPATDPSLYNMDMFYSSNIPATARPYRPYIIRGMAPPTTPCSTDVCDSDYSASRWKASKYYLDLNSDSDPYPPPPTPHSQYLSAEDSCPPSPATERSYFHLFPPPPSPCTDSS

SEQ ID NO: 23871 - protein, 1613 aa, Homo sapiens
MGAVLRSLLACSFCVLLRAAPLLLYANRRDLRLVDATNGKENATIVVGGLEDAAAVDFVFSHGLIYWSDVSEEAIKRTEFNKTESVQNVVVSGLLSPDGLACDWLGEKLYWTDSETNRIEVSNLDGSLRKVLFWQELDQPRAIALDPSSGFMYWTDWGEVPKIERAGMDGSSRFIIINSEIYWPNGLTLDYEEQKLYWADAKLNFIHKSNLDGTNRQAVVKGSLPHPFALTLFEDILYWTDWSTHSILACNKYTGEGLREIHSDIFSPMDIHAFSQQRQPNATNPCGIDNGGCSHLCLMSPVKPFYQCACPTGVKLLENGKTCKDGATELLLLARRTDLRRISLDTPDFTDIVLQLEDIRHAIAIDYDPVEGYIYWTDDEVRAIRRSFIDGSGSQFVVTAQIAHPDGIAVDWVARNLYWTDTGTDRIEVTRLNGTMRKILISEDLEEPRAIVLDPMVGYMYWTDWGEIPKIERAALDGSDRVVLVNTSLGWPNGLALDYDEGKIYWGDAKTDKIEVMNTDGTGRRVLVEDKIPHIFGFTLLGDYVYWTDWQRRSIERVHKRSAEREVIIDQLPDLMGLKATNVHRVIGSNPCAEENGGCSHLCLYRPQGLRCACPIGFELISDMKTCIVPEAFLLFSRRADIRRISLETNNNNVAIPLTGVKEASALDFDVTDNRIYWTDISLKTISRAFMNGSALEHVVEFGLDYPEGMAVDWLGKNLYWADTGTNRIEVSKLDGQHRQVLVWKDLDSPRALALDPAEGFMYWTEWGGKPKIDRAAMDGSERTTLVPNVGRANGLTIDYAKRRLYWTDLDTNLIESSNMLGLNREVIADDLPHPFGLTQYQDYIYWTDWSRRSIERANKTSGQNRTIIQGHLDYVMDILVFHSSRQSGWNECASSNGHCSHLCLAVPVGGFVCGCPAHYSLNADNRTCSAPTTFLLFSQKSAINRMVIDEQQSPDIILPIHSLRNVRAIDYDPLDKQLYWIDSRQNMIRKAQEDGSQGFTVVVSSVPSQNLEIQPYDLSIDIYSRYIYWTCEATNVINVTRLDGRSVGVVLKGEQDRPRAVVVNPEKGYMYFTNLQERSPKIERAALDGTEREVLFFSGLSKPIALALDSRLGKLFWADSDLRRIESSDLSGANRIVLEDSNILQPVGLTVFENWLYWIDKQQQMIEKIDMTGREGRTKVQARIAQLSDIHAVKELNLQEYRQHPCAQDNGGCSHICLVKGDGTTRCSCPMHLVLLQDELSCGEPPTCSPQQFTCFTGEIDCIPVAWRCDGFTECEDHSDELNCPVCSESQFQCASGQCIDGALRCNGDANCQDKSDEKNCEVLCLIDQFRCANGQCIGKHKKCDHNVDCSDKSDELDCYPTEEPAPQATNTVGSVIGVIVTIFVSGTVYFICQRMLCPRMKGDGETMTNDYVVHGPASVPLGYVPHPSSLSGSLPGMSRGKSMISSLSIMGGSSGPPYDRAHVTGASSSSSSSTKGTYFPAILNPPPSPATERSHYTMEFGYSSNSPSTHRSYSYRPYSYRHFAPPTTPCSTDVCDSDYAPSRRMTSVATAKGYTSDLNYDSEPVPPPPTPRSQYLSAEENYESCPPSPYTERSYSHHLYPPPPSPCTDSS

SEQ ID NO: 23872 - protein, 963 aa, Homo sapiens
MGLPEPGPLRLLALLLLLLLLLLLQLQHLAAAAADPLLGGQGPAKDCEKDQFQCRNERCIPSVWRCDEDDDCLDHSDEDDCPKKTCADSDFTCDNGHCIHERWKCDGEEECPDGSDESEATCTKQVCPAEKLSCGPTSHKCVPASWRCDGEKDCEGGADEAGCATLCAPHEFQCGNRSCLAAVFVCDGDDDCGDGSDERGCADPACGPREFRCGGDGGGACIPERWVCDRQFDCEDRSDEAAELCGRPGPGATSAPAACATASQFACRSGECVHLGWRCDGDRDCKDKSDEADCPLGTCRGDEFQCGDGTCVLAIKHCNQEQDCPDGSDEAGCLQGLNECLHNNGGCSHICTDLKIGFECTCPAGFQLLDQKTCGDIDECKDPDACSQICVNYKGYFKCECYPGYEMDLLTKNCKAAAGKSPSLIFTNRHEVRRIDLVKRNYSRLIPMLKNVVALDVEVATNRIYWCDLSYRKIYSAYMDKASDPKEQEVLIDEQLHSPEGLAVDWVHKHIYWTDSGNKTISVATVDGGRRRTLFSRNLSEPRAIAVDPLRGFMYWSDWGDQAKIEKSGLNGVDRQTLVSDNIEWPNGITLDLLSQRLYWVDSKLHQLSSIDFSGGNRKTLISSTDFLSHPFGIAVFEDKVFWTDLENEAIFSANRLNGLEISILAENLNNPHDIVIFHELKQPRAPDACELSVQPNGGCEYLCLPAPQISSHSPKYTCACPDTMWLGPDMKRCYRAPQSTSTTTLASTMTRTVPATTRAPGTTVHRSTYQNHSTETPSLTAAVPSSVSVPRAPSISPSTLSPATSNHSQHYANEDSKMGSTVTAAVIGIIVPIVVIALLCMSGYLIWRNWKRKNTKSMNFDNPVYRKTTEEEDEDELHIGRTAQIGHVYPAAISSFDRPLWAEPCLGETREPEDPAPALKELFVLPGEPRSQLHQLPKNPLSELPVVKSKRVALSLEDDGLP

SEQ ID NO: 23873 - protein, 700 aa, Homo sapiens
MGLPEPGPLRLLALLLLLLLLLLLQLQHLAAAAADPLLGGQGPAKDCEKDQFQCRNERCIPSVWRCDEDDDCLDHSDEDDCPKKTCADSDFTCDNGHCIHERWKCDGEEECPDGSDESEATCTKQVCPAEKLSCGPTSHKCVPASWRCDGEKDCEGGADEAGCATSLGTCRGDEFQCGDGTCVLAIKHCNQEQDCPDGSDEAGCLQGLNECLHNNGGCSHICTDLKIGFECTCPAGFQLLDQKTCGDIDECKDPDACSQICVNYKGYFKCECYPGYEMDLLTKNCKAAAGKSPSLIFTNRHEVRRIDLVKRNYSRLIPMLKNVVALDVEVATNRIYWCDLSYRKIYSAYMDKASDPKEQEVLIDEQLHSPEGLAVDWVHKHIYWTDSGNKTISVATVDGGRRRTLFSRNLSEPRAIAVDPLRGFMYWSDWGDQAKIEKSGLNGVDRQTLVSDNIEWPNGITLDLLSQRLYWVDSKLHQLSSIDFSGGNRKTLISSTDFLSHPFGIAVFEDKVFWTDLENEAIFSANRLNGLEISILAENLNNPHDIVIFHELKQPRAPDACELSVQPNGGCEYLCLPAPQISSHSPKYTCACPDTMWLGPDMKRCYRDANEDSKMGSTVTAAVIGIIVPIVVIALLCMSGYLIWRNWKRKNTKSMNFDNPVYRKTTEEEDEDELHIGRTAQIGHVYPARVALSLEDDGLP

SEQ ID NO: 23874 - protein, 904 aa, Homo sapiens
MGLPEPGPLRLLALLLLLLLLLLLQLQHLAAAAADPLLGGQGPAKDCEKDQFQCRNERCIPSVWRCDEDDDCLDHSDEDDCPKKTCADSDFTCDNGHCIHERWKCDGEEECPDGSDESEATCTKQVCPAEKLSCGPTSHKCVPASWRCDGEKDCEGGADEAGCATLCAPHEFQCGNRSCLAAVFVCDGDDDCGDGSDERGCADPACGPREFRCGGDGGGACIPERWVCDRQFDCEDRSDEAAELCGRPGPGATSAPAACATASQFACRSGECVHLGWRCDGDRDCKDKSDEADCPLGTCRGDEFQCGDGTCVLAIKHCNQEQDCPDGSDEAGCLQGLNECLHNNGGCSHICTDLKIGFECTCPAGFQLLDQKTCGDIDECKDPDACSQICVNYKGYFKCECYPGYEMDLLTKNCKAAAGKSPSLIFTNRHEVRRIDLVKRNYSRLIPMLKNVVALDVEVATNRIYWCDLSYRKIYSAYMDKASDPKEQEVLIDEQLHSPEGLAVDWVHKHIYWTDSGNKTISVATVDGGRRRTLFSRNLSEPRAIAVDPLRGFMYWSDWGDQAKIEKSGLNGVDRQTLVSDNIEWPNGITLDLLSQRLYWVDSKLHQLSSIDFSGGNRKTLISSTDFLSHPFGIAVFEDKVFWTDLENEAIFSANRLNGLEISILAENLNNPHDIVIFHELKQPRAPDACELSVQPNGGCEYLCLPAPQISSHSPKYTCACPDTMWLGPDMKRCYRAPQSTSTTTLASTMTRTVPATTRAPGTTVHRSTYQNHSTETPSLTAAVPSSVSVPRAPSISPSTLSPATSNHSQHYANEDSKMGSTVTAAVIGIIVPIVVIALLCMSGYLIWRNWKRKNTKSMNFDNPVYRKTTEEEDEDELHIGRTAQIGHVYPARVALSLEDDGLP

SEQ ID NO: 23875 - protein, 793 aa, Homo sapiens
MGLPEPGPLRLLALLLLLLLLLLLQLQHLAAAAADPLLGGQGPAKDCEKDQFQCRNERCIPSVWRCDEDDDCLDHSDEDDCPKKTCADSDFTCDNGHCIHERWKCDGEEECPDGSDESEATCTKQVCPAEKLSCGPTSHKCVPASWRCDGEKDCEGGADEAGCATWLNECLHNNGGCSHICTDLKIGFECTCPAGFQLLDQKTCGDIDECKDPDACSQICVNYKGYFKCECYPGYEMDLLTKNCKAAAGKSPSLIFTNRHEVRRIDLVKRNYSRLIPMLKNVVALDVEVATNRIYWCDLSYRKIYSAYMDKASDPKEQEVLIDEQLHSPEGLAVDWVHKHIYWTDSGNKTISVATVDGGRRRTLFSRNLSEPRAIAVDPLRGFMYWSDWGDQAKIEKSGLNGVDRQTLVSDNIEWPNGITLDLLSQRLYWVDSKLHQLSSIDFSGGNRKTLISSTDFLSHPFGIAVFEDKVFWTDLENEAIFSANRLNGLEISILAENLNNPHDIVIFHELKQPRAPDACELSVQPNGGCEYLCLPAPQISSHSPKYTCACPDTMWLGPDMKRCYRAPQSTSTTTLASTMTRTVPATTRAPGTTVHRSTYQNHSTETPSLTAAVPSSVSVPRAPSISPSTLSPATSNHSQHYANEDSKMGSTVTAAVIGIIVPIVVIALLCMSGYLIWRNWKRKNTKSMNFDNPVYRKTTEEEDEDELHIGRTAQIGHVYPAAISSFDRPLWAEPCLGETREPEDPAPALKELFVLPGEPRSQLHQLPKNPLSELPVVKSKRVALSLEDDGLP

SEQ ID NO: 23876 - protein, 275 aa, Homo sapiens
MRMTSSSFVSYCTPGLCQFMAMLPTAGHLLPLLLVIGTGGTVPSPQVPPRGCYVAKEAGERTFRCSQAGLSAVPSGIPNDTRKLYLDANQLASVPAGAFQHLPVLEELDLSHNALAHLSGAAFQGLEGTLRHLDLSANQLASVPVEAFVGLQIQVNLSANPWHCDCALQEVLRQVRLVPGTGTGIVCGSGARPDLVGQEFLLLAGEEELCGSGWGGARRSTDVALLVTMGGWLTLMVAYLVHYVWQNRDETRRSLKRAPVLPVRSEDSSILSTVV

SEQ ID NO: 23877 - protein, 622 aa, Homo sapiens
MCGLQFSLPCLRLFLVVTCYLLLLLHKEILGCSSVCQLCTGRQINCRNLGLSSIPKNFPESTVFLYLTGNNISYINESELTGLHSLVALYLDNSNILYVYPKAFVQLRHLYFLFLNNNFIKRLDPGIFKGLLNLRNLYLQYNQVSFVPRGVFNDLVSVQYLNLQRNRLTVLGSGTFVGMVALRILDLSNNNILRISESGFQHLENLACLYLGSNNLTKVPSNAFEVLKSLRRLSLSHNPIEAIQPFAFKGLANLEYLLLKNSRIRNVTRDGFSGINNLKHLILSHNDLENLNSDTFSLLKNLIYLKLDRNRIISIDNDTFENMGASLKILNLSFNNLTALHPRVLKPLSSLIHLQANSNPWECNCKLLGLRDWLASSAITLNIYCQNPPSMRGRALRYINITNCVTSSINVSRAWAVVKSPHIHHKTTALMMAWHKVTTNGSPLENTETENITFWERIPTSPAGRFFQENAFGNPLETTAVLPVQIQLTTSVTLNLEKNSALPNDAASMSGKTSLICTQEVEKLNEAFDILLAFFILACVLIIFLIYKVVQFKQKLKASENSRENRLEYYSFYQSARYNVTASICNTSPNSLESPGLEQIRLHKQIVPENEAQVILFEHSAL

SEQ ID NO: 23878 - protein, 524 aa, Homo sapiens
MFHCIPLWRCNRHVESIDKRHCSLVYVPEEIYRYARSLEELLLDANQLRELPEQFFQLVKLRKLGLSDNEIQRLPPEIANFMQLVELDVSRNEIPEIPESISFCKALQVADFSGNPLTRLPESFPELQNLTCLSVNDISLQSLPENIGNLYNLASLELRENLLTYLPDSLTQLRRLEELDLGNNEIYNLPESIGALLHLKDLWLDGNQLSELPQEIGNLKNLLCLDVSENRLERLPEEISGLTSLTDLVISQNLLETIPDGIGKLKKLSILKVDQNRLTQLPEAVGECESLTELVLTENQLLTLPKSIGKLKKLSNLNADRNKLVSLPKEIGGCCSLTVFCVRDNRLTRIPAEVSQATELHVLDVAGNRLLHLPLSLTALKLKALWLSDNQSQPLLTFQTDTDYTTGEKILTCVLLPQLPSEPTCQENLPRCGALENLVNDVSDEAWNERAVNRVSAIRFVEDEKDEEDNETRTLLRRATPHPGELKHMKKTVENLRNDMNAAKGLDSNKNEVNHAIDRVTTSV

SEQ ID NO: 23879 - protein, 197 aa, Homo sapiens
MFHCIPLWRCNRHVESIDKRHCSLVYVPEEIYRYARSLEELLLDANQLRELPEQFFQLVKLRKLGLSDNEIQRLPPEIANFMQLVELDVSRNEIPEIPESISFCKALQVADFSGNPLTRLPESFPELQNLTCLSVNDISLQSLPENIGNLYNLASLELRENLLTYLPDSLTQLRRLEELDLGNNEIYNLNQLEPSYI

SEQ ID NO: 23880 - protein, 371 aa, Homo sapiens
MGHKVVVFDISVIRALWETRVKKHKAWQKKEVERLEKSALEKIKEEWNFVAECRRKGIPQAVYCKNGFIDTSVRLLDKIERNTLTRQSSLPKDRGKRSSAFVFELSGEHWTELPDSLKEQTHLREWYISNTLIQIIPTYIQLFQAMRILDLPKNQISHLPAEIGCLKNLKELNVGFNYLKSIPPELGDCENLERLDCSGNLELMELPFELSNLKQVTFVDISANKFSSVPICVLRMSNLQWLDISSNNLTDLPQDIDRLEELQSFLLYKNKLTYLPYSMLNLKKLTLLVVSGDHLVELPTALCDSSTPLKFVSLMDNPIDNAQCEDGNEIMESERDRQHFDKEVMKAYIEDLKERESVPSYTTKVSFSLQL

SEQ ID NO: 23881 - protein, 257 aa, Homo sapiens
MGTVRPPRPSLLLVSTRESCLFLLFCLHLGAACPQPCRCPDHAGAVAVFCSLRGLQEVPEDIPANTVLLKLDANKISHLPDGAFQHLHRLRELDLSHNAIEAIGSATFAGLAGGLRLLDLSYNRIQRIPKDALGKLSAKIRLSHNPLHCECALQEALWELKLDPDSVDEIACHTSVQEEFVGKPLVQALDAGASLCSVPHRTTDVAMLVTMFGWFAMVIAYVVYYVRHNQEDARRHLEYLKSLPSAPASKDPIGPGP

SEQ ID NO: 23882 - protein, 653 aa, Homo sapiens
MKLLWQVTVHHHTWNAILLPFVYLTAQVWILCAAIAAAASAGPQNCPSVCSCSNQFSKVVCTRRGLSEVPQGIPSNTRYLNLMENNIQMIQADTFRHLHHLEVLQLGRNSIRQIEVGAFNGLASLNTLELFDNWLTVIPSGAFEYLSKLRELWLRNNPIESIPSYAFNRVPSLMRLDLGELKKLEYISEGAFEGLFNLKYLNLGMCNIKDMPNLTPLVGLEELEMSGNHFPEIRPGSFHGLSSLKKLWVMNSQVSLIERNAFDGLASLVELNLAHNNLSSLPHDLFTPLRYLVELHLHHNPWNCDCDILWLAWWLREYIPTNSTCCGRCHAPMHMRGRYLVEVDQASFQCSAPFIMDAPRDLNISEGRMAELKCRTPPMSSVKWLLPNGTVLSHASRHPRISVLNDGTLNFSHVLLSDTGVYTCMVTNVAGNSNASAYLNVSTAELNTSNYSFFTTVTVETTEISPEDTTRKYKPVPTTSTGYQPAYTTSTTVLIQTTRVPKQVAVPATDTTDKMQTSLDEVMKTTKIIIGCFVAVTLLAAAMLIVFYKLRKRHQQRSTVTAARTVEIIQVDEDIPAATSAAATAAPSGVSGEGAVVLPTIHDHINYNTYKPAHGAHWTENSLGNSLHPTVTTISEPYIIQTHTKDKVQETQI

SEQ ID NO: 23883 - protein, 1537 aa, Homo sapiens
MTTKRKIIGRLVPCRCFRGEEEIISVLDYSHCSLQQVPKEVFNFERTLEELYLDANQIEELPKQLFNCQALRKLSIPDNDLSNLPTTIASLVNLKELDISKNGVQEFPENIKCCKCLTIIEASVNPISKLPDGFTQLLNLTQLYLNDAFLEFLPANFGRLVKLRILELRENHLKTLPKSMHKLAQLERLDLGNNEFGELPEVLDQIQNLRELWMDNNALQVLPGSIGKLKMLVYLDMSKNRIETVDMDISGCEALEDLLLSSNMLQQLPDSIGLLKKLTTLKVDDNQLTMLPNTIGNLSLLEEFDCSCNELESLPSTIGYLHSLRTLAVDENFLPELPREIGSCKNVTVMSLRSNKLEFLPEEIGQMQKLRVLNLSDNRLKNLPFSFTKLKELAALWLSDNQSKALIPLQTEAHPETKQRVLTNYMFPQQPRGDEDFQSDSDSFNPTLWEEQRQQRMTVAFEFEDKKEDDENAGKVKDLSCQAPWERGQRGITLQPARLSGDCCTPWARCDQQIQDMPVPQNDPQLAWGCISGLQQERSMCTPLPVAAQSTTLPSLSGRQVEINLKRYPTPYPEDLKNMVKSVQNLVGKPSHGVRVENSNPTANTEQTVKEKYEHKWPVAPKEITVEDSFVHPANEMRIGELHPSLAETPLYPPKLVLLGKDKKESTDESEVDKTHCLNNSVSSGTYSDYSPSQASSGSSNTRVKVGSLQTTAKDAVHNSLWGNRIAPSFPQPLDSKPLLSQREAVPPGNIPQRPDRLPMSDTFTDNWTDGSHYDNTGFVAEETTAENANSNPLLSSKSRSTSSHGRRPLIRQDRIVGVPLELEQSTHRHTPETEVPPSNPWQNWTRTPSPFEDRTAFPSKLETTPTTSPLPERKEHIKESTEIPSPFSPGVPWEYHDSNPNRSLSNVFSQIHCRPESSKGVISISKSTERLSPLMKDIKSNKFKKSQSIDEIDIGTYKVYNIPLENYASGSDHLGSHERPDKMLGPEHGMSSMSRSQSVPMLDDEMLTYGSSKGPQQQKASMTKKVYQFDQSFNPQGSVEVKAEKRIPPPFQHNPEYVQQASKNIAKDLISPRAYRGYPPMEQMFSFSQPSVNEDAVVNAQFASQGARAGFLRRADSLVSATEMAMFRRVNEPHELPPTDRYGRPPYRGGLDRQSSVTVTESQFLKRNGRYEDEHPSYQEVKAQAGSFPVKNLTQRRPLSARSYSTESYGASQTRPVSARPTMAALLEKIPSDYNLGNYGDKPSDNSDLKTRPTPVKGEESCGKMPADWRQQLLRHIEARRLDRNAAYKHNTVNLGMLPYGGISAMHAGRSMTLNLQTKSKFDHQELPLQKTPSQQSNILDNGQEDVSPSGQWNPYPLGRRDVPPDTITKKAGSHIQTLMGSQSLQHRSREQQPYEGNINKVTIQQFQSPLPIQIPSSQATRGPQPGRCLIQTKGQRSMDGYPEQFCVRIEKNPGLGFSISGGISGQGNPFKPSDKGIFVTRVQPDGPASNLLQPGDKILQANGHSFVHMEHEKAVLLLKSFQNTVDLVIQRELTV

SEQ ID NO: 23884 - protein, 1490 aa, Homo sapiens
MTTKRKIIGRLVPCRCFRGEEEIISVLDYSHCSLQQVPKEVFNFERTLEELYLDANQIEELPKQLFNCQALRKLSIPDNDLSNLPTTIASLVNLKELDISKNGVQEFPENIKCCKCLTIIEASVNPISKLPDGFTQLLNLTQLYLNDAFLEFLPANFGRLVKLRILELRENHLKTLPKSMHKLAQLERLDLGNNEFGELPEVLDQIQNLRELWMDNNALQVLPGSIGKLKMLVYLDMSKNRIETVDMDISGCEALEDLLLSSNMLQQLPDSIGLLKKLTTLKVDDNQLTMLPNTIGNLSLLEEFDCSCNELESLPSTIGYLHSLRTLAVDENFLPELPREIGSCKNVTVMSLRSNKLEFLPEEIGQMQKLRVLNLSDNRLKNLPFSFTKLKELAALWLSDNQSKALIPLQTEAHPETKQRVLTNYMFPQQPRGDEDFQSDSDSFNPTLWEEQRQQRMTVAFEFEDKKEDDENAGKVKDLSCQAPWERGQRGITLQPARLSGDCCTPWARCDQQIQDMPVPQNDPQLAWGCISGLQQERSMCTPLPVAAQSTTLPSLSGRQVEINLKRYPTPYPEDLKNMVKSVQNLVGKPSHGVRVENSNPTANTEQTVKEKYEHKWPVAPKEITVEDSFVHPANEMRIGELHPSLAETPLYPPKLVLLGKDKKESTDESEVDKTHCLNNSVSSGTYSDYSPSQASSGSSNTRVKVGSLQTTAKDAVHNSLWGNRIAPSFPQPLDSKPLLSQREAVPPGNIPQRPDRLPMSDTFTDNWTDGSHYDNTGFVAEETTAENANSNPLLSSKSRSTSSHGRRPLIRQDRIVGVPLELEQSTHRHTPETEVPPSNPWQNWTRTPSPFEDRTAFPSKLETTPTTSPLPERKEHIKESTEIPSPFSPGVPWEYHDSNPNRSLSNVFSQIHCRPESSKGVISISKSTERLSPLMKDIKSNKFKKSQSIDEIDIGTYKVYNIPLENYASGSDHLGSHERPDKMLGPEHGMSSMSRSQSVPMLDDEMLTYGSSKGPQQQKASMTKKVYQFDQSFNPQGSVEVKAEKRIPPPFQHNPEYVQQASKNIAKDLISPRAYRGYPPMEQMFSFSQPSVNEDAVVNAQFASQGARAGFLRRADSLVSATEMAMFRRVNEPHELPPTDRYGRPPYRGGLDRQSSVTVTESQFLKRNGRYEDEHPSYQEVKAQAGSFPVKNLTQRRPLSARSYSTESYGASQTRPVSARPTMAALLEKIPSDYNLGNYGDKPSDNSDLKTRPTPVKGEESCGKMPADWRQQLLRHIEARRLDRTPSQQSNILDNGQEDVSPSGQWNPYPLGRRDVPPDTITKKAGSHIQTLMGSQSLQHRSREQQPYEGNINKVTIQQFQSPLPIQIPSSQATRGPQPGRCLIQTKGQRSMDGYPEQFCVRIEKNPGLGFSISGGISGQGNPFKPSDKGIFVTRVQPDGPASNLLQPGDKILQANGHSFVHMEHEKAVLLLKSFQNTVDLVIQRELTV

SEQ ID NO: 23885 - protein, 179 aa, Homo sapiens
MTTKRKIIGRLVPCRCFRGEEEIISVLDYSHCSLQQVPKEVFNFERTLEELYLDANQIEELPKQLFNCQALRKLSIPDNDLSNLPTTIASLVNLKELDISKNGVQEFPENIKCCKCLTIIEASVNPISKLPDGFTQLLNLTQLYLNDAFLEFLPANFGRLVKLRILELRENHLKTLPNI

SEQ ID NO: 23886 - protein, 1453 aa, Homo sapiens
MIESENLNQEEIIKELCLCNGLSYEMVGQEGSDTSKLEMFFLGYPRIVGLSLFPNLTSLTIVAQDIKEISGLEPCLQLKELWIAECCIEKIEGLQECRNLEKLYLYFNKISKIENLEKLIKLKVLWLNHNTIKNIEGLQTLKNLKDLNLAGNLINSIGRCLDSNEQLERLNLSGNQICSFKELTNLTRLPCLKDLCLNDPQYTTNPVCLLCNYSTHVLYHLPCLQRFDTLDVSAKQIKELADTTAMKKIMYYNMRIKTLQRHLKEDLEKLNDQKCKLQKLPEERVKLFSFVKKTLERELAELKGSGKGHSDGSNNSKVTDPETLKSCETVTEEPSLQQKILAKLNALNERVTFWNKKLDEIEAIYHIEVKQKKKSHGLLIPLLLIELETVGNFHFEEGTRSDDWFNFCYELILSRFCAWDFRTYGITGVKVKRIIKVNNRILRLKFEEKFQKFLENEDMHDSESYRRMLECLFYVFDPEVSVKKKHLLQILEKGFKDSETSKLPLKKEAIIVSNSLSISECPRIEFLQQKHKDEKKISLKHELFRHGILLITKVFLGQSVQAHEKESISQSNYPMVNSVFIPRKYLLNSVMGQRNCDCSVRQCKWFVFDHDLVLPEYVVEFEYITMVKAPSLFSVFNNVILEESKKNPEVSVFSKDLKFDDEVIKMEPRIKARPKLISLDDKTILSLAKTSVYSHIVSLNLHGNSLSKLRDLSKLTGLRKLNISFNEFTCLDDVYHLYNLEYLDASHNHVITLEGFRGLMKLKHLDLSWNQLKKSGNEINMLCKHTTSLLTLDIQHNPWQKPATLRLSVIGRLKTLTHLNGVFISEEEATAAMKFIAGTRITQLSLLRHSSTKEERPRILSIWPSAKILTQVSKLGPHLHLSGNCYLKITALNLDGQHLFEITNLEKLENLKWASFSNNNLTKMEGLESCINLEELTLDGNCISKIEGISKMTKLTRLSINNNLLTGWEEHTFDNMLHLHSLSLENNRITSLSGLQKSFTLVELYISNNYIAVNQEMHNLKGLCNLVILDMCGNIIIWNQENYRLFVIFHLPELKALDGIPIEPSETDSAKDLFGGRLTSDMIAERQGHSNFKQMQELNWTSSSIRTVDLIPVDQFRNVCNVNLQNNHLTSFSGLIYLPNVKVLCLNYNHIESIMPRLKPQTHLTSRQLLYQKVPSSGYGQQGISKTNRDIMSSENLPPIMHSLEVLHLGYNGICNLIQLQLNRLRNLKFLFLQGNEISQVEGLDNLVVLQELVVDHNRIRSFNDSAFAKPSSLLALHLEENRLRELGKLQSLVKLEKLFLGYNKIQDITELEKLDVISTLRELTVYGNPICRKMLHRHMLIFRLPNLQMLDGSPVNSDDRAKAEFHLAELQAKKNSLIPVTHSPMDGRSFGQVKTPPIEITNVLLPSGFSHYLGSDVTLTPEVEEFLGATFQDQIECNCLKRNEHTPRNSPV

SEQ ID NO: 23887 - protein, 1111 aa, Homo sapiens
MIESENLNQEEIIKELCLCNGLSYEMVGQEGSDTSKLEMFFLGYPRIVGLSLFPNLTSLTIVAQDIKEISGLEPCLQLKELWIAECCIEKIEGLQECRNLEKLYLYFNKISKIENLEKLIKLKVLWLNHNTIKNIEGLQTLKNLKDLNLAGNLINSIGRCLDSNEQLERLNLSGNQICSFKELTNLTRLPCLKDLCLNDPQYTTNPVCLLCNYSTHVLYHLPCLQRFDTLDVSAKQIKELADTTAMKKIMYYNMRIKTLQRHLKEDLEKLNDQKCKLQKLPEERVKLFSFVKKTLERELAELKGSGKGHSDGSNNSKVTDPETLKSCETVTEEPSLQQKILAKLNALNERVTFWNKKLDEIEAIYHIEVKQKKKSHGLLIPLLLIELETVGNFHFEEGTRSDDWFNFCYELILSRFCAWDFRTYGITGVKVKRIIKVNNRILRLKFEEKFQKFLENEDMHDSESYRRMLECLFYVFDPEVSVKKKHLLQILEKGFKDSETSKLPLKKEAIIVSNSLSISECPRIEFLQQKHKDEKKISLKHELFRHGILLITKVFLGQSVQAHEKESISQSNYPMVNSVFIPRKYLLNSVMGQRNCDCSVRQCKWFVFDHDLVLPEYVVEFEYITMVKAPSLFSVFNNVILEESKKNPEVSVFSKDLKFDDEVIKMEPRIKARPKLISLDDKTILSLAKTSVYSHIVSLNLHGNSLSKLRDLSKLTGLRKLNISFNEFTCLDDVYHLYNLEYLDASHNHVITLEGFRGLMKLKHLDLSWNQLKKSGNEINMLCKHTTSLLTLDIQHNPWQKPATLRLSVIGRLKTLTHLNGVFISEEEATAAMKFIAGTRITQLSLLRHSSTKEERPRILSIWPSAKILTQVSKLGPHLHLSGNCYLKITALNLDGQHLFEITNLEKLENLKWASFSNNNLTKMEGLESCINLEELTLDGNCISKIEGISKMTKLTRLSINNNLLTGWEEHTFDNMLHLHSLSLENNRITSLSGLQKSFTLVELYISNNYIAVNQEMHNLKGLCNLVILDMCGNIIIWNQENYRLFVIFHLPELKALDGIPIEPSETDSAKDLFGGRLTSDMIAERQGHSNFKQMQELNWTSSSISCIYFV

SEQ ID NO: 23888 - protein, 860 aa, Homo sapiens
MSEKEGMSEVLEDTISQFRKESRSQSMKEPGFIKETSNLINEASDYLEGKSSNQIYETHPRQNTLESTSSSGRKSKRNEEQKKNLQFSETSTRTGTSQSLSSLTGRTAEYQALVNFLSHETVGEVSPQVSEENQKQLGLGADNFTVNLEAKGLQEFPKDILKIKYVKYLYLDKNQIKTFQGADSGDLLGLEILSLQENGLSSLPSEIQLLHNLRILNVSHNHISHIPKEISQLGNIRQLFFYNNYIENFPSDLECLGNLEILSLGKNKLRHIPDTLPSLKTLRVLNLEYNQLTTFPKALCFLPKLISLDLTGNLISSLPKEIRELKNLETLLMDHNKLTFLAVEIFQLLKIKELQLADNKLEVISHKIENFRELRILILDKNLLKNIPEKISCCAMLECLSLSDNKLTELPKYIHKLNNLRKLHVNRNNMVKITDCISHLNNICSLEFSGNIITDVPIEIKNCQKIIKIELSYNKIMYFPLGLCALDSLYYLSVNGNYISEIPVDISFSKQLLHLELSENKLLIFSEHFCSLINLKYLDLGKNQIKKIPASISNMISLHVLILCCNKFETFPRELCTLENLQVLDLSENQLQKISSDICNLKGIQKLNFSSNQFIHFPIELCQLQSLEQLNISQIKGRKLTRLPGELSNMTQLKELDISNNAIREIPRNIGELRNLVSLHAYNNQISYLPPSLLSLNDLQQLNLSGNNLTALPSAIYNIFSLKEINFDDNPLLRPPVEICKGKQLYTIARYLQRADERDEKILEKIFKIVANNITETNFEFLCQKLNLANSETDMPTKSTVSLSERAHQALVIWKTQSNKLSLTAAALRDQLIRALTMIGAYEIMDKITALNLFTRAIKF

SEQ ID NO: 23889 - protein, 116 aa, Homo sapiens
MTQLKELDISNNAIREIPRNIGELRNLVSLHAYNNQISYLPPSLLSLNDLQQLNLSGNNLTALPSAIYNIFSLKEINFDDNPLLRPPVEICKGKQLYTIARYLQRADERDGLQLHS

SEQ ID NO: 23890 - protein, 808 aa, Homo sapiens
MTSPAAAQSREIDCLSPEAQKLAEARLAAKRAARAEAREIRMKELERQQKEEDSERYSRRSRRNTSASDEDERMSVGSRGSLRVEERPEKDFTEKGSRNMPGLSAATLASLGGTSSRRGSGDTSISIDTEASIREIKELNELKDQIQDVEGKYMQGLKEMKDSLAEVEEKYKKAMVSNAQLDNEKTNFMYQVDTLKDMLLELEEQLAESRRQYEEKNKEFEREKHAHSILQFQFAEVKEALKQREEMLEKHGIILNSEIATNGETSDTLNNVGYQGPTKMTKEELNALKSTGDGTLGRASEVEVKNEIVANVGKREILHNTEKEQHTEDTVKDCVDIEVFPAGENTEDQKSSEDTAPFLGTLAGATYEEQVQSQILESSSLPENTVQVESNEVMGAPDDRTRTPLEPSNCWSDLDGGNHTENVGEAAVTQVEEQAGTVASCPLGHSDDTVYHDDKCMVEVPQELETSTGHSLEKEFTNQEAAEPKEVPAHSTEVGRDHNEEEGEETGLRDEKPIKTEVPGSPAGTEGNCQEATGPSTVDTQNEPLDMKEPDEEKSDQQGEALDSSQKKTKNKKKKNKKKKSPVPVETLKDVKKELTYQNTDLSEIKEEEQVKSTDRKSAVEAQNEVTENPKQKIAAESSENVDCPENPKIKLDGKLDQEGDDVQTAAEEVLADGDTLDFEDDTVQSSGPRAGGEELDEGVAKDNAKIDGATQSSPAEPKSEDADRCTLPEHESPSQDISDACEAESTERCEMSEHPSQTVRKALDSNSLENDDLSAPGREPGHFNPESREDTRGGNEKGKSKEDCTMS

SEQ ID NO: 23891 - protein, 784 aa, Homo sapiens
MTSPAAAQSREIDCLSPEAQKLAEARLAAKRAARAEAREIRMKELERQQKEEDSERYSRRSRRNTSASDEDERMSVGSRGSLRVEERPEKDFTEKGSRNMPGLSAATLASLGGTSSRRGSGDTSISIDTEASIREIKDSLAEVEEKYKKAMVSNAQLDNEKTNFMYQVDTLKDMLLELEEQLAESRRQYEEKNKEFEREKHAHSILQFQFAEVKEALKQREEMLEKHGIILNSEIATNGETSDTLNNVGYQGPTKMTKEELNALKSTGDGTLGRASEVEVKNEIVANVGKREILHNTEKEQHTEDTVKDCVDIEVFPAGENTEDQKSSEDTAPFLGTLAGATYEEQVQSQILESSSLPENTVQVESNEVMGAPDDRTRTPLEPSNCWSDLDGGNHTENVGEAAVTQVEEQAGTVASCPLGHSDDTVYHDDKCMVEVPQELETSTGHSLEKEFTNQEAAEPKEVPAHSTEVGRDHNEEEGEETGLRDEKPIKTEVPGSPAGTEGNCQEATGPSTVDTQNEPLDMKEPDEEKSDQQGEALDSSQKKTKNKKKKNKKKKSPVPVETLKDVKKELTYQNTDLSEIKEEEQVKSTDRKSAVEAQNEVTENPKQKIAAESSENVDCPENPKIKLDGKLDQEGDDVQTAAEEVLADGDTLDFEDDTVQSSGPRAGGEELDEGVAKDNAKIDGATQSSPAEPKSEDADRCTLPEHESPSQDISDACEAESTERCEMSEHPSQTVRKALDSNSLENDDLSAPGREPGHFNPESREDTRGGNEKGKSKEDCTMS

SEQ ID NO: 23892 - protein, 752 aa, Homo sapiens
MTSPAAAQSREIDCLSPEAQKLAEARLAAKRAARAEAREIRMKELERQQKEVEERPEKDFTEKGSRNMPGLSAATLASLGGTSSRRGSGDTSISIDTEASIREIKDSLAEVEEKYKKAMVSNAQLDNEKTNFMYQVDTLKDMLLELEEQLAESRRQYEEKNKEFEREKHAHSILQFQFAEVKEALKQREEMLEKHGIILNSEIATNGETSDTLNNVGYQGPTKMTKEELNALKSTGDGTLGRASEVEVKNEIVANVGKREILHNTEKEQHTEDTVKDCVDIEVFPAGENTEDQKSSEDTAPFLGTLAGATYEEQVQSQILESSSLPENTVQVESNEVMGAPDDRTRTPLEPSNCWSDLDGGNHTENVGEAAVTQVEEQAGTVASCPLGHSDDTVYHDDKCMVEVPQELETSTGHSLEKEFTNQEAAEPKEVPAHSTEVGRDHNEEEGEETGLRDEKPIKTEVPGSPAGTEGNCQEATGPSTVDTQNEPLDMKEPDEEKSDQQGEALDSSQKKTKNKKKKNKKKKSPVPVETLKDVKKELTYQNTDLSEIKEEEQVKSTDRKSAVEAQNEVTENPKQKIAAESSENVDCPENPKIKLDGKLDQEGDDVQTAAEEVLADGDTLDFEDDTVQSSGPRAGGEELDEGVAKDNAKIDGATQSSPAEPKSEDADRCTLPEHESPSQDISDACEAESTERCEMSEHPSQTVRKALDSNSLENDDLSAPGREPGHFNPESREDTRGGNEKGKSKEDCTMS

SEQ ID NO: 23893 - protein, 640 aa, Homo sapiens
MDMGTQGSGRKRLPNRERLTAEDDALNQIAREAEARLAAKRAARAEAREIRMKELERQQKEIYQVQKKYYGLDTKWGDIEQWMEDSERYSRRSRRNTSASDEDERMSVGSRGSLRSQPDLEYGGPYAWTNGYDGELYGSQSLNRRSGRPSCLYSAARPSGSYRASVLDEGSFGGTRRGSTSGSRAPSEYSGHLNSSSRASSRASSARASPVVEERPEKDFTEKGSRNMPGLSAATLASLGGTSSRRGSGDTSISIDTEASIREIKELNELKDQIQDVEGKYMQGLKEMKDSLAEVEEKYKKAMVSNAQLDNEKTNFMYQVDTLKDMLLELEEQLAESRRQYEEKNKEFEREKHAHSILQFQFAEVKEALKQREEMLEEIRQLQQKQASSIREISDLQETIEWKDKKIGALERQKEFFDSVRSERDDLREEVVMLKEELKKHGIILNSEIATNGETSDTLNNVGYQGPTKMTKEELNALKSTGDGTLDIRLKKLVDERECLLEQIKKLKGQLEERQKIGKLDNLRSEDDVLENGTDMHVMDLQRDANRQISDLKFKLAKSEQEITALEQNVIRLESQVSRYKSAAENAEKIEDELKAEKRKLQRELRSALDKTEELEVSNGHLVKRLEKMKANRSALLSQQ

SEQ ID NO: 23894 - protein, 721 aa, Homo sapiens
MGTPASGRKRTPVKDRFSAEDEALSNIAREAEARLAAKRAARAEARDIRMRELERQQKEYSLHSFDRKWGQIQKWLEDSERARYSHRSSHHRPYLGVEDALSIRSVGSHRYDMFKDRSSRLSSLNHSYSHSHGMKKRSSDSHKDLLSGLYFDQRNYSSLRHSKPTSAYYTRQSSSLYSDPLATYKSDRASPTANSGLLRSASLASLYNGGLYNPYGPRTPSECSYYSSRISSARSSPGFTNDDTASIVSSDRASRGRRESVVSAADYFSRSNRRGSVVSEVDDISIPDLSSLDEKSDKQYAENYTRPSSRNSASATTPLSGNSSRRGSGDTSSLIDPDTSLSELRDIYDLKDQIQDVEGRYMQGLKELKESLSEVEEKYKKAMVSNAQLDNEKNNLIYQVDTLKDVIEEQEEQMAEFYRENEEKSKELERQKHMCSVLQHKMEELKEGLRQRDELIEEKQRMQQKIDTMTKEVFDLQETLLWKDKKIGALEKQKEYIACLRNERDMLREELADLQETVKTGEKHGLVIIPDGTPNGDVSHEPVAGAITVVSQEAAQVLESAGEGPLDVRLRKLAGEKEELLSQIRKLKLQLEEERQKCSRNDGTVGDLAGLQNGSDLQFIEMQRDANRQISEYKFKLSKAEQDITTLEQSISRLEGQVLRYKTAAENAEKVEDELKAEKRKLQRELRTALDKIEEMEMTNSHLAKRLEKMKANRTALLAQQ

SEQ ID NO: 23895 - protein, 400 aa, Homo sapiens
MGTPASGRKRTPVKDRFSAEDEALSNIAREAEARLAAKRAARAEARDIRMRELERQQKELDEKSDKQYAENYTRPSSRNSASATTPLSGNSSRRGSGDTSSLIDPDTSLSELRESLSEVEEKYKKAMVSNAQLDNEKNNLIYQVDTLKDVIEEQEEQMAEFYRENEEKSKELERQKHMCSVLQHKMEELKEGLRQRDELIEKHGLVIIPDGTPNGDVSHEPVAGAITVVSQEAAQVLESAGEGPLDVRLRKLAGEKEELLSQIRKLKLQLEEERQKCSRNDGTVGDLAGLQNGSDLQFIEMQRDANRQISEYKFKLSKAEQDITTLEQSISRLEGQVLRYKTAAENAEKVEDELKAEKRKLQRELRTALDKIEEMEMTNSHLAKRLEKMKANRTALLAQQ

SEQ ID NO: 23896 - protein, 100 aa, Homo sapiens
MQRDANRQISEYKFKLSKAEQDITTLEQSISRLEGQVLRYKTAAENAEKVEDELKAEKRKLQRELRTALDKIEEMEMTNSHLAKRLEKMKANRTALLAQQ

SEQ ID NO: 23897 - protein, 424 aa, Homo sapiens
MGTPASGRKRTPVKDRFSAEDEALSNIAREAEARLAAKRAARAEARDIRMRELERQQKELDEKSDKQYAENYTRPSSRNSASATTPLSGNSSRRGSGDTSSLIDPDTSLSELRDIYDLKDQIQDVEGRYMQGLKELKESLSEVEEKYKKAMVSNAQLDNEKNNLIYQVDTLKDVIEEQEEQMAEFYRENEEKSKELERQKHMCSVLQHKMEELKEGLRQRDELIEKHGLVIIPDGTPNGDVSHEPVAGAITVVSQEAAQVLESAGEGPLDVRLRKLAGEKEELLSQIRKLKLQLEEERQKCSRNDGTVGDLAGLQNGSDLQFIEMQRDANRQISEYKFKLSKAEQDITTLEQSISRLEGQVLRYKTAAENAEKVEDELKAEKRKLQRELRTALDKIEEMEMTNSHLAKRLEKMKANRTALLAQQ

SEQ ID NO: 23898 - protein, 503 aa, Homo sapiens
MGTPASGRKRTPVKDRFSAEDEALSNIAREAEARLAAKRAARAEARDIRMRELERQQKEEDSERARYSHRSSHHRPYLGVEDALSIRSVGSHRNHSYSHSHGMKKRSSDSHKDLLASLYNGGLYNPYGPRTLDEKSDKQYAENYTRPSSRNSASATTPLSGNSSRRGSGDTSSLIDPDTSLSELRESLSEVEEKYKKAMVSNAQLDNEKNNLIYQVDTLKDVIEEQEEQMAEFYRENEEKSKELERQKHMCSVLQHKMEELKEGLRQRDELIEEKQRMQQKIDTMTKEVFDLQETLLWKDKKIGKHGLVIIPDGTPNGDVSHEPVAGAITVVSQEAAQVLESAGEGPLDVRLRKLAGEKEELLSQIRKLKLQLEEERQKCSRNDGTVGDLAGLQNGSDLQFIEMQRDANRQISEYKFKLSKAEQDITTLEQSISRLEGQVLRYKTAAENAEKVEDELKAEKRKLQRELRTALDKIEEMEMTNSHLAKRLEKMKANRTALLAQQ

SEQ ID NO: 23899 - protein, 2015 aa, Homo sapiens
MAGMSQRPPSMYWCVGPEESAVCPERAMETLNGAGDTGGKPSTRGGDPAARSRRTEGIRAAYRRGDRGGARDLLEEACDQCASQLEKGQLLSIPAAYGDLEMVRYLLSKRLVELPTEPTDDNPAVVAAYFGHTAVVQELLESLPGPCSPQRLLNWMLALACQRGHLGVVKLLVLTHGADPESYAVRKNEFPVIVRLPLYAAIKSGNEDIAIFLLRHGAYFCSYILLDSPDPSKHLLRKYFIEASPLPSSYPGKTALRVKWSHLRLPWVDLDWLIDISCQITELDLSANCLATLPSVIPWGLINLRKLNLSDNHLGELPGVQSSDEIICSRLLEIDISSNKLSHLPPGFLHLSKLQKLTASKNCLEKLFEEENATNWIGLRKLQELDISDNKLTELPALFLHSFKSLNSLNVSRNNLKVFPDPWACPLKCCKASRNALECLPDKMAVFWKNHLKDVDFSENALKEVPLGLFQLDALMFLRLQGNQLAALPPQEKWTCRQLKTLDLSRNQLGKNEDGLKTKRIAFFTTRGRQRSGTEAASVLEFPAFLSESLEVLCLNDNHLDTVPPSVCLLKSLSELYLGNNPGLRELPPELGQLGNLWQLDTEDLTISNVPAEIQKEGPKAMLSYLRAQLRKAEKCKLMKMIIVGPPRQGKSTLLEILQTGRAPQVVHGEATIRTTKWELQRPAGSRAKVESVEFNVWDIGGPASMATVNQCFFTDKALYVVVWNLALGEEAVANLQFWLLNIEAKAPNAVVLVVGTHLDLIEAKFRVERIATLRAYVLALCRSPSGSRATGFPDITFKHLHEISCKSLEGQEGLRQLIFHVTCSMKDVGSTIGCQRLAGRLIPRSYLSLQEAVLAEQQRRSRDDDVQYLTDRQLEQLVEQTPDNDIKDYEDLQSAISFLIETGTLLHFPDTSHGLRNLYFLDPIWLSECLQRIFNIKGSRSVAKNGVIRAEDLRMLLVGTGFTQQTEEQYFQFLAKFEIALPVANDSYLLPHLLPSKPGLDTHGMRHPTANTIQRVFKMSFVPVGFWQRFIARMLISLAEMDLQLFENKKNTKSRNRKVTIYSFTGNQRNRCSTFRVKRNQTIYWQEGLLVTFDGGYLSVESSDVNWKKKKSGGMKIVCQSEVRDFSAMAFITDHVNSLIDQWFPALTATESDGTPLMEQYVPCPVCETAWAQHTDPSEKSEDVQYFDMEDCVLTAIERDFISCPRHPDLPVPLQELVPELFMTDFPARLFLENSKLEHSEDEGSVLGQGGSGTVIYRARYQGQPVAVKRFHIKKFKNFANVPADTMLRHLRATDAMKNFSEFRQEASMLHALQHPCIVALIGISIHPLCFALELAPLSSLNTVLSENARDSSFIPLGHMLTQKIAYQIASGLAYLHKKNIIFCDLKSDNILVWSLDVKEHINIKLSDYGISRQSFHEGALGVEGTPGYQAPEIRPRIVYDEKVDMFSYGMVLYELLSGQRPALGHHQLQIAKKLSKGIRPVLGQPEEVQFRRLQALMMECWDTKPEKRPLALSVVSQMKDPTFATFMYELCCGKQTAFFSSQGQEYTVVFWDGKEESRNYTVVNTEKGLMEVQRMCCPGMKVSCQLQVQRSLWTATEDQKIYIYTLKGMCPLNTPQQALDTPAVVTCFLAVPVIKKNSYLVLAGLADGLVAVFPVVRGTPKDSCSYLCSHTANRSKFSIADEDARQNPYPVKAMEVVNSGSEVWYSNGPGLLVIDCASLEICRRLEPYMAPSMVTSVVCSSEGRGEEVVWCLDDKANSLVMYHSTTYQLCARYFCGVPSPLRDMFPVRPLDTEPPAASHTANPKVPEGDSIADVSIMYSEELGTQILIHQESLTDYCSMSSYSSSPPRQAARSPSSLPSSPASSSSVPFSTDCEDSDMLHTPGAASDRSEHDLTPMDGETFSQHLQAVKILAVRDLIWVPRRGGDVIVIGLEKDSGAQRGRVIAVLKARELTPHGVLVDAAVVAKDTVVCTFENENTEWCLAVWRGWGAREFDIFYQSYEELGRLEACTRKRR

SEQ ID NO: 23900 - protein, 264 aa, Homo sapiens
MAGMSQRPPSMYWCVGPEESAVCPERAMETLNGAGDTGGKPSTRGGDPAARSRRTEGIRAAYRRGDRGGARDLLEEACDQCASQLEKGQLLSIPAAYGDLEMVRYLLSKRLVELPTEPTDDNPAVVAAYFGHTAVVQELLESLPGPCSPQRLLNWMLALACQRGHLGVVKLLVLTHGADPESYAVRKNEFPVIVRLPLYAAIKSGNEDIAIFLLRHGAYFCSYILLDSPDPSKHLLRKYFIEASPLPSSYPGKTVSSHCLWSVF

SEQ ID NO: 23901 - protein, 2527 aa, Homo sapiens
MASGSCQGCEEDEETLKKLIVRLNNVQEGKQIETLVQILEDLLVFTYSERASKLFQGKNIHVPLLIVLDSYMRVASVQQVGWSLLCKLIEVCPGTMQSLMGPQDVGNDWEVLGVHQLILKMLTVHNASVNLSVIGLKTLDLLLTSGKITLLILDEESDIFMLIFDAMHSFPANDEVQKLGCKALHVLFERVSEEQLTEFVENKDYMILLSALTNFKDEEEIVLHVLHCLHSLAIPCNNVEVLMSGNVRCYNIVVEAMKAFPMSERIQEVSCCLLHRLTLGNFFNILVLNEVHEFVVKAVQQYPENAALQISALSCLALLTETIFLNQDLEEKNENQENDDEGEEDKLFWLEACYKALTWHRKNKHVQEAACWALNNLLMYQNSLHEKIGDEDGHFPAHREVMLSMLMHSSSKEVFQASANALSTLLEQNVNFRKILLSKGIHLNVLELMQKHIHSPEVAESGCKMLNHLFEGSNTSLDIMAAVVPKILTVMKRHETSLPVQLEALRAILHFIVPGMPEESREDTEFHHKLNMVKKQCFKNDIHKLVLAALNRFIGNPGIQKCGLKVISSIVHFPDALEMLSLEGAMDSVLHTLQMYPDDQEIQCLGLSLIGYLITKKNVFIGTGHLLAKILVSSLYRFKDVAEIQTKGFQTILAILKLSASFSKLLVHHSFDLVIFHQMSSNIMEQKDQQFLNLCCKCFAKVAMDDYLKNVMLERACDQNNSIMVECLLLLGADANQAKEGSSLICQVCEKESSPKLVELLLNSGSREQDVRKALTISIGKGDSQIISLLLRRLALDVANNSICLGGFCIGKVEPSWLGPLFPDKTSNLRKQTNIASTLARMVIRYQMKSAVEEGTASGSDGNFSEDVLSKFDEWTFIPDSSMDSVFAQSDDLDSEGSEGSFLVKKKSNSISVGEFYRDAVLQRCSPNLQRHSNSLGPIFDHEDLLKRKRKILSSDDSLRSSKLQSHMRHSDSISSLASEREYITSLDLSANELRDIDALSQKCCISVHLEHLEKLELHQNALTSFPQQLCETLKSLTHLDLHSNKFTSFPSYLLKMSCIANLDVSRNDIGPSVVLDPTVKCPTLKQFNLSYNQLSFVPENLTDVVEKLEQLILEGNKISGICSPLRLKELKILNLSKNHISSLSENFLEACPKVESFSARMNFLAAMPFLPPSMTILKLSQNKFSCIPEAILNLPHLRSLDMSSNDIQYLPGPAHWKSLNLRELLFSHNQISILDLSEKAYLWSRVEKLHLSHNKLKEIPPEIGCLENLTSLDVSYNLELRSFPNEMGKLSKIWDLPLDELHLNFDFKHIGCKAKDIIRFLQQRLKKAVPYNRMKLMIVGNTGSGKTTLLQQLMKTKKSDLGMQSATVGIDVKDWPIQIRDKRKRDLVLNVWDFAGREEFYSTHPHFMTQRALYLAVYDLSKGQAEVDAMKPWLFNIKARASSSPVILVGTHLDVSDEKQRKACMSKITKELLNKRGFPAIRDYHFVNATEESDALAKLRKTIINESLNFKIRDQLVVGQLIPDCYVELEKIILSERKNVPIEFPVIDRKRLLQLVRENQLQLDENELPHAVHFLNESGVLLHFQDPALQLSDLYFVEPKWLCKIMAQILTVKVEGCPKHPKGIISRRDVEKFLSKKRKFPKNYMSQYFKLLEKFQIALPIGEEYLLVPSSLSDHRPVIELPHCENSEIIIRLYEMPYFPMGFWSRLINRLLEISPYMLSGRERALRPNRMYWRQGIYLNWSPEAYCLVGSEVLDNHPESFLKITVPSCRKGCILLGQVVDHIDSLMEEWFPGLLEIDICGEGETLLKKWALYSFNDGEEHQKILLDDLMKKAEEGDLLVNPDQPRLTIPISQIAPDLILADLPRNIMLNNDELEFEQAPEFLLGDGSFGSVYRAAYEGEEVAVKIFNKHTSLRLLRQELVVLCHLHHPSLISLLAAGIRPRMLVMELASKGSLDRLLQQDKASLTRTLQHRIALHVADGLRYLHSAMIIYRDLKPHNVLLFTLYPNAAIIAKIADYGIAQYCCRMGIKTSEGTPGFRAPEVARGNVIYNQQADVYSFGLLLYDILTTGGRIVEGLKFPNEFDELEIQGKLPDPVKEYGCAPWPMVEKLIKQCLKENPQERPTSAQVFDILNSAELVCLTRRILLPKNVIVECMVATHHNSRNASIWLGCGHTDRGQLSFLDLNTEGYTSEEVADSRILCLALVHLPVEKESWIVSGTQSGTLLVINTEDGKKRHTLEKMTDSVTCLYCNSFSKQSKQKNFLLVGTADGKLAIFEDKTVKLKGAAPLKILNIGNVSTPLMCLSESTNSTERNVMWGGCGTKIFSFSNDFTIQKLIETRTSQLFSYAAFSDSNIITVVVDTALYIAKQNSPVVEVWDKKTEKLCGLIDCVHFLREVMVKENKESKHKMSYSGRVKTLCLQKNTALWIGTGGGHILLLDLSTRRLIRVIYNFCNSVRVMMTAQLGSLKNVMLVLGYNRKNTEGTQKQKEIQSCLTVWDINLPHEVQNLEKHIEVRKELAEKMRRTSVE

SEQ ID NO: 23902 - protein, 716 aa, Homo sapiens
MARMSFVIAACQLVLGLLMTSLTESSIQNSECPQLCVCEIRPWFTPQSTYREATTVDCNDLRLTRIPSNLSSDTQVLLLQSNNIAKTVDELQQLFNLTELDFSQNNFTNIKEVGLANLTQLTTLHLEENQITEMTDYCLQDLSNLQELYINHNQISTISAHAFAGLKNLLRLHLNSNKLKVIDSRWFDSTPNLEILMIGENPVIGILDMNFKPLANLRSLVLAGMYLTDIPGNALVGLDSLESLSFYDNKLVKVPQLALQKVPNLKFLDLNKNPIHKIQEGDFKNMLRLKELGINNMGELVSVDRYALDNLPELTKLEATNNPKLSYIHRLAFRSVPALESLMLNNNALNAIYQKTVESLPNLREISIHSNPLRCDCVIHWINSNKTNIRFMEPLSMFCAMPPEYKGHQVKEVLIQDSSEQCLPMISHDSFPNRLNVDIGTTVFLDCRAMAEPEPEIYWVTPIGNKITVETLSDKYKLSSEGTLEISNIQIEDSGRYTCVAQNVQGADTRVATIKVNGTLLDGTQVLKIYVKQTESHSILVSWKVNSNVMTSNLKWSSATMKIDNPHITYTARVPVDVHEYNLTHLQPSTDYEVCLTVSNIHQQTQKSCVNVTTKNAAFAVDISDQETSTALAAVMGSMFAVISLASIAVYFAKRFKRKNYHHSLKKYMQKTSSIPLNELYPPLINLWEGDSEKDKDGSADTKPTQVDTSRSYYMW

SEQ ID NO: 23903 - protein, 713 aa, Homo sapiens
MRLLVAPLLLAWVAGATAAVPVVPWHVPCPPQCACQIRPWYTPRSSYREATTVDCNDLFLTAVPPALPAGTQTLLLQSNSIVRVDQSELGYLANLTELDLSQNSFSDARDCDFHALPQLLSLHLEENQLTRLEDHSFAGLASLQELYLNHNQLYRIAPRAFSGLSNLLRLHLNSNLLRAIDSRWFEMLPNLEILMIGGNKVDAILDMNFRPLANLRSLVLAGMNLREISDYALEGLQSLESLSFYDNQLARVPRRALEQVPGLKFLDLNKNPLQRVGPGDFANMLHLKELGLNNMEELVSIDKFALVNLPELTKLDITNNPRLSFIHPRAFHHLPQMETLMLNNNALSALHQQTVESLPNLQEVGLHGNPIRCDCVIRWANATGTRVRFIEPQSTLCAEPPDLQRLPVREVPFREMTDHCLPLISPRSFPPSLQVASGESMVLHCRALAEPEPEIYWVTPAGLRLTPAHAGRRYRVYPEGTLELRRVTAEEAGLYTCVAQNLVGADTKTVSVVVGRALLQPGRDEGQGLELRVQETHPYHILLSWVTPPNTVSTNLTWSSASSLRGQGATALARLPRGTHSYNITRLLQATEYWACLQVAFADAHTQLACVWARTKEATSCHRALGDRPGLIAILALAVLLLAAGLAAHLGTGQPRKGVGGRRPLPPAWAFWGWSAPSVRVVSAPLVLPWNPGRKLPRSSEGETLLPPLSQNS

SEQ ID NO: 23904 - protein, 708 aa, Homo sapiens
MKDMPLRIHVLLGLAITTLVQAVDKKVDCPRLCTCEIRPWFTPRSIYMEASTVDCNDLGLLTFPARLPANTQILLLQTNNIAKIEYSTDFPVNLTGLDLSQNNLSSVTNINVKKMPQLLSVYLEENKLTELPEKCLSELSNLQELYINHNLLSTISPGAFIGLHNLLRLHLNSNRLQMINSKWFDALPNLEILMIGENPIIRIKDMNFKPLINLRSLVIAGINLTEIPDNALVGLENLESISFYDNRLIKVPHVALQKVVNLKFLDLNKNPINRIRRGDFSNMLHLKELGINNMPELISIDSLAVDNLPDLRKIEATNNPRLSYIHPNAFFRLPKLESLMLNSNALSALYHGTIESLPNLKEISIHSNPIRCDCVIRWMNMNKTNIRFMEPDSLFCVDPPEFQGQNVRQVHFRDMMEICLPLIAPESFPSNLNVEAGSYVSFHCRATAEPQPEIYWITPSGQKLLPNTLTDKFYVHSEGTLDINGVTPKEGGLYTCIATNLVGADLKSVMIKVDGSFPQDNNGSLNIKIRDIQANSVLVSWKASSKILKSSVKWTAFVKTENSHAAQSARIPSDVKVYNLTHLNPSTEYKICIDIPTIYQKNRKKCVNVTTKGLHPDQKEYEKNNTTTLMACLGGLLGIIGVICLISCLSPEMNCDGGHSYVRNYLQKPTFALGELYPPLINLWEAGKEKSTSLKVKATVIGLPTNMS

SEQ ID NO: 23905 - protein, 740 aa, Homo sapiens
MRQTLPLLLLTVLRPSWADPPQEKVPLFRVTQQGPWGSSGSNATDSPCEGLPAADATALTLANRNLERLPGCLPRTLRSLDASHNLLRALSTSELGHLEQLQVLTLRHNRIAALRWGPGGPAGLHTLDLSYNQLAALPPCTGPALSSLRALALAGNPLRALQPRAFACFPALQLLNLSCTALGRGAQGGIAEAAFAGEDGAPLVTLEVLDLSGTFLERVESGWIRDLPKLTSLYLRKMPRLTTLEGDIFKMTPNLQQLDCQDSPALASVATHIFQDTPHLQVLLFQNCNLSSFPPWTLDSSQVLSINLFGNPLTCSCDLSWLLTDAKRTVLSRAADTMCAPAAGSSGPFSASLSLSQLPGVCQSDQSTTLGASHPPCFNRSTYAQGTTVAPSAAPATRPAGDQQSVSKAPNVGSRTIAAWPHSDAREGTAPSTTNSVAGHSNSSVFPRAASTTRTQHRGEHAPELVLEPDISAASTPLASKLLGPFPTSWDRSISSPQPGQRTHATPQAPNPSLSEGEIPVLLLDDYSEEEEGRKEEVGTPHQDVPCDYHPCKHLQTPCAELQRRWRCRCPGLSGEDTIPDPPRLQGVTETTDTSALVHWCAPNSVVHGYQIRYSAEGWAGNQSVVGVIYATARQHPLYGLSPGTTYRVCVLAANRAGLSQPRSSGWRSPCAAFTTKPSFALLLSGLCAASGLLLASTVVLSACLCRRGQTLGLQRCDTHLVAYKNPAFDDYPLGLQTVS

SEQ ID NO: 23906 - protein, 522 aa, Homo sapiens
MDFLLLGLCLYWLLRRPSGVVLCLLGACFQMLPAAPSGCPQLCRCEGRLLYCEALNLTEAPHNLSGLLGLSLRYNSLSELRAGQFTGLMQLTWLYLDHNHICSVQGDAFQKLRRVKELTLSSNQITQLPNTTFRPMPNLRSVDLSYNKLQALAPDLFHGLRKLTTLHMRANAIQFVPVRIFQDCRSLKFLDIGYNQLKSLARNSFAGLFKLTELHLEHNDLVKVNFAHFPRLISLHSLCLRRNKVAIVVSSLDWVWNLEKMDLSGNEIEYMEPHVFETVPHLQSLQLDSNRLTYIEPRILNSWKSLTSITLAGNLWDCGRNVCALASWLNNFQGRYDGNLQCASPEYAQGEDVLDAVYAFHLCEDGAEPTSGHLLSAVTNRSDLGPPASSATTLADGGEGQHDGTFEPATVALPGGEHAENAVQIHKVVTGTMALIFSFLIVVLVLYVSWKCFPASLRQLRQCFVTQRRKQKQKQTMHQMAAMSAQEYYVDYKPNHIEGALVIINEYGSCTCHQQPARECEV

SEQ ID NO: 23907 - protein, 516 aa, Homo sapiens
MGLHFKWPLGAPMLAAIYAMSMVLKMLPALGMACPPKCRCEKLLFYCDSQGFHSVPNATDKGSLGLSLRHNHITELERDQFASFSQLTWLHLDHNQISTVKEDAFQGLYKLKELILSSNKIFYLPNTTFTQLINLQNLDLSFNQLSSLHPELFYGLRKLQTLHLRSNSLRTIPVRLFWDCRSLEFLDLSTNRLRSLARNGFAGLIKLRELHLEHNQLTKINFAHFLRLSSLHTLFLQWNKISNLTCGMEWTWGTLEKLDLTGNEIKAIDLTVFETMPNLKILLMDNNKLNSLDSKILNSLRSLTTVGLSGNLWECSARICALASWLGSFQGRWEHSILCHSPDHTQGEDILDAVHGFQLCWNLSTTVTVMATTYRDPTTEYTKRISSSSYHVGDKEIPTTAGIAVTTEEHFPEPDNAIFTQRVITGTMALLFSFFFIIFIVFISRKCCPPTLRRIRQCSMVQNHRQLRSQTRLHMSNMSDQGPYNEYEPTHEGPFIIINGYGQCKCQQLPYKECEV

SEQ ID NO: 23908 - protein, 581 aa, Homo sapiens
MGFNVIRLLSGSAVALVIAPTVLLTMLSSAERGCPKGCRCEGKMVYCESQKLQEIPSSISAGCLGLSLRYNSLQKLKYNQFKGLNQLTWLYLDHNHISNIDENAFNGIRRLKELILSSNRISYFLNNTFRPVTNLRNLDLSYNQLHSLGSEQFRGLRKLLSLHLRSNSLRTIPVRIFQDCRNLELLDLGYNRIRSLARNVFAGMIRLKELHLEHNQFSKLNLALFPRLVSLQNLYLQWNKISVIGQTMSWTWSSLQRLDLSGNEIEAFSGPSVFQCVPNLQRLNLDSNKLTFIGQEILDSWISLNDISLAGNIWECSRNICSLVNWLKSFKGLRENTIICASPKELQGVNVIDAVKNYSICGKSTTERFDLARALPKPTFKPKLPRPKHESKPPLPPTVGATEPGPETDADAEHISFHKIIAGSVALFLSVLVILLVIYVSWKRYPASMKQLQQRSLMRRHRKKKRQSLKQMTPSTQEFYVDYKPTNTETSEMLLNGTGPCTYNKSGSRECEIPLSMNVSTFLAYDQPTISYCGVHHELLSHKSFETNAQEDTMETHLETELDLSTITTAGRISDHKQQLA

SEQ ID NO: 23909 - protein, 513 aa, Homo sapiens
MGFNVIRLLSGSAVALVIAPTVLLTMLSSAERGCPKGCRCEGKMVYCESQKLQEIPSSISAGCLGLSLRYNSLQKLKYNQFKGLNQLTWLYLDHNHISNIDENAFNGIRRLKELILSSNRISYFLNNTFRPVTNLRNLDLSYNQLHSLGSEQFRGLRKLLSLHLRSNSLRTIPVRIFQDCRNLELLDLGYNRIRSLARNVFAGMIRLKELHLEHNQFSKLNLALFPRLVSLQNLYLQWNKISVIGQTMSWTWSSLQRLDLSGNEIEAFSGPSVFQCVPNLQRLNLDSNKLTFIGQEILDSWISLNDISLAGNIWECSRNICSLVNWLKSFKGLRENTIICASPKELQGVNVIDAVKNYSICGKSTTERFDLARALPKPTFKPKLPRPKHESKPPLPPTVGATEPGPETDADAEHISFHKIIAGSVALFLSVLVILLVIYVSWKRYPASMKQLQQRSLMRRHRKKKRQSLKQMTPSTQEFYVDYKPTNTETSEMLLNGTGPCTYNKSGSRECEV

SEQ ID NO: 23910 - protein, 590 aa, Homo sapiens
MGFHLITQLKGMSVVLVLLPTLLLVMLTGAQRACPKNCRCDGKIVYCESHAFADIPENISGGSQGLSLRFNSIQKLKSNQFAGLNQLIWLYLDHNYISSVDEDAFQGIRRLKELILSSNKITYLHNKTFHPVPNLRNLDLSYNKLQTLQSEQFKGLRKLIILHLRSNSLKTVPIRVFQDCRNLDFLDLGYNRLRSLSRNAFAGLLKLKELHLEHNQFSKINFAHFPRLFNLRSIYLQWNRIRSISQGLTWTWSSLHNLDLSGNDIQGIEPGTFKCLPNLQKLNLDSNKLTNISQETVNAWISLISITLSGNMWECSRSICPLFYWLKNFKGNKESTMICAGPKHIQGEKVSDAVETYNICSEVQVVNTERSHLVPQTPQKPLIIPRPTIFKPDVTQSTFETPSPSPGFQIPGAEQEYEHVSFHKIIAGSVALFLSVAMILLVIYVSWKRYPASMKQLQQHSLMKRRRKKARESERQMNSPLQEYYVDYKPTNSETMDISVNGSGPCTYTISGSRECEMPHHMKPLPYYSYDQPVIGYCQAHQPLHVTKGYETVSPEQDESPGLELGRDHSFIATIARSAAPAIYLERIAN

SEQ ID NO: 23911 - protein, 518 aa, Homo sapiens
MGFHLITQLKGMSVVLVLLPTLLLVMLTGAQRACPKNCRCDGKIVYCESHAFADIPENISGGSQGLSLRFNSIQKLKSNQFAGLNQLIWLYLDHNYISSVDEDAFQGIRRLKELILSSNKITYLHNKTFHPVPNLRNLDLSYNKLQTLQSEQFKGLRKLIILHLRSNSLKTVPIRVFQDCRNLDFLDLGYNRLRSLSRNAFAGLLKLKELHLEHNQFSKINFAHFPRLFNLRSIYLQWNRIRSISQGLTWTWSSLHNLDLSGNDIQGIEPGTFKCLPNLQKLNLDSNKLTNISQETVNAWISLISITLSGNMWECSRSICPLFYWLKNFKGNKESTMICAGPKHIQGEKVSDAVETYNICSEVQVVNTERSHLVPQTPQKPLIIPRPTIFKPDVTQSTFETPSPSPGFQIPGAEQEYEHVSFHKIIAGSVALFLSVAMILLVIYVSWKRYPASMKQLQQHSLMKRRRKKARESERQMNSPLQEYYVDYKPTNSETMDISVNGSGPCTYTISGSRECEV

SEQ ID NO: 23912 - protein, 723 aa, Homo sapiens
MPLFFRKRKPSEEARKRLEYQMCLAKEAGADDILDISKCELSEIPFGAFATCKVLQKKVLIVHTNHLTSLLPKSCSLLSLATIKVLDLHDNQLTALPDDLGQLTALQVLNVERNQLMQLPRSIGNLTQLQTLNVKDNKLKELPDTVGELRSLRTLNISGNEIQRLPQMLAHVRTLEMLSLDASAMVYPPREVCGAGTAAILQFLCKESGLEYYPPSQYLLPILEQDGIENSRDSPDGPTDRFSREELEWQNRFSDYEKRKEQKMLEKLEFERRLELGQREHTQLLQQSSSQKDEILQTVKEEQSRLEQGLSEHQRHLNAERQRLQEQLKQTEQNISSRIQKLLQDNQRQKKSSEILKSLENERIRMEQLMSITQEETESLRRRDVASAMQQMLTESCKNRLIQMAYESQRQNLVQQACSSMAEMDERFQQILSWQQMDQNKAISQILQESAMQKAAFEALQVKKDLMHRQIRSQIKLIETELLQLTQLELKRKSLDTESLQEMISEQRWALSSLLQQLLKEKQQREEELREILTELEAKSETRQENYWLIQYQRLLNQKPLSLKLQEEGMERQLVALLEELSAEHYLPIFAHHRLSLDLLSQMSPGDLAKVGVSEAGLQHEILRRVQELLDAARIQPELKPPMGEVVTPTAPQEPPESVRPSAPPAELEVQASECVVCLEREAQMIFLNCGHVCCCQQCCQPLRTCPLCRQDIAQRLRIYHSS

SEQ ID NO: 23913 - protein, 696 aa, Homo sapiens
MPLFFRKRKPSEEARKRLEYQMCLAKEAGADDILDISKCELSEIPFGAFATCKVLQKKVLIVHTNHLTSLLPKSCSLLSLATIKVLDLHDNQLTALPDDLGQLTALQVLNVERNQLMQLPRSIGNLTQLQTLNVKDNKLKELPDTVGELRSLRTLNISGNEIQRLPQMLAHVRTLEMLSLDASAMVYPPREVCGAGTAAILQFLCKESGLEYYPPSQYLLPILEQDGIENSRDSPDGPTDRFSREELEWQNRFSDYEKRKEQKMLEKLEFERRLELGQREHTQLLQQSSSQKDEILQTVKEEQSRLEQGLSEHQRHLNAERQRLQEQLKQTEQNISSRIQKLLQDNQRQKKSSEILKSLENERIRMEQLMSITQEETESLRRRDVASAMQQMLTESCKNRLIQMAYESQRQNLVQQACSSMAEMDERFQQILSWQQMDQNKAISQILQESAMQKAAFEALQVKKDLMHRQIRSQEMISEQRWALSSLLQQLLKEKQQREEELREILTELEAKSETRQENYWLIQYQRLLNQKPLSLKLQEEGMERQLVALLEELSAEHYLPIFAHHRLSLDLLSQMSPGDLAKVGVSEAGLQHEILRRVQELLDAARIQPELKPPMGEVVTPTAPQEPPESVRPSAPPAELEVQASECVVCLEREAQMIFLNCGHVCCCQQCCQPLRTCPLCRQDIAQRLRIYHSS

SEQ ID NO: 23914 - protein, 303 aa, Homo sapiens
MAEMDERFQQILSWQQMDQNKAISQILQESAMQKAAFEALQVKKDLMHRQIRSQIKLIETELLQLTQLELKRKSLDTESLQEMISEQRWALSSLLQQLLKEKQQREEELREILTELEAKSETRQENYWLIQYQRLLNQKPLSLKLQEEGMERQLVALLEELSAEHYLPIFAHHRLSLDLLSQMSPGDLAKVGVSEAGLQHEILRRVQELLDAARIQPELKPPMGEVVTPTAPQEPPESVRPSAPPAELEVQASECVVCLEREAQMIFLNCGHVCCCQQCCQPLRTCPLCRQDIAQRLRIYHSS

SEQ ID NO: 23915 - protein, 345 aa, Homo sapiens
MKGELLLFSSVIVLLQVVCSCPDKCYCQSSTNFVDCSQQGLAEIPSHLPPQTRTLHLQDNQIHHLPAFAFRSVPWLMTLNLSNNSLSNLAPGAFHGLQHLQVLNLTQNSLLSLESRLFHSLPQLRELDLSSNNISHLPTSLGETWENLTILAVQQNQLQQLDRALLESMPSVRLLLLKDNLWKCNCHLLGLKLWLEKFVYKGGLTDGIICESPDTWKGKDLLRIPHELYQPCPLPAPDPVSSQAQWPGSAHGVVLRPPENHNAGERELLECELKPKPRPANLRHAIATVIITGVVCGIVCLMMLAAAIYGCTYAAITAQYHGGPLAQTNDPGKVEEKERFDSSPA

SEQ ID NO: 23916 - protein, 269 aa, Homo sapiens
MTLNLSNNSLSNLAPGAFHGLQHLQVLNLTQNSLLSLESRLFHSLPQLRELDLSSNNISHLPTSLGETWENLTILAVQQNQLQQLDRALLESMPSVRLLLLKDNLWKCNCHLLGLKLWLEKFVYKGGLTDGIICESPDTWKGKDLLRIPHELYQPCPLPAPDPVSSQAQWPGSAHGVVLRPPENHNAGERELLECELKPKPRPANLRHAIATVIITGVVCGIVCLMMLAAAIYGCTYAAITAQYHGGPLAQTNDPGKVEEKERFDSSPA

SEQ ID NO: 23917 - protein, 370 aa, Homo sapiens
MLAPGSSPGQRGRLALQWRQVSWITCWIALYAVEALPTCPFSCKCDSRSLEVDCSGLGLTTVPPDVPAATRTLLLLNNKLSALPSWAFANLSSLQRLDLSNNFLDRLPRSIFGDLTNLTELQLRNNSIRTLDRDLLRHSPLLRHLDLSINGLAQLPPGLFDGLLALRSLSLRSNRLQNLDRLTFEPLANLQLLQVGDNPWECDCNLREFKHWMEWFSYRGGRLDQLACTLPKELRGKDMRMVPMEMFNYCSQLEDENSSAGLDIPGPPCTKASPEPAKPKPGAEPEPEPSTACPQKQRHRPASVRRAMGTVIIAGVVCGVVCIMMVVAAAYGCIYASLMAKYHRELKKRQPLMGDPEGEHEDQKQISSVA

SEQ ID NO: 23918 - protein, 647 aa, Homo sapiens
MGPLSARLLMQRGRPKSDRLGKIRSLDLSGLELLSEHLDPKLLCRLTQLQELDLSNNHLETLPDNLGLSHLRVLRCANNQLGDVTALCQFPKLEELSLEGNPFLTVNDNLKVSFLLPTLRKVNGKDASSTYSQVENLNRELTSRVTAHWEKFMATLGPEEEAEKAQADFVKSAVRDVRYGPESLSEFTQWRVRMISEELVAASRTQVQKANSPEKPPEAGAAHKPRARLAALKRPDDVPLSLSPSKRACASPSAQVEGSPVAGSDGSQPAVKLEPLHFLQCHSKNNSPQDLETQLWACAFEPAWEEGATSQTVATCGGEAVCVIDCQTGIVLHKYKAPGEEFFSVAWTALMVVTQAGHKKRWSVLAAAGLRGLVRLLHVRAGFCCGVIRAHKKAIATLCFSPAHETHLFTASYDKRIILWDIGVPNQDYEFQASQLLTLDTTSIPLRLCPVASCPDARLLAGCEGGCCCWDVRLDQPQKRRVCEVEFVFSEGSEASGRRVDGLAFVNEDIVASKGSGLGTICLWSWRQTWGGRGSQSTVAVVVLARLQWSSTELAYFSLSACPDKGIVLCGDEEGNVWLYDVSNILKQPPLLPAALQAPTQILKWPQPWALGQVVTKTMVNTVVANASFTYLTALTDSNIVAIWGRM

SEQ ID NO: 23919 - protein, 463 aa, Homo sapiens
MSGGTPYIGSKISLISKAEIRYEGILYTIDTENSTVALAKVRSFGTEDRPTDRPIPPRDEVFEYIIFRGSDIKDLTVCEPPKPQCSLPQDPAIVQSSLGSSTSSFQSMGSYGPFGRMPTYSQFSPSSLVGQQFGAVGVAGSSLTSFGTETSNSGTLPQSSAVGSAFTQDTRSLKTQLSQGRSSPQLDPLRKSPTMEQAVQTASAHLPAPAAVGRRSPVSTRPLPSASQKAGENQEHRRAEVHKVSRPENEQLRNDNKRQVAPGAPSAPRRGRGGHRGGRGRFGIRRDGPMKFEKDFDFESANAQFNKEEIDREFHNKLKLKEDKLEKQEKPVNGEDKGDSGVDTQNSEGNADEEDPLGPNCYYDKTKSFFDNISCDDNRERRPTWAEERRLNAETFGIPLRPNRGRGGYRGRGGLGFRGGRGRGGGRGGTFTAPRGFRGGFRGGRGGREFADFEYRKTTAFGP

SEQ ID NO: 23920 - protein, 463 aa, Homo sapiens
MSGGTPYIGSKISLISKAEIRYEGILYTIDTENSTVALAKVRSFGTEDRPTDRPIPPRDEVFEYIIFRGSDIKDLTVCEPPKPQCSLPQDPAIVQSSLGSSTSSFQSMGSYGPFGRMPTYSQFSPSSLVGQQFGAVGVAGSSLTSFGTETSNSGTLPQSSAVGSAFTQDTRSLKTQLSQGRSSPQLDPLRKSPTMEQAVQTASAHLPAPAAVGRRSPVSTRPLPSASQKAGENQEHRRAEVHKVSRPENEQLRNDNKRQVAPGAPSAPRRGRGGHRGGRGRFGIRRDGPMKFEKDFDFESANAQFNKEEIDREFHNKLKLKEDKLEKQEKPVNGEDKGDSGVDTQNSEGNADEEDPLGPNCYYDKTKSFFDNISCDDNRERRPTWAEERRLNAETFGIPLRPNRGRGGYRGRGGLGFRGGRGRGGGRGGTFTAPRGFRGGFRGGRGGREFADFEYRKDNKVAA

SEQ ID NO: 23921 - protein, 422 aa, Homo sapiens
MSGGTPYIGSKISLISKAEIRYEGILYTIDTENSTVALAKVRSFGTEDRPTDRPIPPRDEVFEYIIFRGSDIKDLTVCEPPKPQCSLPQDPAIVQSSLGSSTSSFQSMGSYGPFGRMPTYSQFSPSSLVGQQFGAVGVGRSSPQLDPLRKSPTMEQAVQTASAHLPAPAAVGRRSPVSTRPLPSASQKAGENQEHRRAEVHKVSRPENEQLRNDNKRQVAPGAPSAPRRGRGGHRGGRGRFGIRRDGPMKFEKDFDFESANAQFNKEEIDREFHNKLKLKEDKLEKQEKPVNGEDKGDSGVDTQNSEGNADEEDPLGPNCYYDKTKSFFDNISCDDNRERRPTWAEERRLNAETFGIPLRPNRGRGGYRGRGGLGFRGGRGRGGGRGGTFTAPRGFRGGFRGGRGGREFADFEYRKTTAFGP

SEQ ID NO: 23922 - protein, 385 aa, Homo sapiens
MSGSSGTPYLGSKISLISKAQIRYEGILYTIDTDNSTVALAKVRSFGTEDRPTDRPAPPREEIYEYIIFRGSDIKDITVCEPPKAQHTLPQDPAIVQSSLGSASASPFQPHVPYSPFRGMAPYGPLAASSLLSQQYAASLGLGAGFPSIPVGKSPMVEQAVQTGSADNLNAKKLLPGKGTTGTQLNGRQAQPSSKTASDVVQPAAVQAQGQVNDENRRPQRRRSGNRRTRNRSRGQNRPTNVKENTIKFEGDFDFESANAQFNREELDKEFKKKLNFKDDKAEKGEEKDLAVVTQSAEAPAEEDLLGPNCYYDKSKSFFDNISSELKTSSRRTTWAEERKLNTETFGVSGRFLRGRSSRGGFRGGRGNGTTRRNPTSHRAGTGRV

SEQ ID NO: 23923 - protein, 385 aa, Homo sapiens
MSGSSGTPYLGSKISLISKAQIRYEGILYTIDTDNSTVALAKVRSFGTEDRPTDRPAPPREEIYEYIIFRGSDIKDITVCEPPKAQHTLPQDPAIVQSSLGSASASPFQPHVPYSPFRGMAPYGPLAASSLLSQQYAASLGLEKLVSPPASAAASSPSSSPSPQPVSELDLSSEPQQLTAKGNSSLGELHAVLQTILRARGKAADRMTVAVADHLPSPCSRRRSGNRRTRNRSRGQNRPTNVKENTIKFEGDFDFESANAQFNREELDKEFKKKLNFKDDKAEKGEEKDLAVVTQSAEAPAEEDLLGPNCYYDKSKSFFDNISSELKTSSRRTTWAEERKLNTETFGVSGRFLRGRSSRGGFRGGRGNGTTRRNPTSHRAGTGRV

SEQ ID NO: 23924 - protein, 239 aa, Homo sapiens
MAPYGPLAASSLLSQQYAASLGLEKLVSPPASAAASSPSSSPSPQPVSELDLSSEPQQLTAKGCLFCFRSLFTYTQSHIVLFRVPTGPGTLEREEMERGAGFPSIPVGKSPMVEQAVQTGSADNLNAKKLLPGKGTTGTQLNGRQAQPSSKTASDVVQPAAVQAQGQVNDENRRPQRRRSGNRRTRNRSRGQNRPTNVKENTIKFEGDFDFESANAQFNREELDKEFKKRPILLLVFWT

SEQ ID NO: 23925 - protein, 338 aa, Homo sapiens
MVRRVQPDRKQLPLVLLRLLCLLPTGLPVRSVDFNRGTDNITVRQGDTAILRCVVEDKNSKVAWLNRSGIIFAGHDKWSLDPRVELEKRHSLEYSLRIQKVDVYDEGSYTCSVQTQHEPKTSQVYLIVQVPPKISNISSDVTVNEGSNVTLVCMANGRPEPVITWRHLTPTGREFEGEEEYLEILGITREQSGKYECKAANEVSSADVKQVKVTVNYPPTITESKSNEATTGRQASLKCEASAVPAPDFEWYRDDTRINSANGLEIKSTEGQSSLTVTNVTEEHYGNYTCVAANKLGVTNASLVLFRPGSVRGINGSISLAVPLWLLAASLLCLLSKC

SEQ ID NO: 23926 - protein, 227 aa, Homo sapiens
MASPSRQPPPGGSGLLQGSRARSYGSLVQSACSPVRERRLEHQLEPGDTLAGLALKYGVTMEQIKRANRLYTNDSIFLKKTLYIPILTEPRDLFNGLDSEEEKDGEEKVHPSNSEVWPHSTERKKQETGAGRANGEVLPTPGQETPTPIHDLSASDFLKKLDSQISLSKKAAAQKLKKGENGVPGEDAGLHLSSPWMQQRAVLGPVPLTRTSRTRTLRDQEDEIFKL

SEQ ID NO: 23927 - protein, 179 aa, Homo sapiens
MRSGPLRISEWKMEQIKRANRLYTNDSIFLKKTLYIPILTEPRDLFNGLDSEEEKDGEEKVHPSNSEVWPHSTERKKQETGAGRANGEVLPTPGQETPTPIHDLSASDFLKKLDSQISLSKKAAAQKLKKGENGVPGEDAGLHLSSPWMQQRAVLGPVPLTRTSRTRTLRDQEDEIFKL

SEQ ID NO: 23928 - protein, 215 aa, Homo sapiens
MADSSPALSLREGGPRAPRPSAPSPPPRSRSGSESEEAELSLSLARTKTRSYGSTASVRAPLGAGVIERHVEHRVRAGDTLQGIALKYGVTMEQIKRANKLFTNDCIFLKKTLNIPVISEKPLLFNGLNSIDSPENETADNSFSQEEEPVVAGEDLPPPSPQESDVQPVQPEEVSARDFLQRLDLQIKLSTQAAKKLKEESRDEESPYATSLYHS

SEQ ID NO: 23929 - protein, 124 aa, Homo sapiens
MEQIKRANKLFTNDCIFLKKTLNIPVISEKPLLFNGLNSIDSPENETADNSFSQEEEPVVAGEDLPPPSPQESDVQPVQPEEVSARDFLQRLDLQIKLSTQAAKKLKEESRDEESPYATSLYHS

SEQ ID NO: 23930 - protein, 852 aa, Homo sapiens
MLITERKHFRSGRIAQSMSEANLIDMEAGKLSKSCNITECQDPDLLHNWPDAFTLRGNNASKVANPFWNQLSASNPFLDDITQLRNNRKRNNISILKEDPFLFCREIENGNSFDSSGDELDVHQLLRQTSSRNSGRSKSVSELLDILDDTAHAHQSIHNSDQILLHDLEWLKNDREAYKMAWLSQRQLARSCLDLNTISQSPGWAQTQLAEVTIACKVNHQGGSVQLPESDITVHVPQGHVAVGEFQEVSLRAFLDPPHMLNHDLSCTVSPLLEIMLGNLNTMEALLLEMKIGAEVRKDPFSQVMTEMVCLHSLGKEGPFKVLSNCYIYKDTIQVKLIDLSQVMYLVVAAQAKALPSPAATIWDYIHKTTSIGIYGPKYIHPSFTVVLTVCGHNYMPGQLTISDIKKGGKNISPVVFQLWGKQSFLLDKPQDLSISIFSCDPDFEVKTEGERKEIKQKQLEAGEVVHQQFLFSLVEHREMHLFDFCVQVEPPNGEPVAQFSITTPDPTPNLKRLSNLPGYLQKKEEIKSAPLSPKILVKYPTFQDKTLNFSNYGVTLKAVLRQSKIDYFLEYFKGDTIALLGEGKVKAIGQSKVKEWYVGVLRGKIGLVHCKNVKVISKEQVMFMSDSVFTTRNLLEQIVLPLKKLTYIYSVVLTLVSEKVYDWKVLADVLGYSHLSLEDFDQIQADKESEKVSYVIKKLKEDCHTERNTRKFLYELIVALLKMDCQELVARLIQEAAVLTSAVKLGKGWRELAEKLVRLTKQQMEAYEIPHRGNTGDVAVEMMWKPAYDFLYTWSAHYGNNYRDVLQDLQSALDRMKNPVTKHWRELTGVLILVNSLEVLRVTAFSTSEEV

SEQ ID NO: 23931 - protein, 325 aa, Homo sapiens
MSLQSRLSGRLAQLRAAGQLLVPPRPRPGHLAGATRTRSSTCGPPAFLGVFGRRARTSAGVGAWGAAAVGRTAGVRTWAPLAMAAKVDLSTSTDWKEAKSFLKGLSDKQREEHYFCKDFVRLKKIPTWKEMAKGVAVKVEEPRYKKDKQLNEKISLLRSDITKLEVDAIVNAANSSLLGGGGVDGCIHRAAGPLLTDECRTLQSCKTGKAKITGGYRLPAKYVIHTVGPIAYGEPSASQAAELRSCYLSSLDLLLEHRLRSVAFPCISTGVFGYPCEAAAEIVLATLREWLEQHKDKVDRLIICVFLEKDEDIYRSRLPHYFPVA

SEQ ID NO: 23932 - protein, 306 aa, Homo sapiens
MAGRHQNRSFPLPGVQSSGQVHAFGNCSDSDILEEDAEVYELRSRGKEKVRRSTSRDRLDDIIVLTKDIQEGDTLNAIALQYCCTVADIKRVNNLISDQDFFALRSIKIPVKKFSSLTETLCPPKGRQTSRHSSVQYSSEQQEILPANDSLAYSDSAGSFLKEVDRDIEQIVKCTDNKRENLNEVVSALTAQQMRFEPDNKNTQRKDPYYGADWGIGWWTAVVIMLIVGIITPVFYLLYYEILAKVDVSHHSTVDSSHLHSKITPPSQQREMENGIVPTKGIHFSQQDDHKLYSQDSQSPAAQQET

SEQ ID NO: 23933 - protein, 127 aa, Homo sapiens
MAGRHQNRSFPLPGVQSSGQVHAFGNCSDSDILEEDAEVYELRSRGKEKVRRSTSRDRLDDIIVLTKDIQEGDTLNAIALQYCCTVYQNSSKKVQFLDRNTLSSKRKTDFTSFICSILFRTTGNFAS

SEQ ID NO: 23934 - protein, 150 aa, Homo sapiens
MAGRHQNRSFPLPGVQSSGQVHAFGNCSDSDILEEDAEVYELRSRGKEKVRRSTSRDRLDDIIVLTKDIQEGDTLNAIALQYCCTLRWMLVIIQQWTLHIYIQKSHPHHSREKWKMELCQLKEYISANKMIINCIVKILSHLLLNRKHSN

SEQ ID NO: 23935 - protein, 2089 aa, Homo sapiens
MEDTQAIDWDVEEEEETEQSSESLRCNVEPVGRLHIFSGAHGPEKDFPLHLGKNVVGRMPDCSVALPFPSISKQHAEIEILAWDKAPILRDCGSLNGTQILRPPKVLSPGVSHRLRDQELILFADLLCQYHRLDVSLPFVSRGPLTVEETPRVQGETQPQRLLLAEDSEEEVDFLSERRMVKKSRTTSSSVIVPESDEEGHSPVLGGLGPPFAFNLNSDTDVEEGQQPATEEASSAARRGATVEAKQSEAEVVTEIQLEKDQPLVKERDNDTKVKRGAGNGVVPAGVILERSQPPGEDSDTDVDDDSRPPGRPAEVHLERAQPFGFIDSDTDAEEERIPATPVVIPMKKRKIFHGVGTRGPGAPGLAHLQESQAGSDTDVEEGKAPQAVPLEKSQASMVINSDTDDEEEVSAALTLAHLKESQPAIWNRDAEEDMPQRVVLLQRSQTTTERDSDTDVEEEELPVENREAVLKDHTKIRALVRAHSEKDQPPFGDSDDSVEADKSSPGIHLERSQASTTVDINTQVEKEVPPGSAIIHIKKHQVSVEGTNQTDVKAVGGPAKLLVVSLEEAWPLHGDCETDAEEGTSLTASVVADVRKSQLPAEGDAGAEWAAAVLKQERAHEVGAQGGPPVAQVEQDLPISRENLTDLVVDTDTLGESTQPQREGAQVPTGREREQHVGGTKDSEDNYGDSEDLDLQATQCFLENQGLEAVQSMEDEPTQAFMLTPPQELGPSHCSFQTTGTLDEPWEVLATQPFCLRESEDSETQPFDTHLEAYGPCLSPPRAIPGDQHPESPVHTEPMGIQGRGRQTVDKVMGIPKETAERVGPERGPLERETEKLLPERQTDVTGEEELTKGKQDREQKQLLARDTQRQESDKNGESASPERDRESLKVEIETSEEIQEKQVQKQTLPSKAFEREVERPVANRECDPAELEEKVPKVILERDTQRGEPEGGSQDQKGQASSPTPEPGVGAGDLPGPTSAPVPSGSQSGGRGSPVSPRRHQKGLLNCKMPPAEKASRIRAAEKVSRGDQESPDACLPPTVPEAPAPPQKPLNSQSQKHLAPPPLLSPLLPSIKPTVRKTRQDGSQEAPEAPLSSELEPFHPKPKIRTRKSSRMTPFPATSAAPEPHPSTSTAQPVTPKPTSQATRSRTNRSSVKTPEPVVPTAPELQPSTSTDQPVTSEPTSQVTRGRKSRSSVKTPETVVPTALELQPSTSTDRPVTSEPTSQATRGRKNRSSVKTPEPVVPTAPELQPSTSTDQPVTSEPTYQATRGRKNRSSVKTPEPVVPTAPELRPSTSTDRPVTPKPTSRTTRSRTNMSSVKTPETVVPTAPELQISTSTDQPVTPKPTSRTTRSRTNMSSVKNPESTVPIAPELPPSTSTEQPVTPEPTSRATRGRKNRSSGKTPETLVPTAPKLEPSTSTDQPVTPEPTSQATRGRTNRSSVKTPETVVPTAPELQPSTSTDQPVTPEPTSQATRGRTDRSSVKTPETVVPTAPELQASASTDQPVTSEPTSRTTRGRKNRSSVKTPETVVPAAPELQPSTSTDQPVTPEPTSRATRGRTNRSSVKTPESIVPIAPELQPSTSRNQLVTPEPTSRATRCRTNRSSVKTPEPVVPTAPEPHPTTSTDQPVTPKLTSRATRRKTNRSSVKTPKPVEPAASDLEPFTPTDQSVTPEAIAQGGQSKTLRSSTVRAMPVPTTPEFQSPVTTDQPISPEPITQPSCIKRQRAAGNPGSLAAPIDHKPCSAPLEPKSQASRNQRWGAVRAAESLTAIPEPASPQLLETPIHASQIQKVEPAGRSRFTPELQPKASQSRKRSLATMDSPPHQKQPQRGEVSQKTVIIKEEEEDTAEKPGKEEDVVTPKPGKRKRDQAEEEPNRIPSRSLRRTKLNQESTAPKVLFTGVVDARGERAVLALGGSLAGSAAEASHLVTDRIRRTVKFLCALGRGIPILSLDWLHQSRKAGFFLPPDEYVVTDPEQEKNFGFSLQDALSRARERRLLEGYEIYVTPGVQPPPPQMGEIISCCGGTYLPSMPRSYKPQRVVITCPQDFPHCSIPLRVGLPLLSPEFLLTGVLKQEAKPEAFVLSPLEMSST

SEQ ID NO: 23936 - protein, 1825 aa, Homo sapiens
MEDTQAIDWDVEEEEETEQSSESLRCNVEPVGRLHIFSGAHGPEKDFPLHLGKNVVGRMPDCSVALPFPSISKQHAEIEILAWDKAPILRDCGSLNGTQILRPPKVLSPGVSHRLRDQELILFADLLCQYHRLDVSLPFVSRGPLTVEETPRVQGETQPQRLLLAEDSEEEVDFLSERRMVKKSRTTSSSVIVPESDEEGHSPVLGGLGPPFAFNLNSDTDVEEGQQPATEEASSAARRGATVEAKQSEAEVVTEIQLEKDQPLVKERDNDTKVKRGAGNGVVPAGVILERSQPPGEDSDTDVDDDSRPPGRPAEVHLERAQPFGFIDSDTDAEEERIPATPVVIPMKKRKIFHGVGTRGPGAPGLAHLQESQAGSDTDVEEGKAPQAVPLEKSQASMVINSDTDDEEEVSAALTLAHLKESQPAIWNRDAEEDMPQRVVLLQRSQTTTERDSDTDVEEEELPVENREAVLKDHTKIRALVRAHSEKDQPPFGDSDDSVEADKSSPGIHLERSQASTTVDINTQVEKEVPPGSAIIHIKKHQVSVEGTNQTDVKAVGGPAKLLVVSLEEAWPLHGDCETDAEEGTSLTASVVADVRKSQLPAEGDAGAEWAAAVLKQERAHEVGAQGGPPVAQVEQDLPISRENLTDLVVDTDTLGESTQPQREGAQVPTGREREQHVGGTKDSEDNYGDSEDLDLQATQCFLENQGLEAVQSMEDEPTQAFMLTPPQELGPSHCSFQTTGLLNCKMPPAEKASRIRAAEKVSRGDQESPDACLPPTVPEAPAPPQKPLNSQSQKHLAPPPLLSPLLPSIKPTVRKTRQDGSQEAPEAPLSSELEPFHPKPKIRTRKSSRMTPFPATSAAPEPHPSTSTAQPVTPKPTSQATRSRTNRSSVKTPEPVVPTAPELQPSTSTDQPVTSEPTSQVTRGRKSRSSVKTPETVVPTALELQPSTSTDRPVTSEPTSQATRGRKNRSSVKTPEPVVPTAPELQPSTSTDQPVTSEPTYQATRGRKNRSSVKTPEPVVPTAPELRPSTSTDRPVTPKPTSRTTRSRTNMSSVKTPETVVPTAPELQISTSTDQPVTPKPTSRTTRSRTNMSSVKNPESTVPIAPELPPSTSTEQPVTPEPTSRATRGRKNRSSGKTPETLVPTAPKLEPSTSTDQPVTPEPTSQATRGRTNRSSVKTPETVVPTAPELQPSTSTDQPVTPEPTSQATRGRTDRSSVKTPETVVPTAPELQASASTDQPVTSEPTSRTTRGRKNRSSVKTPETVVPAAPELQPSTSTDQPVTPEPTSRATRGRTNRSSVKTPESIVPIAPELQPSTSRNQLVTPEPTSRATRCRTNRSSVKTPEPVVPTAPEPHPTTSTDQPVTPKLTSRATRRKTNRSSVKTPKPVEPAASDLEPFTPTDQSVTPEAIAQGGQSKTLRSSTVRAMPVPTTPEFQSPVTTDQPISPEPITQPSCIKRQRAAGNPGSLAAPIDHKPCSAPLEPKSQASRNQRWGAVRAAESLTAIPEPASPQLLETPIHASQIQKVEPAGRSRFTPELQPKASQSRKRSLATMDSPPHQKQPQRGEVSQKTVIIKEEEEDTAEKPGKEEDVVTPKPGKRKRDQAEEEPNRIPSRSLRRTKLNQESTAPKVLFTGVVDARGERAVLALGGSLAGSAAEASHLVTDRIRRTVKFLCALGRGIPILSLDWLHQSRKAGFFLPPDEYVVTDPEQEKNFGFSLQDALSRARERRLLEGYEIYVTPGVQPPPPQMGEIISCCGGTYLPSMPRSYKPQRVVITCPQDFPHCSIPLRVGLPLLSPEFLLTGVLKQEAKPEAFVLSPLEMSST

SEQ ID NO: 23937 - protein, 1802 aa, Homo sapiens
MEDTQAIDWDVEEEEETEQSSESLRCNVEPVGRLHIFSGAHGPEKDFPLHLGKNVVGRMPDCSVALPFPSISKQHAEIEILAWDKAPILRDCGSLNGTQILRPPKVLSPGVSHRLRDQELILFADLLCQYHRLDVSLPFVSRGPLTVEETPRVQGETQPQRLLLAEDSEEEVDFLSERRMVKKSRTTSSSVIVPESDEEGHSPVLGGLGPPFAFNLNSDTDVEEGQQPATEEASSAARRGATVEAKQSEAEVVTEIQLEKDQPLVKERDNDTKVKRGAGNGVVPAGVILERSQPPGEDSDTDVDDDSRPPGRPAEVHLERAQPFGFIDSDTDAEEERIPATPVVIPMKKRKIFHGVGTRGPGAPGLAHLQESQAGSDTDVEEGKAPQAVPLEKSQASMVINSDTDDEEEVSAALTLAHLKESQPAIWNRDAEEDMPQRVVLLQRSQTTTERDSDTDVEEEELPVENREAVLKDHTKIRALVRAHSEKDQPPFGDSDDSVEADKSSPGIHLERSQASTTVDINTQVEKEVPPGSAIIHIKKHQVSVEGTNQTDVKAVGGPAKLLVVSLEEAWPLHGDCETDAEEGTSLTASVVADVRKSQLPAEGDAGAEWAAAVLKQERAHEVGAQGGPPVAQVEQDLPISRENLTDLVVDTDTLGESTQPQREGAQVPTGREREQHVGGTKDSEDNYGDSEDLDLQATQCFLENQGLEAVQSMEDEPTQAFMLTPPQELGPSHCSFQTTGTLDEPWEVLATQPFCLRESEDSETQPFDTHLEAYGPCLSPPRAIPGDQHPESPVHTEPMGIQGRGRQTVDKVMGIPKETAERVGPERGPLERETEKLLPERQTDVTGEEELTKGKQDREQKQLLARDTQRQESDKNGESASPERDRESLKVEIETSEEIQEKQVQKQTLPSKAFEREVERPVANRECDPAELEEKVPKVILERDTQRGEPEGGSQDQKGQASSPTPEPGVGAGDLPGPTSAPVPSGSQSGGRGSPVSPRRHQKGLLNCKMPPAEKASRIRAAEKVSRGDQESPDACLPPTVPEAPAPPQKPLNSQSQKHLAPPPLLSPLLPSIKPTVRKTRQDGSQEAPEAPLSSELEPFHPKPKIRTRKSSRMTPFPATSAAPKLEPSTSTDQPVTPEPTSQATRGRTNRSSVKTPETVVPTAPELQPSTSTDQPVTPEPTSQATRGRTDRSSVKTPETVVPTAPELQASASTDQPVTSEPTSRTTRGRKNRSSVKTPETVVPAAPELQPSTSTDQPVTPEPTSRATRGRTNRSSVKTPESIVPIAPELQPSTSRNQLVTPEPTSRATRCRTNRSSVKTPEPVVPTAPEPHPTTSTDQPVTPKLTSRATRRKTNRSSVKTPKPVEPAASDLEPFTPTDQSVTPEAIAQGGQSKTLRSSTVRAMPVPTTPEFQSPVTTDQPISPEPITQPSCIKRQRAAGNPGSLAAPIDHKPCSAPLEPKSQASRNQRWGAVRAAESLTAIPEPASPQLLETPIHASQIQKVEPAGRSRFTPELQPKASQSRKRSLATMDSPPHQKQPQRGEVSQKTVIIKEEEEDTAEKPGKEEDVVTPKPGKRKRDQAEEEPNRIPSRSLRRTKLNQESTAPKVLFTGVVDARGERAVLALGGSLAGSAAEASHLVTDRIRRTVKFLCALGRGIPILSLDWLHQSRKAGFFLPPDEYVVTDPEQEKNFGFSLQDALSRARERRLLEGYEIYVTPGVQPPPPQMGEIISCCGGTYLPSMPRSYKPQRVVITCPQDFPHCSIPLRVGLPLLSPEFLLTGVLKQEAKPEAFVLSPLEMSST

SEQ ID NO: 23938 - protein, 1066 aa, Homo sapiens
MEDTQAIDWDVEEEEETEQSSESLRCNVEPVGRLHIFSGAHGPEKDFPLHLGKNVVGRMPDCSVALPFPSISKQHAEIEILAWDKAPILRDCGSLNGTQILRPPKVLSPGVSHRLRDQELILFADLLCQYHRLDVSLPFVSRGPLTVEETPRVQGETQPQRLLLAEDSEEEVDFLSERRMVKKSRTTSSSVIVPESDEEGHSPVLGGLGPPFAFNLNSDTDVEEGQQPATEEASSAARRGATVEAKQSEAEVVTEIQLEKDQPLVKERDNDTKVKRGAGNGVVPAGVILERSQPPGEDSDTDVDDDSRPPGRPAEVHLERAQPFGFIDSDTDAEEERIPATPVVIPMKKRKIFHGVGTRGPGAPGLAHLQESQAGSDTDVEEGKAPQAVPLEKSQASMVINSDTDDEEEVSAALTLAHLKESQPAIWNRDAEEDMPQRVVLLQRSQTTTERDSDTDVEEEELPVENREAVLKDHTKIRALVRAHSEKDQPPFGDSDDSVEADKSSPGIHLERSQASTTVDINTQVEKEVPPGSAIIHIKKHQVSVEGTNQTDVKAVGGPAKLLVVSLEEAWPLHGDCETDAEEGTSLTASVVADVRKSQLPAEGDAGAEWAAAVLKQERAHEVGAQGGPPVAQVEQDLPISRENLTDLVVDTDTLGESTQPQREGAQVPTGREREQHVGGTKDSEDNYGDSEDLDLQATQCFLENQGLEAVQSMEDEPTQAFMLTPPQELGPSHCSFQTTGLLNCKMPPAEKASRIRAAEKVSRIQKVEPAGRSRFTPELQPKASQSRKRSLATMDSPPHQKQPQRGEVSQKTVIIKEEEEDTAEKPGKEEDVVTPKPGKRKRDQAEEEPNRIPSRSLRRTKLNQESTAPKVLFTGVVDARGERAVLALGGSLAGSAAEASHLVTDRIRRTVKFLCALGRGIPILSLDWLHQSRKAGFFLPPDEYVVTDPEQEKNFGFSLQDALSRARERRLLEGYEIYVTPGVQPPPPQMGEIISCCGGTYLPSMPRSYKPQRVVITCPQDFPHCSIPLRVGLPLLSPEFLLTGVLKQEAKPEAFVLSPLEMSST

SEQ ID NO: 23939 - protein, 425 aa, Homo sapiens
MYPSNKKKKVWREEKERLLKMTLEERRKEYLRDYIPLNSILSWKEEMKGKGQNDEENTQETSQVKKSLTEKVSLYRGDITLLEVDAIVNAANASLLGGGGVDGCIHRAAGPCLLAECRNLNGCDTGHAKITCGYDLPAKYVIHTVGPIARGHINGSHKEDLANCYKSSLKLVKENNIRSVAFPCISTGIYGFPNEPAAVIALNTIKEWLAKNHHEVDRIIFCVFLEVDFKIYKKKMNEFFSVDDNNEEEEDVEMKEDSDENGPEEKQSVEEMEEQSQDADGVNTVTVPGPASEEAVEDCKDEDFAKDENITKGGEVTDHSVRDQDHPDGQENDSTKNEIKIETESQSSYMETEELSSNQEDAVIVEQPEVIPLTEDQEEKEGEKAPGEDTPRMPGKSEGSSDLENTPGPDAGAQDEAKEQRNGTK

SEQ ID NO: 23940 - protein, 448 aa, Homo sapiens
MYPSNKKKKVWREEKERLLKMTLEERRKEYLRDYIPLNSILSWKEEMKGKGQNDEENTQETSQVKKSLTEKVSLYRGDITLLEVDAIVNAANASLLGGGGVDGCIHRAAGPCLLAECRNLNGCDTGHAKITCGYDLPAKYVIHTVGPIARGHINGSHKEDLANCYKSSLKLVKENNIRSVAFPCISTGIYGFPNEPAAVIALNTIKEWLAKNHHEVDRIIFCVFLEVDFKIYKKKMNEFFSVDDNNEEEEDVEMKEDSDENGPEEKQSVEEMEEQSQDADGVNTVTVPGPASEEAVEDCKDEDFAKDENITKGGEVTDHSVRDQDHPDGQENDSTKNEIKIETESQSSYMETEELSSNQEDAVIVEQPEVIPLTEDQEEKEGEKAPGEDTPRMPGKSEGSSDLENTPGPDVEMNSQVDKVNDPTESQQEDQLIAGAQDEAKEQRNGTK

SEQ ID NO: 23941 - protein, 213 aa, Homo sapiens
MNEFFSVDDNNEEEEDVEMKEDSDENGPEEKQSVEEMEEQSQDADGVNTVTVPGPASEEAVEDCKDEDFAKDENITKGGEVTDHSVRDQDHPDGQENDSTKNEIKIETESQSSYMETEELSSNQEDAVIVEQPEVIPLTEDQEEKEGEKAPGEDTPRMPGKSEGSSDLENTPGPDVEMNSQVDKVNDPTESQQEDQLIAGAQDEAKEQRNGTK

SEQ ID NO: 23942 - protein, 190 aa, Homo sapiens
MNEFFSVDDNNEEEEDVEMKEDSDENGPEEKQSVEEMEEQSQDADGVNTVTVPGPASEEAVEDCKDEDFAKDENITKGGEVTDHSVRDQDHPDGQENDSTKNEIKIETESQSSYMETEELSSNQEDAVIVEQPEVIPLTEDQEEKEGEKAPGEDTPRMPGKSEGSSDLENTPGPDAGAQDEAKEQRNGTK

SEQ ID NO: 23943 - protein, 98 aa, Homo sapiens
METEELSSNQEDAVIVEQPEVIPLTEDQEEKEGEKAPGEDTPRMPGKSEGSSDLENTPGPDVEMNSQVDKVNDPTESQQEDQLIGAQDEAKEQRNGTK

SEQ ID NO: 23944 - protein, 1137 aa, Homo sapiens
MFDCWRFILCKRPGSNSYSSPQRPNEAKKEETDHQIDVSDVIRLVQDTPEATAMATDEIMHQDIVPLCAADIQDQLKKRFAYLSGGRGQDGSPVITFPDYPAFSEIPDKEFQNVMTYLTSIPSLQDAGIGFILVIDRRRDKWTSVKASVLRIAASFPANLQLVLVLRPTGFFQRTLSDIAFKFNRDDFKMKVPVIMLSSVPDLHGYIDKSQLTEDLGGTLDYCHSRWLCQRTAIESFALMVKQTAQMLQSFGTELAETELPNDVQSTSSVLCAHTEKKDKAKEDLRLALKEGHSVLESLRELQAEGSEPSVNQDQLDNQATVQRLLAQLNETEAAFDEFWAKHQQKLEQCLQLRHFEQGFREVKAILDAASQKIATFTDIGNSLAHVEHLLRDLASFEEKSGVAVERARALSLDGEQLIGNKHYAVDSIRPKCQELRHLCDQFSAEIARRRGLLSKSLELHRRLETSMKWCDEGIYLLASQPVDKCQSQDGAEAALQEIEKFLETGAENKIQELNAIYKEYESILNQDLMEHVRKVFQKQASMEEVFHRRQASLKKLAARQTRPVQPVAPRPEALAKSPCPSPGIRRGSENSSSEGGALRRGPYRRAKSEMSESRQGRGSAGEEEESLAILRRHVMSELLDTERAYVEELLCVLEGYAAEMDNPLMAHLLSTGLHNKKDVLFGNMEEIYHFHNRIFLRELENYTDCPELVGRCFLERMEDFQIYEKYCQNKPRSESLWRQCSDCPFFQECQRKLDHKLSLDSYLLKPVQRITKYQLLLKEMLKYSRNCEGAEDLQEALSSILGILKAVNDSMHLIAITGYDGNLGDLGKLLMQGSFSVWTDHKRGHTKVKELARFKPMQRHLFLHEKAVLFCKKREENGEGYEKAPSYSYKQSLNMAAVGITENVKGDAKKFEIWYNAREEVYIVQAPTPEIKAAWVNEIRKVLTSQLQACREASQHRALEQSQSLPLPAPTSTSPSRGNSRNIKKLEERKTDPLSLEGYVSSAPLTKPPEKGKGWSKTSHSLEAPEDDGGWSSAEEQINSSDAEEDGGLGPKKLVPGKYTVVADHEKGGPDALRVRSGDVVELVQEGDEGLWYVRDPTTGKEGWVPASSLSVRLGPSGSAQCLSSSGKAHVPRAHP

SEQ ID NO: 23945 - protein, 1096 aa, Homo sapiens
MPLRGGAGPSPASHGPTHGPSDPRTCLPGRGAGGMRPHGRGALGCCGLCSFYTCHGAAGDEIMHQDIVPLCAADIQDQLKKRFAYLSGGRGQDGSPVITFPDYPAFSEIPDKEFQNVMTYLTSIPSLQDAGIGFILVIDRRRDKWTSVKASVLRIAASFPANLQLVLVLRPTGFFQRTLSDIAFKFNRDDFKMKVPVIMLSSVPDLHGYIDKSQLTEDLGGTLDYCHSRWLCQRTAIESFALMVKQTAQMLQSFGTELAETELPNDVQSTSSVLCAHTEKKDKAKEDLRLALKEGHSVLESLRELQAEGSEPSVNQDQLDNQATVQRLLAQLNETEAAFDEFWAKHQQKLEQCLQLRHFEQGFREVKAILDAASQKIATFTDIGNSLAHVEHLLRDLASFEEKSGVAVERARALSLDGEQLIGNKHYAVDSIRPKCQELRHLCDQFSAEIARRRGLLSKSLELHRRLETSMKWCDEGIYLLASQPVDKCQSQDGAEAALQEIEKFLETGAENKIQELNAIYKEYESILNQDLMEHVRKVFQKQASMEEVFHRRQASLKKLAARQTRPVQPVAPRPEALAKSPCPSPGIRRGSENSSSEGGALRRGPYRRAKSEMSESRQGRGSAGEEEESLAILRRHVMSELLDTERAYVEELLCVLEGYAAEMDNPLMAHLLSTGLHNKKDVLFGNMEEIYHFHNRIFLRELENYTDCPELVGRCFLERMEDFQIYEKYCQNKPRSESLWRQCSDCPFFQECQRKLDHKLSLDSYLLKPVQRITKYQLLLKEMLKYSRNCEGAEDLQEALSSILGILKAVNDSMHLIAITGYDGNLGDLGKLLMQGSFSVWTDHKRGHTKVKELARFKPMQRHLFLHEKAVLFCKKREENGEGYEKAPSYSYKQSLNMAAVGITENVKGDAKKFEIWYNAREEVYIVQAPTPEIKAAWVNEIRKVLTSQLQACREASQHRALEQSQSLPLPAPTSTSPSRGNSRNIKKLEERKTDPLSLEGYVSSAPLTKPPEKGKGWSKTSHSLEAPEDDGGWSSAEEQINSSDAEEDGGLGPKKLVPGKYTVVADHEKGGPDALRVRSGDVVELVQEGDEGLW

SEQ ID NO: 23946 - protein, 1067 aa, Homo sapiens
MAEKGASRGTLRRLWSLPRRRRGTAGRSRPDEIMHQDIVPLCAADIQDQLKKRFAYLSGGRGQDGSPVITFPDYPAFSEIPDKEFQNVMTYLTSIPSLQDAGIGFILVIDRRRDKWTSVKASVLRIAASFPANLQLVLVLRPTGFFQRTLSDIAFKFNRDDFKMKVPVIMLSSVPDLHGYIDKSQLTEDLGGTLDYCHSRWLCQRTAIESFALMVKQTAQMLQSFGTELAETELPNDVQSTSSVLCAHTEKKDKAKEDLRLALKEGHSVLESLRELQAEGSEPSVNQDQLDNQATVQRLLAQLNETEAAFDEFWAKHQQKLEQCLQLRHFEQGFREVKAILDAASQKIATFTDIGNSLAHVEHLLRDLASFEEKSGVAVERARALSLDGEQLIGNKHYAVDSIRPKCQELRHLCDQFSAEIARRRGLLSKSLELHRRLETSMKWCDEGIYLLASQPVDKCQSQDGAEAALQEIEKFLETGAENKIQELNAIYKEYESILNQDLMEHVRKVFQKQASMEEVFHRRQASLKKLAARQTRPVQPVAPRPEALAKSPCPSPGIRRGSENSSSEGGALRRGPYRRAKSEMSESRQGRGSAGEEEESLAILRRHVMSELLDTERAYVEELLCVLEGYAAEMDNPLMAHLLSTGLHNKKDVLFGNMEEIYHFHNRIFLRELENYTDCPELVGRCFLERMEDFQIYEKYCQNKPRSESLWRQCSDCPFFQECQRKLDHKLSLDSYLLKPVQRITKYQLLLKEMLKYSRNCEGAEDLQEALSSILGILKAVNDSMHLIAITGYDGNLGDLGKLLMQGSFSVWTDHKRGHTKVKELARFKPMQRHLFLHEKAVLFCKKREENGEGYEKAPSYSYKQSLNMAAVGITENVKGDAKKFEIWYNAREEVYIVQAPTPEIKAAWVNEIRKVLTSQLQACREASQHRALEQSQSLPLPAPTSTSPSRGNSRNIKKLEERKTDPLSLEGYVSSAPLTKPPEKGKGWSKTSHSLEAPEDDGGWSSAEEQINSSDAEEDGGLGPKKLVPGKYTVVADHEKGGPDALRVRSGDVVELVQEGDEGLW

SEQ ID NO: 23947 - protein, 984 aa, Homo sapiens
MTVRRLSLLCRDLWALWLLLKAGADEIMHQDIVPLCAADIQDQLKKRFAYLSGGRGQDGSPVITFPDYPAFSEIPDKEFQNVMTYLTSIPSLQDAGIGFILVIDRRRDKWTSVKASVLRIAASFPANLQLVLVLRPTGFFQRTLSDIAFKFNRDDFKMKVPVIMLSSVPDLHGYIDKSQLTEDLGGTLDYCHSRWLCQRTAIESFALMVKQTAQMLQSFGTELAETELPNDVQSTSSVLCAHTEKKDKAKEDLRLALKEGHSVLESLRELQAEGSEPSVNQDQLDNQATVQRLLAQLNETEAAFDEFWAKHQQKLEQCLQLRHFEQGFREVKAILDAASQKIATFTDIGNSLAHVEHLLRDLASFEEKSGVAVERARALSLDGEQLIGNKHYAVDSIRPKCQELRHLCDQFSAEIARRRGLLSKSLELHRRLETSMKWCDEGIYLLASQPVDKCQSQDGAEAALQEIEKFLETGAENKIQELNAIYKEYESILNQDLMEHVRKVFQKQASMEEVFHRRQASLKKLAARQTRPVQPVAPRPEALAKSPCPSPGIRRGSENSSSEGGALRRGPYRRAKSEMSESRQGRGSAGEEEESLAILRRHVMSELLDTERAYVEELLCVLEGYAAEMDNPLMAHLLSTGLHNKKDVLFGNMEEIYHFHNRIFLRELENYTDCPELVGRCFLERMEDFQIYEKYCQNKPRSESLWRQCSDCPFFQECQRKLDHKLSLDSYLLKPVQRITKYQLLLKEMLKYSRNCEGAEDLQEALSSILGILKAVNDSMHLIAITGYDGNLGDLGKLLMQGSFSVWTDHKRGHTKVKELARFKPMQRHLFLHEKAVLFCKKREENGEGYEKAPSYSYKQSLNMAAVGITENVKGDAKKFEIWYNAREEVYIVQAPTPEIKAAWVNEIRKVLTSQLQACREASQHRALEQSQSLPLPAPTSTSPSRGNSRNIKKLEERKTDPLSLEGYVSSAPLTKPPEKGKEP

SEQ ID NO: 23948 - protein, 904 aa, Homo sapiens
MKVPVIMLSSVPDLHGYIDKSQLTEDLGGTLDYCHSRWLCQRTAIESFALMVKQTAQMLQSFGTELAETELPNDVQSTSSVLCAHTEKKDKAKEDLRLALKEGHSVLESLRELQAEGSEPSVNQDQLDNQATVQRLLAQLNETEAAFDEFWAKHQQKLEQCLQLRHFEQGFREVKAILDAASQKIATFTDIGNSLAHVEHLLRDLASFEEKSGVAVERARALSLDGEQLIGNKHYAVDSIRPKCQELRHLCDQFSAEIARRRGLLSKSLELHRRLETSMKWCDEGIYLLASQPVDKCQSQDGAEAALQEIEKFLETGAENKIQELNAIYKEYESILNQDLMEHVRKVFQKQASMEEVFHRRQASLKKLAARQTRPVQPVAPRPEALAKSPCPSPGIRRGSENSSSEGGALRRGPYRRAKSEMSESRQGRGSAGEEEESLAILRRHVMSELLDTERAYVEELLCVLEGYAAEMDNPLMAHLLSTGLHNKKDVLFGNMEEIYHFHNRIFLRELENYTDCPELVGRCFLERMEDFQIYEKYCQNKPRSESLWRQCSDCPFFQECQRKLDHKLSLDSYLLKPVQRITKYQLLLKEMLKYSRNCEGAEDLQEALSSILGILKAVNDSMHLIAITGYDGNLGDLGKLLMQGSFSVWTDHKRGHTKVKELARFKPMQRHLFLHEKAVLFCKKREENGEGYEKAPSYSYKQSLNMAAVGITENVKGDAKKFEIWYNAREEVYIVQAPTPEIKAAWVNEIRKVLTSQLQACREASQHRALEQSQSLPLPAPTSTSPSRGNSRNIKKLEERKTDPLSLEGYVSSAPLTKPPEKGKGWSKTSHSLEAPEDDGGWSSAEEQINSSDAEEDGGLGPKKLVPGKYTVVADHEKGGPDALRVRSGDVVELVQEGDEGLW

SEQ ID NO: 23949 - protein, 1107 aa, Homo sapiens
MRFWLRTEEMALEEMVQRLNAVSKHTDEIMHQDIVPLCAADIQDQLKKRFAYLSGGRGQDGSPVITFPDYPAFSEIPDKEFQNVMTYLTSIPSLQDAGIGFILVIDRRRDKWTSVKASVLRIAASFPANLQLVLVLRPTGFFQRTLSDIAFKFNRDDFKMKVPVIMLSSVPDLHGYIDKSQLTEDLGGTLDYCHSRWLCQRTAIESFALMVKQTAQMLQSFGTELAETELPNDVQSTSSVLCAHTEKKDKAKEDLRLALKEGHSVLESLRELQAEGSEPSVNQDQLDNQATVQRLLAQLNETEAAFDEFWAKHQQKLEQCLQLRHFEQGFREVKAILDAASQKIATFTDIGNSLAHVEHLLRDLASFEEKSGVAVERARALSLDGEQLIGNKHYAVDSIRPKCQELRHLCDQFSAEIARRRGLLSKSLELHRRLETSMKWCDEGIYLLASQPVDKCQSQDGAEAALQEIEKFLETGAENKIQELNAIYKEYESILNQDLMEHVRKVFQKQASMEEVFHRRQASLKKLAARQTRPVQPVAPRPEALAKSPCPSPGIRRGSENSSSEGGALRRGPYRRAKSEMSESRQGRGSAGEEEESLAILRRHVMSELLDTERAYVEELLCVLEGYAAEMDNPLMAHLLSTGLHNKKDVLFGNMEEIYHFHNRIFLRELENYTDCPELVGRCFLERMEDFQIYEKYCQNKPRSESLWRQCSDCPFFQECQRKLDHKLSLDSYLLKPVQRITKYQLLLKEMLKYSRNCEGAEDLQEALSSILGILKAVNDSMHLIAITGYDGNLGDLGKLLMQGSFSVWTDHKRGHTKVKELARFKPMQRHLFLHEKAVLFCKKREENGEGYEKAPSYSYKQSLNMAAVGITENVKGDAKKFEIWYNAREEVYIVQAPTPEIKAAWVNEIRKVLTSQLQACREASQHRALEQSQSLPLPAPTSTSPSRGNSRNIKKLEERKTDPLSLEGYVSSAPLTKPPEKGKGWSKTSHSLEAPEDDGGWSSAEEQINSSDAEEDGGLGPKKLVPGKYTVVADHEKGGPDALRVRSGDVVELVQEGDEGLWYVRDPTTGKEGWVPASSLSVRLGPSGSAQCLSSSGKAHVPRAHP

SEQ ID NO: 23950 - protein, 1125 aa, Homo sapiens
MRFWLRTEEMALEEMVQRLNAVSKHTDEIMHQDIVPLCAADIQDQLKKRFAYLSGGRGQDGSPVITFPDYPAFSEIPDKEFQNVMTYLTSIPSLQDAGIGFILVIDRRRDKWTSVKASVLRIAASFPANLQLVLVLRPTGFFQRTLSDIAFKFNRDDFKMKVPVIMLSSVPDLHGYIDKSQLTEDLGGTLDYCHSRWLCQRTAIESFALMVKQTAQMLQSFGTELAETELPNDVQSTSSVLCAHTEKKDKAKEDLRLALKEGHSVLESLRELQAEGSEPSVNQDQLDNQATVQRLLAQLNETEAAFDEFWAKHQQKLEQCLQLRHFEQGFREVKAILDAASQKIATFTDIGNSLAHVEHLLRDLASFEEKSGVAVERARALSLDGEQLIGNKHYAVDSIRPKCQELRHLCDQFSAEIARRRGLLSKSLELHRRLETSMKWCDEGIYLLASQPVDKCQSQDGAEAALQEIEKFLETGAENKIQELNAIYKEYESILNQDLMEHVRKVFQKQASMEEVFHRRQASLKKLAARQTRPVQPVAPRPEALAKSPCPSPGIRRGSENSSSEGGALRRGPYRRAKSEMSESRQGRGSAGEEEESLAILRRHVMSELLDTERAYVEELLCVLEGYAAEMDNPLMAHLLSTGLHNKKDVLFGNMEEIYHFHNRIFLRELENYTDCPELVGRCFLERMEDFQIYEKYCQNKPRSESLWRQCSDCPFFQECQRKLDHKLSLDSYLLKPVQRITKYQLLLKEMLKYSRNCEGAEDLQEALSSILGILKAVNDSMHLIAITGYDGNLGDLGKLLMQGSFSVWTDHKRGHTKVKELARFKPMQRHLFLHEKAVLFCKKREENGEGYEKAPSYSYKQSLNMAAVGITENVKGDAKKFEIWYNAREEVYIVQAPTPEIKAAWVNEIRKVLTSQLQACREASQHRALEQSQSLPLPAPTSTSPSRGNSRNIKKLEERKTDPLSLEGYVSSAPLTKPPEKGKGWSKTSHSLEAPEDDGGWSSAEEQINSSDAEEDGGLGPKKLVPGKYTVVADHEKGGPDALRVRSGDVVELVQEGDEGLWYVRDPTTGKEGWVPASSLSVRLGPSGSAQCLSSSESSPGSAVLSNSSSCSEGGQAPFSDLQG

SEQ ID NO: 23951 - protein, 1113 aa, Homo sapiens
MGDGKAVRISVAEMKSYYLYSEWCSWLLSVAEDEIMHQDIVPLCAADIQDQLKKRFAYLSGGRGQDGSPVITFPDYPAFSEIPDKEFQNVMTYLTSIPSLQDAGIGFILVIDRRRDKWTSVKASVLRIAASFPANLQLVLVLRPTGFFQRTLSDIAFKFNRDDFKMKVPVIMLSSVPDLHGYIDKSQLTEDLGGTLDYCHSRWLCQRTAIESFALMVKQTAQMLQSFGTELAETELPNDVQSTSSVLCAHTEKKDKAKEDLRLALKEGHSVLESLRELQAEGSEPSVNQDQLDNQATVQRLLAQLNETEAAFDEFWAKHQQKLEQCLQLRHFEQGFREVKAILDAASQKIATFTDIGNSLAHVEHLLRDLASFEEKSGVAVERARALSLDGEQLIGNKHYAVDSIRPKCQELRHLCDQFSAEIARRRGLLSKSLELHRRLETSMKWCDEGIYLLASQPVDKCQSQDGAEAALQEIEKFLETGAENKIQELNAIYKEYESILNQDLMEHVRKVFQKQASMEEVFHRRQASLKKLAARQTRPVQPVAPRPEALAKSPCPSPGIRRGSENSSSEGGALRRGPYRRAKSEMSESRQGRGSAGEEEESLAILRRHVMSELLDTERAYVEELLCVLEGYAAEMDNPLMAHLLSTGLHNKKDVLFGNMEEIYHFHNRIFLRELENYTDCPELVGRCFLERMEDFQIYEKYCQNKPRSESLWRQCSDCPFFQECQRKLDHKLSLDSYLLKPVQRITKYQLLLKEMLKYSRNCEGAEDLQEALSSILGILKAVNDSMHLIAITGYDGNLGDLGKLLMQGSFSVWTDHKRGHTKVKELARFKPMQRHLFLHEKAVLFCKKREENGEGYEKAPSYSYKQSLNMAAVGITENVKGDAKKFEIWYNAREEVYIVQAPTPEIKAAWVNEIRKVLTSQLQACREASQHRALEQSQSLPLPAPTSTSPSRGNSRNIKKLEERKTDPLSLEGYVSSAPLTKPPEKGKGWSKTSHSLEAPEDDGGWSSAEEQINSSDAEEDGGLGPKKLVPGKYTVVADHEKGGPDALRVRSGDVVELVQEGDEGLWYVRDPTTGKEGWVPASSLSVRLGPSGSAQCLSSSGKAHVPRAHP

SEQ ID NO: 23952 - protein, 1123 aa, Homo sapiens
MTVRRLSLLCRDLWALWLLLKAGADEIMHQDIVPLCAADIQDQLKKRFAYLSGGRGQDGSPVITFPDYPAFSEIPDKEFQNVMTYLTSIPSLQDAGIGFILVIDRRRDKWTSVKASVLRIAASFPANLQLVLVLRPTGFFQRTLSDIAFKFNRDDFKMKVPVIMLSSVPDLHGYIDKSQLTEDLGGTLDYCHSRWLCQRTAIESFALMVKQTAQMLQSFGTELAETELPNDVQSTSSVLCAHTEKKDKAKEDLRLALKEGHSVLESLRELQAEGSEPSVNQDQLDNQATVQRLLAQLNETEAAFDEFWAKHQQKLEQCLQLRHFEQGFREVKAILDAASQKIATFTDIGNSLAHVEHLLRDLASFEEKSGVAVERARALSLDGEQLIGNKHYAVDSIRPKCQELRHLCDQFSAEIARRRGLLSKSLELHRRLETSMKWCDEGIYLLASQPVDKCQSQDGAEAALQEIEKFLETGAENKIQELNAIYKEYESILNQDLMEHVRKVFQKQASMEEVFHRRQASLKKLAARQTRPVQPVAPRPEALAKSPCPSPGIRRGSENSSSEGGALRRGPYRRAKSEMSESRQGRGSAGEEEESLAILRRHVMSELLDTERAYVEELLCVLEGYAAEMDNPLMAHLLSTGLHNKKDVLFGNMEEIYHFHNRIFLRELENYTDCPELVGRCFLERMEDFQIYEKYCQNKPRSESLWRQCSDCPFFQECQRKLDHKLSLDSYLLKPVQRITKYQLLLKEMLKYSRNCEGAEDLQEALSSILGILKAVNDSMHLIAITGYDGNLGDLGKLLMQGSFSVWTDHKRGHTKVKELARFKPMQRHLFLHEKAVLFCKKREENGEGYEKAPSYSYKQSLNMAAVGITENVKGDAKKFEIWYNAREEVYIVQAPTPEIKAAWVNEIRKVLTSQLQACREASQHRALEQSQSLPLPAPTSTSPSRGNSRNIKKLEERKTDPLSLEGYVSSAPLTKPPEKGKGWSKTSHSLEAPEDDGGWSSAEEQINSSDAEEDGGLGPKKLVPGKYTVVADHEKGGPDALRVRSGDVVELVQEGDEGLWYVRDPTTGKEGWVPASSLSVRLGPSGSAQCLSSSESSPGSAVLSNSSSCSEGGQAPFSDLQG

SEQ ID NO: 23953 - protein, 2623 aa, Homo sapiens
MKVKGRGITCLLVSFAVICLVATPGGKACPRRCACYMPTEVHCTFRYLTSIPDSIPPNVERINLGYNSLVRLMETDFSGLTKLELLMLHSNGIHTIPDKTFSDLQALQVLKMSYNKVRKLQKDTFYGLRSLTRLHMDHNNIEFINPEVFYGLNFLRLVHLEGNQLTKLHPDTFVSLSYLQIFKISFIKFLYLSDNFLTSLPQEMVSYMPDLDSLYLHGNPWTCDCHLKWLSDWIQEKPDVIKCKKDRSPSSAQQCPLCMNPRTSKGKPLAMVSAAAFQCAKPTIDSSLKSKSLTILEDSSSAFISPQGFMAPFGSLTLNMTDQSGNEANMVCSIQKPSRTSPIAFTEENDYIVLNTSFSTFLVCNIDYGHIQPVWQILALYSDSPLILERSHLLSETPQLYYKYKQVAPKPEDIFTNIEADLRADPSWLMQDQISLQLNRTATTFSTLQIQYSSDAQITLPRAEMRPVKHKWTMISRDNNTKLEHTVLVGGTVGLNCPGQGDPTPHVDWLLADGSKVRAPYVSEDGRILIDKSGKLELQMADSFDTGVYHCISSNYDDADILTYRITVVEPLVEAYQENGIHHTVFIGETLDLPCHSTGIPDASISWVIPGNNVLYQSSRDKKVLNNGTLRILQVTPKDQGYYRCVAANPSGVDFLIFQVSVKMKGQRPLEHDGETEGSGLDESNPIAHLKEPPGAQLRTSALMEAEVGKHTSSTSKRHNYRELTLQRRGDSTHRRFRENRRHFPPSARRIDPQHWAALLEKAKKNAMPDKRENTTVSPPPVVTQLPNIPGEEDDSSGMLALHEEFMVPATKALNLPARTVTADSRTISDSPMTNINYGTEFSPVVNSQILPPEEPTDFKLSTAIKTTAMSKNINPTMSSQIQGTTNQHSSTVFPLLLGATEFQDSDQMGRGREHFQSRPPITVRTMIKDVNVKMLSSTTNKLLLESVNTTNSHQTSVREVSEPRHNHFYSHTTQILSTSTFPSDPHTAAHSQFPIPRNSTVNIPLFRRFGRQRKIGGRGRIISPYRTPVLRRHRYSIFRSTTRGSSEKSTTAFSATVLNVTCLSCLPRERLTTATAALSFPSAAPITFPKADIARVPSEESTTLVQNPLLLLENKPSVEKTTPTIKYFRTEISQVTPTGAVMTYAPTSIPMEKTHKVNASYPRVSSTNEAKRDSVITSSLSGAITKPPMTIIAITRFSRRKIPWQQNFVNNHNPKGRLRNQHKVSLQKSTAVMLPKTSPALPRDKVSPFHFTTLSTSVMQIPSNTLTTAHHTTTKTHNPGSLPTKKELPFPPLNPMLPSIISKDSSTKSIISTQTAIPATTPTFPASVITYETQTERSRAQTIQREQEPQKKNRTDPNISPDQSSGFTTPTAMTPPVLTTAETSVKPSVSAFTHSPPENTTGISSTISFHSRTLNLTDVIEELAQASTQTLKSTIASETTLSSKSHQSTTTRKAIIRHSTIPPFLSSSATLMPVPISPPFTQRAVTDNVATPISGLMTNTVVKLHESSRHNAKPQQLVAEVATSPKVHPNAKFTIGTTHFIYSNLLHSTPMPALTTVKSQNSKLTPSPWAENQFWHKPYSEIAEKGKKPEVSMLATTGLSEATTLVSDWDGQKNTKKSDFDKKPVQEATTSKLLPFDSLSRYIFEKPRIVGGKAASFTIPANSDAFLPCEAVGNPLPTIHWTRVPSGLDLSKRKQNSRVQVLPNGTLSIQRVEIQDRGQYLCSASNLFGTDHLHVTLSVVSYPPRILERRTKEITVHSGSTVELKCRAEGRPSPTVTWILANQTVVSESSQGSRQAVVTVDGTLVLHNLSIYDRGFYKCVASNPGGQDSLLVKIQVIAAPPVILEQRRQVIVGTWGESLKLPCTAKGTPQPSVYWVLSDGTEVKPLQFTNSKLFLFSNGTLYIRNLASSDRGTYECIATSSTGSERRVVMLTMEERVTSPRIEAASQKRTEVNFGDKLLLNCSATGEPKPQIMWRLPSKAVVDQQHRVGSWIHVYPNGSLFIGSVTEKDSGVYLCVARNKMGDDLILMHVSLRLKPAKIDHKQYFRKQVLHGKDFQVDCKASGSPVPEISWSLPDGTMINNAMQADDSGHRTRRYTLFNNGTLYFNKVGVAEEGDYTCYAQNTLGKDEMKVHLTVITAAPRIRQSNKTNKRIKAGDTAVLDCEVTGDPKPKIFWLLPSNDMISFSIDRYTFHANGSLTINKVKLLDSGEYVCVARNPSGDDTKMYKLDVVSKPPLINGLYTNRTVIKATAVRHSKKHFDCRAEGTPSPEVMWIMPDNIFLTAPYYGSRITVHKNGTLEIRNVRLSDSADFICVARNEGGESVLVVQLEVLEMLRRPTFRNPFNEKIVAQLGKSTALNCSVDGNPPPEIIWILPNGTRFSNGPQSYQYLIASNGSFIISKTTREDAGKYRCAARNKVGYIEKLVILEIGQKPVILTYAPGTVKGISGESLSLHCVSDGIPKPNIKWTMPSGYVVDRPQINGKYILHDNGTLVIKEATAYDRGNYICKAQNSVGHTLITVPVMIVAYPPRITNRPPRSIVTRTGAAFQLHCVALGVPKPEITWEMPDHSLLSTASKERTHGSEQLHLQGTLVIQNPQTSDSGIYKCTAKNPLGSDYAATYIQVI

SEQ ID NO: 23954 - protein, 650 aa, Homo sapiens
MVESVRLENQPCDLRVGSWIHVYPNGSLFIGSVTEKDSGVYLCVARNKMGDDLILMHVSLRLKPAKIDHKQYFRKQVLHGKDFQVDCKASGSPVPEISWSLPDGTMINNAMQADDSGHRTRRYTLFNNGTLYFNKVGVAEEGDYTCYAQNTLGKDEMKVHLTVITAAPRIRQSNKTNKRIKAGDTAVLDCEVTGDPKPKIFWLLPSNDMISFSIDRYTFHANGSLTINKVKLLDSGEYVCVARNPSGDDTKMYKLDVVSKPPLINGLYTNRTVIKATAVRHSKKHFDCRAEGTPSPEVMWIMPDNIFLTAPYYGSRITVHKNGTLEIRNVRLSDSADFICVARNEGGESVLVVQLEVLEMLRRPTFRNPFNEKIVAQLGKSTALNCSVDGNPPPEIIWILPNGTRFSNGPQSYQYLIASNGSFIISKTTREDAGKYRCAARNKVGYIEKLVILEIGQKPVILTYAPGTVKGISGESLSLHCVSDGIPKPNIKWTMPSGYVVDRPQINGKYILHDNGTLVIKEATAYDRGNYICKAQNSVGHTLITVPVMIVAYPPRITNRPPRSIVTRTGAAFQLHCVALGVPKPEITWEMPDHSLLSTASKERTHGSEQLHLQGTLVIQNPQTSDSGIYKCTAKNPLGSDYAATYIQVI

SEQ ID NO: 23955 - protein, 602 aa, Homo sapiens
MGDDLILMHVSLRLKPAKIDHKQYFRKQVLHGKDFQVDCKASGSPVPEISWSLPDGTMINNAMQADDSGHRTRRYTLFNNGTLYFNKVGVAEEGDYTCYAQNTLGKDEMKVHLTVITAAPRIRQSNKTNKRIKAGDTAVLDCEVTGDPKPKIFWLLPSNDMISFSIDRYTFHANGSLTINKVKLLDSGEYVCVARNPSGDDTKMYKLDVVSKPPLINGLYTNRTVIKATAVRHSKKHFDCRAEGTPSPEVMWIMPDNIFLTAPYYGSRITVHKNGTLEIRNVRLSDSADFICVARNEGGESVLVVQLEVLEMLRRPTFRNPFNEKIVAQLGKSTALNCSVDGNPPPEIIWILPNGTRFSNGPQSYQYLIASNGSFIISKTTREDAGKYRCAARNKVGYIEKLVILEIGQKPVILTYAPGTVKGISGESLSLHCVSDGIPKPNIKWTMPSGYVVDRPQINGKYILHDNGTLVIKEATAYDRGNYICKAQNSVGHTLITVPVMIVAYPPRITNRPPRSIVTRTGAAFQLHCVALGVPKPEITWEMPDHSLLSTASKERTHGSEQLHLQGTLVIQNPQTSDSGIYKCTAKNPLGSDYAATYIQVI

SEQ ID NO: 23956 - protein, 452 aa, Homo sapiens
MAGYLRVVRSLCRASGSRPAWAPAALTAPTSQEQPRRHYADKRIKVAKPVVEMDGDEMTRIIWQFIKEKLILPHVDIQLKYFDLGLPNRDQTDDQVTIDSALATQKYSVAVKCATITPDEARVEEFKLKKMWKSPNGTIRNILGGTVFREPIICKNIPRLVPGWTKPITIGRHAHGDQYKATDFVADRAGTFKMVFTPKDGSGVKEWEVYNFPAGGVGMGMYNTDESISGFAHSCFQYAIQKKWPLYMSTKNTILKAYDGRFKDIFQEIFDKHYKTDFDKNKIWYEHRLIDDMVAQVLKSSGGFVWACKNYDGDVQSDILAQGFGSLGLMTSVLVCPDGKTIEAEAAHGTVTRHYREHQKGRPTSTNPIASIFAWTRGLEHRGKLDGNQDLIRFAQMLEKVCVETVESGAMTKDLAGCIHGLSNVKLNEHFLNTTDFLDTIKSNLDRALGRQ

SEQ ID NO: 23957 - protein, 400 aa, Homo sapiens
MDGDEMTRIIWQFIKEKLILPHVDIQLKYFDLGLPNRDQTDDQVTIDSALATQKYSVAVKCATITPDEARVEEFKLKKMWKSPNGTIRNILGGTVFREPIICKNIPRLVPGWTKPITIGRHAHGDQYKATDFVADRAGTFKMVFTPKDGSGVKEWEVYNFPAGGVGMGMYNTDESISGFAHSCFQYAIQKKWPLYMSTKNTILKAYDGRFKDIFQEIFDKHYKTDFDKNKIWYEHRLIDDMVAQVLKSSGGFVWACKNYDGDVQSDILAQGFGSLGLMTSVLVCPDGKTIEAEAAHGTVTRHYREHQKGRPTSTNPIASIFAWTRGLEHRGKLDGNQDLIRFAQMLEKVCVETVESGAMTKDLAGCIHGLSNVKLNEHFLNTTDFLDTIKSNLDRALGRQ

SEQ ID NO: 23958 - protein, 227 aa, Homo sapiens
MPEINTNHLDKQQVQLLAEMCILIDENDNKIGAETKKNCHLNENIEKGLLHRAFSVFLFNTENKLLLQQRSDAKITFPGCFTNTCCSHPLSNPAELEESDALGVRRAAQRRLKAELGIPLEEVPPEEINYLTRIHYKAQSDGIWGEHEIDYILLVRKNVTLNPDPNEIKSYCYVSKEELKELLKKAASGEIKITPWFKIIAATFLFKWWDNLNHLNQFVDHEKIYRM

SEQ ID NO: 23959 - protein, 284 aa, Homo sapiens
MWRGLALARAIGCAARGRGQWAVRAADCAQSGRHPGPAVVCGRRLISVLEQIRHFVMMPEINTNHLDKQQVQLLAEMCILIDENDNKIGAETKKNCHLNENIEKGLLHRAFSVFLFNTENKLLLQQRSDAKITFPGCFTNTCCSHPLSNPAELEESDALGVRRAAQRRLKAELGIPLEEVPPEEINYLTRIHYKAQSDGIWGEHEIDYILLVRKNVTLNPDPNEIKSYCYVSKEELKELLKKAASGEIKITPWFKIIAATFLFKWWDNLNHLNQFVDHEKIYRM

SEQ ID NO: 23960 - protein, 407 aa, Homo sapiens
MGQKERSTADTLPDLEEWKSAAGLRWWQTAVVDGSGSGNEVIEGPQNARVLKGSQARFNCTVSQGWKLIMWALSDMVVLSVRPMEPIITNDRFTSQRYDQGGNFTSEMIIHNVEPSDSGNIRCSLQNSRLHGSAYLTVQVMGELFIPSVNLVVAENEPCEVTCLPSHWTRLPDISWELGLLVSHSSYYFVPEPSDLQSAVSILALTPQSNGTLTCVATWKSLKARKSATVNLTVIRCPQDTGGGINIPGVLSSLPSLGFSLPTWGKVGLGLAGTMLLTPTCTLTIRCCCCRRRCCGCNCCCRCCFCCRRKRGFRIQFQKKSEKEKTNKETETESGNENSGYNSDEQKTTDTASLPPKSCESSDPEQRNSSCGPPHQRADQRPPRPASHPQASFNLASPEKVSNTTVV

SEQ ID NO: 23961 - protein, 132 aa, Homo sapiens
MNHIVQTFSPVNSGQPPNYEMLKEEQEVAMLGVPHNPAPPMSTVIHIRSETSVPDHVVWSLFNTLFMNTCCLGFIAFAYSVKSRDRKMVGDVTGAQAYASTAKCLNIWALILGIFMTILLIIIPVLVVQAQR

SEQ ID NO: 23962 - protein, 189 aa, Homo sapiens
MALSFSLLMAVLVLSYKSICSLGCDLPQTHSLGNRRALILLAQMGRISHFSCLKDRYDFGFPQEVFDGNQFQKAQAISAFHEMIQQTFNLFSTKDSSAAWDETLLDKFYIELFQQLNDLEACVTQEVGVEEIALMNEDSILAVRKYFQRITLYLMGKKYSPCAWEVVRAEIMRSFSFSTNLQKGLRRKD

SEQ ID NO: 23963 - protein, 507 aa, Homo sapiens
MAGRGSLVSWRAFHGCDSAEELPRVSPRFLRAWHPPPVSARMPTRRWAPGTQCITKCEHTRPKPGELAFRKGDVVTILEACENKSWYRVKHHTSGQEGLLAAGALREREALSADPKLSLMPWFHGKISGQEAVQQLQPPEDGLFLVRESARHPGDYVLCVSFGRDVIHYRVLHRDGHLTIDEAVFFCNLMDMVEHYSKDKGAICTKLVRPKRKHGTKSAEEELARAGWLLNLQHLTLGAQIGEGEFGAVLQGEYLGQKVAVKNIKCDVTAQAFLDETAVMTKMQHENLVRLLGVILHQGLYIVMEHVSKGNLVNFLRTRGRALVNTAQLLQFSLHVAEGMEYLESKKLVHRDLAARNILVSEDLVAKVSDFGLAKAERKGLDSSRLPVKWTAPEALKHGKFTSKSDVWSFGVLLWEVFSYGRAPYPKMSLKEVSEAVEKGYRMEPPEGCPGPVHVLMSSCWEAEPARRPPFRKLAEKLARELRSAGAPASVSGQDADGSTSPRSQEP

SEQ ID NO: 23964 - protein, 508 aa, Homo sapiens
MQGHFPAERREGRPRRGTRGQQQLLVSPRFLRAWHPPPVSARMPTRRWAPGTQCITKCEHTRPKPGELAFRKGDVVTILEACENKSWYRVKHHTSGQEGLLAAGALREREALSADPKLSLMPWFHGKISGQEAVQQLQPPEDGLFLVRESARHPGDYVLCVSFGRDVIHYRVLHRDGHLTIDEAVFFCNLMDMVEHYSKDKGAICTKLVRPKRKHGTKSAEEELARAGWLLNLQHLTLGAQIGEGEFGAVLQGEYLGQKVAVKNIKCDVTAQAFLDETAVMTKMQHENLVRLLGVILHQGLYIVMEHVSKGNLVNFLRTRGRALVNTAQLLQFSLHVAEGMEYLESKKLVHRDLAARNILVSEDLVAKVSDFGLAKAERKGLDSSRLPVKWTAPEALKHGKFTSKSDVWSFGVLLWEVFSYGRAPYPKMSLKEVSEAVEKGYRMEPPEGCPGPVHVLMSSCWEAEPARRPPFRKLAEKLARELRSAGAPASVSGQDADGSTSPRSQEP

SEQ ID NO: 23965 - protein, 466 aa, Homo sapiens
MPTRRWAPGTQCITKCEHTRPKPGELAFRKGDVVTILEACENKSWYRVKHHTSGQEGLLAAGALREREALSADPKLSLMPWFHGKISGQEAVQQLQPPEDGLFLVRESARHPGDYVLCVSFGRDVIHYRVLHRDGHLTIDEAVFFCNLMDMVEHYSKDKGAICTKLVRPKRKHGTKSAEEELARAGWLLNLQHLTLGAQIGEGEFGAVLQGEYLGQKVAVKNIKCDVTAQAFLDETAVMTKMQHENLVRLLGVILHQGLYIVMEHVSKGNLVNFLRTRGRALVNTAQLLQFSLHVAEGMEYLESKKLVHRDLAARNILVSEDLVAKVSDFGLAKAERKGLDSSRLPVKWTAPEALKHGKFTSKSDVWSFGVLLWEVFSYGRAPYPKMSLKEVSEAVEKGYRMEPPEGCPGPVHVLMSSCWEAEPARRPPFRKLAEKLARELRSAGAPASVSGQDADGSTSPRSQEP

SEQ ID NO: 23966 - protein, 155 aa, Homo sapiens
MKVASGSTATAAAGPSCALKAGKTASGAGEVVRCLSEQSVAISRCAGGAGARLPALLDEQQVNVLLYDMNGCYSRLKELVPTLPQNRKVSKVEILQHVIDYIRDLQLELNSESEVGTPGGRGLPVRAPLSTLNGEISALTAEAACVPADDRILCR

SEQ ID NO: 23967 - protein, 149 aa, Homo sapiens
MKVASGSTATAAAGPSCALKAGKTASGAGEVVRCLSEQSVAISRCAGGAGARLPALLDEQQVNVLLYDMNGCYSRLKELVPTLPQNRKVSKVEILQHVIDYIRDLQLELNSESEVGTPGGRGLPVRAPLSTLNGEISALTAEVRSRSDH

SEQ ID NO: 23968 - protein, 221 aa, Homo sapiens
MAAAVRMNIQMLLEAADYLERREREAEHGYASMLPYNNKDRDALKRRNKSKKNNSSSRSTHNEMEKNRRAHLRLCLEKLKGLVPLGPESSRHTTLSLLTKAKLHIKKLEDCDRKAVHQIDQLQREQRHLKRQLEKLGIERIRMDSIGSTVSSERSDSDREEIDVDVESTDYLTGDLDWSSSSVSDSDERGSMQSLGSDEGYSSTSIKRIKLQDSHKACLGL

SEQ ID NO: 23969 - protein, 211 aa, Homo sapiens
MAAAVRMNIQMLLEAADYLERREREAEHGYASMLPYNNKDRDALKRRNKSKKNNSSSRRAHLRLCLEKLKGLVPLGPESSRHTTLSLLTKAKLHIKKLEDCDRKAVHQIDQLQREQRHLKRQLEKLGIERIRMDSIGSTVSSERSDSDREEIDVDVESTDYLTGDLDWSSSSVSDSDERGSMQSLGSDEGYSSTSIKRIKLQDSHKACLGL

SEQ ID NO: 23970 - protein, 86 aa, Homo sapiens
MLSQKPKKKHNFLNHGLSLNLVIKPYLALEGSVAFPAENGVQDTESTQEKRETGDEENSAKFPVGRRDFDTLSCMLGRVYQSCWQV

SEQ ID NO: 23971 - protein, 279 aa, Homo sapiens
MSALEWYAHKSLGDGIFWIQERFYESGNRANIWLVRGSEQDVVIDTGLGLRSLPEYLYSSGLLQDREAKEDAARRPLLAVATHVHFDHSGGLYQFDRVAVHHAEAEALARGDNFETVTWLSDSEVVRTPSPGWRARQFRVQAVQPTLILQDGDVINLGDRQLTVMHMPGHSRGSICLHDKDRKILFSGDVVYDGSLIDWLPYSRISDYVGTCERLIELVDRGLVEKVLPGHFNTFGAERLFRLASNYISKAGICHKVSTFAMRSLASLALRVTNSRTSP

SEQ ID NO: 23972 - protein, 199 aa, Homo sapiens
MSALEWYAHKSLGDGIFWIQERFYESGNRANIWLVRGSEQDVVIDTGLGLRSLPEYLYSSGLLQDREAKEDAARRPLLAVATHVHFDHSGGLYQFDRVAVHHAEAEALARGDNFETVTWLSDSEVVRTPSPGWRARQFRVQAVQPTLILQDGNGPPRARALVKGGYWEETVRVPHVADLRGHKGDYFGTSQSHFCFTLP

SEQ ID NO: 23973 - protein, 86 aa, Homo sapiens
MLSQKTKKKHNFLNHGLSLNLVIKPYLALEGSVAFPAENGVQDTESTLEKRETGDEENSAKFPIGRRDFDTLRCMLGRVYQRCWQV

SEQ ID NO: 23974 - protein, 340 aa, Homo sapiens
MNPFHASCWNTSAELLNKSWNKEFAYQTASVVDTVILPSMIGIICSTGLVGNILIVFTIIRSRKKTVPDIYICNLAVADLVHIVGMPFLIHQWARGGEWVFGGPLCTIITSLDTCNQFACSAIMTVMSVDRYFALVQPFRLTRWRTRYKTIRINLGLWAASFILALPVWVYSKVIKFKDGVESCAFDLTSPDDVLWYTLYLTITTFFFPLPLILVCYILILCYTWEMYQQNKDARCCNPSVPKQRVMKLTKMVLVLVVVFILSAAPYHVIQLVNLQMEQPTLAFYVGYYLSICLSYASSSINPFLYILLSGNFQKRLPQIQRRATEKEINNMGNTLKSHF

SEQ ID NO: 23975 - protein, 189 aa, Homo sapiens
MSETELEKIKVRTAEHLENDKNNISWLKEDTQLTNAKHADEKPINAIVINSVSDFNITDGPAKENPNEKKLSESSTSLSSLEECQTTFSYLQTDTSVHHRDTDEECASLILACLFCQFWDCLLMLPGTCETVCTKMCCPSRRYHHTSDENHSRNDCSCNCDMDCSLFESCHETSECLELAMEISEICYR

SEQ ID NO: 23976 - protein, 202 aa, Homo sapiens
MSETELEKIKVRTAEHLENDKNNISWLKEGLSTSILNPLGDPDTQLTNAKHADEKPINAIVINSVSDFNITDGPAKENPNEKKLSESSTSLSSLEECQTTFSYLQTDTSVHHRDTDEECASLILACLFCQFWDCLLMLPGTCETVCTKMCCPSRRYHHTSDENHSRNDCSCNCDMDCSLFESCHETSECLELAMEISEICYR

SEQ ID NO: 23977 - protein, 246 aa, Homo sapiens
MSGAGEALAPGPVGPQRVAEAGGGQLGSTAQGKCDKDNTEKDITQATNSHFTHGEMQDQSIWGNPSDGELIRTQPQRLPQLQTSAQVPSGEEIGKIKNGHTGLSNGNGIHHGAKHGSADNRKLSAPVSQKMHRKIQSSLSVNSDISKKSKVNAVFSQKTGSSPEDCCVHCILACLFCEFLTLCNIVLGQASCGICTSEACCCCCGDEMGDDCNCPCDMDCGIMDACCESSDCLEICMECCGICFPS

SEQ ID NO: 23978 - protein, 355 aa, Homo sapiens
MRGVRAATAAAVAATAASGLSRREAGGRAGAAAAVVRPPGRKCGRCRRLANFPGRKRRRRRRKGLGATTGGCGEAVSSLHPAPHSPSSVRPAGRRARRQRRGAGSAERPMSGAGEALAPGPVGPQRVAEAGGGQLGSTAQGKCDKDNTEKDITQATNSHFTHGEMQDQSIWGNPSDGELIRTQPQRLPQLQTSAQVPSGEEIGKIKNGHTGLSNGNGIHHGAKHGSADNRKLSAPVSQKMHRKIQSSLSVNSDISKKSKVNAVFSQKTGSSPEDCCVHCILACLFCEFLTLCNIVLGQASCGICTSEACCCCCGDEMGDDCNCPCDMDCGIMDACCESSDCLEICMECCGICFPS

SEQ ID NO: 23979 - protein, 714 aa, Homo sapiens
MPVRFKGLSEYQRNFLWKKSYLSESCNSSVGRKYPWAGLRSDQLGITKEPSFISKRRVPYHDPQISKSLEWNGAISESNVVASPEPEAPETPKSQEAEQKDVTQERVHSLEASRVPKRTRSHSADSRAEGASDVENNEGVTNHTPVNENVELEHSTKVLSENVDNGLDRLLRKKAGLTVVPSYNALRNSEYQRQFVWKTSKETAPAFAANQVFHNKSQFVPPFKGNSVIHETEYKRNFKGLSPVKEPKLRNDLRENRNLETVSPERKSNKIDDRLKLEAEMELKDLHQPKRKLTPWKHQRLGKVNSEYRAKFLSPAQYLYKAGAWTHVKGNMPNQVKELREKAEFYRKRVQGTHFSRDHLNQILSDSNCCWDVSSTTSSEGTVSSNIRALDLAGDPTSHKTLQKCPSTEPEEKGNIVEEQPQKNTTEKLGVSAPTIPVRRRLAWDTENTSEDVQKQPGEKEEEDDNEEEGDRKTGKQAFMGEQEKLDVREKSKADKMKEGSDSSVSSEKGGRLPTPKLRELGGIQRTHHDLTTPAVGGAVLVSPSKMKPPAPEQRKRMTSQDCLETSKNDFTKKESRAVSLLTSPAAGIKTVDPLPLREDSEDNIHKFAEATLPVSKIPKYPTNPPGQLPSPPHVPSYWHPSRRIQGSLRDPEFQHNVGKARMNNLQLPQHEAFNDEDEDRLSEISARSAASSLRAFQTLARAKKRKENFWGKT

SEQ ID NO: 23980 - protein, 222 aa, Homo sapiens
MPVRFKGLSEYQRNFLWKKSYLSESCNSSVGRKYPWAGLRSDQLGITKEPSFISKRRVPYHDPQISKSLEWNGAISESNVVASPEPEAPETPKSQEAEQKDVTQERVHSLEASRVPKRTRSHSADSRAEGASDVENNEGVTNHTPVNENVELEHSTKVLSENVDNGVGIFTAFLFKSIEFFIGFIVISVILHFVFQNFPLLFSCLMSIRIVDNRLLTLVIVN

SEQ ID NO: 23981 - protein, 69 aa, Homo sapiens
MPVRFKGLSEYQRNFLWKKSYLSESCNSSVGRKYPWAGLRSDQLGNQGRCRTKIQHSDISSLLILVCST

SEQ ID NO: 23982 - protein, 679 aa, Homo sapiens
MPVRFKGLSEYQRNFLWKKSYLSESCNSSVGRKYPWAGLRSDQLGITKEPSFISKRRVPYHDPQISKSLEWNGAISESNVVASPEPEAPETPKSQEAEQKDVTQERVHSLEASRVPKRTRSHSADSRAEGASDVENNEGVTNHTPVNENVELEHSTKVLSENVDNGVFHNKSQFVPPFKGNSVIHETEYKRNFKGLSPVKEPKLRNDLRENRNLETVSPERKSNKIDDRLKLEAEMELKDLHQPKRKLTPWKHQRLGKVNSEYRAKFLSPAQYLYKAGAWTHVKGNMPNQGSLNAMWYAEVKELREKAEFYRKRVQGTHFSRDHLNQILSDSNCCWDVSSTTSSEGTVSSNIRALDLAGDPTSHKTLQKCPSTEPEEKGNIVEEQPQKNTTEKLGVSAPTIPVRRRLAWDTENTSEDVQKQPGEKEEEDDNEEEGDRKTGKQAFMGEQEKLDVREKSKADKMKEGSDSSVSSEKGGRLPTPKLRELGGIQRTHHDLTTPAVGGAVLVSPSKMKPPAPEQRKRMTSQDCLETSKNDFTKKESRAVSLLTSPAAGIKTVDPLPLREDSEDNIHKFAEATLPVSKIPKYPTNPPGQLPSPPHVPSYWHPSRRIQGSLRDPEFQHNVGKARMNNLQLPQHEAFNDEDEDRLSEISARSAASSLRAFQTLARAKKRKENFWGKT

SEQ ID NO: 23983 - protein, 388 aa, Homo sapiens
MAVSVTPIRDTKWLTLEVCREFQRGTCSRPDTECKFAHPSKSCQVENGRVIACFDSLKGRCSRENCKYLHPPPHLKTQLEINGRNNLIQQKNMAMLAQQMQLANAMMPGAPLQPVPMFSVAPSLATNASAAAFNPYLGPVSPSLVPAEILPTAPMLVTGNPGVPVPAAAAAAAQKLMRTDRLEVCREYQRGNCNRGENDCRFAHPADSTMIDTNDNTVTVCMDYIKGRCSREKCKYFHPPAHLQAKIKAAQYQVNQAAAAQAAATAAAMTQSAVKSLKRPLEATFDLGIPQAVLPPLPKRPALEKTNGATAVFNTGIFQYQQALANMQLQQHTAFLPPVPMVHGATPATVSAATTSATSVPFAATATANQIPIISAEHLTSHKYVTQM

SEQ ID NO: 23984 - protein, 370 aa, Homo sapiens
MAVSVTPIRDTKWLTLEVCREFQRGTCSRPDTECKFAHPSKSCQVENGRVIACFDSLKGRCSRENCKYLHPPPHLKTQLEINGRNNLIQQKNMAMLAQQMQLANAMMPGAPLQPVPMFSVAPSLATNASAAAFNPYLGPVSPSLVPAEILPTAPMLVTGNPGVPVPAAAAAAAQKLMRTDRLEVCREYQRGNCNRGENDCRFAHPADSTMIDTNDNTVTVCMDYIKGRCSREKCKYFHPPAHLQAKIKAAQYQVNQAAAAQAAATAAAMGIPQAVLPPLPKRPALEKTNGATAVFNTGIFQYQQALANMQLQQHTAFLPPVPMVHGATPATVSAATTSATSVPFAATATANQIPIISAEHLTSHKYVTQM

SEQ ID NO: 23985 - protein, 302 aa, Homo sapiens
MAVSVTPIRDTKWLTLEVCREFQRGTCSRPDTECKFAHPSKSCQVENGRVIACFDSLKGRCSRENCKYLHPPPHLKTQLEINGRNNLIQQKNMAMLAQQMQLANAMMPGAPLQPVVCREYQRGNCNRGENDCRFAHPADSTMIDTNDNTVTVCMDYIKGRCSREKCKYFHPPAHLQAKIKAAQYQVNQAAAAQAAATAAAMGIPQAVLPPLPKRPALEKTNGATAVFNTGIFQYQQALANMQLQQHTAFLPPVPMVHGATPATVSAATTSATSVPFAATATANQIPIISAEHLTSHKYVTQM

SEQ ID NO: 23986 - protein, 314 aa, Homo sapiens
MAVSVTPIRDTKWLTLEVCREFQRGTCSRPDTECKFAHPSKSCQVENGRVIACFDSLKGRCSRENCKYLHPPPHLKTQLEINGRNNLIQQKNMAMLAQQMQLANAMMPGAPLQPVVCREYQRGNCNRGENDCRFAHPADSTMIDTNDNTVTVCMDYIKGRCSREKCKYFHPPAHLQAKIKAAQYQVNQAAAAQAAATAAAMGIPQAVLPPLPKRPALEKTNGATAVFNTGIFQYQQALANMQLQQHTAFLPPGSILCMTPATSVVPMVHGATPATVSAATTSATSVPFAATATANQIPIISAEHLTSHKYVTQM

SEQ ID NO: 23987 - protein, 382 aa, Homo sapiens
MAVSVTPIRDTKWLTLEVCREFQRGTCSRPDTECKFAHPSKSCQVENGRVIACFDSLKGRCSRENCKYLHPPPHLKTQLEINGRNNLIQQKNMAMLAQQMQLANAMMPGAPLQPVPMFSVAPSLATNASAAAFNPYLGPVSPSLVPAEILPTAPMLVTGNPGVPVPAAAAAAAQKLMRTDRLEVCREYQRGNCNRGENDCRFAHPADSTMIDTNDNTVTVCMDYIKGRCSREKCKYFHPPAHLQAKIKAAQYQVNQAAAAQAAATAAAMGIPQAVLPPLPKRPALEKTNGATAVFNTGIFQYQQALANMQLQQHTAFLPPGSILCMTPATSVVPMVHGATPATVSAATTSATSVPFAATATANQIPIISAEHLTSHKYVTQM

SEQ ID NO: 23988 - protein, 342 aa, Homo sapiens
MAVSVTPIRDTKWLTLEVCREFQRGTCSRPDTECKFAHPSKSCQVENGRVIACFDSLKGRCSRENCKYLHPPPHLKTQLEINGRNNLIQQKNMAMLAQQMQLANAMMPGAPLQPVPMFSVAPSLATNASAAAFNPYLGPVSPSLVPAEILPTAPMLVTGNPGVPVPAAAAAAAQKLMRTDRLEVCREYQRGNCNRGENDCRFAHPADSTMIDTNDNTVTVCMDYIKGRCSREKCKYFHPPAHLQAKIKAAQYQVNQAAAAQAAATAAAMGIPQAVLPPLPKRPALEKTNGATAVFNTGIFQYQQALANMQLQQHTAFLPPGSILCMTPATSVDTHNICRTSD

SEQ ID NO: 23989 - protein, 340 aa, Homo sapiens
MAVSVTPIRDTKWLTLEVCREFQRGTCSRPDTECKFAHPSKSCQVENGRVIACFDSLKGRCSRENCKYLHPPPHLKTQLEINGRNNLIQQKNMAMLAQQMQLANAMMPGAPLQPVPMFSVAPSLATNASAAAFNPYLGPVSPSLVPAEILPTAPMLVTGNPGVPVPAAAAAAAQKLMRTDRLEVCREYQRGNCNRGENDCRFAHPADSTMIDTNDNTVTVCMDYIKGRCSREKCKYFHPPAHLQAKIKAAQYQVNQAAAAQAAATAAAMFPWCTVLRQPLCPQQQHLPQVFPSLQQPQPTSPILDASTLLGATSCPAAAGKMIPIISAEHLTSHKYVTQM

SEQ ID NO: 23990 - protein, 495 aa, Homo sapiens
MAAEPQPSSLSYRTTGSTYLHPLSELLGIPLDQVNFVVCQLVALFAAFWFRIYLRPGTTSSDVRHAVATIFGIYFVIFCFGWYSVHLFVLVLMCYAIMVTASVSNIHRYSFFVAMGYLTICHISRIYIFHYGILTTDFSGPLMIVTQKITTLAFQVHDGLGRRAEDLSAEQHRLAIKVKPSFLEYLSYLLNFMSVIAGPCNNFKDYIAFIEGKHIHMKLLEVNWKRKGFHSLPEPSPTGAVIHKLGITLVSLLLFLTLTKTFPVTCLVDDWFVHKASFPARLCYLYVVMQASKPKYYFAWTLADAVNNAAGFGFSGVDKNGNFCWDLLSNLNIWKIETATSFKMYLENWNIQTATWLKCVCYQRVPWYPTVLTFILSALWHGVYPGYYFTFLTGILVTLAARAVRNNYRHYFLSSRALKAVYDAGTWAVTQLAVSYTVAPFVMLAVEPTISLYKSMYFYLHIISLLIILFLPMKPQAHTQRRPQTLNSINKRKTD

SEQ ID NO: 23991 - protein, 346 aa, Homo sapiens
MEFSLRIFLGLGRRAEDLSAEQHRLAIKVKPSFLEYLSYLLNFMSVIAGPCNNFKDYIAFIEGKHIHMKLLEVNWKRKGFHSLPEPSPTGAVIHKLGITLVSLLLFLTLTKTFPVTCLVDDWFVHKASFPARLCYLYVVMQASKPKYYFAWTLADAVNNAAGFGFSGVDKNGNFCWDLLSNLNIWKIETATSFKMYLENWNIQTATWLKCVCYQRVPWYPTVLTFILSALWHGVYPGYYFTFLTGILVTLAARAVRNNYRHYFLSSRALKAVYDAGTWAVTQLAVSYTVAPFVMLAVEPTISLYKSMYFYLHIISLLIILFLPMKPQAHTQRRPQTLNSINKRKTD

SEQ ID NO: 23992 - protein, 241 aa, Homo sapiens
MAAEPQPSSLSYRTTGSTYLHPLSELLGIPLDQVNFVVCQLVALFAAFWFRIYLRPGTTSSDVRHAVATIFGIYFVIFCFGWYSVHLFVLVLMCYAIMVTASVSNIHRYSFFVAMGYLTICHISRIYIFHYGILTTDFSGPLMIVTQKITTLAFQVHDGLGRRAEDLSAEQHRLAIKVKPSFLEYLSYLLNFMSVIAGPCNNFKDYIAFIEGKHIHMKLLEVNWKRKGFHSLPEPSPTGHL

SEQ ID NO: 23993 - protein, 491 aa, Homo sapiens
MCNTNMSVPTDGAVTTSQIPASEQETLVRPKPLLLKLLKSVGAQKDTYTMKEVLFYLGQYIMTKRLYDEKQQHIVYCSNDLLGDLFGVPSFSVKEHRKIYTMIYRNLVVVNQQESSDSGTSVSENRCHLEGGSDQKDLVQELQEEKPSSSHLVSRPSTSSRRRAISETEENSDELSGERQRKRHKSDSISLSFDESLALCVIREICCERSSSSESTGTPSNPDLDAGVSEHSGDWLDQDSVSDQFSVEFEVESLDSEDYSLSEEGQELSDEDDEVYQVTVYQAGESDTDSFEEDPEISLADYWKCTSCNEMNPPLPSHCNRCWALRENWLPEDKGKDKGEISEKAKLENSTQAEEGFDVPDCKKTIVNDSRESCVEENDDKITQASQSQESEDYSQPSTSSSIIYSSQEDVKEFEREETQDKEESVESSLPLNAIEPCVICQGRPKNGCIVHGKTGHLMACFTCAKKLKKRNKPCPVCRQPIQMIVLTYFP

SEQ ID NO: 23994 - protein, 296 aa, Homo sapiens
MCNTNMSVPTDGAVTTSQIPASEQETLDLDAGVSEHSGDWLDQDSVSDQFSVEFEVESLDSEDYSLSEEGQELSDEDDEVYQVTVYQAGESDTDSFEEDPEISLADYWKCTSCNEMNPPLPSHCNRCWALRENWLPEDKGKDKGEISEKAKLENSTQAEEGFDVPDCKKTIVNDSRESCVEENDDKITQASQSQESEDYSQPSTSSSIIYSSQEDVKEFEREETQDKEESVESSLPLNAIEPCVICQGRPKNGCIVHGKTGHLMACFTCAKKLKKRNKPCPVCRQPIQMIVLTYFP

SEQ ID NO: 23995 - protein, 270 aa, Homo sapiens
MCNTNMSVPTDGAVTTSQIPASEQETLDLDAGVSEHSGDWLDQDSVSDQFSVEFEVESLDSEDYSLSEEGQELSDEDDEDYWKCTSCNEMNPPLPSHCNRCWALRENWLPEDKGKDKGEISEKAKLENSTQAEEGFDVPDCKKTIVNDSRESCVEENDDKITQASQSQESEDYSQPSTSSSIIYSSQEDVKEFEREETQDKEESVESSLPLNAIEPCVICQGRPKNGCIVHGKTGHLMACFTCAKKLKKRNKPCPVCRQPIQMIVLTYFP

SEQ ID NO: 23996 - protein, 218 aa, Homo sapiens
MCNTNMSVPTDGAVTTSQIPASEQETLDYWKCTSCNEMNPPLPSHCNRCWALRENWLPEDKGKDKGEISEKAKLENSTQAEEGFDVPDCKKTIVNDSRESCVEENDDKITQASQSQESEDYSQPSTSSSIIYSSQEDVKEFEREETQDKEESVESSLPLNAIEPCVICQGRPKNGCIVHGKTGHLMACFTCAKKLKKRNKPCPVCRQPIQMIVLTYFP

SEQ ID NO: 23997 - protein, 321 aa, Homo sapiens
MCNTNMSVPTDGAVTTSQIPASEQETLVRPKPLLLKLLKSVGAQKDTYTMKEDLDAGVSEHSGDWLDQDSVSDQFSVEFEVESLDSEDYSLSEEGQELSDEDDEVYQVTVYQAGESDTDSFEEDPEISLADYWKCTSCNEMNPPLPSHCNRCWALRENWLPEDKGKDKGEISEKAKLENSTQAEEGFDVPDCKKTIVNDSRESCVEENDDKITQASQSQESEDYSQPSTSSSIIYSSQEDVKEFEREETQDKEESVESSLPLNAIEPCVICQGRPKNGCIVHGKTGHLMACFTCAKKLKKRNKPCPVCRQPIQMIVLTYFP

SEQ ID NO: 23998 - protein, 132 aa, Homo sapiens
MCNTNMSVPTDGAVTTSQIPASEQETLVRQESEDYSQPSTSSSIIYSSQEDVKEFEREETQDKEESVESSLPLNAIEPCVICQGRPKNGCIVHGKTGHLMACFTCAKKLKKRNKPCPVCRQPIQMIVLTYFP

SEQ ID NO: 23999 - protein, 102 aa, Homo sapiens
MCNTNMSVPTDGAVTTSQIPASEQETLVRPKPLLLKLLKSVGAQKDTYTMKEVLFYLGQYIMTKRLYDEKQQHIVNDCANLFPLVDLSIRELYISNYITLGI

SEQ ID NO: 24000 - protein, 430 aa, Homo sapiens
MTKRLYDEKQQHIVYCSNDLLGDLFGVPSFSVKEHRKIYTMIYRNLVVVNQQESSDSGTSVSENRCHLEGGSDQKDLVQELQEEKPSSSHLVSRPSTSSRRRAISETEENSDELSGERQRKRHKSDSISLSFDESLALCVIREICCERSSSSESTGTPSNPDLDAGVSEHSGDWLDQDSVSDQFSVEFEVESLDSEDYSLSEEGQELSDEDDEVYQVTVYQAGESDTDSFEEDPEISLADYWKCTSCNEMNPPLPSHCNRCWALRENWLPEDKGKDKGEISEKAKLENSTQAEEGFDVPDCKKTIVNDSRESCVEENDDKITQASQSQESEDYSQPSTSSSIIYSSQEDVKEFEREETQDKEESVESSLPLNAIEPCVICQGRPKNGCIVHGKTGHLMACFTCAKKLKKRNKPCPVCRQPIQMIVLTYFP

SEQ ID NO: 24001 - protein, 446 aa, Homo sapiens
MCNTNMSVPTDGAVTTSQIPASEQETLVRPKPLLLKLLKSVGAQKDTYTMKEKIYTMIYRNLVVVNQQESSDSGTSVSENRCHLEGGSDQKDLVQELQEEKPSSSHLVSRPSTSSRRRAISETEENSDELSGERQRKRHKSDSISLSFDESLALCVIREICCERSSSSESTGTPSNPDLDAGVSEHSGDWLDQDSVSDQFSVEFEVESLDSEDYSLSEEGQELSDEDDEVYQVTVYQAGESDTDSFEEDPEISLADYWKCTSCNEMNPPLPSHCNRCWALRENWLPEDKGKDKGEISEKAKLENSTQAEEGFDVPDCKKTIVNDSRESCVEENDDKITQASQSQESEDYSQPSTSSSIIYSSQEDVKEFEREETQDKEESVESSLPLNAIEPCVICQGRPKNGCIVHGKTGHLMACFTCAKKLKKRNKPCPVCRQPIQMIVLTYFP

SEQ ID NO: 24002 - protein, 436 aa, Homo sapiens
MCNTNMSVPTDGAVTTSQIPASEQETLVRPKPLLLKLLKSVGAQKDTYTMKEVLFYLGQYIMTKRLYDEKQQHIVYCSNDLLGDLFGVPSFSVKEHRKIYTMIYRNLVVVNQQEENSDELSGERQRKRHKSDSISLSFDESLALCVIREICCERSSSSESTGTPSNPDLDAGVSEHSGDWLDQDSVSDQFSVEFEVESLDSEDYSLSEEGQELSDEDDEVYQVTVYQAGESDTDSFEEDPEISLADYWKCTSCNEMNPPLPSHCNRCWALRENWLPEDKGKDKGEISEKAKLENSTQAEEGFDVPDCKKTIVNDSRESCVEENDDKITQASQSQESEDYSQPSTSSSIIYSSQEDVKEFEREETQDKEESVESSLPLNAIEPCVICQGRPKNGCIVHGKTGHLMACFTCAKKLKKRNKPCPVCRQPIQMIVLTYFP

SEQ ID NO: 24003 - protein, 497 aa, Homo sapiens
MVRSRQMCNTNMSVPTDGAVTTSQIPASEQETLVRPKPLLLKLLKSVGAQKDTYTMKEVLFYLGQYIMTKRLYDEKQQHIVYCSNDLLGDLFGVPSFSVKEHRKIYTMIYRNLVVVNQQESSDSGTSVSENRCHLEGGSDQKDLVQELQEEKPSSSHLVSRPSTSSRRRAISETEENSDELSGERQRKRHKSDSISLSFDESLALCVIREICCERSSSSESTGTPSNPDLDAGVSEHSGDWLDQDSVSDQFSVEFEVESLDSEDYSLSEEGQELSDEDDEVYQVTVYQAGESDTDSFEEDPEISLADYWKCTSCNEMNPPLPSHCNRCWALRENWLPEDKGKDKGEISEKAKLENSTQAEEGFDVPDCKKTIVNDSRESCVEENDDKITQASQSQESEDYSQPSTSSSIIYSSQEDVKEFEREETQDKEESVESSLPLNAIEPCVICQGRPKNGCIVHGKTGHLMACFTCAKKLKKRNKPCPVCRQPIQMIVLTYFP

SEQ ID NO: 24004 - protein, 472 aa, Homo sapiens
MAGGEAGVTLGQPHLSRQDLTTLDVTKLTPLSHEVISRQATINIGTIGHVAHGKSTVVKAISGVHTVRFKNELERNITIKLGYANAKIYQLDDPSCPRPECYRSCGSSMPDEFPTDIPGTKGNFRLVRHVSFVDCPGHDILMATMLNGAAVMDAALLLIAGNESCPQPQTSEHLAAIEIMKLKHILILQNKIDLVKERQAKEQYEQILAFVQGTVAEGAPIIPISAQLKYNIEVVCEYIVKKIPVPPRDFTSEPRLIVIRSFDVNKPGCEVDDLKGGVAGGSILKGVLKVGQETEVRPGIVSKDSEGKLMCKSIFSKIVSLFAEHNDLQYAAPGGLIGVGTKIDPTLCRADRMVGQILGAVGALPEIFTELEISYFLLRRLLGVRTEGDKKAAKVQKLSKNEVLMVNIGSLSTGGRVSAVKADLGKIVLTNPVCTEVGEKIALSRRVEKHWRLIGWGQIRRGVTIKPTVDDD

SEQ ID NO: 24005 - protein, 466 aa, Homo sapiens
MAGGEAGVTLGQPHLSRQDLTTLDVTKLTPLSHEVISRQATINIGTIGHVAHGKSTVVKAISGVHTVRFKNELERNITIKLGYANAKIYQLDDPSCPRPECYRSCGSSMPDEFPTDIPGTKGNFRLVRHVSFVDCPGHDILMATMLNGAAVMDAALLLIAGNESCPQPQTSEHLAAIEIMKLKHILILQNKIDLVKERQAKEQYEQILAFVQGTVAEGAPIIPISAQLKYNIEVVCEYIVKKIPVPPRDFTSEPRLIVIRSFDVNKPGCEVDDLKGGVAGGSILKGVLKVGQETEVRPGIVSKDSEGKLMCKSIFSKIVSLFAEHNDLQYAAPGGLIGVGTKIDPTLCRADRMVGQILGAVGALPEIFTELEISYFLLRRLLGVRTEGDKKAAKVQKLSKNEVLMVNIGSLSTGGRVSAVKADLGKIVLTNPVCTEIHLIHLDLIKELEWGPVLTNETQRKSAANF

SEQ ID NO: 24006 - protein, 520 aa, Homo sapiens
MATTSTTGSTLLQPLSNAVQLPIDQVNFVVCQLFALLAAIWFRTYLHSSKTSSFIRHVVATLLGLYLALFCFGWYALHFLVQSGISYCIMIIIGVENMHNYCFVFALGYLTVCQVTRVYIFDYGQYSADFSGPMMIITQKITSLACEIHDGMFRKDEELTSSQRDLAVRRMPSLLEYLSYNCNFMGILAGPLCSYKDYITFIEGRSYHITQSGENGKEETQYERTEPSPNTAVVQKLLVCGLSLLFHLTICTTLPVEYNIDEHFQATASWPTKIIYLYISLLAARPKYYFAWTLADAINNAAGFGFRGYDENGAARWDLISNLRIQQIEMSTSFKMFLDNWNIQTALWLKRVCYERTSFSPTIQTFILSAIWHGVYPGYYLTFLTGVLMTLAARAMRNNFRHYFIEPSQLKLFYDVITWIVTQVAISYTVVPFVLLSIKPSLTFYSSWYYCLHILGILVLLLLPVKKTQRRKNTHENIQLSQSKKFDEGENSLGQNSFSTTNNVCNQNQEIASRHSSLKQ

SEQ ID NO: 24007 - protein, 382 aa, Homo sapiens
MDFGLALLLAGLLGLLLGQSLQVKPLQVEPPEPVVAVALGASRQLTCRLACADRGASVQWRGLDTSLGAVQSDTGRSVLTVRNASLSAAGTRVCVGSCGGRTFQHTVQLLVYAFPDQLTVSPAALVPGDPEVACTAHKVTPVDPNALSFSLLVGGQELEGAQALGPEVQEEEEEPQGDEDVLFRVTERWRLPPLGTPVPPALYCQATMRLPGLELSHRQAIPVLHSPTSPEPPDTTSPESPDTTSPESPDTTSQEPPDTTSPEPPDKTSPEPAPQQGSTHTPRSPGSTRTRRPEISQAGPTQGEVIPTGSSKPAGDQLPAALWTSSAVLGLLLLALPTYHLWKRCRHLAEDDTHPPASLRLLPQVSAWAGLRGTGQVGISPS

SEQ ID NO: 24008 - protein, 271 aa, Homo sapiens
MDFGLALLLAGLLGLLLGQSLQVKPLQVEPPEPVVAVALGASRQLTCRLACADRGASVQWRGLDTSLGAVQSDTGRSVLTVRNASLSAAGTRVCVGSCGGRTFQHTVQLLVYAFPDQLTVSPAALVPGDPEVACTAHKVTPVDPNALSFSLLVGGQELEGAQALGPEVQEEEEEPQGDEDVLFRVTERWRLPPLGTPVPPALYCQATMRLPGLELSHRQAIPAALPTYHLWKRCRHLAEDDTHPPASLRLLPQVSAWAGLRGTGQVGISPS

SEQ ID NO: 24009 - protein, 295 aa, Homo sapiens
MDFGLALLLAGLLGLLLGQSLQVKPLQVEPPEPVVAVALGASRQLTCRLACADRGASVQWRGLDTSLGAVQSDTGRSVLTVRNASLSAAGTRVCVGSCGGRTFQHTVQLLVYAFPDQLTVSPAALVPGDPEVACTAHKVTPVDPNALSFSLLVGGQELEGAQALGPEVQEEEEEPQGDEDVLFRVTERWRLPPLGTPVPPALYCQATMRLPGLELSHRQAIPASKPAGDQLPAALWTSSAVLGLLLLALPTYHLWKRCRHLAEDDTHPPASLRLLPQVSAWAGLRGTGQVGISPS

SEQ ID NO: 24010 - protein, 200 aa, Homo sapiens
MDFGLALLLAGLLGLLLAFPDQLTVSPAALVPGDPEVACTAHKVTPVDPNALSFSLLVGGQELEGAQALGPEVQEEEEEPQGDEDVLFRVTERWRLPPLGTPVPPALYCQATMRLPGLELSHRQAIPASKPAGDQLPAALWTSSAVLGLLLLALPTYHLWKRCRHLAEDDTHPPASLRLLPQVSAWAGLRGTGQVGISPS

SEQ ID NO: 24011 - protein, 385 aa, Homo sapiens
MQACGGGAAGRRAFDSICPNRMLALPGRALLCKPGKPERKFAPPRKFFPGCTGGSPVSVYEDPPDAEPTALPALTTIDLQDLADCSSLLGSDAPPGGDLAASQNHSHQTEADFNLQDFRDTVDDLISDSSSMMSPTLASGDFPFSPCDISPFGPCLSPPLDPRALQSPPLRPPDVPPPEQYWKEVADQNQRALGDALVENNQLHVTLTQKQEEIASLKERNVQLKELASRTRHLASVLDKLMITQSRDCGAAAEPFLLKAKAKRSLEELVSAAGQDCAEVDAILREISERCDEALQSRDPKRPRLLPEPANTDTRPGNLHGAFRGLRTDCSRSALNLSHSELEEGGSFSTRIRSHSTIRTLAFPQGNAFTIRTANGGYKFRWVPS

SEQ ID NO: 24012 - protein, 435 aa, Homo sapiens
MEWLWLFFLHPISFYQGAAFPFALLFNYLCIMDSFSTRARYLFLLTGGGALAVAAMGSYAVLVFTPAVCAVALLCSLAPQQVHRWTFCFQMSWQTLCHLGLHYTEYYLHEPPSVRFCITLSSLMLLTQRVTSLSLDICEGKVKAASGGFRSRSSLSEHVCKALPYFSYLLFFPALLGGSLCSFQRFQARVQGSSALHPRHSFWALSWRGLQILGLECLNVAVSRVVDAGAGLTDCQQFECIYVVWTTAGLFKLTYYSHWILDDSLLHAAGFGPELGQSPGEEGYVPDADIWTLERTHRISVFSRKWNQSTARWLRRLVFQHSRAWPLLQTFAFSAWWHGLHPGQVFGFVCWAVMVEADYLIHSFANEFIRSWPMRLFYRTLTWAHTQLIIAYIMLAVEVRSLSSLWLLCNSYNSVFPMVYCILLLLLAKRKHKCN

SEQ ID NO: 24013 - protein, 329 aa, Homo sapiens
MFFKKLSCRFCITLSSLMLLTQRVTSLSLDICEGKVKAASGGFRSRSSLSEHVCKALPYFSYLLFFPALLGGSLCSFQRFQARVQGSSALHPRHSFWALSWRGLQILGLECLNVAVSRVVDAGAGLTDCQQFECIYVVWTTAGLFKLTYYSHWILDDSLLHAAGFGPELGQSPGEEGYVPDADIWTLERTHRISVFSRKWNQSTARWLRRLVFQHSRAWPLLQTFAFSAWWHGLHPGQVFGFVCWAVMVEADYLIHSFANEFIRSWPMRLFYRTLTWAHTQLIIAYIMLAVEVRSLSSLWLLCNSYNSVFPMVYCILLLLLAKRKHKCN

SEQ ID NO: 24014 - protein, 472 aa, Homo sapiens
MAGGEAGVTLGQPHLSRQDLTTLDVTKLTPLSHEVISRQATINIGTIGHVAHGKSTVVKAISGVHTVRFKNELERNITIKLGYANAKIYKLDDPSCPRPECYRSCGSSTPDEFPTDIPGTKGNFKLVRHVSFVDCPGHDILMATMLNGAAVMDAALLLIAGNESCPQPQTSEHLAAIEIMKLKHILILQNKIDLVKESQAKEQYEQILAFVQGTVAEGAPIIPISAQLKYNIEVVCEYIVKKIPVPPRDFTSEPRLIVIRSFDVNKPGCEVDDLKGGVAGGSILKGVLKVGQEIEVRPGIVSKDSEGKLMCKPIFSKIVSLFAEHNDLQYAAPGGLIGVGTKIDPTLCRADRMVGQVLGAVGALPEIFTELEISYFLLRRLLGVRTEGDKKAAKVQKLSKNEVLMVNIGSLSTGGRVSAVKADLGKIVLTNPVCTEVGEKIALSRRVEKHWRLIGWGQIRRGVTIKPTVDDD

SEQ ID NO: 24015 - protein, 406 aa, Homo sapiens
MSASQDSRSRDNGPDGMEPEGVIESNWNEIVDSFDDMNLSESLLRGIYAYGFEKPSAIQQRAILPCIKGYDVIAQAQSGTGKTATFAISILQQIELDLKATQALVLAPTRELAQQIQKVVMALGDYMGASCHACIGGTNVRAEVQKLQMEAPHIIVGTPGRVFDMLNRRYLSPKYIKMFVLDEADEMLSRGFKDQIYDIFQKLNSNTQVVLLSATMPSDVLEVTKKFMRDPIRILVKKEELTLEGIRQFYINVEREEWKLDTLCDLYETLTITQAVIFINTRRKVDWLTEKMHARDFTVSAMHGDMDQKERDVIMREFRSGSSRVLITTDLLARGIDVQQVSLVINYDLPTNRENYIHRIGRGGRFGRKGVAINMVTEEDKRTLRDIETFYNTSIEEMPLNVADLI

SEQ ID NO: 24016 - protein, 347 aa, Homo sapiens
MSASQDSRSRDNGPDGMEPEGVIESNWNEIVDSFDDMNLSESLLRGIYAYGFEKPSAIQQRAILPCIKGYDVIAQAQSGTGKTATFAISILQQIELDLKATQALVLAPTRELAQQIQKVVMALGDYMGASCHACIGGTNVRAEVQKLQMEAPHIIVGTPGRVFDMLNRRYLSPKYIKMFVLDEADEMLSRGFKDQIYDIFQKLNSNTQVVLLSATMPSDVLEVTKKFMRDPIRILVKKEELTLEGIRQFYINVEREEWKLDTLCDLYETLTITQAVIFINTRRKVDWLTEKMHARDFTVSAMHGDMDQKERDVIMREFRSGSSRVLITTDLLGKLYPQNRSRWTVWP

SEQ ID NO: 24017 - protein, 208 aa, Homo sapiens
MIIKHFFGTVLVLLASTTIFSLDLKLIIFQQRQVNQESLKLLNKLQTLSIQQCLPHRKNFLLPQKSLSPQQYQKGHTLAILHEMLQQIFSLFRANISLDGWEENHTEKFLIQLHQQLEYLEALMGLEAEKLSGTLGSDNLRLQVKMYFRRIHDYLENQDYSTCAWAIVQVEISRCLFFVFSLTEKLSKQGRPLNDMKQELTTEFRSPR

SEQ ID NO: 24018 - protein, 379 aa, Homo sapiens
MEQLSSANTRFALDLFLALSENNPAGNIFISPFSISSAMAMVFLGTRGNTAAQLSKTFHFNTVEEVHSRFQSLNADINKRGASYILKLANRLYGEKTYNFLPEFLVSTQKTYGADLASVDFQHASEDARKTINQWVKGQTEGKIPELLASGMVDNMTKLVLVNAIYFKGNWKDKFMKEATTNAPFRLNKKDRKTVKMMYQKKKFAYGYIEDLKCRVLELPYQGEELSMVILLPDDIEDESTGLKKIEEQLTLEKLHEWTKPENLDFIEVNVSLPRFKLEESYTLNSDLARLGVQDLFNSSKADLSGMSGARDIFISKIVHKSFVEVNEEGTEAAAATAGIATFCMLMPEENFTADHPFLFFIRHNSSGSILFLGRFSSP

SEQ ID NO: 24019 - protein, 228 aa, Homo sapiens
MVDNMTKLVLVNAIYFKGNWKDKFMKEATTNAPFRLNKKDRKTVKMMYQKKKFAYGYIEDLKCRVLELPYQGEELSMVILLPDDIEDESTGLKKIEEQLTLEKLHEWTKPENLDFIEVNVSLPRFKLEESYTLNSDLARLGVQDLFNSSKADLSGMSGARDIFISKIVHKSFVEVNEEGTEAAAATAGIATFCMLMPEENFTADHPFLFFIRHNSSGSILFLGRFSSP

SEQ ID NO: 24020 - protein, 240 aa, Homo sapiens
MTPHRLLPPLLLLLALLLAASPGGALARCPGCGQGVQAGCPGGCVEEEDGGSPAEGCAEAEGCLRREGQECGVYTPNCAPGLQCHPPKDDEAPLRALLLGRGRCLPARAPAVAEENPKESKPQAGTARPQDVNRRDQQRNPGTSTTPSQPNSAGVQDTEMGPCRRHLDSVLQQLQTEVYRGAQTLYVPNCDHRGFYRKRQCRSSQGQRRGPCWCVDRMGKSLPGSPDGNGSSSCPTGSSG

SEQ ID NO: 24021 - protein, 566 aa, Homo sapiens
MARQPYRFPQARIPERGSGVFRLTVRNAMAHRDSEMKEECLREDLKFYFMSPCEKYRARRQIPWKLGLQILKIVMVTTQLVRFGLSNQLVVAFKEDNTVAFKHLFLKGYSGTDEDDYSCSVYTQEDAYESIFFAINQYHQLKDITLGTLGYGENEDNRIGLKVCKQHYKKGTMFPSNETLNIDNDVELDCVQLDLQDLSKKPPDWKNSSFFRLEFYRLLQVEISFHLKGIDLQTIHSRELPDCYVFQNTIIFDNKAHSGKIKIYFDSDAKIEECKDLNIFGSTQKNAQYVLVFDAFVIVICLASLILCTRSIVLALRLRKRFLNFFLEKYKRPVCDTDQWEFINGWYVLVIISDLMTIIGSILKMEIKAKNLTNYDLCSIFLGTSTLLVWVGVIRYLGYFQAYNVLILTMQASLPKVLRFCACAGMIYLGYTFCGWIVLGPYHDKFENLNTVAECLFSLVNGDDMFATFAQIQQKSILVWLFSRLYLYSFISLFIYMILSLFIALITDSYDTIKKFQQNGFPETDLQEFLKECSSKEEYQKESSAFLSCICCRRRKRSDDHLIPIS

SEQ ID NO: 24022 - protein, 538 aa, Homo sapiens
MAHRDSEMKEECLREDLKFYFMSPCEKYRARRQIPWKLGLQILKIVMVTTQLVRFGLSNQLVVAFKEDNTVAFKHLFLKGYSGTDEDDYSCSVYTQEDAYESIFFAINQYHQLKDITLGTLGYGENEDNRIGLKVCKQHYKKGTMFPSNETLNIDNDVELDCVQLDLQDLSKKPPDWKNSSFFRLEFYRLLQVEISFHLKGIDLQTIHSRELPDCYVFQNTIIFDNKAHSGKIKIYFDSDAKIEECKDLNIFGSTQKNAQYVLVFDAFVIVICLASLILCTRSIVLALRLRKRFLNFFLEKYKRPVCDTDQWEFINGWYVLVIISDLMTIIGSILKMEIKAKNLTNYDLCSIFLGTSTLLVWVGVIRYLGYFQAYNVLILTMQASLPKVLRFCACAGMIYLGYTFCGWIVLGPYHDKFENLNTVAECLFSLVNGDDMFATFAQIQQKSILVWLFSRLYLYSFISLFIYMILSLFIALITDSYDTIKKFQQNGFPETDLQEFLKECSSKEEYQKESSAFLSCICCRRRKRSDDHLIPIS

SEQ ID NO: 24023 - protein, 354 aa, Homo sapiens
MEAATAPEVAAGSKLKVKEASPADAEPPQASPGQGAGSPTPQLLPPIEEHPKIWLPRALRQTYIRKVGDTVNLLIPFQGKPKPQAIWTHDGCALDTRRVSVRNGEQDSILFIREAQRADSGRYQLRVQLGGLEATATIDILVIERPGPPQSIKLVDVWGFSATLEWTPPQDTGNTALLGYTVQKADTKSGLWFTVLEHYHRTSCIVSDLIIGNSYAFRVFAENQCGLSETAPITTDLAHIQKAATVYKTKGFAQRDFSEAPKFTQPLADCTTVTGYNTQLFCCVRASPRPKIIWLKNKMDIQGNPKYRALTHLGICSLEIRKPGPFDGGIYTCKAVNPLGEASVDCRVDVKVPN

SEQ ID NO: 24024 - protein, 331 aa, Homo sapiens
MEAATAPEVAAGSKLKVKEASPADAEPPQASPGQGAGSPTPQLLPPIEEHPKIWLPRALRQTYIRKVGDTVNLLIPFQGKPKPQAIWTHDGCALDTRRVSVRNGEQDSILFIREAQRADSERPGPPQSIKLVDVWGFSATLEWTPPQDTGNTALLGYTVQKADTKSGLWFTVLEHYHRTSCIVSDLIIGNSYAFRVFAENQCGLSETAPITTDLAHIQKAATVYKTKGFAQRDFSEAPKFTQPLADCTTVTGYNTQLFCCVRASPRPKIIWLKNKMDIQGNPKYRALTHLGICSLEIRKPGPFDGGIYTCKAVNPLGEASVDCRVDVKVPN

SEQ ID NO: 24025 - protein, 282 aa, Homo sapiens
MERPSLRALLLGAAGLLLLLLPLSSSSSSDTCGPCEPASCPPLPPLGCLLGETRDACGCCPMCARGEGEPCGGGGAGRGYCAPGMECVKSRKRRKGKAGAAAGGPGVSGVCVCKSRYPVCGSDGTTYPSGCQLRAASQRAESRGEKAITQVSKGTCEQGPSIVTPPKDIWNVTGAQVYLSCEVIGIPTPVLIWNKVKRGHYGVQRTELLPGDRDNLAIQTRGGPEKHEVTGWVLVSPLSKEDAGEYECHASNSQGQASASAKITVVDALHEIPVKKGEGAEL

SEQ ID NO: 24026 - protein, 279 aa, Homo sapiens
MERPSLRALLLGAAGLLLLLLPLSSSSSSDTCGPCEPASCPPLPPLGCLLGETRDACGCCPMCARGEGEPCGGGGAGRGYCAPGMECVKSRKRRKGKAGAAAGGPGVSGVCVCKSRYPVCGSDGTTYPSGCQLRAASQRAESRGEKAITQVSKGTCEQGPSIVTPPKDIWNVTGAQVYLSCEVIGIPTPVLIWNKVKRGHYGVQRTELLPGDRDNLAIQTRGGPEKHEVTGWVLVSPLSKEDAGEYECHASNSQGQASASAKITVVDALHEIPVKKGTQ

SEQ ID NO: 24027 - protein, 346 aa, Homo sapiens
MPRGQKSKLRAREKRQRTRGQTQDLKVGQPTAAEKEESPSSSSSVLRDTASSSLAFGIPQEPQREPPTTSAAAAMSCTGSDKGDESQDEENASSSQASTSTERSLKDSLTRKTKMLVQFLLYKYKMKEPTTKAEMLKIISKKYKEHFPEIFRKVSQRTELVFGLALKEVNPTTHSYILVSMLGPNDGNQSSAWTLPRNGLLMPLLSVIFLNGNCAREEEIWEFLNMLGIYDGKRHLIFGEPRKLITQDLVQEKYLEYQQVPNSDPPRYQFLWGPRAHAETSKMKVLEFLAKVNDTTPNNFPLLYEEALRDEEERAGARPRVAARRGTTAMTSAYSRATSSSSSQPM

SEQ ID NO: 24028 - protein, 117 aa, Homo sapiens
MDWTWRFLFVVAAATGVQSQVQLVQSGAEVKKPGSSVKVSCKASGGTFSSYAISWVRQAPGQGLEWMGGIIPIFGTANYAQKFQGRVTITADESTSTAYMELSSLRSEDTAVYYCAR

SEQ ID NO: 24029 - protein, 117 aa, Homo sapiens
MGSTAILALLLAVLQGVCAEVQLVQSGAEVKKPGESLRISCKGSGYSFTSYWISWVRQMPGKGLEWMGRIDPSDSYTNYSPSFQGHVTISADKSISTAYLQWSSLKASDTAMYYCAR

SEQ ID NO: 24030 - protein, 273 aa, Homo sapiens
MATWDEKAVTRRAKVAPAERMSKFLRHFTVVGDDYHAWNINYKKWENEEEEEEEEQPPPTPVSGEEGRAAAPDVAPAPGPAPRAPLDFRGMLRKLFSSHRFQVIIICLVVLDALLVLAELILDLKIIQPDKNNYAAMVFHYMSITILVFFMMEIIFKLFVFRLEFFHHKFEILDAVVVVVSFILDIVLLFQEHQFEALGLLILLRLWRVARIINGIIISVKTRSERQLLRLKQMNVQLAAKIQHLEFSCSEKEQEIERLNKLLRQHGLLGEVN

SEQ ID NO: 24031 - protein, 236 aa, Homo sapiens
MATWDEKAVTRRAKVAPAERMSKFLRHFTVVGDDYHAWNINYKKWENEEEEEEEEQPPPTPVSGEVIIICLVVLDALLVLAELILDLKIIQPDKNNYAAMVFHYMSITILVFFMMEIIFKLFVFRLEFFHHKFEILDAVVVVVSFILDIVLLFQEHQFEALGLLILLRLWRVARIINGIIISVKTRSERQLLRLKQMNVQLAAKIQHLEFSCSEKEQEIERLNKLLRQHGLLGEVN

SEQ ID NO: 24032 - protein, 255 aa, Homo sapiens
MATWDEKAVTRRAKVAPAERMSKFLRHFTVVGDDYHAWNINYKKWENEEEEEEEEQPPPTPVSGEEGRAAAPDVAPAPGPAPRAPLDFRGMLRKLFSSHRFQVIIICLVVLDALLVLAELILDLKIIQPDKNNYAAMVFHYMSITILVFFMMEIIFKLFVFRLEFFHHKFEILDAVVVVVSFILDIVLLFQEHQFEALGLLILLRLWRVARIINGIIISVKTRSERQLLRLKQMNVQLAAKIQHLEFSCSEKPLD

SEQ ID NO: 24033 - protein, 253 aa, Homo sapiens
MSKFLRHFTVVGDDYHAWNINYKKWENEEEEEEEEQPPPTPVSGEEGRAAAPDVAPAPGPAPRAPLDFRGMLRKLFSSHRFQVIIICLVVLDALLVLAELILDLKIIQPDKNNYAAMVFHYMSITILVFFMMEIIFKLFVFRLEFFHHKFEILDAVVVVVSFILDIVLLFQEHQFEALGLLILLRLWRVARIINGIIISVKTRSERQLLRLKQMNVQLAAKIQHLEFSCSEKEQEIERLNKLLRQHGLLGEVN

SEQ ID NO: 24034 - protein, 597 aa, Homo sapiens
MAHNKIPPRWLNCPRRGQPVAGRFLPLKTMLGPRYDSQVAEENRFHPSMLSNYLKSLKVKMGLLVDLTNTSRFYDRNDIEKEGIKYIKLQCKGHGECPTTENTETFIRLCERFNERNPPELIGVHCTHGFNRTGFLICAFLVEKMDWSIEAAVATFAQARPPGIYKGDYLKELFRRYGDIEEAPPPPLLPDWCFEDDEDEDEDEDGKKESEPGSSASFGKRRKERLKLGAIFLEGVTVKGVTQVTTQPKLGEVQQKCHQFCGWEGSGFPGAQPVSMDKQNIKLLDLKPYKVSWKADGTRYMMLIDGTNEVFMIDRDNSVFHVSNLEFPFRKDLRMHLSNTLLDGEMIIDRVNGQAVPRYLIYDIIKFNSQPVGDCDFNVRLQCIEREIISPRHEKMKTGLIDKTQEPFSVRNKPFFDICTSRKLLEGNFAKEVSHEMDGLIFQPTGKYKPGRCDDILKWKPPSLNSVDFRLKITRMGGEGLLPQNVGLLYVGGYERPFAQIKVTKELKQYDNKIIECKFENNSWVFMRQRTDKSFPNAYNTAMAVCNSISNPVTKEMLFEFIDRCTAASQGQKRKHHLDPDTELMPPPPPKRPRPLT

SEQ ID NO: 24035 - protein, 574 aa, Homo sapiens
MAHNKIPPRWLNCPRRGQPVAGRFLPLKTMLGPRYDSQVAEENRFHPSMLSNYLKSLKVKMGLLVDLTNTSRFYDRNDIEKEGIKYIKLQCKGHGECPTTENTETFIRLCERFNERNPPELIGVHCTHGFNRTGFLICAFLVEKMDWSIEAAVATFAQARPPGIYKGDYLKELFRRYGDIEEAPPPPLLPDWCFEDDEDEDEDEDGKKESEPGSSASFGKRRKERLKLGAIFLEGVTVKGVTQVTTQPKLGEVQQKCHQFCGWEGSGFPGAQPVSMDKQNIKLLDLKPYKVSWKADGTRYMMLIDGTNEVFMIDRDNSVFHVSNLEFPFRKDLRMHLSNTLLDGEMIIDRVNGQAVPRYLIYDIIKFNSQPVGDCDFNVRLQCIEREIISPRHEKMKTGLIDKTQEPFSVRNKPFFDICTSRKKYKPGRCDDILKWKPPSLNSVDFRLKITRMGGEGLLPQNVGLLYVGGYERPFAQIKVTKELKQYDNKIIECKFENNSWVFMRQRTDKSFPNAYNTAMAVCNSISNPVTKEMLFEFIDRCTAASQGQKRKHHLDPDTELMPPPPPKRPRPLT

SEQ ID NO: 24036 - protein, 457 aa, Homo sapiens
MAHNKIPPRWLNCPRRGQPVAGRFLPLKTMLGPRYDSQVAEENRFHPSMLSNYLKSLKVKMGLLVDLTNTSRFYDRNDIEKEGIKYIKLQCKGHGECPTTENTETFIRLCERFNERNPPELIGVHCTHGFNRTGFLICAFLVEKMDWSIEAAVATFAQARPPGIYKGDYLKELFRRYGDIEEAPPPPLLPDWCFEDDEDEDEDEDGKKESEPGSSASFGKRRKERLKLGAIFLEGVTVKGVTQVTTQPKLGEVQQKCHQFCGWEGSGFPGAQPVSMDKQNIKLLDLKPYKVSWKADGTRYMMLIDGTNEVFMIDRDNSVFHVSNLEFPFRKDLRMHLSNTLLDGEMIIDRVNGQAVPRYLIYDIIKFNSQPVGDCDFNVRLQCIEREIISPRHEKMKTGLIDKTQEPFSVRNKPFFDICTSRKKYKPGRCDDILKWKPPSLNSVDFRLKITRMGGEG

SEQ ID NO: 24037 - protein, 541 aa, Homo sapiens
MAHNKIPPRWLNCPRRGQPVAGRFLPLKTMLGPRYDSQVAEENRFHPSMLSNYLKSLKVKMGLLVDLTNTSRFYDRNDIEKEGIKYIKLQCKGHGECPTTENTETFIRLCERFNERNPPELIGVHCTHGFNRTGFLICAFLVEKMDWSIEAAVATFAQARPPGIYKGDYLKELFRRYGDIEEAPPPPLLPDWCFEDDEDEDEDEDGKKESEPGSSASFGKRRKERLKLGAIFLEGVTVKGVTQVTTQPKLGEVQQKCHQFCGWEGSGFPGAQPVSMDKQNIKLLDLKPYKVSWKADGTRYMMLIDGTNEVFMIDRDNSVFHVSNLEFPFRKDLRMHLSNTLLDGEMIIDRVNGQAVPRYLIYDIIKFNSQPVGDCDFNVRLQCIEREIISPRHEKMKTGLIDKTQEPFSVRNKPFFDICTSRKLLEGNFAKEVSHEMDGLIFQPTGKYKPGRCDDILKWKPPSLNSVDFRLKITRMGGEGLLPQNVGLLYVGGYERPFAQIKVCLFIFSVLFLDVLLSGIHQNLANNNQHIKISCSSTLGG

SEQ ID NO: 24038 - protein, 585 aa, Homo sapiens
MHTPPALPRRFQGGGRVRTPGSHRQGKDNLERDPSGGCVPDFLPQAQDSNHFIMESLFCESSGDSSLEKEFLGAPVGPSVSTPNSQHSSPSRSLSANSIKVEMYSDEESSRLLGPDERLLEKDDSVIVEDSLSEPLGYCDGSGPEPHSPGGIRLPNGKLKCDVCGMVCIGPNVLMVHKRSHTGERPFHCNQCGASFTQKGNLLRHIKLHSGEKPFKCPFCNYACRRRDALTGHLRTHSVSSPTVGKPYKCNYCGRSYKQQSTLEEHKERCHNYLQSLSTEAQALAGQPGDEIRDLEMVPDSMLHSSSERPTFIDRLANSLTKRKRSTPQKFVGEKQMRFSLSDLPYDVNSGGYEKDVELVAHHSLEPGFGSSLAFVGAEHLRPLRLPPTNCISELTPVISSVYTQMQPLPGRLELPGSREAGEGPEDLADGGPLLYRPRGPLTDPGASPSNGCQDSTDTESNHEDRVAGVVSLPQGPPPQPPPTIVVGRHSPAYAKEDPKPQEGLLRGTPGPSKEVLRVVGESGEPVKAFKCEHCRILFLDHVMFTIHMGCHGFRDPFECNICGYHSQDRYEFSSHIVRGEHKVG

SEQ ID NO: 24039 - protein, 544 aa, Homo sapiens
MDSRYLQLQLYLPSCSLLQGSGDSSLEKEFLGAPVGPSVSTPNSQHSSPSRSLSANSIKVEMYSDEESSRLLGPDERLLEKDDSVIVEDSLSEPLGYCDGSGPEPHSPGGIRLPNGKLKCDVCGMVCIGPNVLMVHKRSHTGERPFHCNQCGASFTQKGNLLRHIKLHSGEKPFKCPFCNYACRRRDALTGHLRTHSVSSPTVGKPYKCNYCGRSYKQQSTLEEHKERCHNYLQSLSTEAQALAGQPGDEIRDLEMVPDSMLHSSSERPTFIDRLANSLTKRKRSTPQKFVGEKQMRFSLSDLPYDVNSGGYEKDVELVAHHSLEPGFGSSLAFVGAEHLRPLRLPPTNCISELTPVISSVYTQMQPLPGRLELPGSREAGEGPEDLADGGPLLYRPRGPLTDPGASPSNGCQDSTDTESNHEDRVAGVVSLPQGPPPQPPPTIVVGRHSPAYAKEDPKPQEGLLRGTPGPSKEVLRVVGESGEPVKAFKCEHCRILFLDHVMFTIHMGCHGFRDPFECNICGYHSQDRYEFSSHIVRGEHKVG

SEQ ID NO: 24040 - protein, 526 aa, Homo sapiens [sequence omitted]

SEQ ID NO: 24041 - protein, 500 aa, Homo sapiens
METEAIDGYITCDNELSPEREHSNMAIDLTSSTPNGQHASPSHMTSTNSVKLEMQSDEECDRKPLSREDEIRGHDEGSSLEEPLIESSEVADNRKVQELQGEGGIRLPNGERPFHCNQCGASFTQKGNLLRHIKLHSGEKPFKCPFCSYACRRRDALTGHLRTHSVGKPHKCNYCGRSYKQRSSLEEHKERCHNYLQNVSMEAAGQVMSHHVPPMEDCKEQEPIMDNNISLVPFERPAVIEKLTGNMGKRKSSTPQKFVGEKLMRFSYPDIHFDMNLTYEKEAELMQSHMMDQAINNAITYLGAEALHPLMQHPPSTIAEVAPVISSAYSQVYHPNRIERPISRETADSHENNMDGPISLIRPKSRPQEREASPSNSCLDSTDSESSHDDHQSYQGHPALNPKRKQSPAYMKEDVKALDTTKAPKGSLKDIYKVFNGEGEQIRAFKCEHCRVLFLDHVMYTIHMGCHGYRDPLECNICGYRSQDRYEFSSHIVRGEHTFH

SEQ ID NO: 24042 - protein, 148 aa, Homo sapiens
METEAIDGYITCDNELSPEREHSNMAIDLTSSTPNGQHASPSHMTSTNSVKLEMQSDEECDRKPLSREDEIRGHDEGSSLEEPLIESSEVADNRKVQELQGEGGIRLPNGKLKCDVCGMVCIGPNVLMVHKRSHTGVAVVKTTFSEFC

SEQ ID NO: 24043 - protein, 452 aa, Homo sapiens
METEAIDGYITCDNELSPEREHSNMAIDLTSSTPNGQHASPSHMTSTNSVKLEMQSDEECDRKPLSREDEIRGHDEGSSLEEPLIESSEVADNRKVQELQGEGGIRLPNGERPFHCNQCGASFTQKGNLLRHIKLHSGEKPFKCPFCSYACRRRDALTGHLRTHSVGKPHKCNYCGRSYKQRSSLEEHKERCHNYLQNVSMEAAGQVMSHHGEKLMRFSYPDIHFDMNLTYEKEAELMQSHMMDQAINNAITYLGAEALHPLMQHPPSTIAEVAPVISSAYSQVYHPNRIERPISRETADSHENNMDGPISLIRPKSRPQEREASPSNSCLDSTDSESSHDDHQSYQGHPALNPKRKQSPAYMKEDVKALDTTKAPKGSLKDIYKVFNGEGEQIRAFKCEHCRVLFLDHVMYTIHMGCHGYRDPLECNICGYRSQDRYEFSSHIVRGEHTFH

SEQ ID NO: 24044 - protein, 52 aa, Homo sapiens
METEAIDGYITCDNELSPEREHSNMAIDLTSSTPNGQHASPSHMTSRSFSKI

SEQ ID NO: 24045 - protein, 239 aa, Homo sapiens
METEAIDGYITCDNELSPEREHSNMAIDLTSSTPNGQHASPSHMTSTNSVKLEMQSDEECDRKPLSREDEIRGHDEGSSLEEPLIESSEVADNRKVQELQGEGGIRLPNGKLKCDVCGMVCIGPNVLMVHKRSHTGERPFHCNQCGASFTQKGNLLRHIKLHSGEKPFKCPFCSYACRRRDALTGHLRTHSVGKPHKCNYCGRSYKQRSSLEEHKERCHNYLQNVSMEAAGQVMSHHDS

SEQ ID NO: 24046 - protein, 454 aa, Homo sapiens
METEAIDGYITCDNELSPEREHSNMAIDLTSSTPNGQHASPSHMTSTNSVKLEMQSDEECDRKPLSREDEIRGHDEGSSLEEPLIESSEVADNRKVQELQGEGGIRLPNGERPFHCNQCGASFTQKGNLLRHIKLHSGEKPFKCPFCSYACRRRDALTGHLRTHSVPPMEDCKEQEPIMDNNISLVPFERPAVIEKLTGNMGKRKSSTPQKFVGEKLMRFSYPDIHFDMNLTYEKEAELMQSHMMDQAINNAITYLGAEALHPLMQHPPSTIAEVAPVISSAYSQVYHPNRIERPISRETADSHENNMDGPISLIRPKSRPQEREASPSNSCLDSTDSESSHDDHQSYQGHPALNPKRKQSPAYMKEDVKALDTTKAPKGSLKDIYKVFNGEGEQIRAFKCEHCRVLFLDHVMYTIHMGCHGYRDPLECNICGYRSQDRYEFSSHIVRGEHTFH

SEQ ID NO: 24047 - protein, 230 aa, Homo sapiens
METEAIDGYITCDNELSPEREHSNMAIDLTSSTPNGQHASPSHMTSTIAEVAPVISSAYSQVYHPNRIERPISRETADSHENNMDGPISLIRPKSRPQEREASPSNSCLDSTDSESSHDDHQSYQGHPALNPKRKQSPAYMKEDVKALDTTKAPKGSLKDIYKVFNGEGEQIRAFKCEHCRVLFLDHVMYTIHMGCHGYRDPLECNICGYRSQDRYEFSSHIVRGEHTFH

SEQ ID NO: 24048 - protein, 426 aa, Homo sapiens
MASGHSLLLENAQQVVLVCARGERFLARDALRSLAVLEGASLVVGKDGFIKAIGPADVIQRQFSGETFEEIIDCSGKCILPGLVDAHTHPVWAGERVHEFAMKLAGATYMEIHQAGGGIHFTVERTRQATEEELFRSLQQRLQCMMRAGTTLVECKSGYGLDLETELKMLRVIERARRELDIGISATYCGAHSVPKGKTATEAADDIINNHLPKLKELGRNGEIHVDNIDVFCEKGVFDLDSTRRILQRGKDIGLQINFHGDELHPMKAAELGAELGAQAISHLEEVSDEGIVAMATARCSAILLPTTAYMLRLKQPRARKMLDEGVIVALGSDFNPNAYCFSMPMVMHLACVNMRMSMPEALAAATINAAYALGKSHTHGSLEVGKQGDLIIINSSRWEHLIYQFGGHHELIEYVIAKGKLIYKT

SEQ ID NO: 24049 - protein, 267 aa, Homo sapiens
MAPRRARGCRTLGLPALLLLLLLRPPATRGITCPPPMSVEHADIWVKSYSLYSRERYICNSGFKRKAGTSSLTECVLNKATNVAHWTTPSLKCIRDPALVHQRPAPPSTVTTAGVTPQPESLSPSGKEPAASSPSSNNTAATTAAIVPGSQLMPSKSPSTGTTEISSHESSHGTPSQTTAKNWELTASASHQPPGVYPQGHSDTTVAISTSTVLLCGLSAVSLLACYLKSRQTPPLASVEMEAMEALPVTWGTSSRDEDLENCSHHL

SEQ ID NO: 24050 - protein, 234 aa, Homo sapiens
MAPRRARGCRTLGLPALLLLLLLRPPATRGITCPPPMSVEHADIWVKSYSLYSRERYICNSGFKRKAGTSSLTECVLNKATNVAHWTTPSLKCIKPAASSPSSNNTAATTAAIVPGSQLMPSKSPSTGTTEISSHESSHGTPSQTTAKNWELTASASHQPPGVYPQGHSDTTVAISTSTVLLCGLSAVSLLACYLKSRQTPPLASVEMEAMEALPVTWGTSSRDEDLENCSHHL

SEQ ID NO: 24051 - protein, 252 aa, Homo sapiens
MAPRRARGCRTLGLPALLLLLLLRPPATRGITCPPPMSVEHADIWVKSYSLYSRERYICNSGFKRKAGTSSLTECVLNKATNVAHWTTPSLKCIRDPALVHQRPAPPSTVTTAGVTPQPESLSPSGKEPAASSPSSNNTAATTAAIVPGSQLMPSKSPSTGTTEISSHESSHGTPSQTTAKNWELTASASHQPPGVYPQGHSDTTVAISTSTVLLCGLSAVSLLACYLKSRASVCSCHPRSAGHTCSVGSVC

SEQ ID NO: 24052 - protein, 219 aa, Homo sapiens
MAPRRARGCRTLGLPALLLLLLLRPPATRGITCPPPMSVEHADIWVKSYSLYSRERYICNSGFKRKAGTSSLTECVLNKATNVAHWTTPSLKCIKPAASSPSSNNTAATTAAIVPGSQLMPSKSPSTGTTEISSHESSHGTPSQTTAKNWELTASASHQPPGVYPQGHSDTTVAISTSTVLLCGLSAVSLLACYLKSRASVCSCHPRSAGHTCSVGSVC

SEQ ID NO: 24053 - protein, 202 aa, Homo sapiens
MAPRRARGCRTLGLPALLLLLLLRPPATRGDPALVHQRPAPPSTVTTAGVTPQPESLSPSGKEPAASSPSSNNTAATTAAIVPGSQLMPSKSPSTGTTEISSHESSHGTPSQTTAKNWELTASASHQPPGVYPQGHSDTTVAISTSTVLLCGLSAVSLLACYLKSRQTPPLASVEMEAMEALPVTWGTSSRDEDLENCSHHL

SEQ ID NO: 24054 - protein, 187 aa, Homo sapiens
MAPRRARGCRTLGLPALLLLLLLRPPATRGDPALVHQRPAPPSTVTTAGVTPQPESLSPSGKEPAASSPSSNNTAATTAAIVPGSQLMPSKSPSTGTTEISSHESSHGTPSQTTAKNWELTASASHQPPGVYPQGHSDTTVAISTSTVLLCGLSAVSLLACYLKSRASVCSCHPRSAGHTCSVGSVC

SEQ ID NO: 24055 - protein, 169 aa, Homo sapiens
MAPRRARGCRTLGLPALLLLLLLRPPATREPAASSPSSNNTAATTAAIVPGSQLMPSKSPSTGTTEISSHESSHGTPSQTTAKNWELTASASHQPPGVYPQGHSDTTVAISTSTVLLCGLSAVSLLACYLKSRQTPPLASVEMEAMEALPVTWGTSSRDEDLENCSHHL

SEQ ID NO: 24056 - protein, 154 aa, Homo sapiens
MAPRRARGCRTLGLPALLLLLLLRPPATREPAASSPSSNNTAATTAAIVPGSQLMPSKSPSTGTTEISSHESSHGTPSQTTAKNWELTASASHQPPGVYPQGHSDTTVAISTSTVLLCGLSAVSLLACYLKSRASVCSCHPRSAGHTCSVGSVC

SEQ ID NO: 24057 - protein, 231 aa, Homo sapiens
MSVEHADIWVKSYSLYSRERYICNSGFKRKAGTSSLTECVLNKATNVAHWTTPSLKCIRDPALVHQRPAPPSTVTTAGVTPQPESLSPSGKEPAASSPSSNNTAATTAAIVPGSQLMPSKSPSTGTTEISSHESSHGTPSQTTAKNWELTASASHQPPGVYPQGHSDTTVAISTSTVLLCGLSAVSLLACYLKSRQTPPLASVEMEAMEALPVTWGTSSRDEDLENCSHHL

SEQ ID NO: 24058 - protein, 313 aa, Homo sapiens
MDFDERGPCSSNMYLPSCTYYVSGPDFSSLPSFLPQTPSSRPMTYSYSSNLPQVQPVREVTFREYAIEPATKWHPRGNLAHCYSAEELVHRDCLQAPSAAGVPGDVLAKSSANVYHHPTPAVSSNFYSTVGRNGVLPQAFDQFFETAYGTPENLASSDYPGDKSAEKGPPAATATSAAAAAAATGAPATSSSDSGGGGGCRETAAAAEEKERRRRPESSSSPESSSGHTEDKAGGSSGQRTRKKRCPYTKYQIRELEREFFFSVYINKEKRLQLSRMLNLTDRQVKIWFQNRRMKEKKINRDRLQYYSANPLL

SEQ ID NO: 24059 - protein, 328 aa, Homo sapiens
MCHQQLVISWFSLVFLASPLVAIWELKKDVYVVELDWYPDAPGEMVVLTCDTPEEDGITWTLDQSSEVLGSGKTLTIQVKEFGDAGQYTCHKGGEVLSHSLLLLHKKEDGIWSTDILKDQKEPKNKTFLRCEAKNYSGRFTCWWLTTISTDLTFSVKSSRGSSDPQGVTCGAATLSAERVRGDNKEYEYSVECQEDSACPAAEESLPIEVMVDAVHKLKYENYTSSFFIRDIIKPDPPKNLQLKPLKNSRQVEVSWEYPDTWSTPHSYFSLTFCVQVQGKSKREKKDRVFTDKTSATVICRKNASISVRAQDRYYSSSWSEWASVPCS

SEQ ID NO: 24060 - protein, 229 aa, Homo sapiens
MTPQLLLALVLWASCPPCSGRKGPPAALTLPRVQCRASRYPIAVDCSWTLPPAPNSTSPVSFIATYRLGMAARGHSWPCLQQTPTSTSCTITDVQLFSMAPYVLNVTAVHPWGSSSSFVPFITEHIIKPDPPEGVRLSPLAERQLQVQWEPPGSWPFPEIFSLKYWIRYKRQGAARFHRVGPIEATSFILRAVRPRARYYVQVAAQDLTDYGELSDWSLPATATMSLGK

SEQ ID NO: 24061 - protein, 197 aa, Homo sapiens
MTLLPGLLFLTWLHTCLAHHDPSLRGHPHSHGTPHCYSAEELPLGQAPPHLLARGAKWGQALPVALVSSLEAASHRGRHERPSATTQCPVLRPEEVLEADTHQRSISPWRYRVDTDEDRYPQKLAFAECLCRGCIDARTGRETAALNSVRLLQSLLVLRRRPCSRDGSGLPTPGAFAFHTEFIHVPVGCTCVLPRSV

SEQ ID NO: 24062 - protein, 282 aa, Homo sapiens
MGEHNLLNPGFVGPLVNIHTGDTFYFPNFRASGAQLPGLPSLSYPRRDNVCSLSWPSAEPCNGYPQPYLGSPVSLNPPFGRTCELARVEDGKGYYREPCAEGGGGGLKREERGRDPGAGPGAALLPLEPSGPPALGFKYDYAAGGGGGDGGGGAGPPHDPPSCQSLESDSSSSLLNEGNKGAGAGDPGSLVSPLNPGGGLSASGAPWYPINSRSRKKRKPYSKLQLAELEGEFLVNEFITRQRRRELSDRLNLSDQQVKIWFQNRRMKKKRLLLREQALSFF

SEQ ID NO: 24063 - protein, 270 aa, Homo sapiens
MCERSLYRAGYVGSLLNLQSPDSFYFSNLRPNGGQLAALPPISYPRGALPWAATPASCAPAQPAGATAFGGFSQPYLAGSGPLGLQPPTAKDGPEEQAKFYAPEAAAGPEERGRTRPSFAPESSLAPAVAALKAAKYDYAGVGRATPGSTTLLQGAPCAPGFKDDTKGPLNLNMTVQAAGVASCLRPSLPDGLPWGAAPGRARKKRKPYTKQQIAELENEFLVNEFINRQKRKELSNRLNLSDQQVKIWFQNRRMKKKRVVLREQALALY

SEQ ID NO: 24064 - protein, 217 aa, Homo sapiens
MCERSLYRAGYVGSLLNLQSPDSFYFSNLRPNGGQLAALPPISYPRGALPWAATPASCAPAQPAGATAFGGFSQPYLAGSGPLGLQPPTAKDGPEEQAKFYAPEAAAGPEERGRTRPSFAPESSLAPAVAALKAAKYDYAGVGRATPGSTTLLQGAPCAPGFKDDTKGPLNLNMTVQAAGVASCLRPSLPDGKRCPCSPGRFGPGWEVGFKGECKGR

SEQ ID NO: 24065 - protein, 104 aa, Homo sapiens
MGKESGWDSGRAAVAAVVGGVVAVGTVLVALSAMGFTSVGIAASSIAAKMMSTAAIANGGGVAAGSLVAILQSVGAAGLSVTSKVIGGFAGTALGAWLGSPPSS

SEQ ID NO: 24066 - protein, 99 aa, Homo sapiens
MTSKLAVALLAAFLISAALCEGAVLPRSAKELRCQCIKTYSKPFHPKFIKELRVIESGPHCANTEIIVKLSDGRELCLDPKENWVQRVVEKFLKRAENS

SEQ ID NO: 24067 - protein, 1336 aa, Homo sapiens
MMEIQMDEGGGVVVYQDDYCSGSVMSERVSGLAGSIYREFERLIHCYDEEVVKELMPLVVNVLENLDSVLSENQEHEVELELLREDNEQLLTQYEREKALRRQAEEKFIEFEDALEQEKKELQIQVEHYEFQTRQLELKAKNYADQISRLEERESEMKKEYNALHQRHTEMIQTYVEHIERSKMQQVGGNSQTESSLPGRRKERPTSLNVFPLADGTVRAQIGGKLVPAGDHWHLSDLGQLQSSSSYQCPQDEMSESGQSSAAATPSTTGTKSNTPTSSVPSAAVTPLNESLQPLGDYGVGSKNSKRAREKRDSRNMEVQVTQEMRNVSIGMGSSDEWSDVQDIIDSTPELDMCPETRLDRTGSSPTQGIVNKAFGINTDSLYHELSTAGSEVIGDVDEGADLLGEFSVRDDFFGMGKEVGNLLLENSQLLETKNALNVVKNDLIAKVDQLSGEQEVLRGELEAAKQAKVKLENRIKELEEELKRVKSEAIIARREPKEEAEDVSSYLCTESDKIPMAQRRRFTRVEMARVLMERNQYKERLMELQEAVRWTEMIRASREHPSVQEKKKSTIWQFFSRLFSSSSSPPPAKRPYPSVNIHYKSPTTAGFSQRRNHAMCPISAGSRPLEFFPDDDCTSSARREQKREQYRQVREHVRNDDGRLQACGWSLPAKYKQLSPNGGQEDTRMKNVPVPVYCRPLVEKDPTMKLWCAAGVNLSGWRPNEDDAGNGVKPAPGRDPLTCDREGDGEPKSAHTSPEKKKAKELPEMDATSSRVWILTSTLTTSKVVIIDANQPGTVVDQFTVCNAHVLCISSIPAASDSDYPPGEMFLDSDVNPEDPGADGVLAGITLVGCATRCNVPRSNCSSRGDTPVLDKGQGEVATIANGKVNPSQSTEEATEATEVPDPGPSEPETATLRPGPLTEHVFTDPAPTPSSGPQPGSENGPEPDSSSTRPEPEPSGDPTGAGSSAAPTMWLGAQNGWLYVHSAVANWKKCLHSIKLKDSVLSLVHVKGRVLVALADGTLAIFHRGEDGQWDLSNYHLMDLGHPHHSIRCMAVVYDRVWCGYKNKVHVIQPKTMQIEKSFDAHPRRESQVRQLAWIGDGVWVSIRLDSTLRLYHAHTHQHLQDVDIEPYVSKMLGTGKLGFSFVRITALLVAGSRLWVGTGNGVVISIPLTETVVLHRGQLLGLRANKTSPTSGEGARPGGIIHVYGDDSSDRAASSFIPYCSMAQAQLCFHGHRDAVKFFVSVPGNVLATLNGSVLDSPAEGPGPAAPASEVEGQKLRNVLVLSGGEGYIDFRIGDGEDDETEEGAGDMSQVKPVLSKAERSHIIVWQVSYTPE

SEQ ID NO: 24068 - protein, 250 aa, Homo sapiens
MMEIQMDEGGGVVVYQDDYCSGSVMSERVSGLAGSIYREFERLIHCYDEEVVKELMPLVVNVLENLDSVLSENQEHEVELELLREDNEQLLTQYEREKALRRQAEEKFIEFEDALEQEKKELQIQVEHYEFQTRQLELKAKNYADQISRLEERESEMKKEYNALHQRHTEMIQTYVEHIERSKMQQVGGNSQTESSLPGRRKERPTSLNVFPLADGTVRAQIGGKLVPAGDHWHLSDLGQLQSSSSYQVL

SEQ ID NO: 24069 - protein, 242 aa, Homo sapiens
MPRGFTWLRYLGIFLGVALGNEPLEMWPLTQNEECTVTGFLRDKLQYRSRLQYMKHYFPINYKISVPYEGVFRIANVTRLQRAQVSERELRYLWVLVSLSATESVQDVLLEGHPSWKYLQEVETLLLNVQQGLTDVEVSPKVESVLSLLNAPGPNLKLVRPKALLDNCFRVMELLYCSCCKQSSVLNWQDCEVPSPQSCSPEPSLQYAATQLYPPPPWSPSSPPHSTGSVRPVRAQGEGLLP

SEQ ID NO: 24070 - protein, 241 aa, Homo sapiens
MPRGFTWLRYLGIFLGVALGNEPLEMWPLTQNEECTVTGFLRDKLQYRSRLQYMKHYFPINYKISVPYEGVFRIANVTRLRAQVSERELRYLWVLVSLSATESVQDVLLEGHPSWKYLQEVETLLLNVQQGLTDVEVSPKVESVLSLLNAPGPNLKLVRPKALLDNCFRVMELLYCSCCKQSSVLNWQDCEVPSPQSCSPEPSLQYAATQLYPPPPWSPSSPPHSTGSVRPVRAQGEGLLP

SEQ ID NO: 24071 - protein, 1321 aa, Homo sapiens
MELEDGVVYQEEPGGSGAVMSERVSGLAGSIYREFERLIGRYDEEVVKELMPLVVAVLENLDSVFAQDQEHQVELELLRDDNEQLITQYEREKALRKHAEEKFIEFEDSQEQEKKDLQTRVESLESQTRQLELKAKNYADQISRLEEREAELKKEYNALHQRHTEMIHNYMEHLERTKLHQLSGSDQLESTAHSRIRKERPISLGIFPLPAGDGLLTPDAQKGGETPGSEQWKFQELSQPRSHTSLKVSNSPEPQKAVEQEDELSDVSQGGSKATTPASTANSDVATIPTDTPLKEENEGFVKVTDAPNKSEISKHIEVQVAQETRNVSTGSAENEEKSEVQAIIESTPELDMDKDLSGYKGSSTPTKGIENKAFDRNTESLFEELSSAGSGLIGDVDEGADLLGMGREVENLILENTQLLETKNALNIVKNDLIAKVDELTCEKDVLQGELEAVKQAKLKLEEKNRELEEELRKARAEAEDARQKAKDDDDSDIPTAQRKRFTRVEMARVLMERNQYKERLMELQEAVRWTEMIRASRENPAMQEKKRSSIWQFFSRLFSSSSNTTKKPEPPVNLKYNAPTSHVTPSVKKRSSTLSQLPGDKSKAFDFLSEETEASLASRREQKREQYRQVKAHVQKEDGRVQAFGWSLPQKYKQVTNGQGENKMKNLPVPVYLRPLDEKDTSMKLWCAVGVNLSGGKTRDGGSVVGASVFYKDVAGLDTEGSKQRSASQSSLDKLDQELKEQQKELKNQEELSSLVWICTSTHSATKVLIIDAVQPGNILDSFTVCNSHVLCIASVPGARETDYPAGEDLSESGQVDKASLCGSMTSNSSAETDSLLGGITVVGCSAEGVTGAATSPSTNGASPVMDKPPEMEAENSEVDENVPTAEEATEATEGNAGSAEDTVDISQTGVYTEHVFTDPLGVQIPEDLSPVYQSSNDSDAYKDQISVLPNEQDLVREEAQKMSSLLPTMWLGAQNGCLYVHSSVAQWRKCLHSIKLKDSILSIVHVKGIVLVALADGTLAIFHRGVDGQWDLSNYHLLDLGRPHHSIRCMTVVHDKVWCGYRNKIYVVQPKAMKIEKSFDAHPRKESQVRQLAWVGDGVWVSIRLDSTLRLYHAHTYQHLQDVDIEPYVSKMLGTGKLGFSFVRITALMVSCNRLWVGTGNGVIISIPLTETNKTSGVPGNRPGSVIRVYGDENSDKVTPGTFIPYCSMAHAQLCFHGHRDAVKFFVAVPGQVISPQSSSSGTDLTGDKAGPSAQEPGSQTPLKSMLVISGGEGYIDFRMGDEGGESELLGEDLPLEPSVTKAERSHLIVWQVMYGNE

SEQ ID NO: 24072 - protein, 1311 aa, Homo sapiens
MELEDGVVYQEEPGGSGAVMSERVSGLAGSIYREFERLIGRYDEEVVKELMPLVVAVLENLDSVFAQDQEHQVELELLRDDNEQLITQYEREKALRKHAEEKFIEFEDSQEQEKKDLQTRVESLESQTRQLELKAKNYADQISRLEEREAELKKEYNALHQRHTEMIHNYMEHLERTKLHQLSGSDQLESTAHSRIRKERPISLGIFPLPAGDGLLTPDAQKGGETPGSEQWKFQELSQPRSHTSLKDELSDVSQGGSKATTPASTANSDVATIPTDTPLKEENEGFVKVTDAPNKSEISKHIEVQVAQETRNVSTGSAENEEKSEVQAIIESTPELDMDKDLSGYKGSSTPTKGIENKAFDRNTESLFEELSSAGSGLIGDVDEGADLLGMGREVENLILENTQLLETKNALNIVKNDLIAKVDELTCEKDVLQGELEAVKQAKLKLEEKNRELEEELRKARAEAEDARQKAKDDDDSDIPTAQRKRFTRVEMARVLMERNQYKERLMELQEAVRWTEMIRASRENPAMQEKKRSSIWQFVPTRFSRLFSSSSNTTKKPEPPVNLKYNAPTSHVTPSVKKRSSTLSQLPGDKSKAFDFLSEETEASLASRREQKREQYRQVKAHVQKEDGRVQAFGWSLPQKYKQVTNGQGENKMKNLPVPVYLRPLDEKDTSMKLWCAVGVNLSGGKTRDGGSVVGASVFYKDVAGLDTEGSKQRSASQSSLDKLDQELKEQQKELKNQEELSSLVWICTSTHSATKVLIIDAVQPGNILDSFTVCNSHVLCIASVPGARETDYPAGEDLSESGQVDKASLCGSMTSNSSAETDSLLGGITVVGCSAEGVTGAATSPSTNGASPVMDKPPEMEAENSEVDENVPTAEEATEATEGNAGSAEDTVDISQTGVYTEHVFTDPLGVQIPEDLSPVYQSSNDSDAYKDQISVLPNEQDLVREEAQKMSSLLPTMWLGAQNGCLYVHSSVAQWRKCLHSIKLKDSILSIVHVKGIVLVALADGTLAIFHRGVDGQWDLSNYHLLDLGRPHHSIRCMTVVHDKVWCGYRNKIYVVQPKAMKIEKSFDAHPRKESQVRQLAWVGDGVWVSIRLDSTLRLYHAHTYQHLQDVDIEPYVSKMLGTGKLGFSFVRITALMVSCNRLWVGTGNGVIISIPLTETNKTSGVPGNRPGSVIRVYGDENSDKVTPGTFIPYCSMAHAQLCFHGHRDAVKFFVAVPGQVISPQSSSSGTDLTGDKAGPSAQEPGSQTPLKSMLVISGGEGYIDFRMGDEGGESELLGEDLPLEPSVTKAERSHLIVWQVMYGNE

SEQ ID NO: 24073 - protein, 945 aa, Homo sapiens
MELEDGVVYQEEPGGSGAVMSERVSGLAGSIYREFERLIGRYDEEVVKELMPLVVAVLENLDSVFAQDQEHQVELELLRDDNEQLITQYEREKALRKHAEEKFIEFEDSQEQEKKDLQTRVESLESQTRQLELKAKNYADQISRLEEREAELKKEYNALHQRHTEMIHNYMEHLERTKLHQLSGSDQLESTAHSRIRKERPISLGIFPLPAGDGLLTPDAQKGGETPGSEQWKFQELSQPRSHTSLKVSNSPEPQKAVEQEDELSDVSQGGSKATTPASTANSDVATIPTDTPLKEENEGFVKVTDAPNKSEISKHIEVQVAQETRNVSTGSAENEEKSEVQAIIESTPELDMDKDLSGYKGSSTPTKGIENKAFDRNTESLFEELSSAGSGLIGDVDEGADLLGMGREVENLILENTQLLETKNALNIVKNDLIAKVDELTCEKDVLQGELEAVKQAKLKLEEKNRELEEELRKARAEAEDARQKAKDDDDSDIPTAQRKRFTRVEMARVLMERNQYKERLMELQEAVRWTEMIRASRENPAMQEKKRSSIWQFFSRLFSSSSNTTKKPEPPVNLKYNAPTSHVTPSVKKRSSTLSQLPGDKSKAFDFLSEETEASLASRREQKREQYRQVKAHVQKEDGRVQAFGWSLPQKYKQVTNGQGENKMKNLPVPVYLRPLDEKDTSMKLWCAVGVNLSGGKTRDGGSVVGASVFYKDVAGLDTEGSKQRSASQSSLDKLDQELKEQQKELKNQEELSSLVWICTSTHSATKVLIIDAVQPGNILDSFTVCNSHVLCIASVPGARETDYPAGEDLSESGQVDKASLCGSMTSNSSAETDSLLGGITVVGCSAEGVTGAATSPSTNGASPVMDKPPEMEAENSEVDENVPTAEEATEATEGNAGSAEDTVDISQTGVYTEHVFTDPLGVQIPEDLSPVYQSRYNNGSST

SEQ ID NO: 24074 - protein, 1307 aa, Homo sapiens
MELEDGVVYQEEPGGSGAVMSERVSGLAGSIYREFERLIGRYDEEVVKELMPLVVAVLENLDSVFAQDQEHQVELELLRDDNEQLITQYEREKALRKHAEEKFIEFEDSQEQEKKDLQTRVESLESQTRQLELKAKNYADQISRLEEREAELKKEYNALHQRHTEMIHNYMEHLERTKLHQLSGSDQLESTAHSRIRKERPISLGIFPLPAGDGLLTPDAQKGGETPGSEQWKFQELSQPRSHTSLKDELSDVSQGGSKATTPASTANSDVATIPTDTPLKEENEGFVKVTDAPNKSEISKHIEVQVAQETRNVSTGSAENEEKSEVQAIIESTPELDMDKDLSGYKGSSTPTKGIENKAFDRNTESLFEELSSAGSGLIGDVDEGADLLGMGREVENLILENTQLLETKNALNIVKNDLIAKVDELTCEKDVLQGELEAVKQAKLKLEEKNRELEEELRKARAEAEDARQKAKDDDDSDIPTAQRKRFTRVEMARVLMERNQYKERLMELQEAVRWTEMIRASRENPAMQEKKRSSIWQFFSRLFSSSSNTTKKPEPPVNLKYNAPTSHVTPSVKKRSSTLSQLPGDKSKAFDFLSEETEASLASRREQKREQYRQVKAHVQKEDGRVQAFGWSLPQKYKQVTNGQGENKMKNLPVPVYLRPLDEKDTSMKLWCAVGVNLSGGKTRDGGSVVGASVFYKDVAGLDTEGSKQRSASQSSLDKLDQELKEQQKELKNQEELSSLVWICTSTHSATKVLIIDAVQPGNILDSFTVCNSHVLCIASVPGARETDYPAGEDLSESGQVDKASLCGSMTSNSSAETDSLLGGITVVGCSAEGVTGAATSPSTNGASPVMDKPPEMEAENSEVDENVPTAEEATEATEGNAGSAEDTVDISQTGVYTEHVFTDPLGVQIPEDLSPVYQSSNDSDAYKDQISVLPNEQDLVREEAQKMSSLLPTMWLGAQNGCLYVHSSVAQWRKCLHSIKLKDSILSIVHVKGIVLVALADGTLAIFHRGVDGQWDLSNYHLLDLGRPHHSIRCMTVVHDKVWCGYRNKIYVVQPKAMKIEKSFDAHPRKESQVRQLAWVGDGVWVSIRLDSTLRLYHAHTYQHLQDVDIEPYVSKMLGTGKLGFSFVRITALMVSCNRLWVGTGNGVIISIPLTETNKTSGVPGNRPGSVIRVYGDENSDKVTPGTFIPYCSMAHAQLCFHGHRDAVKFFVAVPGQVISPQSSSSGTDLTGDKAGPSAQEPGSQTPLKSMLVISGGEGYIDFRMGDEGGESELLGEDLPLEPSVTKAERSHLIVWQVMYGNE

SEQ ID NO: 24075 - protein, 931 aa, Homo sapiens
MELEDGVVYQEEPGGSGAVMSERVSGLAGSIYREFERLIGRYDEEVVKELMPLVVAVLENLDSVFAQDQEHQVELELLRDDNEQLITQYEREKALRKHAEEKFIEFEDSQEQEKKDLQTRVESLESQTRQLELKAKNYADQISRLEEREAELKKEYNALHQRHTEMIHNYMEHLERTKLHQLSGSDQLESTAHSRIRKERPISLGIFPLPAGDGLLTPDAQKGGETPGSEQWKFQELSQPRSHTSLKDELSDVSQGGSKATTPASTANSDVATIPTDTPLKEENEGFVKVTDAPNKSEISKHIEVQVAQETRNVSTGSAENEEKSEVQAIIESTPELDMDKDLSGYKGSSTPTKGIENKAFDRNTESLFEELSSAGSGLIGDVDEGADLLGMGREVENLILENTQLLETKNALNIVKNDLIAKVDELTCEKDVLQGELEAVKQAKLKLEEKNRELEEELRKARAEAEDARQKAKDDDDSDIPTAQRKRFTRVEMARVLMERNQYKERLMELQEAVRWTEMIRASRENPAMQEKKRSSIWQFFSRLFSSSSNTTKKPEPPVNLKYNAPTSHVTPSVKKRSSTLSQLPGDKSKAFDFLSEETEASLASRREQKREQYRQVKAHVQKEDGRVQAFGWSLPQKYKQVTNGQGENKMKNLPVPVYLRPLDEKDTSMKLWCAVGVNLSGGKTRDGGSVVGASVFYKDVAGLDTEGSKQRSASQSSLDKLDQELKEQQKELKNQEELSSLVWICTSTHSATKVLIIDAVQPGNILDSFTVCNSHVLCIASVPGARETDYPAGEDLSESGQVDKASLCGSMTSNSSAETDSLLGGITVVGCSAEGVTGAATSPSTNGASPVMDKPPEMEAENSEVDENVPTAEEATEATEGNAGSAEDTVDISQTGVYTEHVFTDPLGVQIPEDLSPVYQSRYNNGSST

SEQ ID NO: 24076 - protein, 1177 aa, Homo sapiens
MSPGCMLLFVFGFVGGAVVINSAILVSLSVLLLVHFSISTGVPALTQNLPRILRKERPISLGIFPLPAGDGLLTPDAQKGGETPGSEQWKFQELSQPRSHTSLKDELSDVSQGGSKATTPASTANSDVATIPTDTPLKEENEGFVKVTDAPNKSEISKHIEVQVAQETRNVSTGSAENEEKSEVQAIIESTPELDMDKDLSGYKGSSTPTKGIENKAFDRNTESLFEELSSAGSGLIGDVDEGADLLGMGREVENLILENTQLLETKNALNIVKNDLIAKVDELTCEKDVLQGELEAVKQAKLKLEEKNRELEEELRKARAEAEDARQKAKDDDDSDIPTAQRKRFTRVEMARVLMERNQYKERLMELQEAVRWTEMIRASRENPAMQEKKRSSIWQFFSRLFSSSSNTTKKPEPPVNLKYNAPTSHVTPSVKKRSSTLSQLPGDKSKAFDFLSEETEASLASRREQKREQYRQVKAHVQKEDGRVQAFGWSLPQKYKQVTNGQGENKMKNLPVPVYLRPLDEKDTSMKLWCAVGVNLSGGKTRDGGSVVGASVFYKDVAGLDTEGSKQRSASQSSLDKLDQELKEQQKELKNQEELSSLVWICTSTHSATKVLIIDAVQPGNILDSFTVCNSHVLCIASVPGARETDYPAGEDLSESGQVDKASLCGSMTSNSSAETDSLLGGITVVGCSAEGVTGAATSPSTNGASPVMDKPPEMEAENSEVDENVPTAEEATEATEGNAGSAEDTVDISQTGVYTEHVFTDPLGVQIPEDLSPVYQSSNDSDAYKDQISVLPNEQDLVREEAQKMSSLLPTMWLGAQNGCLYVHSSVAQWRKCLHSIKLKDSILSIVHVKGIVLVALADGTLAIFHRGVDGQWDLSNYHLLDLGRPHHSIRCMTVVHDKVWCGYRNKIYVVQPKAMKIEKSFDAHPRKESQVRQLAWVGDGVWVSIRLDSTLRLYHAHTYQHLQDVDIEPYVSKMLGTGKLGFSFVRITALMVSCNRLWVGTGNGVIISIPLTETVILHQGRLLGLRANKTSGVPGNRPGSVIRVYGDENSDKVTPGTFIPYCSMAHAQLCFHGHRDAVKFFVAVPGQVISPQSSSSGTDLTGDKAGPSAQEPGSQTPLKSMLVISGGEGYIDFRMGDEGGESELLGEDLPLEPSVTKAERSHLIVWQVMYGNE

SEQ ID NO: 24077 - protein, 579 aa, Homo sapiens
MRRPPGNGEAASEGPGGWGLWGVQESRRLCCAGHDRCKQALLQIGINMMALPGGRHLDSVTLPGQRLHLMQVDSVQRWMEDLKLMTECECMCVLQAKPISLEEDAQGDLILAGGPGPGDPLQLLLKRGWVISTELRRIGQKLAQDRWARVHSMSVRLTCHARSMVSEYSAVSRNSLKEMGEIEKLLMEKCSELSAVTERCLQVENEHVLKSMKACVSETLSMLGQHFGQLLELALTREVQALVRKIDASDNIYTTESTTGNLFSLTQEGAPLCRIIAKEGGVVALFKVCRQDSFRCLYPQALRTLASICCVEEGVHQLEKVDGVLCLADILTDNSHSEATRAEAAAVVAQVTSPHLPVTQHLSSFLESMEEIVTALVKLCQEASSGEVFLLASAALANITFFDTMACEMLLQLNAIRVLLEACSDKQRVDTPYTRDQIVTILANMSVLEQCASDIIQENGVQLIMGMLSEKPRSGTPAEVAACERVQQKAAVTLARLSRDPDVAREAVRLSCMSRLIELCRSPSERNSSDAVLVACLAALRRLAGVCPEGLQDSDFQQLVQPRLVDSFLLCSNMEESFV

SEQ ID NO: 24078 - protein, 532 aa, Homo sapiens
MMALPGGRHLDSVTLPGQRLHLMQVDSVQRWMEDLKLMTECECMCVLQAKPISLEEDAQGDLILAGGPGPGDPLQLLLKRGWVISTELRRIGQKLAQDRWARVHSMSVRLTCHARSMVSEYSAVSRNSLKEMGEIEKLLMEKCSELSAVTERCLQVENEHVLKSMKACVSETLSMLGQHFGQLLELALTREVQALVRKIDASDNIYTTESTTGNLFSLTQEGAPLCRIIAKEGGVVALFKVCRQDSFRCLYPQALRTLASICCVEEGVHQLEKVDGVLCLADILTDNSHSEATRAEAAAVVAQVTSPHLPVTQHLSSFLESMEEIVTALVKLCQEASSGEVFLLASAALANITFFDTMACEMLLQLNAIRVLLEACSDKQRVDTPYTRDQIVTILANMSVLEQCASDIIQENGVQLIMGMLSEKPRSGTPAEVAACERVQQKAAVTLARLSRDPDVAREAVRLSCMSRLIELCRSPSERNSSDAVLVACLAALRRLAGVCPEGLQDSDFQQLVQPRLVDSFLLCSNMEESFV

SEQ ID NO: 24079 - protein, 334 aa, Homo sapiens
MRREWEARMETHSPIWQNLLMRLDNCLALRLQSPLVQALVRKIDASDNIYTTESTTGNLFSLTQEGAPLCRIIAKVDGVLCLADILTDNSHSEATRAEAAAVVAQVTSPHLPVTQHLSSFLESMEEIVTALVKLCQEASSGEVFLLASAALANITFFDTMACEMLLQLNAIRVLLEACSDKQRVDTPYTRDQIVTILANMSVLEQCASDIIQENGVQLIMGMLSEKPRSGTPAEVAACERVQQKAAVTLARLSRDPDVAREAVRLSCMSRLIELCRSPSERNSSDAVLVACLAALRRLAGVCPEGLQDSDFQQLVQPRLVDSFLLCSNMEESFV

SEQ ID NO: 24080 - protein, 490 aa, Homo sapiens
MMALPGGRHLDSVTLPGQRLHLMQVDSVQRWMEDLKLMTECECMCVLQAKPISLEEDAQGDLILAGGPGPGDPLQLLLKRGWVISTELRRIGQKLAQDRWARVHSMSVRLTCHARSMVSEYSAVSRNSLKEMGEIEKLLMEKCSELSAVTERCLQVENEHVLKSMKACVSETLSMLGQHFGQLLELALTREVQALVRKIDASDNIYTTESTTGNLFSLTQEGAPLCRIIAKVDGVLCLADILTDNSHSEATRAEAAAVVAQVTSPHLPVTQHLSSFLESMEEIVTALVKLCQEASSGEVFLLASAALANITFFDTMACEMLLQLNAIRVLLEACSDKQRVDTPYTRDQIVTILANMSVLEQCASDIIQENGVQLIMGMLSEKPRSGTPAEVAACERVQQKAAVTLARLSRDPDVAREAVRLSCMSRLIELCRSPSERNSSDAVLVACLAALRRLAGVCPEGLQDSDFQQLVQPRLVDSFLLCSNMEESFV

SEQ ID NO: 24081 - protein, 567 aa, Homo sapiens
MMALPGGRHLDSVTLPGQRLHLMQVDSVQRWMEDLKLMTECECMCVLQAKPISLEEDAQGDLILAGGPGPGDPLQLLLKRGWVISTELRRIGQKLAQDRWARVHSMSVRLTCHARSMVSEYSAVSRNSLKEMGEIEKLLMEKCSELSAVTERCLQVENEHVLKSMKACVSETLSMLGQHFGQLLELALTREVQVESHSVTRLECSGAISAQCNLRLPGSSDSPASASQALVRKIDASDNIYTTESTTGNLFSLTQEGAPLCRIIAKEGGVVALFKVCRQDSFRCLYPQALRTLASICCVEEGVHQLEKVDGVLCLADILTDNSHSEATRAEAAAVVAQVTSPHLPVTQHLSSFLESMEEIVTALVKLCQEASSGEVFLLASAALANITFFDTMACEMLLQLNAIRVLLEACSDKQRVDTPYTRDQIVTILANMSVLEQCASDIIQENGVQLIMGMLSEKPRSGTPAEVAACERVQQKAAVTLARLSRDPDVAREAVRLSCMSRLIELCRSPSERNSSDAVLVACLAALRRLAGVCPEGLQDSDFQQLVQPRLVDSFLLCSNMEESFV

SEQ ID NO: 24082 - protein, 520 aa, Homo sapiens
MMALPGGRHLDSVTLPGQRLHLMQVDSVQRWMEDLKLMTECECMCVLQAKPISLEEDAQGDLILAGGPGPGDPLQLLLKRGWVISTELRRIGQKLAQDRWARVHSMSVRLTCHARSMVSEYSAVSRNSLKEMGEIEKLLMEKCSELSAVTERCLQVENEHVLKSMKACVSETLSMLGQHFGQLLELALTREVQALVRKIDASDNIYTTESTTGNLFSLTQEGAPLCRIIAKEGGVVALFKVCRQDSFRCLYPQALRTLASICCVEEGVHQLEKVDGVLCLADILTDNSHSEATRAEAAAVVAQVTSPHLPVTQHLSSFLESMEEIVTALVKLCQEASSGEVFLLASAALANITFFDTMACEMLLQLNAIRVLLEACSDKQRVDTPYTRDQIVTILANMSVLEQCASDIIQENGVQLIMGMLSEKPRSGTPAEVAACERVQQKAAVTLARLSRDPDVAREAVRLSCMSRLIELCRSPSERNSSDAVLVACLAMGIQLQVKKTNISALLLWFLFWHIQGCSA

SEQ ID NO: 24083 - protein, 452 aa, Homo sapiens
MACRSCVVGFSSLSSCEVTPVGSPRPGTSGWDSCRAPGPGFSSRSLTGCWSAGTISKVTVNPGLLVPLDVKLDPAVQQLKNQEKEEMKALNDKFASLIGKVQALEQRNQLLETRWSFLQGQDSAIFDLGHLYEEYQGRLQEELRKVSQERGQLEANLLQVLEKVEEFRIRYEDEISKRTDMEFTFVQLKKDLDAECLHRTELETKLKSLESFVELMKTIYEQELKDLAAQVKDVSVTVGMDSRCHIDLSGIVEEVKAQYDAVAARSLEEAEAYSRSQLEEQAARSAEYGSSLQSSRSEIADLNVRIQKLRSQILSVKSHCLKLEENIKTAEEQGELAFQDAKTKLAQLEAALQQAKQDMARQLRKYQELMNVKLALDIEIATYRKLVEGEEGRMDSPSATVVSAVQSRCKTAASRSGLSKAPSRKKKGSKGPVIKITEMSEKYFSQESEVSE

SEQ ID NO: 24084 - protein, 422 aa, Homo sapiens
MACRSCVVGFSSLSSCEVTPVGSPRPGTSGWDSCRAPGPGFSSRSLTGCWSAGTISKVTVNPGLLVPLDVKLDPAVQQLKNQEKEEMKALNDKFASLIGKVQALEQRNQLLETRWSFLQGQDSAIFDLGHLYEEYQGRLQEELRKVSQERGQLEANLLQVLEKVEEFRIRYEDEISKRTDMEFTFVQLKKDLDAECLHRTELETKLKSLESFVELMKTIYEQELKDLAAQVKDVSVTVGMDSRCHIDLSGIVEEVKAQYDAVAARSLEEAEAYSRSQLEEQAARSAEYGSSLQSSRSEIADLNVRIQKLRSQILSVKSHCLKLEENIKTAEEQGELAFQDAKTKLAQLEAALQQAKQDMARQLRKYQELMNVKLALDIEIATYRKLVEGEEGRMDSPSATVVSAVQSRCKTAPSLPYPLCSL

SEQ ID NO: 24085 - protein, 487 aa, Homo sapiens
MSCHFPGSPPWALAGQPGASAPDWSTPDPFAAFLLSQVQALEQRNQLLETRWSFLQGQDSAIFDLGHLYEEYQGRLQEELRKVSQERGQLEANLLQVLEKVEEFRIRYEDEISKRTDMEFTFVQLKKVACPACPRGSFLMGPGPSFPPDILLSFMPNQSPQRLKSQDQQTDRGIPPSPSSSFFEALSQISSGITPTLTQEAAPQPTPALGPSIPSPTTHHCCQPQDLDAECLHRTELETKLKSLESFVELMKTIYEQELKDLAAQVKDVSVTVGMDSRCHIDLSGIVEEVKAQYDAVAARSLEEAEAYSRSQLEEQAARSAEYGSSLQSSRSEIADLNVRIQKLRSQILSVKSHCLKLEENIKTAEEQGELAFQDAKTKLAQLEAALQQAKQDMARQLRKYQELMNVKLALDIEIATYRKLVEGEEGRMDSPSATVVSAVQSRCKTAASRSGLSKAPSRKKKGSKGPVIKITEMSEKYFSQESEVSE

SEQ ID NO: 24086 - protein, 798 aa, Homo sapiens
MVALPMVLVLLLVLSRGESELDAKIPSTGDATEWRNPHLSMLGSCQPAPSCQKCILSHPSCAWCKQLNFTASGEAEARRCARREELLARGCPLEELEEPRGQQEVLQDQPLSQGARGEGATQLAPQRVRVTLRPGEPQQLQVRFLRAEGYPVDLYYLMDLSYSMKDDLERVRQLGHALLVRLQEVTHSVRIGFGSFVDKTVLPFVSTVPSKLRHPCPTRLERCQSPFSFHHVLSLTGDAQAFEREVGRQSVSGNLDSPEGGFDAILQAALCQEQIGWRNVSRLLVFTSDDTFHTAGDGKLGGIFMPSDGHCHLDSNGLYSRSTEFDYPSVGQVAQALSAANIQPIFAVTSAALPVYQELSKLIPKSAVGELSEDSSNVVQLIMDAYNSLSSTVTLEHSSLPPGVHISYESQCEGPEKREGKAEDRGQCNHVRINQTVTFWVSLQATHCLPEPHLLRLRALGFSEELIVELHTLCDCNCSDTQPQAPHCSDGQGHLQCGVCSCAPGRLGRLCECSVAELSSPDLESGCRAPNGTGPLCSGKGHCQCGRCSCSGQSSGHLCECDDASCERHEGILCGGFGRCQCGVCHCHANRTGRACECSGDMDSCISPEGGLCSGHGRCKCNRCQCLDGYYGALCDQCPGCKTPCERHRDCAECGAFRTGPLATNCSTACAHTNVTLALAPILDDGWCKERTLDNQLFFFLVEDDARGTVVLRVRPQEKGADHTQAIVLGCVGGIVAVGLGLVLAYRLSVEIYDRREYSRFEKEQQQLNWKQDSNPLYKSAITTTINPRFQEADSPTL

SEQ ID NO: 24087 - protein, 650 aa, Homo sapiens
MVALPMVLVLLLVLSRGESELDAKIPSTGDATEWRNPHLSMLGSCQPAPSCQKCILSHPSCAWCKQLNFTASGEAEARRCARREELLARGCPLEELEEPRGQQEVLQDQPLSQGARGEGATQLAPQRVRVTLRPGEPQQLQVRFLRAEGYPVDLYYLMDLSYSMKDDLERVRQLGHALLVRLQEVTHSVRIGFGSFVDKTVLPFVSTVPSKLRHPCPTRLERCQSPFSFHHVLSLTGDAQAFEREVGRQSVSGNLDSPEGGFDAILQAALCQEQIGWRNVSRLLVFTSDDTFHTAGDGKLGGIFMPSDGHCHLDSNGLYSRSTEFDYPSVGQVAQALSAANIQPIFAVTSAALPVYQELSKLIPKSAVGELSEDSSNVVQLIMDAYNSLSSTVTLEHSSLPPGVHISYESQCEGPEKREGKAEDRGQCNHVRINQTVTFWVSLQATHCLPEPHLLRLRALGFSEELIVELHTLCDCNCSDTQPQAPHCSDGQGHLQCGVCRDCAECGAFRTGPLATNCSTACAHTNVTLALAPILDDGWCKERTLDNQLFFFLVEDDARGTVVLRVRPQEKGADHTQAIVLGCVGGIVAVGLGLVLAYRLSVEIYDRREYSRFEKEQQQLNWKQDSNPLYKSAITTTINPRFQEADSPTL

SEQ ID NO: 24088 - protein, 472 aa, Homo sapiens
MTTCSRQFTSSSSMKGSCGIGGGIGGGSSRISSVLAGGSCRAPSTYGGGLSVSSSRFSSGGACGLGGGYGGGFSSSSSSFGSGFGGGYGGGLGAGLGGGFGGGFAGGDGLLVGSEKVTMQNLNDRLASYLDKVRALEEANADLEVKIRDWYQRQRPAEIKDYSPYFKTIEDLRNKILTATVDNANVLLQIDNARLAADDFRTKYETELNLRMSVEADINGLRRVLDELTLARADLEMQIESLKEELAYLKKNHEEEMNALRGQVGGDVNVEMDAAPGVDLSRILNEMRDQYEKMAEKNRKDAEEWFFTKTEELNREVATNSELVQSGKSEISELRRTMQNLEIELQSQLSMKASLENSLEETKGRYCMQLAQIQEMIGSVEEQLAQLRCEMEQQNQEYKILLDVKTRLEQEIATYRRLLEGEDAHLSSSQFSSGSQSSRDVTSSSRQIRTKVMDVHDGKVVSTHEQVLRTKN

SEQ ID NO: 24089 - protein, 963 aa, Homo sapiens
MAAHLKKRVYEEFTKVVQPQEEIATKKLRLTKPSKSAALHIDLCKATSPADALQYLLQFARKPVEAESVEGVVRILLEHYYKENDPSVRLKIASLLGLLSKTAGFSPDCIMDDAINILQNEKSHQVLAQLLDTLLAIGTKLPENQAIQMRLVDVACKHLTDTSHGVRNKCLQLLGNLGSLEKSVTKDAEGLAARDVQKIIGDYFSDQDPRVRTAAIKAMLQLHERGLKLHQTIYNQACKLLSDDYEQVRSAAVQLIWVVSQLYPESIVPIPSSNEEIRLVDDAFGKICHMVSDGSWVVRVQAAKLLGSMEQVSSHFLEQTLDKKLMSDLRRKRTAHERAKELYSSGEFSSGRKWGDDAPKEEVDTGAVNLIESGACGAFVHGLEDEMYEVRIAAVEALCMLAQSSPSFAEKCLDFLVDMFNDEIEEVRLQSIHTMRKISNNITLREDQLDTVLAVLEDSSRDIREALHELLCCTNVSTKEGIHLALVELLKNLTKYPTDRDSIWKCLKFLGSRHPTLVLPLVPELLSTHPFFDTAEPDMDDPAYIAVLVLIFNAAKTCPTMPALFSDHTFRHYAYLRDSLSHLVPALRLPGRKLVSSAVSPSIIPQEDPSQQFLQQSLERVYSLQHLDPQGAQELLEFTIRDLQRLGELQSELAGVADFSATYLRCQLLLIKALQEKLWNVAAPLYLKQSDLASAAAKQIMEETYKMEFMYSGVENKQVVIIHHMRLQAKALQLIVTARTTRGLDPLFGMCEKFLQEVDFFQRYFIADLPHLQDSFVDKLLDLMPRLMTSKPAEVVKILQTMLRQSAFLHLPLPEQIHKASATIIEPAGESDNPLRFTSGLVVALDVDATLEHVQDPQNTVKVQVLYPDGQAQMIHPKPADFRNPGPGRHRLITQVYLSHTAWTEACQVEVRLLLAYNSSARIPKCPWMEGGEMSPQVETSIEGTIPFSKPVKVYIMPKPARR

SEQ ID NO: 24090 - protein, 505 aa, Homo sapiens
MAAHLKKRVYEEFTKVVQPQEEIATKKLRLTKPSKSAALHIDLCKATSPADALQYLLQFARKPVEAESVEGVVRILLEHYYKENDPSVRLKIASLLGLLSKTAGFSPDCIMDDAINILQNEKSHQVLAQLLDTLLAIGTKLPENQAIQMRLVDVACKHLTDTSHGVRNKCLQLLGNLGSLEKSVTKDAEGLAARDVQKIIGDYFSDQDPRVRTAAIKAMLQLHERGLKLHQTIYNQACKLLSDDYEQVRSAAVQLIWVVSQLYPESIVPIPSSNEEIRLVDDAFGKICHMVSDGSWVVRVQAAKLLGSMEQVSSHFLEQTLDKKLMSDLRRKRTAHERAKELYSSGEFSSGRKWGDDAPKEEVDTGAVNLIESGACGAFVHGLEDEMYEVRIAAVEALCMLAQSSPSFAEKCLDFLVDMFNDEIEEVRLQSIHTMRKISNNITLREDQLDTVLAVLEDSSRDIREALHELLCCTNVSTKEGIHLALVELLKNLTKYPTDRDSIWK

SEQ ID NO: 24091 - protein, 510 aa, Homo sapiens
MPSTSCRMKHLTDTSHGVRNKCLQLLGNLGSLEKSVTKDAEGLAARDVQKIIGDYFSDQDPRVRTAAIKAMLQLHERGLKLHQTIYNQACKLLSDDYEQVRSAAVQLIWVVSQLYPESIVPIPSSNEEIRLVDDAFGKICHMVSDGSWVVRVQAAKLLGSMEQVSSHFLEQTLDKKLMSDLRRKRTAHERAKELYSSGEFSSGRKWGDDAPKEEVDTGAVNLIESGACGAFVHGLEDEMYEVRIAAVEALCMLAQSSPSFAEKCLDFLVDMFNDEIEEVRLQSIHTMRKISNNITLREDQLDTVLAVLEDSSRDIREALHELLCCTNVSTKEGIHLALVELLKNLTKYPTDRDSIWKCLKFLGSRHPTLVLPLVPELLSTHPFFDTAEPDMDDPAYIAVLVLIFNAAKTCPTMPALFSDHTFRHYAYLRDSLSHLVPALRLPGRKLVSSAVSPSIIPQEDPSQQFLQQSLERVYSLQHLDPQGAQELLEFTIRVEVSPWWPGWSQTPELK

SEQ ID NO: 24092 - protein, 667 aa, Homo sapiens
MHHQQRMAALGTDKELSDLLDFSAMFSPPVSSGKNGPTSLASGHFTGSNVEDRSSSGSWGNGGHPSPSRNYGDGTPYDHMTSRDLGSHDNLSPPFVNSRIQSKTERGSYSSYGRESNLQGCHQQSLLGGDMDMGNPGTLSPTKPGSQYYQYSSNNPRRRPLHSSAMEVQTKKVRKVPPGLPSSVYAPSASTADYNRDSPGYPSSKPATSTFPSSFFMQDGHHSSDPWSSSSGMNQPGYAGMLGNSSHIPQSSSYCSLHPHERLSYPSHSSADINSSLPPMSTFHRSGTNHYSTSSCTPPANGTDSIMANRGSGAAGSSQTGDALGKALASIYSPDHTNNSFSSNPSTPVGSPPSLSAGTAVWSRNGGQASSSPNYEGPLHSLQSRIEDRLERLDDAIHVLRNHAVGPSTAMPGGHGDMHGIIGPSHNGAMGGLGSGYGTGLLSANRHSLMVGTHREDGVALRGSHSLLPNQVPVPQLPVQSATSPDLNPPQDPYRGMPPGLQGQSVSSGSSEIKSDDEGDENLQDTKSSEDKKLDDDKKDIKSITSNNDDEDLTPEQKAEREKERRMANNARERLRVRDINEAFKELGRMVQLHLKSDKPQTKLLILHQAVAVILSLEQQVRERNLNPKAACLKRREEEKVSSEPPPLSLAGPHPGMGDASNHMGQM

SEQ ID NO: 24093 - protein, 511 aa, Homo sapiens
MYCAYTIPGMGGNSLMYYYNGKAVYAPSASTADYNRDSPGYPSSKPATSTFPSSFFMQDGHHSSDPWSSSSGMNQPGYAGMLGNSSHIPQSSSYCSLHPHERLSYPSHSSADINSSLPPMSTFHRSGTNHYSTSSCTPPANGTDSIMANRGSGAAGSSQTGDALGKALASIYSPDHTNNSFSSNPSTPVGSPPSLSAGTAVWSRNGGQASSSPNYEGPLHSLQSRIEDRLERLDDAIHVLRNHAVGPSTAMPGGHGDMHGIIGPSHNGAMGGLGSGYGTGLLSANRHSLMVGTHREDGVALRGSHSLLPNQVPVPQLPVQSATSPDLNPPQDPYRGMPPGLQGQSVSSGSSEIKSDDEGDENLQDTKSSEDKKLDDDKKDIKSITRSRSSNNDDEDLTPEQKAEREKERRMANNARERLRVRDINEAFKELGRMVQLHLKSDKPQTKLLILHQAVAVILSLEQQVRERNLNPKAACLKRREEEKVSSEPPPLSLAGPHPGMGDASNHMGQM

SEQ ID NO: 24094 - protein, 671 aa, Homo sapiens
MHHQQRMAALGTDKELSDLLDFSAMFSPPVSSGKNGPTSLASGHFTGSNVEDRSSSGSWGNGGHPSPSRNYGDGTPYDHMTSRDLGSHDNLSPPFVNSRIQSKTERGSYSSYGRESNLQGCHQQSLLGGDMDMGNPGTLSPTKPGSQYYQYSSNNPRRRPLHSSAMEVQTKKVRKVPPGLPSSVYAPSASTADYNRDSPGYPSSKPATSTFPSSFFMQDGHHSSDPWSSSSGMNQPGYAGMLGNSSHIPQSSSYCSLHPHERLSYPSHSSADINSSLPPMSTFHRSGTNHYSTSSCTPPANGTDSIMANRGSGAAGSSQTGDALGKALASIYSPDHTNNSFSSNPSTPVGSPPSLSAGTAVWSRNGGQASSSPNYEGPLHSLQSRIEDRLERLDDAIHVLRNHAVGPSTAMPGGHGDMHGIIGPSHNGAMGGLGSGYGTGLLSANRHSLMVGTHREDGVALRGSHSLLPNQVPVPQLPVQSATSPDLNPPQDPYRGMPPGLQGQSVSSGSSEIKSDDEGDENLQDTKSSEDKKLDDDKKDIKSITRSRSSNNDDEDLTPEQKAEREKERRMANNARERLRVRDINEAFKELGRMVQLHLKSDKPQTKLLILHQAVAVILSLEQQVRERNLNPKAACLKRREEEKVSSEPPPLSLAGPHPGMGDASNHMGQM

SEQ ID NO: 24095 - protein, 611 aa, Homo sapiens
MHHQQRMAALGTDKELSDLLDFSAMFSPPVSSGKNGPTSLASGHFTGSNVEDRSSSGSWGNGGHPSPSRNYGDGTPYDHMTSRDLGSHDNLSPPFVNSRIQSKTERGSYSSYGRESNLQGCHQVYAPSASTADYNRDSPGYPSSKPATSTFPSSFFMQDGHHSSDPWSSSSGMNQPGYAGMLGNSSHIPQSSSYCSLHPHERLSYPSHSSADINSSLPPMSTFHRSGTNHYSTSSCTPPANGTDSIMANRGSGAAGSSQTGDALGKALASIYSPDHTNNSFSSNPSTPVGSPPSLSAGTAVWSRNGGQASSSPNYEGPLHSLQSRIEDRLERLDDAIHVLRNHAVGPSTAMPGGHGDMHGIIGPSHNGAMGGLGSGYGTGLLSANRHSLMVGTHREDGVALRGSHSLLPNQVPVPQLPVQSATSPDLNPPQDPYRGMPPGLQGQSVSSGSSEIKSDDEGDENLQDTKSSEDKKLDDDKKDIKSITRSRSSNNDDEDLTPEQKAEREKERRMANNARERLRVRDINEAFKELGRMVQLHLKSDKPQTKLLILHQAVAVILSLEQQVRERNLNPKAACLKRREEEKVSSEPPPLSLAGPHPGMGDASNHMGQM

SEQ ID NO: 24096 - protein, 607 aa, Homo sapiens
MHHQQRMAALGTDKELSDLLDFSAMFSPPVSSGKNGPTSLASGHFTGSNVEDRSSSGSWGNGGHPSPSRNYGDGTPYDHMTSRDLGSHDNLSPPFVNSRIQSKTERGSYSSYGRESNLQGCHQVYAPSASTADYNRDSPGYPSSKPATSTFPSSFFMQDGHHSSDPWSSSSGMNQPGYAGMLGNSSHIPQSSSYCSLHPHERLSYPSHSSADINSSLPPMSTFHRSGTNHYSTSSCTPPANGTDSIMANRGSGAAGSSQTGDALGKALASIYSPDHTNNSFSSNPSTPVGSPPSLSAGTAVWSRNGGQASSSPNYEGPLHSLQSRIEDRLERLDDAIHVLRNHAVGPSTAMPGGHGDMHGIIGPSHNGAMGGLGSGYGTGLLSANRHSLMVGTHREDGVALRGSHSLLPNQVPVPQLPVQSATSPDLNPPQDPYRGMPPGLQGQSVSSGSSEIKSDDEGDENLQDTKSSEDKKLDDDKKDIKSITSNNDDEDLTPEQKAEREKERRMANNARERLRVRDINEAFKELGRMVQLHLKSDKPQTKLLILHQAVAVILSLEQQVRERNLNPKAACLKRREEEKVSSEPPPLSLAGPHPGMGDASNHMGQM

SEQ ID NO: 24097 - protein, 507 aa, Homo sapiens
MYCAYTIPGMGGNSLMYYYNGKAVYAPSASTADYNRDSPGYPSSKPATSTFPSSFFMQDGHHSSDPWSSSSGMNQPGYAGMLGNSSHIPQSSSYCSLHPHERLSYPSHSSADINSSLPPMSTFHRSGTNHYSTSSCTPPANGTDSIMANRGSGAAGSSQTGDALGKALASIYSPDHTNNSFSSNPSTPVGSPPSLSAGTAVWSRNGGQASSSPNYEGPLHSLQSRIEDRLERLDDAIHVLRNHAVGPSTAMPGGHGDMHGIIGPSHNGAMGGLGSGYGTGLLSANRHSLMVGTHREDGVALRGSHSLLPNQVPVPQLPVQSATSPDLNPPQDPYRGMPPGLQGQSVSSGSSEIKSDDEGDENLQDTKSSEDKKLDDDKKDIKSITSNNDDEDLTPEQKAEREKERRMANNARERLRVRDINEAFKELGRMVQLHLKSDKPQTKLLILHQAVAVILSLEQQVRERNLNPKAACLKRREEEKVSSEPPPLSLAGPHPGMGDASNHMGQM

SEQ ID NO: 24098 - protein, 596 aa, Homo sapiens
MKDIFFQFIIARVRKCYSLSCLHTLPVVPTLRKTERGSYSSYGRESNLQGCHQSLLGGDMDMGNPGTLSPTKPGSQYYQYSSNNPRRRPLHSSAMEVQTKKVRKVPPGLPSSVYAPSASTADYNRDSPGYPSSKPATSTFPSSFFMQDGHHSSDPWSSSSGMNQPGYAGMLGNSSHIPQSSSYCSLHPHERLSYPSHSSADINSSLPPMSTFHRSGTNHYSTSSCTPPANGTDSIMANRGSGAAGSSQTGDALGKALASIYSPDHTNNSFSSNPSTPVGSPPSLSAGTAVWSRNGGQASSSPNYEGPLHSLQSRIEDRLERLDDAIHVLRNHAVGPSTAMPGGHGDMHGIIGPSHNGAMGGLGSGYGTGLLSANRHSLMVGTHREDGVALRGSHSLLPNQVPVPQLPVQSATSPDLNPPQDPYRGMPPGLQGQSVSSGSSEIKSDDEGDENLQDTKSSEDKKLDDDKKDIKSITSNNDDEDLTPEQKAEREKERRMANNARERLRVRDINEAFKELGRMVQLHLKSDKPQTKLLILHQAVAVILSLEQQVRERNLNPKAACLKRREEEKVSSEPPPLSLAGPHPGMGDASNHMGQM

SEQ ID NO: 24099 - protein, 507 aa, Homo sapiens
MKFKQCRCSDTGLCCLDHEGKAEVYAPSASTADYNRDSPGYPSSKPATSTFPSSFFMQDGHHSSDPWSSSSGMNQPGYAGMLGNSSHIPQSSSYCSLHPHERLSYPSHSSADINSSLPPMSTFHRSGTNHYSTSSCTPPANGTDSIMANRGSGAAGSSQTGDALGKALASIYSPDHTNNSFSSNPSTPVGSPPSLSAGTAVWSRNGGQASSSPNYEGPLHSLQSRIEDRLERLDDAIHVLRNHAVGPSTAMPGGHGDMHGIIGPSHNGAMGGLGSGYGTGLLSANRHSLMVGTHREDGVALRGSHSLLPNQVPVPQLPVQSATSPDLNPPQDPYRGMPPGLQGQSVSSGSSEIKSDDEGDENLQDTKSSEDKKLDDDKKDIKSITSNNDDEDLTPEQKAEREKERRMANNARERLRVRDINEAFKELGRMVQLHLKSDKPQTKLLILHQAVAVILSLEQQVRERNLNPKAACLKRREEEKVSSEPPPLSLAGPHPGMGDASNHMGQM

SEQ ID NO: 24100 - protein, 537 aa, Homo sapiens
MDMGNPGTLSPTKPGSQYYQYSSNNPRRRPLHSSAMEVQTKKVRKVPPGLPSSVYAPSASTADYNRDSPGYPSSKPATSTFPSSFFMQDGHHSSDPWSSSSGMNQPGYAGMLGNSSHIPQSSSYCSLHPHERLSYPSHSSADINSSLPPMSTFHRSGTNHYSTSSCTPPANGTDSIMANRGSGAAGSSQTGDALGKALASIYSPDHTNNSFSSNPSTPVGSPPSLSAGTAVWSRNGGQASSSPNYEGPLHSLQSRIEDRLERLDDAIHVLRNHAVGPSTAMPGGHGDMHGIIGPSHNGAMGGLGSGYGTGLLSANRHSLMVGTHREDGVALRGSHSLLPNQVPVPQLPVQSATSPDLNPPQDPYRGMPPGLQGQSVSSGSSEIKSDDEGDENLQDTKSSEDKKLDDDKKDIKSITSNNDDEDLTPEQKAEREKERRMANNARERLRVRDINEAFKELGRMVQLHLKSDKPQTKLLILHQAVAVILSLEQQVRERNLNPKAACLKRREEEKVSSEPPPLSLAGPHPGMGDASNHMGQM

SEQ ID NO: 24101 - protein, 625 aa, Homo sapiens
MEEDSRDVEDRSSSGSWGNGGHPSPSRNYGDGTPYDHMTSRDLGSHDNLSPPFVNSRIQSKTERGSYSSYGRESNLQGCHQQSLLGGDMDMGNPGTLSPTKPGSQYYQYSSNNPRRRPLHSSAMEVQTKKVRKVPPGLPSSVYAPSASTADYNRDSPGYPSSKPATSTFPSSFFMQDGHHSSDPWSSSSGMNQPGYAGMLGNSSHIPQSSSYCSLHPHERLSYPSHSSADINSSLPPMSTFHRSGTNHYSTSSCTPPANGTDSIMANRGSGAAGSSQTGDALGKALASIYSPDHTNNSFSSNPSTPVGSPPSLSAGTAVWSRNGGQASSSPNYEGPLHSLQSRIEDRLERLDDAIHVLRNHAVGPSTAMPGGHGDMHGIIGPSHNGAMGGLGSGYGTGLLSANRHSLMVGTHREDGVALRGSHSLLPNQVPVPQLPVQSATSPDLNPPQDPYRGMPPGLQGQSVSSGSSEIKSDDEGDENLQDTKSSEDKKLDDDKKDIKSITSNNDDEDLTPEQKAEREKERRMANNARERLRVRDINEAFKELGRMVQLHLKSDKPQTKLLILHQAVAVILSLEQQVRERNLNPKAACLKRREEEKVSSEPPPLSLAGPHPGMGDASNHMGQM

SEQ ID NO: 24102 - protein, 600 aa, Homo sapiens
MKDIFFQFIIARVRKCYSLSCLHTLPVVPTLRKTERGSYSSYGRESNLQGCHQSLLGGDMDMGNPGTLSPTKPGSQYYQYSSNNPRRRPLHSSAMEVQTKKVRKVPPGLPSSVYAPSASTADYNRDSPGYPSSKPATSTFPSSFFMQDGHHSSDPWSSSSGMNQPGYAGMLGNSSHIPQSSSYCSLHPHERLSYPSHSSADINSSLPPMSTFHRSGTNHYSTSSCTPPANGTDSIMANRGSGAAGSSQTGDALGKALASIYSPDHTNNSFSSNPSTPVGSPPSLSAGTAVWSRNGGQASSSPNYEGPLHSLQSRIEDRLERLDDAIHVLRNHAVGPSTAMPGGHGDMHGIIGPSHNGAMGGLGSGYGTGLLSANRHSLMVGTHREDGVALRGSHSLLPNQVPVPQLPVQSATSPDLNPPQDPYRGMPPGLQGQSVSSGSSEIKSDDEGDENLQDTKSSEDKKLDDDKKDIKSITRSRSSNNDDEDLTPEQKAEREKERRMANNARERLRVRDINEAFKELGRMVQLHLKSDKPQTKLLILHQAVAVILSLEQQVRERNLNPKAACLKRREEEKVSSEPPPLSLAGPHPGMGDASNHMGQM

SEQ ID NO: 24103 - protein, 664 aa, Homo sapiens
MQRAKTELFRLQIVTDDLRKNEMFSPPVSSGKNGPTSLASGHFTGSNVEDRSSSGSWGNGGHPSPSRNYGDGTPYDHMTSRDLGSHDNLSPPFVNSRIQSKTERGSYSSYGRESNLQGCHQQSLLGGDMDMGNPGTLSPTKPGSQYYQYSSNNPRRRPLHSSAMEVQTKKVRKVPPGLPSSVYAPSASTADYNRDSPGYPSSKPATSTFPSSFFMQDGHHSSDPWSSSSGMNQPGYAGMLGNSSHIPQSSSYCSLHPHERLSYPSHSSADINSSLPPMSTFHRSGTNHYSTSSCTPPANGTDSIMANRGSGAAGSSQTGDALGKALASIYSPDHTNNSFSSNPSTPVGSPPSLSGTAVWSRNGGQASSSPNYEGPLHSLQSRIEDRLERLDDAIHVLRNHAVGPSTAMPGGHGDMHGIIGPSHNGAMGGLGSGYGTGLLSANRHSLMVGTHREDGVALRGSHSLLPNQVPVPQLPVQSATSPDLNPPQDPYRGMPPGLQGQSVSSGSSEIKSDDEGDENLQDTKSSEDKKLDDDKKDIKSITSNNDDEDLTPEQKAEREKERRMANNARERLRVRDINEAFKELGRMVQLHLKSDKPQTKLLILHQAVAVILSLEQQVRERNLNPKAACLKRREEEKVSSEPPPLSLAGPHPGMGDASNHMGQM

SEQ ID NO: 24104 - protein, 647 aa, Homo sapiens
MFSPPVSSGKNGPTSLASGHFTGSNVEDRSSSGSWGNGGHPSPSRNYGDGTPYDHMTSRDLGSHDNLSPPFVNSRIQSKTERGSYSSYGRESNLQGCHQQSLLGGDMDMGNPGTLSPTKPGSQYYQYSSNNPRRRPLHSSAMEVQTKKVRKVPPGLPSSVYAPSASTADYNRDSPGYPSSKPATSTFPSSFFMQDGHHSSDPWSSSSGMNQPGYAGMLGNSSHIPQSSSYCSLHPHERLSYPSHSSADINSSLPPMSTFHRSGTNHYSTSSCTPPANGTDSIMANRGSGAAGSSQTGDALGKALASIYSPDHTNNSFSSNPSTPVGSPPSLSAGTAVWSRNGGQASSSPNYEGPLHSLQSRIEDRLERLDDAIHVLRNHAVGPSTAMPGGHGDMHGIIGPSHNGAMGGLGSGYGTGLLSANRHSLMVGTHREDGVALRGSHSLLPNQVPVPQLPVQSATSPDLNPPQDPYRGMPPGLQGQSVSSGSSEIKSDDEGDENLQDTKSSEDKKLDDDKKDIKSITRSRSSNNDDEDLTPEQKAEREKERRMANNARERLRVRDINEAFKELGRMVQLHLKSDKPQTKLLILHQAVAVILSLEQQVRERNLNPKAACLKRREEEKVSSEPPPLSLAGPHPGMGDASNHMGQM

SEQ ID NO: 24105 - protein, 643 aa, Homo sapiens
MFSPPVSSGKNGPTSLASGHFTGSNVEDRSSSGSWGNGGHPSPSRNYGDGTPYDHMTSRDLGSHDNLSPPFVNSRIQSKTERGSYSSYGRESNLQGCHQQSLLGGDMDMGNPGTLSPTKPGSQYYQYSSNNPRRRPLHSSAMEVQTKKVRKVPPGLPSSVYAPSASTADYNRDSPGYPSSKPATSTFPSSFFMQDGHHSSDPWSSSSGMNQPGYAGMLGNSSHIPQSSSYCSLHPHERLSYPSHSSADINSSLPPMSTFHRSGTNHYSTSSCTPPANGTDSIMANRGSGAAGSSQTGDALGKALASIYSPDHTNNSFSSNPSTPVGSPPSLSAGTAVWSRNGGQASSSPNYEGPLHSLQSRIEDRLERLDDAIHVLRNHAVGPSTAMPGGHGDMHGIIGPSHNGAMGGLGSGYGTGLLSANRHSLMVGTHREDGVALRGSHSLLPNQVPVPQLPVQSATSPDLNPPQDPYRGMPPGLQGQSVSSGSSEIKSDDEGDENLQDTKSSEDKKLDDDKKDIKSITSNNDDEDLTPEQKAEREKERRMANNARERLRVRDINEAFKELGRMVQLHLKSDKPQTKLLILHQAVAVILSLEQQVRERNLNPKAACLKRREEEKVSSEPPPLSLAGPHPGMGDASNHMGQM

SEQ ID NO: 24106 - protein, 583 aa, Homo sapiens
MFSPPVSSGKNGPTSLASGHFTGSNVEDRSSSGSWGNGGHPSPSRNYGDGTPYDHMTSRDLGSHDNLSPPFVNSRIQSKTERGSYSSYGRESNLQGCHQVYAPSASTADYNRDSPGYPSSKPATSTFPSSFFMQDGHHSSDPWSSSSGMNQPGYAGMLGNSSHIPQSSSYCSLHPHERLSYPSHSSADINSSLPPMSTFHRSGTNHYSTSSCTPPANGTDSIMANRGSGAAGSSQTGDALGKALASIYSPDHTNNSFSSNPSTPVGSPPSLSAGTAVWSRNGGQASSSPNYEGPLHSLQSRIEDRLERLDDAIHVLRNHAVGPSTAMPGGHGDMHGIIGPSHNGAMGGLGSGYGTGLLSANRHSLMVGTHREDGVALRGSHSLLPNQVPVPQLPVQSATSPDLNPPQDPYRGMPPGLQGQSVSSGSSEIKSDDEGDENLQDTKSSEDKKLDDDKKDIKSITSNNDDEDLTPEQKAEREKERRMANNARERLRVRDINEAFKELGRMVQLHLKSDKPQTKLLILHQAVAVILSLEQQVRERNLNPKAACLKRREEEKVSSEPPPLSLAGPHPGMGDASNHMGQM

SEQ ID NO: 24107 - protein, 451 aa, Homo sapiens
MQDGHHSSDPWSSSSGMNQPGYAGMLGNSSHIPQSSSYCSLHPHERLSYPSHSSADINSSLPPMSTFHRSGTNHYSTSSCTPPANGTDSIMANRGSGAAGSSQTGDALGKALASIYSPDHTNNSFSSNPSTPVGSPPSLSAGTAVWSRNGGQASSSPNYEGPLHSLQSRIEDRLERLDDAIHVLRNHAVGPSTAMPGGHGDMHGIIGPSHNGAMGGLGSGYGTGLLSANRHSLMVGTHREDGVALRGSHSLLPNQVPVPQLPVQSATSPDLNPPQDPYRGMPPGLQGQSVSSGSSEIKSDDEGDENLQDTKSSEDKKLDDDKKDIKSITSNNDDEDLTPEQKAEREKERRMANNARERLRVRDINEAFKELGRMVQLHLKSDKPQTKLLILHQAVAVILSLEQQVRERNLNPKAACLKRREEEKVSSEPPPLSLAGPHPGMGDASNHMGQM

SEQ ID NO: 24108 - protein, 1950 aa, Homo sapiens
MPGARRRRRGAAMEGKPRAGVALAPGPSGRRPSARCARRRRPGLLLPGLWLLLLARPASCAPDELSPEQHNLSLYSMELVLKKSTGHSAAQVALTETAPGSQHSSPLHVTAPPSATTFDTAFFNQGKQTKSTADPSIFVATYVSVTSKEVAVNDDEMDNFLPDTHWTTPRMVSPIQYITVSPPGLPREALEPMLTPSLPMVSLQDEEVTSGWQNTTRQPAAYAESASHFHTFRSAFRTSEGIVPTPGRNLVLYPTDAYSHLSSRTLPEIVASLTEGVETTLFLSSRSLMPQPLGDGITIPLPSLGEVSQPPEEVWATSADRYTDVTTVLSQSLEETISPRTYPTVTASHAALAFSRTHSPLLSTPLAFASSASPTDVSSNPFLPSDSSKTSELHSNSALPGPVDNTHILSPVSSFRPYTWCAACTVPSPQQVLATSLMEKDVGSGDGAETLCMTVLEESSISLMSSVVADFSEFEEDPQVFNTLFPSRPIVPLSSRSMEISETSVGISAEVDMSSVTTTQVPPAHGRLSVPASLDPTAGSLSVAETQVTPSSVTTAFFSVITSILLDSSFSVIANKNTPSLAVRDPSVFTPYSLVPSVESSLFSDQERSSFSEHKPRGALDFASSFFSTPPLELSGSISSPSEAPASLSLMPSDLSPFTSQSFSPLVETFTLFDSSDLQSSQLSLPSSTNLEFSQLQPSSELPLNTIMLLPSRSEVSPWSSFPSDSLEFVEASTVSLTDSEAHFTSAFIETTSYLESSLISHESAVTALVPPGSESFDILTAGIQATSPLTTVHTTPILTESSLFSTLTPPDDQISALDGHVSVLASFSKAIPTGTVLITDAYLPSGSSFVSEATPFPLPTELTVVGPSLTPTEVPLNTSTEVSTTSTGAATGGPLDSTLMGDAASQSPPESSAAPPLPSLRPVTAFTLEATVDTPTLATAKPPYVCDITVPDAYLITTVLARRAVQEYIITAIKEVLRIHFNRAVELKVYELFTDFTFLVTSGPFVYTAISVINVLINSKLVRDQTPLILSVKPSFLVPESRFQVQTVLQFVPPSVDTGFCNFTQRIEKGLMTALFEVRKHHQGTYNLTVQILNITISSSRVTPRRGPVNIIFAVKSTQGFLNGSEVSELLRNLSVVEFSFYLGYPVLQIAEPFQYPQLNLSQLLKSSWVRTVLLGVMEKQLQNEVFQAEMERKLAQLLSEVSTRRRMWRRATVAAGNSVVQVVNVSRLEGDDNPVQLIYFVEDQDGERLSAVKSSDLINKMDLQRAAIILGYRIQGVIAQPVDRVKRPSPESQSNNLWVIVGVVIPVLVVMVIVVILYWKLCRTDKLDFQPDTVANIQQRQKLQIPSVKGFDFAKQHLGQHNKDDILIIHEPAPLPGPLKDHTTPSENGDVPSPKSKIPSKNVRHRGRVSPSDADSTVSEESSERDAGDKTPGAVNDGRSHRAPQSGPPLPSSGNEQHSSASIFEHVDRISRPPEASRRVPSKIQLIAMQPIPAPPVQRPSPADRVAESNKINKEIQTALRHKSEIEHHRNKIRLRAKRRGHYEFPVVDDLSSGDTKERHRVYRRAQMQIDKILDPTASVPSVFIEPRKSSRIKRSPKPRRKHQVNGCPADAEKDRLITTDSDGTYRRPPGVHNSAYIGCPSDPDLPADVQTPSSVELGRYPALPFPASQYIPPQPSIEEARQTMHSLLDDAFALVAPSSQPASTAGVGPGVPPGLPANSTPSQEERRATQWGSFYSPAQTANNPCSRYEDYGMTPPTGPLPRPGFGPGLLQSTELVPPDPQQPQASAEAPFAARGIYSEEMPSVARPRPVGGTTGSQIQHLTQVGIASRIGAQPVEIPPSRGSQYGGPGWPSYGEDEAGRREATHMLGHQEYSSSPLFQVPRTSGREPSAPSGNLPHRGLQGPGLGYPTSSTEDLQPGHSSASLIKAIREELLRLSQKQSTVQNFHS

SEQ ID NO: 24109 - protein, 1934 aa, Homo sapiens
MPGARRRRRGAAMEGKPRAGVALAPGPSGRRPSARCARRRRPGLLLPGLWLLLLARPASCAPDELSPEQHNLSLYSMELVLKKSTGHSAAQVALTETAPGSQHSSPLHVTAPPSATTFDTAFFNQGKQTKSTADPSIFVATYVSVTSKEVAVNDDEMDNFLPDTHWTTPRMVSPIQYITVSPPGLPREALEPMLTPSLPMVSLQDEEVTSGWQNTTRQPAAYAESASHFHTFRSAFRTSEGIVPTPGRNLVLYPTDAYSHLSSRTLPEIVASLTEGVETTLFLSSRSLMPQPLGDGITIPLPSLGEVSQPPEEVWATSADRYTDVTTVLSQSLEETISPRTYPTVTASHAALAFSRTHSPLLSTPLAFASSASPTDVSSNPFLPSDSSKTSELHSNSALPGPVDNTHILSPVSSFRPYTWCAACTVPSPQQVLATSLMEKDVGSGDGAETLCMTVLEESSISLMSSVVADFSEFEEDPQVFNTLFPSRPIVPLSSRSMEISETSVGISAEVDMSSVTTTQVPPAHGRLSVPASLDPTAGSLSVAETQVTPSSVTTAFFSVITSILLDSSFSVIANKNTPSLAVRDPSVFTPYSLVPSVESSLFSDQERSSFSEHKPRGALDFASSFFSTPPLELSGSISSPSEAPASLSLMPSDLSPFTSQSFSPLVETFTLFDSSDLQSSQLSLPSSTNLEFSQLQPSSELPLNTIMLLPSRSEVSPWSSFPSDSLEFVEASTVSLTDSEAHFTSAFIETTSYLESSLISHESAVTALVPPGSESFDILTAGIQATSPLTTVHTTPILTESSLFSTLTPPDDQISALDGHVSVLASFSKAIPTGTVLITDAYLPSGSSFVSEATPFPLPTELTVVGPSLTPTEVPLNTSTEVSTTSTGAATGGPLDSTLMGDAASQSPPESSAAPPLPSLRPVTAFTLEATVDTPTLATAKPPYVCDITVPDAYLITTVLARRAVQEYIITAIKEVLRIHFNRAVELKVYELFTDFTFLVTSGPFVYTAISVINVLINSKLVRDQTPLILSVKPSFLVPESRFQVQTVLQFVPPSVDTGFCNFTQRIEKGLMTALFEVRKHHQGTYNLTVQILNITISSSRVTPRRGPVNIIFAVKSTQGFLNGSEVSELLRNLSVVEFSFYLGYPVLQIAEPFQYPQLNLSQLLKSSWVRTVLLGVMEKQLQNEVFQAEMERKLAQLLSEVSTRRRMWRRATVAAGNSVVQVVNVSRLEGDDNPVQLIYFVEDQDGERLSAVKSSDLINKMDLQRAAIILGYRIQGVIAQPVDRVKRPSPESQSNNLWVIVGVVIPVLVVMVIVVILYWKLCRTDKLDFQPDTVANIQQRQKLQIPSVKGFDFAKQHLGQHNKDDILIIHEPAPLPGPLKDHTTPSENGDVPSPKSKIPSKNVRHRGRVSPSDADSTVSEESSERDAGDKTPGAVNDGRSHRAPQSGPPLPSSGNEQHSSASIFEHVDRISRPPEASRRVPSKIQLIAMQPIPAPPVQRPSPADRVAESNKINKEIQTALRHKSEIEHHRNKIRLRAKRRGHYEFPVVDDLSSGDTKERHRVYRRAQMQIDKILDPTASVPSVFIEPRKSSRIKRSPKPRRKHQVNGCPADAEKDRLITTDSDGTYRRPPGVHNSAYIGCPSDPDLPADVQTPSSVELGRYPALPFPASQYIPPQPSIEEARQTMHSLLDDAFALVAPSSQPASTAGVGPGVPPGLPANSTPSQEERRATQWGSFYSPAQTANNPCSRYEDYGMTPPTGPLPRPGFGPGLLQSTELVPPDPQQPQASAEAPFAARGIYSEEMPSVARPRPVGGTTGSQIQHLTQVGIASRIGAQPVEIPPSRGSQYGGPGWPSYGEDEAGRREAVPRTSGREPSAPSGNLPHRGLQGPGLGYPTSSTEDLQPGHSSASLIKAIREELLRLSQKQSTVQNFHS

SEQ ID NO: 24110 - protein, 718 aa, Homo sapiens
MVSAIFQVVNVSRLEGDDNPVQLIYFVEDQDGERLSAVKSSDLINKMDLQRAAIILGYRIQGVIAQPVDRVKRPSPESQSNNLWVIVGVVIPVLVVMVIVVILYWKLCRTDKLDFQPDTVANIQQRQKLQIPSVKGFDFAKQHLGQHNKDDILIIHEPAPLPGPLKDHTTPSENGDVPSPKSKIPSKNVRHRGRVSPSDADSTVSEESSERDAGDKTPGAVNDGRSHRAPQSGPPLPSSGNEQHSSASIFEHVDRISRPPEASRRVPSKIQLIAMQPIPAPPVQRPSPADRVAESNKINKEIQTALRHKSEIEHHRNKIRLRAKRRGHYEFPVVDDLSSGDTKERHRVYRRAQMQIDKILDPTASVPSVFIEPRKSSRIKRSPKPRRKHQVNGCPADAEKDRLITTDSDGTYRRPPGVHNSAYIGCPSDPDLPADVQTPSSVELGRYPALPFPASQYIPPQPSIEEARQTMHSLLDDAFALVAPSSQPASTAGVGPGVPPGLPANSTPSQEERRATQWGSFYSPAQTANNPCSRYEDYGMTPPTGPLPRPGFGPGLLQSTELVPPDPQQPQASAEAPFAARGIYSEEMPSVARPRPVGGTTGSQIQHLTQVGIASRIGAQPVEIPPSRGSQYGGPGWPSYGEDEAGRREAVPRTSGREPSAPSGNLPHRGLQGPGLGYPTSSTEDLQPGHSSASLIKAIREELLRLSQKQSTVQNFHS

SEQ ID NO: 24111 - protein, 734 aa, Homo sapiens
MVSAIFQVVNVSRLEGDDNPVQLIYFVEDQDGERLSAVKSSDLINKMDLQRAAIILGYRIQGVIAQPVDRVKRPSPESQSNNLWVIVGVVIPVLVVMVIVVILYWKLCRTDKLDFQPDTVANIQQRQKLQIPSVKGFDFAKQHLGQHNKDDILIIHEPAPLPGPLKDHTTPSENGDVPSPKSKIPSKNVRHRGRVSPSDADSTVSEESSERDAGDKTPGAVNDGRSHRAPQSGPPLPSSGNEQHSSASIFEHVDRISRPPEASRRVPSKIQLIAMQPIPAPPVQRPSPADRVAESNKINKEIQTALRHKSEIEHHRNKIRLRAKRRGHYEFPVVDDLSSGDTKERHRVYRRAQMQIDKILDPTASVPSVFIEPRKSSRIKRSPKPRRKHQVNGCPADAEKDRLITTDSDGTYRRPPGVHNSAYIGCPSDPDLPADVQTPSSVELGRYPALPFPASQYIPPQPSIEEARQTMHSLLDDAFALVAPSSQPASTAGVGPGVPPGLPANSTPSQEERRATQWGSFYSPAQTANNPCSRYEDYGMTPPTGPLPRPGFGPGLLQSTELVPPDPQQPQASAEAPFAARGIYSEEMPSVARPRPVGGTTGSQIQHLTQVGIASRIGAQPVEIPPSRGSQYGGPGWPSYGEDEAGRREATHMLGHQEYSSSPLFQVPRTSGREPSAPSGNLPHRGLQGPGLGYPTSSTEDLQPGHSSASLIKAIREELLRLSQKQSTVQNFHS

SEQ ID NO: 24112 - protein, 483 aa, Homo sapiens
MSIRVTQKSYKVSTSGPRAFSSRSYTSGPGSRISSSSFSRVGSSNFRGGLGGGYGGASGMGGITAVTVNQSLLSPLVLEVDPNIQAVRTQEKEQIKTLNNKFASFIDKVRFLEQQNKMLETKWSLLQQQKTARSNMDNMFESYINNLRRQLETLGQEKLKLEAELGNMQGLVEDFKNKYEDEINKRTEMENEFVLIKKDVDEAYMNKVELESRLEGLTDEINFLRQLYEEEIRELQSQISDTSVVLSMDNSRSLDMDSIIAEVKAQYEDIANRSRAEAESMYQIKYEELQSLAGKHGDDLRRTKTEISEMNRNISRLQAEIEGLKGQRASLEAAIADAEQRGELAIKDANAKLSELEAALQRAKQDMARQLREYQELMNVKLALDIEIATYRKLLEGEESRLESGMQNMSIHTKTTSGYAGGLSSAYGGLTSPGLSYSLGSSFGSGAGSSSFSRTSSSRAVVVKKIETRDGKLVSESSDVLPK

SEQ ID NO: 24113 - protein, 511 aa, Homo sapiens
MNGVSWSQDLQEGISAWFGPPASTPASTMSIRVTQKSYKVSTSGPRAFSSRSYTSGPGSRISSSSFSRVGSSNFRGGLGGGYGGASGMGGITAVTVNQSLLSPLVLEVDPNIQAVRTQEKEQIKTLNNKFASFIDKVRFLEQQNKMLETKWSLLQQQKTARSNMDNMFESYINNLRRQLETLGQEKLKLEAELGNMQGLVEDFKNKYEDEINKRTEMENEFVLIKKDVDEAYMNKVELESRLEGLTDEINFLRQLYEEEIRELQSQISDTSVVLSMDNSRSLDMDSIIAEVKAQYEDIANRSRAEAESMYQIKYEELQSLAGKHGDDLRRTKTEISEMNRNISRLQAEIEGLKGQRASLEAAIADAEQRGELAIKDANAKLSELEAALQRAKQDMARQLREYQELMNVKLALDIEIATYRKLLEGEESRLESGMQNMSIHTKTTSGYAGGLSSAYGGLTSPGLSYSLGSSFGSGAGSSSFSRTSSSRAVVVKKIETRDGKLVSESSDVLPK

SEQ ID NO: 24114 - protein, 1849 aa, Homo sapiens
MDHTASQNAQDLIGIPHLGVSGSSTKWHSELSPTEGPHSAGSSTPGFLSPMAELSHPSPPPPALGSLLQLPDGSPSWSMLEVASGPASTQQIKAGVPGRVHNGVSLPTFKNTETATHEAEPPLFQTAESGAIEMTSRKLASATANDSANPLHLSAAPENSRGPALSAEHTSSLVPSLHITTLGQEQAILSGAVPASPSTGTADFPSILTFLQPTENHASPSPVPEMPTLPAEGSDGSPPATRDLLLSSKVPNLLSTSWTFPRWKKDSVTAILGKNEEANVTIPLQAFPRKEVLSLHTVNGFVSDFSTGSVSSPIITAPRTNPLPSGPPLPSILSIQATQTVFPSLGFSSTKPEAYAAAVDHSGLPASASKQVRASPSSMDVYDSLTIGDMKKPATTDVFWSSLSAETGSLSTESIISGLQQQTNYDLNGHTISTTSWETHLAPTAPPNGLTSAADAIKSQDFKDTAGHSVTAEGFSIQDLVLGTSIEQPVQQSDMTMVGSHIDLWPTSNNNHSRDFQTAEVAYYSPTTRHSVSHPQLQLPNQPAHPLLLTSPGPTSTGSLQEMLSDGTDTGSEISSDINSSPERNASTPFQNILGYHSAAESSISTSVFPRTSSRVLRASQHPKKWTADTVSSKVQPTAAAAVTLFLRKSSPPALSAALVAKGTSSSPLAVASGPAKSSSMTTLAKNVTNKAASGPKRTPGAVHTAFPFTPTYMYARTGHTTSTHTAMQGNMDTASGLLSTTYLPRKPQAMHTGLPNPTNLEMPRASTPRPLTVTAALTSITASVKATRLPPLRAENTDAVLPAASAAVVTTGKMASNLECQMSSKLLVKTVLFLTQRRVQISESLKFSIAKGLTQALRKAFHQNDVSAHVDILEYSHNVTVGYYATKGKLVYLPAVVIEMLGVYGVSNVTADLKQHTPHLQSVAVLASPWNPQPAGYFQLKTVLQFVSQADNIQSCKFAQTMEQRLQKAFQDAERKVLNTKSNLTIQIVSTSNASQAVTLVYVVGNQSTFLNGTVASSLLSQLSAELVGFYLTYPPLTIAEPLEYPNLDISETTRDYWVITVLQGVDNSLVGLHNQSFARVMEQRLAQLFMMSQQQGRRFKRATTLGSYTVQMVKMQRVPGPKDPAELTYYTLYNGKPLLGTAAAKILSTIDSQRMALTLHHVVLLQADPVVKNPPNNLWIIAAVLAPIAVVTVIIIIITAVLCRKNKNDFKPDTMINLPQRAKPVQGFDYAKQHLGQQGADEEVIPVTQETVVLPLPIRDAPQERDVAQDGSTIKTAKSTETRKSRSPSENGSVISNESGKPSSGRRSPQNVMAQQKVTKEEARKRNVPASDEEEGAVLFDNSSKVAAEPFDTSSGSVQLIAIKPTALPMVPPTSDRSQESSAVLNGEVNKALKQKSDIEHYRNKLRLKAKRKGYYDFPAVETSKGLTERKKMYEKAPKEMEHVLDPDSELCAPFTESKNRQQMKNSVYRSRQSLNSPSPGETEMDLLVTRERPRRGIRNSGYDTEPEIIEETNIDRVPEPRGYSRSRQVKGHSETSTLSSQPSIDEVRQQMHMLLEEAFSLASAGHAGQSRHQEAYGSAQHLPYSEVVTSAPGTMTRPRAGVQWVPTYRPEMYQYSLPRPAYRFSQLPEMVMGSPPPPVPPRTGPVAVASLRRSTSDIGSKTRMAESTGPEPAQLHDSASFTQMSRGPVSVTQLDQSALNYSGNTVPAVFAIPAANRPGFTGYFIPTPPSSYRNQAWMSYAGENELPSQWADSVPLPGYIEAYPRSRYPQSSPSRLPRQYSQPANLHPSLEQAPAPSTAASQQSLAENDPSDAPLTNISTAALVKAIREEVAKLAKKQTDMFEFQV

SEQ ID NO: 24115 - protein, 1235 aa, Homo sapiens
MDHTASQNAQDLIGIPHLGVSGSSTKWHSELSPTEGPHSAGSSTPGFLSPMAELSHPSPPPPALGSLLQLPDGSPSWSMLEVASGPASTQQIKAGVPGRVHNGVSLPTFKNTETATHEAEPPLFQTAESGAIEMTSRKLASATANDSANPLHLSAAPENSRGPALSAEHTSSLVPSLHITTLGQEQAILSGAVPASPSTGTADFPSILTFLQPTENHASPSPVPEMPTLPAEGSDGSPPATRDLLLSSKVPNLLSTSWTFPRWKKDSVTAILGKNEEANVTIPLQAFPRKEVLSLHTVNGFVSDFSTGSVSSPIITAPRTNPLPSGPPLPSILSIQATQTVFPSLGFSSTKPEAYAAAVDHSGLPASASKQVRASPSSMDVYDSLTIGDMKKPATTDVFWSSLSAETGSLSTESIISGLQQQTNYDLNGHTISTTSWETHLAPTAPPNGLTSAADAIKSQDFKDTAGHSVTAEGFSIQDLVLGTSIEQPVQQSDMTMVGSHIDLWPTSNNNHSRDFQTAEVAYYSPTTRHSVSHPQLQLPNQPAHPLLLTSPGPTSTGSLQEMLSDGTDTGSEISSDINSSPERNASTPFQNILGYHSAAESSISTSVFPRTSSRVLRASQHPKKWTGAATNAADTVSSKVQPTAAAAVTLFLRKSSPPALSAALVAKGTSSSPLAVASGPAKSSSMTTLAKNVTNKAASGPKRTPGAVHTAFPFTPTYMYARTGHTTSTHTAMQGNMDTASGLLSTTYLPRKPQAMHTGLPNPTNLEMPRASTPRPLTVTAALTSITASVKATRLPPLRAENTDAVLPAASAAVVTTGKMASNLECQMSSKLLVKTVLFLTQRRVQISESLKFSIAKGLTQALRKAFHQNDVSAHVDILEYSHNVTVGYYATKGKLVYLPAVVIEMLGVYGVSNVTADLKQHTPHLQSVAVLASPWNPQPAGYFQLKTVLQFVSQADNIQSCKFAQTMEQRLQKAFQDAERKVLNTKSNLTIQIVSTSNASQAVTLVYVVGNQSTFLNGTVASSLLSQLSAELVGFYLTYPPLTIAEPLEYPNLDISETTRDYWVITVLQGVDNSLVGLHNQSFARVMEQRLAQLFMMSQQQGRRFKRATTLGSYTVQMVKMQRVPGPKDPAELTYYTLYNGKPLLGTAAAKILSTIDSQRMALTLHHVVLLQADPVVKNPPNNLWIIAAVLAPIAVVTVIIIIITAVLCRKNKNDFKPDTMINLPQRAKQVAQ

SEQ ID NO: 24116 - protein, 471 aa, Homo sapiens
MVLDSGAQAYDQAPPSPPTSPPSLRHRLKPSDRDGPPLYPWSQSLALPLALAVPPALQPQPEQQPFSQMLLGHRGHMRRSESTYSVNSTGRRGRGTLGRPPPGRGRNPGGGTLRPAASLPHIAKTQRDAGHIASKSPCMLVALRPTNMDRERDKFFQSHYTYNPQFEYQEPMPTAVLEKYCEASGQFIHQAVGIIEAVLEKFGTYEHFEAATGGQLLTKCQIWSIVRKYMQKEGCAGEVVVQLSEDLLSQAVMMVENSRPTLAINLTGARQYWLEGMLRHEIGTHYLRGVNNARQPWHNAEGRLRYGLRPANPTEEGLASLHSVLFRKQPFLWRAALLYYTIHRAARMSFRQLFQDLERYVQDADVRWEYCVRAKRGQTDTSLPGCFSKDQVYLDGIVRILRHRQTIDFPLLTSLGKVSYEDVDHLRPHGVLDNTRVPHFMQDLARYRQQLEHIMATNRLDEAELGRLLPD

SEQ ID NO: 24117 - protein, 408 aa, Homo sapiens
MVLDSGAQAYDQAPPSPPTSPPSLRHRLKPSDRDGPPLYPWSQSLALPLALAVPPALQPQPEQQPFSQMLLGHRGHMRRSESTYSVNSTGRRGRGTLGRPPPGRGRNPGGGTLRPAASLPHIAKTQRDAGHIASKSPCMLVALRPTNMDRERDKFFQSHYTYNPQFEYQEPMPTAVLEKYCEASGQFIHQAVGIIEAVLEKFGTYEHFEAATGGQLLTKCQIWSIVRKYMQKEGCAGEVVVQLSEDLLSQAVMMVENSRPTLAINLTGARQYWLEGMLRHEIGTHYLRGVNNARQPWHNAEGRLRYGLRPANPTEEGLASLHSVLFRKQPFLWRAALLYYTIHRAARMSFRQLFQDLERYVQDADVRWEYCVRAKRGQTDTSLPARTRCTWTASCAFCDIARPSISRC

SEQ ID NO: 24118 - protein, 316 aa, Homo sapiens
MTVQDDMGTQDVGQGGICILVPRRAGGNVSLGEFVHVCGCVGVGWGADGWERIHVCEPLWILGCESTGGGASRCLGLGEPVCEPEFRSMRMEVSRPEPRPDGTGPGLGSQAGPRTPRPAPPPLAFPAGTHYLRGVNNARQPWHNAEGRLRYGLRPANPTEEGLASLHSVLFRKQPFLWRAALLYYTIHRAARMSFRQLFQDLERYVQDADVRWEYCVRAKRGQTDTSLPGCFSKDQVYLDGIVRILRHRQTIDFPLLTSLGKVSYEDVDHLRPHGVLDNTRVPHFMQDLARYRQQLEHIMATNRLDEAELGRLLPD

SEQ ID NO: 24119 - protein, 430 aa, Homo sapiens
MSFTTRSTFSTNYRSLGSVQAPSYGARPVSSAASVYAGAGGSGSRISVSRSTSFRGGMGSGGLATGIAGGLAGMGGIQNEKETMQSLNDRLASYLDRVRSLETENRRLESKIREHLEKKGPQVRDWSHYFKIIEDLRAQIFANTVDNARIVLQIDNARLAADDFRVKYETELAMRQSVENDIHGLRKVIDDTNITRLQLETEIEALKEELLFMKKNHEEEVKGLQAQIASSGLTVEVDAPKSQDLAKIMADIRAQYDELARKNREELDKYWSQQIEESTTVVTTQSAEVGAAETTLTELRRTVQSLEIDLDSMRNLKASLENSLREVEARYALQMEQLNGILLHLESELAQTRAEGQRQAQEYEALLNIKVKLEAEIATYRRLLEDGEDFNLGDALDSSNSMQTIQKTTTRRIVDGKVVSETNDTKVLRH

SEQ ID NO: 24120 - protein, 911 aa, Homo sapiens
MDGAMGPRGLLLCMYLVSLLILQAMPALGSATGRSKSSEKRQAVDTAVDGVFIRSLKVNCKVTSRFAHYVVTSQVVNTANEAREVAFDLEIPKTAFISDFAVTADGNAFIGDIKDKVTAWKQYRKAAISGENAGLVRASGRTMEQFTIHLTVNPQSKVTFQLTYEEVLKRNHMQYEIVIKVKPKQLVHHFEIDVDIFEPQGISKLDAQASFLPKELAAQTIKKSFSGKKGHVLFRPTVSQQQSCPTCSTSLLNGHFKVTYDVSRDKICDLLVANNHFAHFFAPQNLTNMNKNVVFVIDISGSMRGQKVKQTKEALLKILGDMQPGDYFDLVLFGTRVQSWKGSLVQASEANLQAAQDFVRGFSLDEATNLNGGLLRGIEILNQVQESLPELSNHASILIMLTDGDPTEGVTDRSQILKNVRNAIRGRFPLYNLGFGHNVDFNFLEVMSMENNGRAQRIYEDHDATQQLQGFYSQVAKPLLVDVDLQYPQDAVLALTQNHHKQYYEGSEIVVAGRIADNKQSSFKADVQAHGEGQEFSITCLVDEEEMKKLLRERGHMLENHVERLWAYLTIQELLAKRMKVDREERANLSSQALQMSLDYGFVTPLTSMSIRGMADQDGLKPTIDKPSEDSPPLEMLGPRRTFVLSALQPSPTHSSSNTQRLPDRVTGVDTDPHFIIHVPQKEDTLCFNINEEPGVILSLVQDPNTGFSVNGQLIGNKARSPGQHDGTYFGRLGIANPATDFQLEVTPQNITLNPGFGGPVFSWRDQAVLRQDGVVVTINKKRNLVVSVDDGGTFEVVLHRVWKGSSVHQDFLGFYVLDSHRMSARTHGLLGQFFHPIGFEVSDIHPGSDPTKPDATMVVRNRRLTVTRGLQKDYSKDPWHGAEVSCWFIHNNGAGLIDGAYTDYIVPDIF

SEQ ID NO: 24121 - protein, 769 aa, Homo sapiens
MEQFTIHLTVNPQSKVTFQLTYEEVLKRNHMQYEIVIKVKPKQLVHHFEIDVDIFEPQGISKLDAQASFLPKELAAQTIKKSFSGKKGHVLFRPTVSQQQSCPTCSTSLLNGHFKVTYDVSRDKICDLLVANNHFAHFFAPQNLTNMNKNVVFVIDISGSMRGQKVKQTKEALLKILGDMQPGDYFDLVLFGTRVQSWKGSLVQASEANLQAAQDFVRGFSLDEATNLNGGLLRGIEILNQVQESLPELSNHASILIMLTDGDPTEGVTDRSQILKNVRNAIRGRFPLYNLGFGHNVDFNFLEVMSMENNGRAQRIYEDHDATQQLQGFYSQVAKPLLVDVDLQYPQDAVLALTQNHHKQYYEGSEIVVAGRIADNKQSSFKADVQAHGEGQEFSITCLVDEEEMKKLLRERGHMLENHVERLWAYLTIQELLAKRMKVDREERANLSSQALQMSLDYGFVTPLTSMSIRGMADQDGLKPTIDKPSEDSPPLEMLGPRRTFVLSALQPSPTHSSSNTQRLPDRVTGVDTDPHFIIHVPQKEDTLCFNINEEPGVILSLVQDPNTGFSVNGQLIGNKARSPGQHDGTYFGRLGIANPATDFQLEVTPQNITLNPGFGGPVFSWRDQAVLRQDGVVVTINKKRNLVVSVDDGGTFEVVLHRVWKGSSVHQDFLGFYVLDSHRMSARTHGLLGQFFHPIGFEVSDIHPGSDPTKPDATMVVRNRRLTVTRGLQKDYSKDPWHGAEVSCWFIHNNGAGLIDGAYTDYIVPDIF

SEQ ID NO: 24122 - protein, 623 aa, Homo sapiens
MNKNVVFVIDISGSMRGQKVKQTKEALLKILGDMQPGDYFDLVLFGTRVQSWKGSLVQASEANLQAAQDFVRGFSLDEATNLNGGLLRGIEILNQVQESLPELSNHASILIMLTDGDPTEGVTDRSQILKNVRNAIRGRFPLYNLGFGHNVDFNFLEVMSMENNGRAQRIYEDHDATQQLQGFYSQVAKPLLVDVDLQYPQDAVLALTQNHHKQYYEGSEIVVAGRIADNKQSSFKADVQAHGEGQEFSITCLVDEEEMKKLLRERGHMLENHVERLWAYLTIQELLAKRMKVDREERANLSSQALQMSLDYGFVTPLTSMSIRGMADQDGLKPTIDKPSEDSPPLEMLGPRRTFVLSALQPSPTHSSSNTQRLPDRVTGVDTDPHFIIHVPQKEDTLCFNINEEPGVILSLVQDPNTGFSVNGQLIGNKARSPGQHDGTYFGRLGIANPATDFQLEVTPQNITLNPGFGGPVFSWRDQAVLRQDGVVVTINKKRNLVVSVDDGGTFEVVLHRVWKGSSVHQDFLGFYVLDSHRMSARTHGLLGQFFHPIGFEVSDIHPGSDPTKPDATMVVRNRRLTVTRGLQKDYSKDPWHGAEVSCWFIHNNGAGLIDGAYTDYIVPDIF

SEQ ID NO: 24123 - protein, 335 aa, Homo sapiens
MVRRDRLRRMREWWVQVGLLAVPLLAAYLHIPPPQLSPALHSWKSSGKFFTYKGLRIFYQDSVGVVGSPEIVVLLHGFPTSSYDWYKIWEGLTLRFHRVIALDFLGFGFSDKPRPHHYSIFEQASIVEALLRHLGLQNRRINLLSHDYGDIVAQELLYRYKQNRSGRLTIKSLCLSNGGIFPETHRPLLLQKLLKDGGVLSPILTRLMNFFVFSRGLTPVFGPYTRPSESELWDMWAGIRNNDGNLVIDSLLQYINQRKKFRRRWVGALASVTIPIHFIYGPLDPVNPYPEFLELYRKTLPRSTVSILDDHISHYPQLEDPMGFLNAYMGFINSF

SEQ ID NO: 24124 - protein, 326 aa, Homo sapiens
MREWWVQVGLLAVPLLAAYLHIPPPQLSPALHSWKSSGKFFTYKGLRIFYQDSVGVVGSPEIVVLLHGFPTSSYDWYKIWEGLTLRFHRVIALDFLGFGFSDKPRPHHYSIFEQASIVEALLRHLGLQNRRINLLSHDYGDIVAQELLYRYKQNRSGRLTIKSLCLSNGGIFPETHRPLLLQKLLKDGGVLSPILTRLMNFFVFSRGLTPVFGPYTRPSESELWDMWAGIRNNDGNLVIDSLLQYINQRKKFRRRWVGALASVTIPIHFIYGPLDPVNPYPEFLELYRKTLPRSTVSILDDHISHYPQLEDPMGFLNAYMGFINSF

SEQ ID NO: 24125 - protein, 292 aa, Homo sapiens
MREWWVQVGLLAVPLLAAYLHIPPPQLSPALHSWKSSGKFFTYKGLRIFYQDSVGVVGSPEIVVLLHGFPTSSYDWYKIWEGLTLRFHRVIALDFLGFGFSDKPRPHHYSIFEQASIVEALLRHLGLQNRRINLLSHDYGDIVAQELLYRYKQNRSGRLTIKSLCLSNGGIFPETHRPLLLQKLLKDGGVLSPILTRLMNFFVFSRGLLQYINQRKKFRRRWVGALASVTIPIHFIYGPLDPVNPYPEFLELYRKTLPRSTVSILDDHISHYPQLEDPMGFLNAYMGFINSF

SEQ ID NO: 24126 - protein, 469 aa, Homo sapiens
MEYHQPEDPAPGKAGTAEAVIPENHEVLAGPDEHPQDTDARDADGEAREREPADQALLPSQCGDNLESPLPEASSAPPGPTLGTLPEVETIRACSMPQELPQSPRTRQPEPDFYCVKWIPWKGEQTPIITQSTNGPCPLLAIMNILFLQWKVKLPPQKEVITSDELMAHLGNCLLSIKPQEKSEGLQLNFQQNVDDAMTVLPKLATGLDVNVRFTGVSDFEYTPECSVFDLLGIPLYHGWLVDPQSPEAVRAVGKLSYNQLVERIITCKHSSDTNLVTEGLIAEQFLETTAAQLTYHGLCELTAAAKEGELSVFFRNNHFSTMTKHKSHLYLLVTDQGFLQEEQVVWESLHNVDGDSCFCDSDFHLSHSLGKGPGAEGGSGSPETQLQVDQDYLIALSLQQQQPRGPLGLTDLELAQQLQQEEYQQQQAAQPVRMRTRVLSLQGRGATSGRPAGERRQRPKHESDCILL

SEQ ID NO: 24127 - protein, 327 aa, Homo sapiens
MNILFLQWKVKLPPQKEVITSDELMAHLGNCLLSIKPQEKSEGLQLNFQQNVDDAMTVLPKLATGLDVNVRFTGVSDFEYTPECSVFDLLGIPLYHGWLVDPQSPEAVRAVGKLSYNQLVERIITCKHSSDTNLVTEGLIAEQFLETTAAQLTYHGLCELTAAAKEGELSVFFRNNHFSTMTKHKSHLYLLVTDQGFLQEEQVVWESLHNVDGDSCFCDSDFHLSHSLGKGPGAEGGSGSPETQLQVDQDYLIALSLQQQQPRGPLGLTDLELAQQLQQEEYQQQQAAQPVRMRTRVLSLQGRGATSGRPAGERRQRPKHESDCILL

SEQ ID NO: 24128 - protein, 517 aa, Homo sapiens
MLLGPPPFNESTKPSPSPCHSFASQAWLRQVPEVSKHLQCPSAKSLLTMEYHQPEDPAPGKAGTAEAVIPENHEVLAGPDEHPQDTDARDADGEAREREPADQALLPSQCGDNLESPLPEASSAPPGPTLGTLPEVETIRACSMPQELPQSPRTRQPEPDFYCVKWIPWKGEQTPIITQSTNGPCPLLAIMNILFLQWKVKLPPQKEVITSDELMAHLGNCLLSIKPQEKSEGLQLNFQQNVDDAMTVLPKLATGLDVNVRFTGVSDFEYTPECSVFDLLGIPLYHGWLVDPQSPEAVRAVGKLSYNQLVERIITCKHSSDTNLVTEGLIAEQFLETTAAQLTYHGLCELTAAAKEGELSVFFRNNHFSTMTKHKSHLYLLVTDQGFLQEEQVVWESLHNVDGDSCFCDSDFHLSHSLGKGPGAEGGSGSPETQLQVDQDYLIALSLQQQQPRGPLGLTDLELAQQLQQEEYQQQQAAQPVRMRTRVLSLQGRGATSGRPAGERRQRPKHESDCILL

SEQ ID NO: 24129 - protein, 374 aa, Homo sapiens
MPQELPQSPRTRQPEPDFYCVKWIPWKGEQTPIITQSTNGPCPLLAIMNILFLQWKVKLPPQKEVITSDELMAHLGNCLLSIKPQEKSEGLQLNFQQNVDDAMTVLPKLATGLDVNVRFTGVSDFEYTPECSVFDLLGIPLYHGWLVDPQSPEAVRAVGKLSYNQLVERIITCKHSSDTNLVTEGLIAEQFLETTAAQLTYHGLCELTAAAKEGELSVFFRNNHFSTMTKHKSHLYLLVTDQGFLQEEQVVWESLHNVDGDSCFCDSDFHLSHSLGKGPGAEGGSGSPETQLQVDQDYLIALSLQQQQPRGPLGLTDLELAQQLQQEEYQQQQAAQPVRMRTRVLSLQGRGATSGRPAGERRQRPKHESDCILL

SEQ ID NO: 24130 - protein, 135 aa, Homo sapiens
MAEKFDHLEEHLEKFVENIRQLGIIVSDFQPSSQAGLNQKLNFIVTGLQDIDKCRQQLHDITVPLEVFEYIDQGRNPQLYTKECLERALAKNEQVKGKIDTMKKFKSLLIQELSKVFPEDMAKYRSIRGEDHPPS

SEQ ID NO: 24131 - protein, 285 aa, Homo sapiens
MKVTVGPDPSLVYRPDVDPEVAKDKASFRNYTSGPLLDRVFTTYKLMHTHQTVDFVRSKHAQFGGFSYKKMTVMEAVDLLDGLVDESDPDVDFPNSFHAFQTAEGIRKAHPDKDWFHLVGLLHDLGKVLALFGEPQWAVVGDTFPVGCRPQASVVFCDSTFQDNPDLQDPRYSTELGMYQPHCGLDRVLMSWGHDEYMYQVMKFNKFSLPPEAFYMIRFHSFYPWHTGRDYQQLCSQQDLAMLPWVREFNKFDLYTKCPDLPDVDKLRPYYQGLIDKYCPGILSW

SEQ ID NO: 24132 - protein, 231 aa, Homo sapiens
MKVTVGPDPSLVYRPDVDPEVAKDKASFRNYTSGPLLDRVFTTYKLMHTHQTVDFVRSKHAQFGGFSYKKMTVMEAVDLLDGLVDESDPDVDFPNSFHAFQTAEGIRKAHPDKVPNLPCPSPSQTGSTSSGSCTTWGRSWPCSGSPSGLSSATPSPSDAVRRPPWFSATPPSRTTLTSRILDTAQSSGCISPTVGSTGSSCPGAMMQVRPLHQVPGPAGRGQAAALLPGAH

SEQ ID NO: 24133 - protein, 404 aa, Homo sapiens
MVQLAPAAAMDEVTFRSDTVLSDVHLYTPNHRHLMVRLNSVGQPVFLSQFKLLWSQDSWTDSGAKGGSHRDVHTKEPPSAETGSTGSPPGSGHGNEGFSLQAGTDTTGQEVAEAQLDEDGDLDVVRRPRAASDSNPAGPLRDKVHPMILAQEEDDVLGEEAQGSPHDIIRIEHTMATPLEDVGKQVWRGALLLADYILFRQDLFRGCTALELGAGTGLASIIAATMARTVYCTDVGADLLSMCQRNIALNSHLAATGGGIVRVKELDWLKDDLCTDPKVPFSWSQEEISDLYDHTTILFAAEVFYDDDLTDAVFKTLSRLAHRLKNACTAILSVEKRLNFTLRHLDVTCEAYDHFRSCLHALEQLADGKLRFVVEPVEASFPQLLVYERLQQLELWKIIAEPVT

SEQ ID NO: 24134 - protein, 205 aa, Homo sapiens
MVQLAPAAAMDEVTFRSDTVLSDVHLYTPNHRHLMVRLNSVGQPVFLSQFKLLWSQDSWTDSGAKGGSHRDVHTKEPPSAETGSTGSPPGSGHGNEGFSLQAGTDTTGQEVAEAQLDEDGDLDVVRRPRAASDSNPAGPLRDKVHPMILAQEEDDVLGEEAQGSPHDIIRIGVAGRPAPGRLHPVPTGPLPRMYSAGARGRHGAR

SEQ ID NO: 24135 - protein, 179 aa, Homo sapiens
MARTVYCTDVGADLLSMCQRNIALNSHLAATGGGIVRVKELDWLKDDLCTDPKVPFSWSQEEISDLYDHTTILFAAEVFYDDDLTDAVFKTLSRLAHRLKNACTAILSVEKRLNFTLRHLDVTCEAYDHFRSCLHALEQLADGKLRFVVEPVEASFPQLLVYERLQQLELWKIIAEPVT

SEQ ID NO: 24136 - protein, 713 aa, Homo sapiens
MLCVGRLGGLGARAAALPPRRAGRGSLEAGIRARRVSTSWSPVGAAFNVKPQGSRLDLFGERRGLFGVPELSAPEGFHIAQEKALRKTELLVDRACSTPPGPQTVLIFDELSDSLCRVADLADFVKIAHPEPAFREAAEEACRSIGTMVEKLNTNVDLYQSLQKLLADKKLVDSLDPETRRVAELFMFDFEISGIHLDKEKRKRAVDLNVKILDLSSTFLMGTNFPNKIEKHLLPEHIRRNFTSAGDHIIIDGLHAESPDDLVREAAYKIFLYPNAGQLKCLEELLSSRDLLAKLVGYSTFSHRALQGTIAKNPETVMQFLEKLSDKLSERTLKDFEMIRGMKMKLNPQNSEVMPWDPPYYSGVIRAERYNIEPSLYCPFFSLGACMEGLNILLNRLLGISLYAEQPAKGEVWSEDVRKLAVVHESEGLLGYIYCDFFQRADKPHQDCHFTIRGGRLKEDGDYQLPVVVLMLNLPRSSRSSPTLLTPSMMENLFHEMGHAMHSMLGRTRYQHVTGTRCPTDFAEVPSILMEYFANDYRVVNQFARHYQTGQPLPKNMVSRLCESKKVCAAADMQLQVFYATLDQIYHGKHPLRNSTTDILKETQEKFYGLPYVPNTAWQLRFSHLVGYGARYYSYLMSRAVASMVWKECFLQDPFNRAAGERYRREMLAHGGGREPMLMVEGMLQKCPSVDDFVSALVSDLDLDFETFLMDSE

SEQ ID NO: 24137 - protein, 190 aa, Homo sapiens
MYVWPCAVVLAQYLWFHRRSLPGKAILEIGAGVSLPGILAAKCGAEVILSDSSELPHCLEVCRQSCQMNNLPHLQVVGLTWGHISWDLLALPPQDIILASDVFFEPEDFEDILATIYFLMHKNPKVQLWSTYQVRSADWSLEALLYKWDMKCVHIPLESFDADKEDIAESTLPGRHTVEMLVISFAKDSL

SEQ ID NO: 24138 - protein, 123 aa, Homo sapiens
MNNLPHLQVVGLTWGHISWDLLALPPQDIILASDVFFEPEDFEDILATIYFLMHKNPKVQLWSTYQVRSADWSLEALLYKWDMKCVHIPLESFDADKEDIAESTLPGRHTVEMLVISFAKDSL

SEQ ID NO: 24139 - protein, 366 aa, Homo sapiens
MARERPPGRGCGVLRRCLLGAVLLFGLRLCAELRRAGPGSPTRSAPPGPAWRPPGPHLPPAPGQPRGASRRQVTYVRSGRRAPPGGGGSGTPEPGCCAPRGRPRRKGPRWHIDLQPWAGSAQSLDEEAWRFLRYISTTQIACNHMNTDSLATDSSPTHKPWSVCLDDRFNLAHQIRNKQCRLYSLGLGSDDTHFEVSMANNGCEVHRFDPSVKSAHILESQHLWYHRLSIDWRDPHPAVAAQKPHSNTRKLGSILNEFGHHKIDVLKADLESAEWKVLENLILEDVLEQIGQLIFEIHLHWPGFEVSGSDSSVVRFWYSLLKELEQKDFRLFHSYKDLSKPQLFLKKDIFNASSCYTLSWVNTRWK

SEQ ID NO: 24140 - protein, 442 aa, Homo sapiens
MENWSKDITHSYLEQETTGINKSTQPDEQLTMNSEKSMHRKSTELVNEITCENTEWPGQRSTNFQIISSYPDDESVYCTTEKYNVMEHRHNDMHYECMTPCQVTSDSDKEKTIAFLLKELDILRTSNKKLQQKLAKEDKEQRKLKFKLELQEKETEAKIAEKTAALVEEVYFAQKERDEAVMSRLQLAIEERDEAIARAKHMEMSLKVLENINPEENDMTLQELLNRINNADTGIAIQKNGAIIVDRIYKTKECKMRITAEEMSALIEERDAALSKCKRLEQELHHVKEQNQTSANNMRHLTAENNQERALKAKLLSMQQARETAVQQYKKLEEEIQTLRVYYSLHKSLSQEENLKDQFNYTLSTYEEALKNRENIVSITQQQNEELATQLQQALTERANMELQLQHAREASQVANEKVQKLERLVDVLRKKVGTGTMRTVI

SEQ ID NO: 24141 - protein, 261 aa, Homo sapiens
MSRLQLAIEERDEAIARAKHMEMSLKVLENINPEENDMTLQELLNRINNADTGIAIQKNGAIIVDRIYKTKECKMRITAEEMSALIEERDAALSKCKRLEQELHHVKEQNQTSANNMRHLTAENNQERALKAKLLSMQQARETAVQQYKKLEEEIQTLRVYYSLHKSLSQEENLKDQFNYTLSTYEEALKNRENIVSITQQQNEELATQLQQALTERANMELQLQHAREASQVANEKVQKLERLVDVLRKKVGTGTMRTVI

SEQ ID NO: 24142 - protein, 169 aa, Homo sapiens
MENWSKDITHSYLEQETTGINKSTQPDEQLTMNSEKSMHRKSTELVNEITCENTEWPGQRSTNFQIISSYPDDESVYCTTEKYNVMEHRHNDMHYECMTPCQVTSDSDKEKTIAFLLKELDILRTSNKKLQQKLAKEDKEQRKLKFKLELQEKETEAKIAEKTAERRGV

SEQ ID NO: 24143 - protein, 1368 aa, Homo sapiens
METQLQSIFEEVVKTEVIEEAFPGMFMDTPEDEKTKLISCLGAFRQFWGGLSQESHEQCIQWIVKFIHGQHSPKRISFLYDCLAMAVETGLLPPRLVCESLINSDTLEWERTQLWALTFKLVRKIIGGVDYKGVRDLLKVILEKILTIPNTVSSAVVQQLLAAREVIAYILERNACLLPAYFAVTEIRKLYPEGKLPHWLLGNLVSDFVDTFRPTARINSICGRCSLLPVVNNSGAICNSWKLDPATLRFPLKGLLPYDKDLFEPQTALLRYVLEQPYSRDMVCNMLGLNKQHKQRCPVLEDQLVDLVVYAMERSETEEKFDDGGTSQLLWQHLSSQLIFFVLFQFASFPHMVLSLHQKLAGRGLIKGRDHLMWVLLQFISGSIQKNALADFLPVMKLFDLLYPEKEYIPVPDINKPQSTHAFAMTCIWIHLNRKAQNDNSKLQIPIPHSLRLHHEFLQQSLRNKSLQMNDYKIALLCNAYSTNSECFTLPMGALVETIYGNGIMRIPLPGTNCMASGSITPLPMNLLDSLTVHAKMSLIHSIATRVIKLAHAKSSVALAPALVETYSRLLVYMEIESLGIKGFISQLLPTVFKSHAWGILHTLLEMFSYRMHHIQPHYRVQLLSHLHTLAAVAQTNQNQLHLCVESTALRLITALGSSEVQPQFTRFLSDPKTVLSAESEELNRALILTLARATHVTDFFTGSDSIQGTWCKDILQTIMSFTPHNWASHTLSCFPGPLQAFFKQNNVPQESRFNLKKNVEEEYRKWKSMSNENDIITHFSMQGSPPLFLCLLWKMLLETDHINQIGYRVLERIGARALVAHVRTFADFLVYEFSTSAGGQQLNKCIEILNDMVWKYNIVTLDRLILCLAMRSHEGNEAQVCYFIIQLLLLKPNDFRNRVSDFVKENSPEHWLQNDWHTKHMNYHKKYPEKLYFEGLAEQVDPPVQIQSPYLPIYFGNVCLRFLPVFDIVIHRFLELLPVSKSLETLLDHLGGLYKFHDRPVTYLYNTLHYYEMHLRDRAFLKRKLVHAIIGSLKDNRPQGWCLSDTYLKCAMNAREENPWVPDDTYYCRLIGRLVDTMAGKSPGPFPNCDWRFNEFPNPAAHALHVTCVELMALAVSGKEVGNALLNVVLKSQPLVPRENITAWMNAIGLIITALPEPYWIVLHDRIVSVISSPSLTSETEWVGYPFRLFDFTACHQSYSEMSCSYTLALAHAVWHHSSIGQLSLIPKFLTEVLLPIVKTEFQLLYVYHLVGPFLQRFQQERTRCMIEIGVAFYDMLLNVDQCSTHLNYMDPICDFLYHMKYMFTGDSVKEQVEKIICNLKPALKLRLRFITHISKMEPAAVPPQAMNSGSPAPQSNQVPVSLPVTQ

SEQ ID NO: 24144 - protein, 886 aa, Homo sapiens
METQLQSIFEEVVKTEVIEEAFPGMFMDTPEDEKTKLISCLGAFRQFWGGLSQESHEQCIQWIVKFIHGQHSPKRISFLYDCLAMAVETGLLPPRLVCESLINSDTLEWERTQLWALTFKLVRKIIGGVDYKGVRDLLKVILEKILTIPNTVSSAVVQQLLAAREVIAYILERNACLLPAYFAVTEIRKLYPEGKLPHWLLGNLVSDFVDTFRPTARINSICGRCSLLPVVNNSGAICNSWKLDPATLRFPLKGLLPYDKDLFEPQTALLRYVLEQPYSRDMVCNMLGLNKQTLNIAQHKQRCPVLEDQLVDLVVYAMERSETEEKFDDGGTSQLLWQHLSSQLIFFVLFQFASFPHMVLSLHQKLAGRGLIKGRDHLMWVLLQFISGSIQKNALADFLPVMKLFDLLYPEKEYIPVPDINKPQSTHAFAMTCIWIHLNRKAQNDNSKLQIPIPHSLRLHHEFLQQSLRNKSLQMNDYKIALLCNAYSTNSECFTLPMGALVETIYGNGIMRIPLPGTNCMASGSITPLPMNLLDSLTVHAKMSLIHSIATRVIKLAHAKSSVALAPALVETYSRLLVYMEIESLGIKGFISQLLPTVFKSHAWGILHTLLEMFSYRMHHIQPHYRVQLLSHLHTLAAVAQTNQNQLHLCVESTALRLITALGSSEVQPQFTRFLSDPKTVLSAESEELNRALILTLARATHVTDFFTGSDSIQGTWCKDILQTIMSFTPHNWASHTLSCFPGPLQAFFKQNNVPQESRFNLKKNVEEEYRKWKSMSNENDIITHFSMQGSPPLFLCLLWKMLLETDHINQIGYRVLERIGARALVAHVRTFADFLVYEFSTSAGGQQLNKCIEILNDMVWKYNIVTLDRLILCLVRINTFLSLFS

SEQ ID NO: 24145 - protein, 1365 aa, Homo sapiens
METQLQSIFEEVVKTEVIEEAFPGMFMDTPEDEKTKLISCLGAFRQFWGGLSQESHEQCIQWIVKFIHGQHSPKRISFLYDCLAMAVETGLLPPRLVCESLINSDTLEWERTQLWALTFKLVRKIIGGVDYKGVRDLLKVILEKILTIPNTVSSAVVQQLLAAREVIAYILERNACLLPAYFAVTEIRKLYPEGKLPHWLLGNLVSDFVDTFRPTARINSICGRCSLLPVVNNSGAICNSWKLDPATLRFPLKGLLPYDKDLFEPQTALLRYVLEQPYSRDMVCNMLGLNKQTLNIAQHKQRCPVLEDQLVDLVVYAMERSETEEKFDDGGTSQLLWQHLSSQLIFFVLFQFASFPHMVLSLHQKLAGRGLIKGRDHLMWVLLQFISGSIQKNALADFLPVMKLFDLLYPEKEYIPVPDINKPQSTHAFAMTCIWIHLNRKAQNDNSKLQIPIPHSLRLHHEFLQQSLRNKSLQMNDYKIALLCNAYSTNSECFTLPMGALVETIYGNGIMRIPLPGTNCMASGSITPLPMNLLDSLTVHAKMSLIHSIATRVIKLAHAKSSVALAPALVETYSRLLVYMEIESLGIKGFISQLLPTVFKSHAWGILHTLLEMFSYRMHHIQPHYRVQLLSHLHTLAAVAQTNQNQLHLCVESTALRLITALGSSEVQPQFTRFLSDPKTVLSAESEELNRALILTLARATHVTDFFTGSDSIQGTWCKDILQTIMSFTPHNWASHTLSCFPGPLQAFFKQNNVPQESRFNLKKNVEEEYRKWKSMSNENDIITHFSMQGSPPLFLCLLWKMLLETDHINQIGYRVLERIGARALVAHVRTFADFLVYEFSTSAGGQQLNKCIEILNDMVWKYNIVTLDRLILCLAMRSHEGNEAQVCYFIIQLLLLKPNDFRNRVSDFVKENSPEHWLQNDWHTKHMNYHKKYPEKLYFEGLAEQVDPPVQIQSPYLPIYFGNVCLRFLPVFDIVIHRFLELLPVSKSLETLLDHLGGLYKFHDRPVTYLYNTLHYYEMHLRDRAFLKRKLVHAIIGSLKDNRPQGWCLSDTYLKCAMNAREENPWVPDDTYYCRLIGRLVDTMAGKSPGPFPNCDWRFNEFPNPAAHALHVTCVELMALAVSGKEVGNALLNVVLKSQPLVPRENITAWMNAIGLIITALPEPYWIVLHDRIVSVISSPSLTSETEWVGYPFRLFDFTACHQSYSEMSCSYTLALAHAVWHHSSIGQLSLIPKFLTEVLLPIVKTEFQLLYVYHLVGPFLQRFQQERTRCMIEIGVAFYDMLLNVDQCSTHLNYMDPICDFLYHMKYMFTGDSVKEQVEKIICNLKPALKLRLRFITHISKMEPAAVPPQAMNSGSPAPQSNQ

SEQ ID NO: 24146 - protein, 1359 aa, Homo sapiens
METQLQSIFEEVVKTEVIEEAFPGMFMDTPEDEKTKLISCLGAFRQFWGGLSQESHEQCIQWIVKFIHGQHSPKRISFLYDCLAMAVETGLLPPRLVCESLINSDTLEWERTQLWALTFKLVRKIIGGVDYKGVRDLLKVILEKILTIPNTVSSAVVQQLLAAREVIAYILERNACLLPAYFAVTEIRKLYPEGKLPHWLLGNLVSDFVDTFRPTARINSICGRCSLLPVVNNSGAICNSWKLDPATLRFPLKGLLPYDKDLFEPQTALLRYVLEQPYSRDMVCNMLGLNKQHKQRCPVLEDQLVDLVVYAMERSETEEKFDDGGTSQLLWQHLSSQLIFFVLFQFASFPHMVLSLHQKLAGRGLIKGRDHLMWVLLQFISGSIQKNALADFLPVMKLFDLLYPEKEYIPVPDINKPQSTHAFAMTCIWIHLNRKAQNDNSKLQIPIPHSLRLHHEFLQQSLRNKSLQMNDYKIALLCNAYSTNSECFTLPMGALVETIYGNGIMRIPLPGTNCMASGSITPLPMNLLDSLTVHAKMSLIHSIATRVIKLAHAKSSVALAPALVETYSRLLVYMEIESLGIKGFISQLLPTVFKSHAWGILHTLLEMFSYRMHHIQPHYRVQLLSHLHTLAAVAQTNQNQLHLCVESTALRLITALGSSEVQPQFTRFLSDPKTVLSAESEELNRALILTLARATHVTDFFTGSDSIQGTWCKDILQTIMSFTPHNWASHTLSCFPGPLQAFFKQNNVPQESRFNLKKNVEEEYRKWKSMSNENDIITHFSMQGSPPLFLCLLWKMLLETDHINQIGYRVLERIGARALVAHVRTFADFLVYEFSTSAGGQQLNKCIEILNDMVWKYNIVTLDRLILCLAMRSHEGNEAQVCYFIIQLLLLKPNDFRNRVSDFVKENSPEHWLQNDWHTKHMNYHKKYPEKLYFEGLAEQVDPPVQIQSPYLPIYFGNVCLRFLPVFDIVIHRFLELLPVSKSLETLLDHLGGLYKFHDRPVTYLYNTLHYYEMHLRDRAFLKRKLVHAIIGSLKDNRPQGWCLSDTYLKCAMNAREENPWVPDDTYYCRLIGRLVDTMAGKSPGPFPNCDWRFNEFPNPAAHALHVTCVELMALAVSGKEVGNALLNVVLKSQPLVPRENITAWMNAIGLIITALPEPYWIVLHDRIVSVISSPSLTSETEWVGYPFRLFDFTACHQSYSEMSCSYTLALAHAVWHHSSIGQLSLIPKFLTEVLLPIVKTEFQLLYVYHLVGPFLQRFQQERTRCMIEIGVAFYDMLLNVDQCSTHLNYMDPICDFLYHMKYMFTGDSVKEQVEKIICNLKPALKLRLRFITHISKMEPAAVPPQAMNSGSPAPQSNQ

SEQ ID NO: 24147 - protein, 1364 aa, Homo sapiens
METQLQSIFEEVVKTEVIEEAFPGMFMDTPEDEKTKLISCLGAFRQFWGGLSQESHEQCIQWIVKFIHGQHSPKRISFLYDCLAMAVETGLLPPRLVCESLINSDTLEWERTQLWALTFKLVRKIIGGVDYKGVRDLLKVILEKILTIPNTVSSAVVQQLLAAREVIAYILERNACLLPAYFAVTEIRKLYPEGKLPHWLLGNLVSDFVDTFRPTARINSICGRCSLLPVVNNSGAICNSWKLDPATLRFPLKGLLPYDKDLFEPQTALLRYVLEQPYSRDMVCNMLGLNKQHKQRCPVLEDQLVDLVVYAMERSETEEKFDDGGTSQLLWQHLSSQLIFFVLFQFASFPHMVLSLHQKLAGRGLIKGRDHLMWVLLQFISGSIQKNALADFLPVMKLFDLLYPEKEYIPVPDINKPQSTHAFAMTCIWIHLNRKAQNDNSKLQIPIPHSLRLHHEFLQQSLRNKSLQMNDYKIALLCNAYSTNSECFTLPMGALVETIYGNGIMRIPLPGTNCMASGSITPLPMNLLDSLTVHAKMSLIHSIATRVIKLAHAKSSVALAPALVETYSRLLVYMEIESLGIKGFISQLLPTVFKSHAWGILHTLLEMFSYRMHHIQPHYRVQLLSHLHTLAAVAQTNQNQLHLCVESTALRLITALGSSEVQPQFTRFLSDPKTVLSAESEELNRALILTLARATHVTDFFTGSDSIQGTWCKDILQTIMSFTPHNWASHTLSCFPGPLQAFFKQNNVPQESRFNLKKNVEEEYRKWKSMSNENDIITHFSMQGSPPLFLCLLWKMLLETDHINQIGYRVLERIGARALVAHVRTFADFLVYEFSTSAGGQQLNKCIEILNDMVWKYNIVTLDRLILCLAMRSHEGNEAQVCYFIIQLLLLKPNDFRNRVSDFVKENSPEHWLQNDWHTKHMNYHKKYPEKLYFEGLAEQVDPPVQIQSPYLPIYFGNVCLRFLPVFDIVIHRFLELLPVSKSLETLLDHLGGLYKFHDRPVTYLYNTLHYYEMHLRDRAFLKRKLVHAIIGSLKDNRPQGWCLSDTYLKCAMNAREENPWVPDDTYYCRLIGRLVDTMAGKSPGPFPNCDWRFNEFPNPAAHALHVTCVELMALAVSGKEVGNALLNVVLKSQPLVPRENITAWMNAIGLIITALPEPYWIVLHDRIVSVISSPSLTSETEWVGYPFRLFDFTACHQSYSEMSCSYTLALAHAVWHHSSIGQLSLIPKFLTEVLLPIVKTEFQLLYVYHLVGPFLQRFQQERTRCMIEIGVAFYDMLLNVDQCSTHLNYMDPICDFLYHMKYMFTGDSVKEQVEKIICNLKPALKLRLRFITHISKMEPAAVPPQAMNSGSPAPQSNQVDTLT

SEQ ID NO: 24148 - protein, 475 aa, Homo sapiens
METQLQSIFEEVVKTEVIEEAFPGMFMDTPEDEKTKLISCLGAFRQFWGGLSQESHEQCIQWIVKFIHGQHSPKRISFLYDCLAMAVETGLLPPRLVCESLINSDTLEWERTQLWALTFKLVRKIIGGVDYKGVRDLLKVILEKILTIPNTVSSAVVQQLLAAREVIAYILERNACLLPAYFAVTEIRKLYPEGKLPHWLLGNLVSDFVDTFRPTARINSICGRCSLLPVVNNSGAICNSWKLDPATLRFPLKGLLPYDKDLFEPQTALLRYVLEQPYSRDMVCNMLGLNKQHKQRCPVLEDQLVDLVVYAMERSETEEKFDDGGTSQLLWQHLSSQLIFFVLFQFASFPHMVLSLHQKLAGRGLIKGRDHLMWVLLQFISGSIQKNALADFLPVMKLFDLLYPEKEYIPVPDINKPQSTHAFAMTCIWIHLNRKAQNDNSKLQIPIPHSLRLHHESAFANCFQITCMGDLTHTP

SEQ ID NO: 24149 - protein, 603 aa, Homo sapiens
MAASCPLPVTPDLPTLRAKLQGLLQFLRDALSISNAHTVDFYTESVWEELVDLPPETVLAALRKSASETEALPSETRPLVEAEWEAGMTDFPKIFCETSQKLVSVEAFALAAKYYSVQNLGICTPFEQLLVALRGNQNQRIGENQKAVEFMNMKKSHEVQAMSELISSIADYYGIKQVIDLGSGKGYLSSFLSLKYGLKVYGIDSSNTNTHGAEERNRKLKKHWKLCHAQSRLDVNGLALKMAKERKVQNKVKNKADTEEVFNNSPTNQEKMPTSAILPDFSGSVISNIRNQMETLHSQPHQEENLCFENSFSLINLLPINAVEPTSSQQIPNRETSEANKERRKMTSKSSESNIYSPLTSFITADSELHDIIKDLEDCLMVGLHTCGDLAPNTLRIFTSNSEIKGVCSVGCCYHLLSEEFENQHKERTQEKWGFPMCHYLKEERWCCGRNARMSACLALERVAAGQGLPTESLFYRAVLQDIIKDCYGITKCDRHVGKIYSKCSSFLDYVRRSLKKLGLDESKLPEKIIMNYYEKYKPRMNELEAFNMLKVVLAPCIETLILLDRLCYLKEQEDIAWSALVKLFDPVKSPRCYAVIALKKQQ

SEQ ID NO: 24150 - protein, 2177 aa, Homo sapiens
MAAFGILSYEHRPLKRPRLGPPDVYPQDPKQKEDELTALNVKQGFNNQPAVSGDEHGSAKNVSFNPAKISSNFSSIIAEKLRCNTLPDTGRRKPQVNQKDNFWLVTARSQSAINTWFTDLAGTKPLTQLAKKVPIFSKKEEVFGYLAKYTVPVMRAAWLIKMTCAYYAAISETKVKKRHVDPFMEWTQIITKYLWEQLQKMAEYYRPGPAGSGGCGSTIGPLPHDVEVAIRQWDYTEKLAMFMFQDGMLDRHEFLTWVLECFEKIRPGEDELLKLLLPLLLRYSGEFVQSAYLSRRLAYFCTRRLALQLDGVSSHSSHVISAQSTSTLPTTPAPQPPTSSTPSTPFSDLLMCPQHRPLVFGLSCILQTILLCCPSALVWHYSLTDSRIKTGSPLDHLPIAPSNLPMPEGNSAFTQQVRAKLREIEQQIKERGQAVEVRWSFDKCQEATAGFTIGRVLHTLEVLDSHSFERSDFSNSLDSLCNRIFGLGPSKDGHEISSDDDAVVSLLCEWAVSCKRSGRHRAMVVAKLLEKRQAEIEAERCGESEAADEKGSIASGSLSAPSAPIFQDVLLQFLDTQAPMLTDPRSESERVEFFNLVLLFCELIRHDVFSHNMYTCTLISRGDLAFGAPGPRPPSPFDDPADDPEHKEAEGSSSSKLEDPGLSESMDIDPSSSVLFEDMEKPDFSLFSPTMPCEGKGSPSPEKPDVEKEVKPPPKEKIEGTLGVLYDQPRHVQYATHFPIPQEESCSHECNQRLVVLFGVGKQRDDARHAIKKITKDILKVLNRKGTAETDQLAPIVPLNPGDLTFLGGEDGQKRRRNRPEAFPTAEDIFAKFQHLSHYDQHQVTAQVSRNVLEQITSFALGMSYHLPLVQHVQFIFDLMEYSLSISGLIDFAIQLLNELSVVEAELLLKSSDLVGSYTTSLCLCIVAVLRHYHACLILNQDQMAQVFEGLCGVVKHGMNRSDGSSAERCILAYLYDLYTSCSHLKNKFGELFSDFCSKVKNTIYCNVEPSESNMRWAPEFMIDTLENPAAHTFTYTGLGKSLSENPANRYSFVCNALMHVCVGHHDPDRVNDIAILCAELTGYCKSLSAEWLGVLKALCCSSNNGTCGFNDLLCNVDVSDLSFHDSLATFVAILIARQCLLLEDLIRCAAIPSLLNAACSEQDSEPGARLTCRILLHLFKTPQLNPCQSDGNKPTVGIRSSCDRHLLAASQNRIVDGAVFAVLKAVFVLGDAELKGSGFTVTGGTEELPEEEGGGGSGGRRQGGRNISVETASLDVYAKYVLRSICQQEWVGERCLKSLCEDSNDLQDPVLSSAQAQRLMQLICYPHRLLDNEDGENPQRQRIKRILQNLDQWTMRQSSLELQLMIKQTPNNEMNSLLENIAKATIEVFQQSAETGSSSGSTASNMPSSSKTKPVLSSLERSGVWLVAPLIAKLPTSVQGHVLKAAGEELEKGQHLGSSSRKERDRQKQKSMSLLSQQPFLSLVLTCLKGQDEQREGLLTSLYSQVHQIVNNWRDDQYLDDCKPKQLMHEALKLRLNLVGGMFDTVQRSTQQTTEWAMLLLEIIISGTVDMQSNNELFTTVLDMLSVLINGTLAADMSSISQGSMEENKRAYMNLAKKLQKELGERQSDSLEKVRQLLPLPKQTRDVITCEPQGSLIDTKGNKIAGFDSIFKKEGLQVSTKQKISPWDLFEGLKPSAPLSWGWFGTVRVDRRVARGEEQQRLLLYHTHLRPRPRAYYLEPLPLPPEDEEPPAPTLLEPEKKAPEPPKTDKPGAAPPSTEERKKKSTKGKKRSQPATKTEDYGMGPGRSGPYGVTVPPDLLHHPNPGSITHLNYRQGSIGLYTQNQPLPAGGPRVDPYRPVRLPMQKLPTRPTYPGVLPTTMTGVMGLEPSSYKTSVYRQQQPAVPQGQRLRQQLQQSQGMLGQSSVHQMTPSSSYGLQTSQGYTPYVSHVGLQQHTGPAGTMVPPSYSSQPYQSTHPSTNPTLVDPTRHLQQRPSGYVHQQAPTYGHGLTSTQRFSHQTLQQTPMISTMTPMSAQGVQAGVRSTAILPEQQQQQQQQQQQQQQQQQQQQQQQQQQYHIRQQQQQQILRQQQQQQQQQQQQQQQQQQQQQQQQQQHQQQQQQQAAPPQPQPQSQPQFQRQGLQQTQQQQQTAALVRQLQQQLSNTQPQPSTNIFGRY

SEQ ID NO: 24151 - protein, 2180 aa, Homo sapiens
MAAFGILSYEHRPLKRPRLGPPDVYPQDPKQKEDELTALNVKQGFNNQPAVSGDEHGSAKNVSFNPAKISSNFSSIIAEKLRCNTLPDTGRRKPQVNQKDNFWLVTARSQSAINTWFTDLAGTKPLTQLAKKVPIFSKKEEVFGYLAKYTVPVMRAAWLIKMTCAYYAAISETKVKKRHVDPFMEWTQIITKYLWEQLQKMAEYYRPGPAGSGGCGSTIGPLPHDVEVAIRQWDYTEKLAMFMFQDGMLDRHEFLTWVLECFEKIRPGEDELLKLLLPLLLRYSGEFVQSAYLSRRLAYFCTRRLALQLDGVSSHSSHVISAQSTSTLPTTPAPQPPTSSTPSTPFSDLLMCPQHRPLVFGLSCILQTILLCCPSALVWHYSLTDSRIKTGSPLDHLPIAPSNLPMPEGNSAFTQQVRAKLREIEQQIKERGQAVEVRWSFDKCQEATAGFTIGRVLHTLEVLDSHSFERSDFSNSLDSLCNRIFGLGPSKDGHEISSDDDAVVSLLCEWAVSCKRSGRHRAMVVAKLLEKRQAEIEAERCGESEAADEKGSIASGSLSAPSAPIFQDVLLQFLDTQAPMLTDPRSESERVEFFNLVLLFCELIRHDVFSHNMYTCTLISRGDLAFGAPGPRPPSPFDDPADDPEHKEAEGSSSSKLEDPGLSESMDIDPSSSVLFEDMEKPDFSLFSPTMPCEGKGSPSPEKPDVEKEVKPPPKEKIEGTLGVLYDQPRHVQYATHFPIPQEESCSHECNQRLVVLFGVGKQRDDARHAIKKITKDILKVLNRKGTAETDQLAPIVPLNPGDLTFLGGEDGQKRRRNRPEAFPTAEDIFAKFQHLSHYDQHQVTAQVSRNVLEQITSFALGMSYHLPLVQHVQFIFDLMEYSLSISGLIDFAIQLLNELSVVEAELLLKSSDLVGSYTTSLCLCIVAVLRHYHACLILNQDQMAQVFEGLCGVVKHGMNRSDGSSAERCILAYLYDLYTSCSHLKNKFGELFSDFCSKVKNTIYCNVEPSESNMRWAPEFMIDTLENPAAHTFTYTGLGKSLSENPANRYSFVCNALMHVCVGHHDPDRVNDIAILCAELTGYCKSLSAEWLGVLKALCCSSNNGTCGFNDLLCNVDVSDLSFHDSLATFVAILIARQCLLLEDLIRCAAIPSLLNAACSEQDSEPGARLTCRILLHLFKTPQLNPCQSDGNKPTVGIRSSCDRHLLAASQNRIVDGAVFAVLKAVFVLGDAELKGSGFTVTGGTEELPEEEGGGGSGGRRQGGRNISVETASLDVYAKYVLRSICQQEWVGERCLKSLCEDSNDLQDPVLSSAQAQRLMQLICYPHRLLDNEDGENPQRQRIKRILQNLDQWTMRQSSLELQLMIKQTPNNEMNSLLENIAKATIEVFQQSAETGSSSGSTASNMPSSSKTKPVLSSLERSGVWLVAPLIAKLPTSVQGHVLKAAGEELEKGQHLGSSSRKERDRQKQKSMSLLSQQPFLSLVLTCLKGQDEQREGLLTSLYSQVHQIVNNWRDDQYLDDCKPKQLMHEALKLRLNLVGGMFDTVQRSTQQTTEWAMLLLEIIISGTVDMQSNNELFTTVLDMLSVLINGTLAADMSSISQGSMEENKRAYMNLAKKLQKELGERQSDSLEKVRQLLPLPKQTRDVITCEPQGSLIDTKGNKIAGFDSIFKKEGLQVSTKQKISPWDLFEGLKPSAPLSWGWFGTVRVDRRVARGEEQQRLLLYHTHLRPRPRAYYLEPLPLPPEDEEPPAPTLLEPEKKAPEPPKTDKPGAAPPSTEERKKKSTKGKKRSQPATKTEDYGMGPGRSGPYGVTVPPDLLHHPNPGSITHLNYRQGSIGLYTQNQPLPAGGPRVDPYRPVRLPMQKLPTRPTYPGVLPTTMTGVMGLEPSSYKTSVYRQQQPAVPQGQRLRQQLQAKIQSQGMLGQSSVHQMTPSSSYGLQTSQGYTPYVSHVGLQQHTGPAGTMVPPSYSSQPYQSTHPSTNPTLVDPTRHLQQRPSGYVHQQAPTYGHGLTSTQRFSHQTLQQTPMISTMTPMSAQGVQAGVRSTAILPEQQQQQQQQQQQQQQQQQQQQQQQQQQYHIRQQQQQQILRQQQQQQQQQQQQQQQQQQQQQQQQQQHQQQQQQQAAPPQPQPQSQPQFQRQGLQQTQQQQQTAALVRQLQQQLSNTQPQPSTNIFGRY

SEQ ID NO: 24152 - protein, 2176 aa, Homo sapiens
MAAFGILSYEHRPLKRPRLGPPDVYPQDPKQKEDELTALNVKQGFNNQPAVSGDEHGSAKNVSFNPAKISSNFSSIIAEKLRCNTLPDTGRRKPQVNQKDNFWLVTARSQSAINTWFTDLAGTKPLTQLAKKVPIFSKKEEVFGYLAKYTVPVMRAAWLIKMTCAYYAAISETKVKKRHVDPFMEWTQIITKYLWEQLQKMAEYYRPGPAGSGGCGSTIGPLPHDVEVAIRQWDYTEKLAMFMFQDGMLDRHEFLTWVLECFEKIRPGEDELLKLLLPLLLRYSGEFVQSAYLSRRLAYFCTRRLALQLDGVSSHSSHVISAQSTSTLPTTPAPQPPTSSTPSTPFSDLLMCPQHRPLVFGLSCILQTILLCCPSALVWHYSLTDSRIKTGSPLDHLPIAPSNLPMPEGNSAFTQQVRAKLREIEQQIKERGQAVEVRWSFDKCQEATAGFTIGRVLHTLEVLDSHSFERSDFSNSLDSLCNRIFGLGPSKDGHEISSDDDAVVSLLCEWAVSCKRSGRHRAMVVAKLLEKRQAEIEAERCGESEAADEKGSIASGSLSAPSAPIFQDVLLQFLDTQAPMLTDPRSESERVEFFNLVLLFCELIRHDVFSHNMYTCTLISRGDLAFGAPGPRPPSPFDDPADDPEHKEAEGSSSSKLEDPGLSESMDIDPSSSVLFEDMEKPDFSLFSPTMPCEGKGSPSPEKPDVEKEVKPPPKEKIEGTLGVLYDQPRHVQYATHFPIPQEESCSHECNQRLVVLFGVGKQRDDARHAIKKITKDILKVLNRKGTAETDQLAPIVPLNPGDLTFLGGEDGQKRRRNRPEAFPTAEDIFAKFQHLSHYDQHQVTAQVSRNVLEQITSFALGMSYHLPLVQHVQFIFDLMEYSLSISGLIDFAIQLLNELSVVEAELLLKSSDLVGSYTTSLCLCIVAVLRHYHACLILNQDQMAQVFEGLCGVVKHGMNRSDGSSAERCILAYLYDLYTSCSHLKNKFGELFSDFCSKVKNTIYCNVEPSESNMRWAPEFMIDTLENPAAHTFTYTGLGKSLSENPANRYSFVCNALMHVCVGHHDPDRVNDIAILCAELTGYCKSLSAEWLGVLKALCCSSNNGTCGFNDLLCNVDVSDLSFHDSLATFVAILIARQCLLLEDLIRCAAIPSLLNAACSEQDSEPGARLTCRILLHLFKTPQLNPCQSDGNKPTVGIRSSCDRHLLAASQNRIVDGAVFAVLKAVFVLGDAELKGSGFTVTGGTEELPEEEGGGGSGGRRQGGRNISVETASLDVYAKYVLRSICQQEWVGERCLKSLCEDSNDLQDPVLSSAQAQRLMQLICYPHRLLDNEDGENPQRQRIKRILQNLDQWTMRQSSLELQLMIKQTPNNEMNSLLENIAKATIEVFQQSAETGSSSGSTASNMPSSSKTKPVLSSLERSGVWLVAPLIAKLPTSVQGHVLKAAGEELEKGQHLGSSSRKERDRQKQKSMSLLSQQPFLSLVLTCLKGQDEQREGLLTSLYSQVHQIVNNWRDDQYLDDCKPKQLMHEALKLRLNLVGGMFDTVQRSTQQTTEWAMLLLEIIISGTVDMQSNNELFTTVLDMLSVLINGTLAADMSSISQGSMEENKRAYMNLAKKLQKELGERQSDSLEKVRQLLPLPKQTRDVITCEPQGSLIDTKGNKIAGFDSIFKKEGLQVSTKQKISPWDLFEGLKPSAPLSWGWFGTVRVDRRVARGEEQQRLLLYHTHLRPRPRAYYLEPLPLPPEDEEPPAPTLLEPEKKAPEPPKTDKPGAAPPSTEERKKKSTKGKKRSQPATKTEDYGMGPGRSGPYGVTVPPDLLHHPNPGSITHLNYRQGSIGLYTQNQPLPAGGPRVDPYRPVRLPMQKLPTRPTYPGVLPTTMTGVMGLEPSSYKTSVYRQQQPAVPQGQRLRQQLQSQGMLGQSSVHQMTPSSSYGLQTSQGYTPYVSHVGLQQHTGPAGTMVPPSYSSQPYQSTHPSTNPTLVDPTRHLQQRPSGYVHQQAPTYGHGLTSTQRFSHQTLQQTPMISTMTPMSAQGVQAGVRSTAILPEQQQQQQQQQQQQQQQQQQQQQQQQQQYHIRQQQQQQILRQQQQQQQQQQQQQQQQQQQQQQQQQQHQQQQQQQAAPPQPQPQSQPQFQRQGLQQTQQQQQTAALVRQLQQQLSNTQPQPSTNIFGRY

SEQ ID NO: 24153 - protein, 245 aa, Homo sapiens
MAQEEGGSLPEVRARVRAAHGIPDLAQKLHFYDRWAPDYDQDVATLLYRAPRLAVDCLTQALPGPPHSALILDVACGTGLVAAELRAPGFLQLHGVDGSPGMLEQAQAPGLYQRLSLCTLGQEPLPSPEGTFDAVLIVGALSDGQVPCNAIPELHVTKPGGLVCLTTRTNSSNLQYKEALEATLDRLEQAGMWEGLVAWPVDRLWTAGSWLPPSWRWYPASLPRMASSPALSTCTESGRRPRLRK

SEQ ID NO: 24154 - protein, 691 aa, Homo sapiens
MNAAVVRRTQEALGKVIRRPPLTEKLLSKPPFRYLHDIITEVIRMTGFMKGLYTDAEMKSDNVKDKDAKISFLQKAIDVVVMVSGEPLLAKPARIVAGHEPERTNELLQIIGKCCLNKLSSDDAVRRVLAGEKGEVKGRASLTSRSQELDNKNVREEESRVHKNTEDRGDAEIKERSTSRDRKQKEELKEDRKPREKDKDKEKAKENGGNRHREGERERAKARARPDNERQKDRGNRERDRDSERKKETERKSEGGKEKERLRDRDRERDRDKGKDRDRRRVKNGEHSWDLDREKNREHDKPEKKSASSGEMSKKLSDGTFKDSKAETETEISTRASKSLTTKTSKRRSKNSVEGRKEDNISAKSLDSIVSGINNEPNQETTTSEIGTKEANINSTSISDDNSASLRCENIQPNPTEKQKGDSTSDAEGDAGPAGQDKSEVPETPEIPNELSSNIRRIPRPGSARPAPPRVKRQDSMEALQMDRSGSGKTVSNVITESHNSDNEEDDQFVVEAAPQLSEMSEIEMVTAVELEEEEKHGGLVKKILETKKDYEKLQQSPKPGEKERSLFESAWKKEKDIVSKEIEKLRTSIQTLCKSALPLGKIMDYIQEDVDAMQNELQMWHSENRQHAEALQQEQRITDCAVEPLKAELAELEQLIKDQQDKICAVKANILKNEEKIQKMVYSINLTSRR

SEQ ID NO: 24155 - protein, 625 aa, Homo sapiens
MNAAVVRRTQEALGKVIRRPPLTEKLLSKPPFRYLHDIITEVIRMTGFMKGLYTDAEMKSDNVKDKDAKISFLQKAIDVVVMVSGEPLLAKPARIVAGHEPERTNELLQIIGKCCLNKLSSDDAVRRVLAGEKGEVKGRASLTSRSQELDNKNVREEESRVHKNTEDRGDAEIKERSTSRDRKQKEELKEDRKPREKDKDKEKAKENGGNRHREGERERAKARARPDNERQKDRGNRERDRDSERKKETERKSEGGKEKERLRDRDRERDRDKGKDRDRRRVKNGEHSWDLDREKNREHDKPEKKSASSGEMSKKLSDGTFKDSKAETETEISTRASKSLTTKTSKRRSKNSVEGDSTSDAEGDAGPAGQDKSEVPETPEIPNELSSNIRRIPRPGSARPAPPRVKRQDSMEALQMDRSGSGKTVSNVITESHNSDNEEDDQFVVEAAPQLSEMSEIEMVTAVELEEEEKHGGLVKKILETKKDYEKLQQSPKPGEKERSLFESAWKKEKDIVSKEIEKLRTSIQTLCKSALPLGKIMDYIQEDVDAMQNELQMWHSENRQHAEALQQEQRITDCAVEPLKAELAELEQLIKDQQDKICAVKANILKNEEKIQKMVYSINLTSRR

SEQ ID NO: 24156 - protein, 378 aa, Homo sapiens
MAGSYPEGAPAVLADKRQQFGSRFLRDPARVFHHNAWDNVEWSEEQAAAAERKVQENSIQRVCQEKQVDYEINAHKYWNDFYKIHENGFFKDRHWLFTEFPELAPSQNQNHLKDWFLENKSEVPECRNNEDGPGLIMEEQHKCSSKSLEHKTQTLPVEENVTQKISDLEICADEFPGSSATYRILEVGCGVGNTVFPILQTNNDPGLFVYCCDFSSTAIELVQTNSEYDPSRCFAFVHDLCDEEKSYPVPKGSLDIIILIFVLSAIVPDKMQKAINRLSRLLKPGGMMLLRDYGRYDMAQLRFKKGQCLSGNFYVRGDGTRVYFFTQEELDTLFTTAGLEKVQNLVDRRLQVNRGKQLTMYRVWIQCKYCKPLLSSTS

SEQ ID NO: 24157 - protein, 242 aa, Homo sapiens
MEEQHKCSSKSLEHKTQTLPVEENVTQKISDLEICADEFPGSSATYRILEVGCGVGNTVFPILQTNNDPGLFVYCCDFSSTAIELVQTNSEYDPSRCFAFVHDLCDEEKSYPVPKGSLDIIILIFVLSAIVPDKMQKAINRLSRLLKPGGMMLLRDYGRYDMAQLRFKKGQCLSGNFYVRGDGTRVYFFTQEELDTLFTTAGLEKVQNLVDRRLQVNRGKQLTMYRVWIQCKYCKPLLSSTS

SEQ ID NO: 24158 - protein, 378 aa, Homo sapiens
MAGSYPEGAPAILADKRQQFGSRFLSDPARVFHHNAWDNVEWSEEQAAAAERKVQENSIQRVCQEKQVDYEINAHKYWNDFYKIHENGFFKDRHWLFTEFPELAPSQNQNHLKDWFLENKSEVCECRNNEDGPGLIMEEQHKCSSKSLEHKTQTPPVEENVTQKISDLEICADEFPGSSATYRILEVGCGVGNTVFPILQTNNDPGLFVYCCDFSSTAIELVQTNSEYDPSRCFAFVHDLCDEEKSYPVPKGSLDIIILIFVLSAVVPDKMQKAINRLSRLLKPGGMVLLRDYGRYDMAQLRFKKGQCLSGNFYVRGDGTRVYFFTQEELDTLFTTAGLEKVQNLVDRRLQVNRGKQLTMYRVWIQCKYCKPLLSSTS

SEQ ID NO: 24159 - protein, 313 aa, Homo sapiens
MPVDYEINAHKYWNDFYKIHENGFFKDRHWLFTEFPELAPSQNQNHLKDWFLENKSEVCECRNNEDGPGLIMEEQHKCSSKSLEHKTQTPPVEENVTQKISDLEICADEFPGSSATYRILEVGCGVGNTVFPILQTNNDPGLFVYCCDFSSTAIELVQTNSEYDPSRCFAFVHDLCDEEKSYPVPKGSLDIIILIFVLSAVVPDKMQKAINRLSRLLKPGGMVLLRDYGRYDMAQLRFKKGQCLSGNFYVRGDGTRVYFFTQEELDTLFTTAGLEKVQNLVDRRLQVNRGKQLTMYRVWIQCKYCKPLLSSTS

SEQ ID NO: 24160 - protein, 459 aa, Homo sapiens
MSVRFSSTSRRLGSCGGTGSVRLSSGGAGFGAGNTCGVPGIGSGFSCAFGGSSSAGGYGGGLGGGSASCAAFTGNEHGLLSGNEKVTMQNLNDRLASYLENVRALEEANADLEQKIKGWYEKFGPGSCRGLDHDYSRYFPIIDELKNQIISATTSNAHVVLQNDNARLTADDFRLKFENELALHQSVEADINGLRRVLDELTLCRTDLEIQLETLSEELAYLKKNHEEEMKALQCAAGGNVNVEMNAAPGVDLTVLLNNMRAEYEALAEQNRRDAEAWFNEKSASLQQQISDDAGATTSARNELIEMKRTLQTLEIELQSLLATKHSLECSLTETESNYCAQLAQIQAQIGALEEQLHQVRTETEGQKLEYEQLLDIKVHLEKEIETYCLLIDGEDGSCSKSKGYGGPGNQTKDSSKTTIVKTVVEEIDPRGKVLSSRVHTVEEKSTKVNNKNEQRVSS

SEQ ID NO: 24161 - protein, 620 aa, Homo sapiens; identical to SEQ ID NO: 280

SEQ ID NO: 24162 - protein, 989 aa, Homo sapiens
MKVVNLKQAILQAWKERWSDYQWAINMKKFFPKGATWDILNLADALLEQAMIGPSPNPLILSYLKYAISSQMVSYSSVLTAISKFDDFSRDLCVQALLDIMDMFCDRLSCHGKAEECIGLCRALLSALHWLLRCTAASAERLREGLEAGTPAAGEKQLAMCLQRLEKTLSSTKNRALLHIAKLEEASSWTAIEHSLLKLGEILANLSNPQLRSQAEQCGTLIRSIPTMLSVHAEQMHKTGFPTVHAVILLEGTMNLTGETQSLVEQLTMVKRMQHIPTPLFVLEIWKACFVGLIESPEGTEELKWTAFTFLKIPQVLVKLKKYSHGDKDFTEDVNCAFEFLLKLTPLLDKADQRCNCDCTNFLLQECGKQGLLSEASVNNLMAKRKADREHAPQQKSGENANIQPNIQLILRAEPTVTNILKTMDADHSKSPEGLLGVLGHMLSGKSLDLLLAAAAATGKLKSFARKFINLNEFTTYGSEESTKPASVRALLFDISFLMLCHVAQTYGSEVILSESRTGAEVPFFETWMQTCMPEEGKILNPDHPCFRPDSTKVESLVALLNNSSEMKLVQMKWHEACLSISAAILEILNAWENGVLAFESIQKITDNIKGKVCSLAVCAVAWLVAHVRMLGLDEREKSLQMIRQLAGPLFSENTLQFYNERVVIMNSILERMCADVLQQTATQIKFPSTGVDTMPYWNLLPPKRPIKEVLTDIFAKVLEKGWVDSRSIHIFDTLLHMGGVYWFCNNLIKELLKETRKEHTLRAVELLYSIFCLDMQQVTLVLLGHILPGLLTDSSKWHSLMDPPGTALAKLAVWCALSSYSSHKGQASTRQKKRHREDIEDYISLFPLDDVQPSKLMRLLSSNEDDANILSSPTDRSMSSSLSASQLHTVNMRDPLNRVLANLFLLISSILGSRTAGPHTQFVQWFMEECVDCLEQGGRGSVLQFMPFTTVSELVKVSAMSSPKVVLAITDLSLPLGRQVAAKAIAAL

SEQ ID NO: 24163 - protein, 976 aa, Homo sapiens
MKVVNLKQAILQAWKERWSDYQWAINMKKFFPKGATWDILNLADALLEQAMIGPSPNPLILSYLKYAISSQFDDFSRDLCVQALLDIMDMFCDRLSCHGKAEECIGLCRALLSALHWLLRCTAASAERLREGLEAGTPAAGEKQLAMCLQRLEKTLSSTKNRALLHIAKLEEASSWTAIEHSLLKLGEILANLSNPQLRSQAEQCGTLIRSIPTMLSVHAEQMHKTGFPTVHAVILLEGTMNLTGETQSLVEQLTMVKRMQHIPTPLFVLEIWKACFVGLIESPEGTEELKWTAFTFLKIPQVLVKLKKYSHGDKDFTEDVNCAFEFLLKLTPLLDKADQRCNCDCTNFLLQECGKQGLLSEASVNNLMAKRKADREHAPQQKSGENANIQPNIQLILRAEPTVTNILKTMDADHSKSPEGLLGVLGHMLSGKSLDLLLAAAAATGKLKSFARKFINLNEFTTYGSEESTKPASVRALLFDISFLMLCHVAQTYGSEVILSESRTGAEVPFFETWMQTCMPEEGKILNPDHPCFRPDSTKVESLVALLNNSSEMKLVQMKWHEACLSISAAILEILNAWENGVLAFESIQKITDNIKGKVCSLAVCAVAWLVAHVRMLGLDEREKSLQMIRQLAGPLFSENTLQFYNERVVIMNSILERMCADVLQQTATQIKFPSTGVDTMPYWNLLPPKRPIKEVLTDIFAKVLEKGWVDSRSIHIFDTLLHMGGVYWFCNNLIKELLKETRKEHTLRAVELLYSIFCLDMQQVTLVLLGHILPGLLTDSSKWHSLMDPPGTALAKLAVWCALSSYSSHKGQASTRQKKRHREDIEDYISLFPLDDVQPSKLMRLLSSNEDDANILSSPTDRSMSSSLSASQLHTVNMRDPLNRVLANLFLLISSILGSRTAGPHTQFVQWFMEECVDCLEQGGRGSVLQFMPFTTVSELVKVSAMSSPKVVLAITDLSLPLGRQVAAKAIAAL

SEQ ID NO: 24164 - protein, 341 aa, Homo sapiens
MVPAAGALLWVLLLNLGPRAAGAQGLTQTPTEMQRVSLRFGGPMTRSYRSTARTGLPRKTRIILEDENDAMADADRLAGPAAAELLAATVSTGFSRSSAINEEDGSSEEGVVINAGKDSTSRELPSATPNTAGSSSTRFIANSQEPEIRLTSSLPRSPGRSTEDLPGSQATLSQWSTPGSTPSRWPSPSPTAMPSPEDLRLVLMPWGPWHCHCKSGTMSRSRSGKLHGLSGRLRVGALSQLRTEHKPCTYQQCPCNRLREECPLDTSLCTDTNCASQSTTSTRTTTTPFPTIHLRSSPSLPPASPCPALAFWKRVRIGLEDIWNSLSSVFTEMQPIDRNQR

SEQ ID NO: 24165 - protein, 176 aa, Homo sapiens
MVPAAGALLWVLLLNLGPRAAGAQGLTQTPTEMQRVSLRFGGPMTRSYRSTARTGLPRKTRIILEDENDAMADADRLAGPAAAELLAATVSTGFSRSSAINEEDGSSEEGVVINAGKDSTSRELPSATPNTAGSSSTRFIANSQEPEIRLTSSLPRSPGRSTEDLPCHLLRICGWC

SEQ ID NO: 24166 - protein, 2174 aa, Homo sapiens
MSASFVPNGASLEDCHCNLFCLADLTGIKWKKYVWQGPTSAPILFPVTEEDPILSSFSRCLKADVLGVWRRDQRPGRRELWIFWWGEDPSFADLIHHDLSEEEDGVWENGLSYECRTLLFKAVHNLLERCLMNRNFVRIGKWFVKPYEKDEKPINKSEHLSCSFTFFLHGDSNVCTSVEINQHQPVYLLSEEHITLAQQSNSPFQVILCPFGLNGTLTGQAFKMSDSATKKLIGEWKQFYPISCCLKEMSEEKQEDMDWEDDSLAAVEVLVAGVRMIYPACFVLVPQSDIPTPSPVGSTHCSSSCLGVHQVPASTRDPAMSSVTLTPPTSPEEVQTVDPQSVQKWVKFSSVSDGFNSDSTSHHGGKIPRKLANHVVDRVWQECNMNRAQNKRKYSASSGGLCEEATAAKVASWDFVEATQRTNCSCLRHKNLKSRNAGQQGQAPSLGQQQQILPKHKTNEKQEKSEKPQKRPLTPFHHRVSVSDDVGMDADSASQRLVISAPDSQVRFSNIRTNDVAKTPQMHGTEMANSPQPPPLSPHPCDVVDEGVTKTPSTPQSQHFYQMPTPDPLVPSKPMEDRIDSLSQSFPPQYQEAVEPTVYVGTAVNLEEDEANIAWKYYKFPKKKDVEFLPPQLPSDKFKDDPVGPFGQESVTSVTELMVQCKKPLKVSDELVQQYQIKNQCLSAIASDAEQEPKIDPYAFVEGDEEFLFPDKKDRQNSEREAGKKHKVEDGTSSVTVLSHEEDAMSLFSPSIKQDAPRPTSHARPPSTSLIYDSDLAVSYTDLDNLFNSDEDELTPGSKKSANGSDDKASCKESKTGNLDPLSCISTADLHKMYPTPPSLEQHIMGFSPMNMNNKEYGSMDTTPGGTVLEGNSSSIGAQFKIEVDEGFCSPKPSEIKDFSYVYKPENCQILVGCSMFAPLKTLPSQYLPPIKLPEECIYRQSWTVGKLELLSSGPSMPFIKEGDGSNMDQEYGTAYTPQTHTSFGMPPSSAPPSNSGAGILPSPSTPRFPTPRTPRTPRTPRGAGGPASAQGSVKYENSDLYSPASTPSTCRPLNSVEPATVPSIPEAHSLYVNLILSESVMNLFKDCNFDSCCICVCNMNIKGADVGVYIPDPTQEAQYRCTCGFSAVMNRKFGNNSGLFLEDELDIIGRNTDCGKEAEKRFEALRATSAEHVNGGLKESEKLSDDLILLLQDQCTNLFSPFGAADQDPFPKSGVISNWVRVEERDCCNDCYLALEHGRQFMDNMSGGKVDEALVKSSCLHPWSKRNDVSMQCSQDILRMLLSLQPVLQDAIQKKRTVRPWGVQGPLTWQQFHKMAGRGSYGTDESPEPLPIPTFLLGYDYDYLVLSPFALPYWERLMLEPYGSQRDIAYVVLCPENEALLNGAKSFFRDLTAIYESCRLGQHRPVSRLLTDGIMRVGSTASKKLSEKLVAEWFSQAADGNNEAFSKLKLYAQVCRYDLGPYLASLPLDSSLLSQPNLVAPTSQSLITPPQMTNTGNANTPSATLASAASSTMTVTSGVAISTSVATANSTLTTASTSSSSSSNLNSGVSSNKLPSFPPFGSMNSNAAGSMSTQANTVQSGQLGGQQTSALQTAGISGESSSLPTQPHPDVSESTMDRDKVGIPTDGDSHAVTYPPAIVVYIIDPFTYENTDESTNSSSVWTLGLLRCFLEMVQTLPPHIKSTVSVQIIPCQYLLQPVKHEDREIYPQHLKSLAFSAFTQCRRPLPTSTNVKTLTGFGPGLAMETALRSPDRPECIRLYAPPFILAPVKDKQTELGETFGEAGQKYNVLFVGYCLSHDQRWILASCTDLYGELLETCIINIDVPNRARRKKSSARKFGLQKLWEWCLGLVQMSSLPWRVVIGRLGRIGHGELKDWSCLLSRRNLQSLSKRLKDMCRMCGISAADSPSILSACLVAMEPQGSFVIMPDSVSTGSVFGRSTTLNMQTSQLNTPQDTSCTHILVFPTSASVQVASATYTTENLDLAFNPNNDGADGMGIFDLLDTGDDLDPDIINILPASPTGSPVHSPGSHYPHGGDAGKGQSTDRLLSTEPHEEVPNILQQPLALGYFVSTAKAGPLPDWFWSACPQAQYQCPLFLKASLHLHVPSVQSDELLHSKHSHPLDSNQTSDVLRFVLEQYNALSWLTCDPATQDRRSCLPIHFVVLNQLYNFIMNML

SEQ ID NO: 24167 - protein, 254 aa, Homo sapiens
MDPAASSCMRSLQPPAPVWGCLRNPHSEGNGASGLPHYPPTPFSFHQKPDFLATATAAYPDFSASCLAATPHSLPQEEHIFTEQHPAFPQSPNWHFPVSDARRRPNSGPAGGSKEMGTSSLGLVDTTGGPGDDYGVLGSTANETEKKSSRRRKESSDNQENRGKPEGSSKARKERTAFTKEQLRELEAEFAHHNYLTRLRRYEIAVNLDLSERQVKVWFQNRRMKWKRVKGGQPISPNGQDPEDGDSTASPSSE

SEQ ID NO: 24168 - protein, 184 aa, Homo sapiens
MDPAASSCMRSLQPPAPVWGCLRNPHSEGNGASGLPHYPPTPFSFHQKPDFLATATAAYPDFSASCLAATPHSLPQEEHIFTEQHPAFPQSPNWHFPVSDARRRPNSGPAGGSKEMGTSSLGLVDTTGGPGDDYGVLGSTANETEKKSSRRRKESSGQSVVPEPKDEVEACEGRSAHLPQWAGP

SEQ ID NO: 24169 - protein, 139 aa, Homo sapiens
MGTSSLGLVDTTGGPGDDYGVLGSTANETEKKSSRRRKESSDNQENRGKPEGSSKARKERTAFTKEQLRELEAEFAHHNYLTRLRRYEIAVNLDLSERQVKVWFQNRRMKWKRVKGGQPISPNGQDPEDGDSTASPSSE

SEQ ID NO: 24170 - protein, 263 aa, Homo sapiens
MWELRSASFWRAIFAEFFATLFYVFFGLGSSLRWAPGPLHVLQVAMAFGLALATLVQSVGHISGAHVNPAVTFAFLVGSQMSLLRAFCYMAAQLLGAVAGAAVLYSVTPPAVRGNLALNTLHPAVSVGQATTVEIFLTLQFVLCIFATYDERRNGQLGSVALAVGFSLALGHLFGMYYTGAGMNPARSFAPAILTGNFTNHWVYWVGPIIGGGLGSLLYDFLLFPRLKSISERLSVLKGAKPDVSNGQPEVTGEPVELNTQAL

SEQ ID NO: 24171 - protein, 747 aa, Homo sapiens
MVPGSEGPARAGSVVADVVFVIEGTANLGPYFEGLRKHYLLPAIEYFNGGPPAETDFGGDYGGTQYSLVVFNTVDCAPESYVQCHAPTSSAYEFVTWLDGIKFMGGGGESCSLIAEGLSTALQLFDDFKKMREQIGQTHRVCLLICNSPPYLLPAVESTTYSGCTTENLVQQIGERGIHFSIVSPRKLPALRLLFEKAAPPALLEPLQPPTDVSQDPRHMVLVRGLVLPVGGGSAPGPLQSKQPVPLPPAAPSGATLSAAPQQPLPPVPPQYQVPGNLSAAQVAAQNAVEAAKNQKAGLGPRFSPITPLQQAAPGVGPPFSQAPAPQLPPGPPGAPKPPPASQPSLVSTVAPGSGLAPTAQPGAPSMAGTVAPGGVSGPSPAQLGAPALGGQQSVSNKLLAWSGVLEWQEKPKPASVDANTKLTRSLPCQVYVNHGENLKTEQWPQKLIMQLIPQQLLTTLGPLFRNSRMVQFHFTNKDLESLKGLYRIMGNGFAGCVHFPHTAPCEVRVLMLLYSSKKKIFMGLIPYDQSGFVNGIRQVITNHKQVQQQKLEQQQRGMGGQQAPPGLGPILEDQARPSQNLLQLRPPQPQPQGTVGASGATGQPQPQGTAQPPPGAPQGPPGAASGPPPPGPILRPQNPGANPQLRSLLLNPPPPQTGVPPPQASLHHLQPPGAPALLPPPHQGLGQPQLGPPLLHPPPAQSWPAQLPPRAPLPGQMLLSGGPRGPVPQPGLQPSVMEDDILMDLI

SEQ ID NO: 24172 - protein, 793 aa, Homo sapiens
MVPGSEGPARAGSVVADVVFVIEGTANLGPYFEGLRKHYLLPAIEYFNGGPPAETDFGGDYGGTQYSLVVFNTVDCAPESYVQCHAPTSSAYEFVTWLDGIKFMGGGGESCSLIAEGLSTALQLFDDFKKMREQIGQTHRVCLLICNSPPYLLPAVESTTYSGCTTENLVQQIGERGIHFSIVSPRKLPALRLLFEKAAPPALLEPLQPPTDVSQDPRHMVLVRGLVLPVGGGSAPGPLQSKQPVPLPPAAPSGATLSAAPQQPLPPVPPQYQVPGNLSAAQVAAQNAVEAAKNQKAGLGPRFSPITPLQQAAPGVGPPFSQAPAPQLPPGPPGAPKPPPASQPSLVSTVAPGSGLAPTAQPGAPSMAGTVAPGGVSGPSPAQLGAPALGGQQSVSNKLLAWSGVLEWQEKPKPASVDANTKLTRSLPCQVYVNHGENLKTEQWPQKLIMQLIPQQLLTTLGPLFRNSRMVQFHFTNKDLESLKGLYRIMGNGFAGCVHFPHTAPCEVRVLMLLYSSKKKIFMGLIPYDQSGFVNGIRQVITNHKQVQQQKLEQQQRGMGGQQAPPGLGPILEDQARPSQNLLQLRPPQPQPQGTVGASGATGQPQPQGTAQPPPGAPQGPPGAASGPPPPGPILRPQNPGANPQLRSLLLNPPPPQTGVPPPQASLHHLQPPGAPALLPPPHQGLGQPQLGPPLLHPPPAQSWPAQLPPRAPLPAAKRKREGEGRVFREKWERAYFFVEVKSMPMCLICKQIVSVLKEYNLKRHYESKHSKSYDQYTEQTRRIRARPIWPDP

SEQ ID NO: 24173 - protein, 730 aa, Homo sapiens
MVPGSEGPARAGSVVADVVFVIEGTANLGPYFEGLRKHYLLPAIEYFNGGPPAETDFGGDYGGTQYSLVVFNTVDCAPESYVQCHAPTSSAYEFVTWLDGIKFMGGGGESCSLIAEGLSTALQLFDDFKKMREQIGQTHRVCLLICNSPPYLLPAVESTTYSGCTTENLVQQIGERGIHFSIVSPRKLPALRLLFEKAAPPALLEPLQPPTDVSQDPRHMVLVRGLVLPVGGGSAPGPLQSKQPVPLPPAAPSGATLSAAPQQPLPPVPPQYQVPGNLSAAQVAAQNAVEAAKNQKAGLGPRFSQAPAPQLPPGPPGAPKPPPASQPSLVSTVAPGSGLAPTAQPGAPSMAGTVAPGGVSGPSPAQLGAPALGGQQSVSNKLLAWSGVLEWQEKPKPASVDANTKLTRSLPCQVYVNHGENLKTEQWPQKLIMQLIPQQLLTTLGPLFRNSRMVQFHFTNKDLESLKGLYRIMGNGFAGCVHFPHTAPCEVRVLMLLYSSKKKIFMGLIPYDQSGFVNGIRQVITNHKQVQQQKLEQQQRGMGGQQAPPGLGPILEDQARPSQNLLQLRPPQPQPQGTVGASGATGQPQPQGTAQPPPGAPQGPPGAASGPPPPGPILRPQNPGANPQLRSLLLNPPPPQTGVPPPQASLHHLQPPGAPALLPPPHQGLGQPQLGPPLLHPPPAQSWPAQLPPRAPLPGQMLLSGGPRGPVPQPGLQPSVMEDDILMDLI

SEQ ID NO: 24174 - protein, 534 aa, Homo sapiens
MVPGSEGPARAGSVVADVVFVIEGTANLGPYFEGLRKHYLLPAIEYFNGGPPAETDFGGDVPGNLSAAQVAAQNAVEAAKNQKAGLGPRFSPITPLQQAAPGVGPPFSQAPAPQLPPGPPGAPKPPPASQPSLVSTVAPGSGLAPTAQPGAPSMAGTVAPGGVSGPSPAQLGAPALGGQQSVSNKLLAWSGVLEWQEKPKPASVDANTKLTRSLPCQVYVNHGENLKTEQWPQKLIMQLIPQQLLTTLGPLFRNSRMVQFHFTNKDLESLKGLYRIMGNGFAGCVHFPHTAPCEVRVLMLLYSSKKKIFMGLIPYDQSGFVNGIRQVITNHKQVQQQKLEQQQRGMGGQQAPPGLGPILEDQARPSQNLLQLRPPQPQPQGTVGASGATGQPQPQGTAQPPPGAPQGPPGAASGPPPPGPILRPQNPGANPQLRSLLLNPPPPQTGVPPPQASLHHLQPPGAPALLPPPHQGLGQPQLGPPLLHPPPAQSWPAQLPPRAPLPGQMLLSGGPRGPVPQPGLQPSVMEDDILMDLI

SEQ ID NO: 24175 - protein, 304 aa, Homo sapiens
MEHPLFGCLRSPHATAQGLHPFSQSSLALHGRSDHMSYPELSTSSSSCIIAGYPNEEGMFASQHHRGHHHHHHHHHHHHHQQQQHQALQTNWHLPQMSSPPSAARHSLCLQPDSGGPPELGSSPPVLCSNSSSLGSSTPTGAACAPGDYGRQALSPAEAEKRSGGKRKSDSSDSQEGNYKSEVNSKPRKERTAFTKEQIRELEAEFAHHNYLTRLRRYEIAVNLDLTERQVKVWFQNRRMKWKRVKGGQQGAAAREKELVNVKKGTLLPSELSGIGAATLQQTGDSIANEDSHDSDHSSEHAHL

SEQ ID NO: 24176 - protein, 219 aa, Homo sapiens
METPIEREIRRSCEREESLRRSRGLSPGRAGRELVELRVRPVLNLPGPGPALPRALERARAGAQMQRDIEREAHRQAALARPAVPEPRARSPPQPLGELKRFFEAAAGSGSSAGAGDGAGPQRLPEPGGRPRSAVQGGCRVLGSAPPPFTPSLLEQEVRAVREREQELQRQRRSVYGTAEFKEPTPSLTASRGDGKLVVIWPPRRKVSENGLEQEERKP

SEQ ID NO: 24177 - protein, 651 aa, Homo sapiens
MSGVRAVRISIESACEKQVHEVGLDGTETYLPPLSMSQNLARLAQRIDFSQGSGSEEEEAAGTEGDAQEWPGAGSSADQDDEEGVVKFQPSLWPWDSVRNNLRSALTEMCVLYDVLSIVRDKKFMTLDPVSQDALPPKQNPQTLQLISKKKSLAGAAQILLKGAERLTKSVTENQENKLQRDFNSELLRLRQHWKLRKVGDKILGDLSYRSAGSLFPHHGTFEVIKNTDLDLDKKIPEDYCPLDVQIPSDLEGSAYIKVSIQKQAPDIGDLGTVNLFKRPLPKSKPGSPHWQTKLEAAQNVLLCKEIFAQLSREAVQIKSQVPHIVVKNQIISQPFPSLQLSISLCHSSNDKKSQKFATEKQCPEDHLYVLEHNLHLLIREFHKQTLSSIMMPHPASAPFGHKRMRLSGPQAFDKNEINSLQSSEGLLEKIIKQAKHIFLRSRAAATIDSLASRIEDPQIQAHWSNINDVYESSVKVLITSQGYEQICKSIQLQLNIGVEQIRVVHRDGRVITLSYQEQELQDFLLSQMSQHQVHAVQQLAKVMGWQVLSFSNHVGLGPIESIGNASAITVASPSGDYAISVRNGPESGSKIMVQFPRNQCKDLPKSDVLQDNKWSHLRGPFKEVQWNKMEGRNFVYKMELLMSALSPCLL

SEQ ID NO: 24178 - protein, 145 aa, Homo sapiens
MSGVRAVRISIESACEKQVHEVGLDGTETYLPPLSMSQNLARLAQRIDFSQGSGSEEEEAAGTEGDAQEWPGAGSSADQDDEEGVVKFQPSLWPWDSVRNNLRSALTEMCVLYDVLSIVRDKKFMTLDPVSQDALPPKQVFVDFN

SEQ ID NO: 24179 - protein, 364 aa, Homo sapiens
MLGSGFKAERLRVNLRLVINRLKLLEKKKTELAQKARKEIADYLAAGKDERARIRVEHIIREDYLVEAMEILELYCDLLLARFGLIQSMKELDSGLAESVSTLIWAAPRLQSEVAELKIVADQLCAKYSKEYGKLCRTNQIGTVNDRLMHKLSVEAPPKILVERYLIEIAKNYNVPYEPDSVVMAEAPPGVETDLIDVGFTDDVKKGGPGRGGSGGFTAPVGGPDGTVPMPMPMPMPSANTPFSYPLPKGPSDFNGLPMGTYQAFPNIHPPQIPATPPSYESVDDINADKNISSAQIVGPGPKPEASAKLPSRPADNYDNFVLPELPSVPDTLPTASAGASTSASEDIDFDDLSRRFEELKKKT

SEQ ID NO: 24180 - protein, 335 aa, Homo sapiens
MLGSGFKAERLRVNLRLVINRLKLLEKKKTELAQKARKEIADYLAAGKDERARIRVEHIIREDYLVEAMEILELYCDLLLARFGLIQSMKELDSGLAESVSTLIWAAPRLQSEVAELKIVADQLCAKYSKEYGKLCRTNQIGTVNDRLMHKLSVEAPPKILVERYLIEIAKNYNVPYEPDSVVMAEAPPGVETDLIDVGFTDDVKKGGPGRGGSGGFTAPVGGPDGTVPMPMPMPMPMPSANTPFSYPLPKGPVDDINADKNISSAQIVGPGPKPEASAKLPSRPADNYDNFVLPELPSVPDTLPTASAGASTSASEDIDFDDLSRRFEELKKKT

SEQ ID NO: 24181 - protein, 379 aa, Homo sapiens
MVFKLKTKEEQHSMLGSGFKAERLRVNLRLVINRLKLLEKKKTELAQKARKEIADYLAAGKDERARIRVEHIIREDYLVEAMEILELYCDLLLARFGLIQSMKELDSGLAESVSTLIWAAPRLQSEVAELKIVADQLCAKYSKEYGKLCRTNQIGTVNDRLMHKLSVEAPPKILVERYLIEIAKNYNVPYEPDSVVMAEAPPGVETDLIDVGFTDDVKKGGPGRGGSGGFTAPVGGPDGTVPMPMPMPMPMPSANTPFSYPLPKGPSDFNGLPMGTYQAFPNIHPPQIPATPPSYESVDDINADKNISSAQIVGPGPKPEASAKLPSRPADNYDNFVLPELPSVPDTLPTASAGASTSASEDIDFDDLSRRFEELKKKT

SEQ ID NO: 24182 - protein, 366 aa, Homo sapiens
MLGSGFKAERLRVNLRLVINRLKLLEKKKTELAQKARKEIADYLAAGKDERARIRVEHIIREDYLVEAMEILELYCDLLLARFGLIQSMKELDSGLAESVSTLIWAAPRLQSEVAELKIVADQLCAKYSKEYGKLCRTNQIGTVNDRLMHKLSVEAPPKILVERYLIEIAKNYNVPYEPDSVVMAEAPPGVETDLIDVGFTDDVKKGGPGRGGSGGFTAPVGGPDGTVPMPMPMPMPMPSANTPFSYPLPKGPSDFNGLPMGTYQAFPNIHPPQIPATPPSYESVDDINADKNISSAQIVGPGPKPEASAKLPSRPADNYDNFVLPELPSVPDTLPTASAGASTSASEDIDFDDLSRRFEELKKKT

SEQ ID NO: 24183 - protein, 360 aa, Homo sapiens
MLGSGFKAERLRVNLRLVINRLKLLEKKKTELAQKARKEIADYLAAGKDERARIRVEHIIREDYLVEAMEILELYCDLLLARFGLIQSMKELDSGLAESVSTLIWAAPRLQSEVAELKIVADQLCAKYSKEYGKLCRTNQIGTVNDRLMHKLSVEAPPKILVERYLIEIAKNYNVPYEPDSVVMAEAPPGVETDLIDVGFTDDVKKGGPGRGGSGGFTAPVGGPDGTVPMPMPMPMPMPSANTPFSYPLPKGPSDFNGLPMGTYQAFPNIHPPQIPATPPSYESMTLMLIRISLLHRLLVLDPSQKPLQSFLPDLQITMTTLSYQSCHLCQTHYQLHLLVPAPQHLKTLTLMIFPGGLKS

SEQ ID NO: 24184 - protein, 218 aa, Homo sapiens
MHKLSVEAPPKILVERYLIEIAKNYNVPYEPDSVVMAEAPPGVETDLIDVGFTDDVKKGGPGRGGSGGFTAPVGGPDGTVPMPMPMPMPMPSANTPFSYPLPKGPSDFNGLPMGTYQAFPNIHPPQIPATPPSYESVDDINADKNISSAQIVGPGPKPEASAKLPSRPADNYDNFVLPELPSVPDTLPTASAGASTSASEDIDFDDLSRRFEELKKKT

SEQ ID NO: 24185 - protein, 521 aa, Homo sapiens
MAENPSLENHRIKSFKNKGRDVETMRRHRNEVTVELRKNKRDEHLLKKRNVPQEESLEDSDVDADFKAQNVTLEAILQNATSDNPVVQLSAVQAARKLLSSDRNPPIDDLIKSGILPILVKCLERDDNPSLQFEAAWALTNIASGTSAQTQAVVQSNAVPLFLRLLRSPHQNVCEQAVWALGNIIGDGPQCRDYVISLGVVKPLLSFISPSIPITFLRNVTWVIVNLCRNKDPPPPMETVQEILPALCVLIYHTDINILVDTVWALSYLTDGGNEQIQMVIDSGVVPFLVPLLSHQEVKVQTAALRAVGNIVTGTDEQTQVVLNCDVLSHFPNLLSHPKEKINKEAVWFLSNITAGNQQQVQAVIDAGLIPMIIHQLAKGDFGTQKEAAWAISNLTISGRKDQVEYLVQQNVIPPFCNLLSVKDSQVVQVVLDGLKNILIMAGDEASTIAEIIEECGGLEKIEVLQQHENEDIYKLAFEIIDQYFSGDDIDEDPCLIPEATQGGTYNFDPTANLQTKEFNF

SEQ ID NO: 24186 - protein, 146 aa, Homo sapiens
MTLTKGSFTYSSGEEYRGEWKEGRRHGFGQLMFADGGTYLGHFENGLFNGFGVLTFSDGSRYEGEFAQGKFNGVGVFIRYDNMTFEGEFKNGRVDGFGLLTFPDGSHGIPRNEGLFENNKLLRREKCSAIVQRAQSASKSARNLTA

SEQ ID NO: 24187 - protein, 204 aa, Homo sapiens
MAWSRAGPMRSGVAPGCLGNSQWAAGIVPSAVAQDGGVKWGNRWWRWRRARWQPGAHQRKSPRRWNPASRRDGHPERPAPGRRHGFGQLMFADGGTYLGHFENGLFNGFGVLTFSDGSRYEGEFAQGKFNGVGVFIRYDNMTFEGEFKNGRVDGFGLLTFPDGSHGIPRNEGLFENNKLLRREKCSAIVQRAQSASKSARNLTA

SEQ ID NO: 24188 - protein, 815 aa, Homo sapiens
MAGGHCGSFPAAAAGSGEIVQLNVGGTRFSTSRQTLMWIPDSFFSSLLSGRISTLRDETGAIFIDRDPAAFAPILNFLRTKELDLRGVSINVLRHEAEFYGITPLVRRLLLCEELERSSCGSVLFHGYLPPPGIPSRKINNTVRSADSRNGLNSTEGEARGNGTQPVLSGTGEETVRLGFPVDPRKVLIVAGHHNWIVAAYAHFAVCYRIKESSGWQQVFTSPYLDWTIERVALNAKVVGGPHGDKDKMVAVASESSIILWSVQDGGSGSEIGVFSLGVPVDALFFIGNQLVATSHTGKVGVWNAVTQHWQVQDVVPITSYDTAGSFLLLGCNNGSIYYIDMQKFPLRMKDNDLLVTELYHDPSNDAITALSVYLTPKTSVSGNWIEIAYGTSSGAVRVIVQHPETVGSGPQLFQTFTVHRSPVTKIMLSEKHLVSVCADNNHVRTWTVTRFRGMISTQPGSTPLASFKILSLEETESHGSYSSGNDIGPFGERDDQQVFIQKVVPITNKLFVRLSSTGKRICEIQAVDCTTISSFTVRECEGSSRMGSRPRRYLFTGHTNGSIQMWDLTTAMDMVNKSEDKDVGGPTEEELLKLLDQCDLSTSRCATPNISPATSVVQHSHLRESNSSLQLQHHDTTHEAATYGSMRPYRESPLLARARRTESFHSYRDFQTINLNRNVERAVPENGNLGPIQAEVKGATGECNISERKSPGVEIKSLRELDSGLEVHKIAEGFSESKKRSSEDENENKIEFRKKGGFEGGGFLGRKKVPYLASSPSTSDGGTDSPGTASPSPTKTTPSPRHKKSDSSGQEYSL

SEQ ID NO: 24189 - protein, 813 aa, Homo sapiens
MAGGHCGSFPAAAAGSGEIVQLNVGGTRFSTSRQTLMWIPDSFFSSLLSGRISTLRDETGAIFIDRDPAAFAPILNFLRTKELDLRGVSINVLRHEAEFYGITPLVRRLLLCEELERSSCGSVLFHGYLPPPGIPSRKINNTVRSADSRNGLNSTEGEARGNGTQPVLSGTGEETVRLGFPVDPRKVLIVAGHHNWIVAAYAHFAVCYRIKESSGWQQVFTSPYLDWTIERVALNAKVVGGPHGDKDKMVAVASESSIILWSVQDGGSGSEIGVFSLGVPVDALFFIGNQLVATSHTGKVGVWNAVTQHWQVQDVVPITSYDTAGSFLLLGCNNGSIYYIDMQKFPLRMKDNDLLVTELYHDPSNDAITALSVYLTPKTSVSGNWIEIAYGTSSGAVRVIVQHPETVGSGPQLFQTFTVHRSPVTKIMLSEKHLVSVCADNNHVRTWTVTRFRGMISTQPGSTPLASFKILSLEETESHGSYSSGNDIGPFGERDDQQVFIQKVVPITNKLFVRLSSTGKRICEIQAVDCTTISSFTVRECEGSSRMGSRPRRYLFTGHTNGSIQMWDLTTAMDMVNKSEDKGGPTEEELLKLLDQCDLSTSRCATPNISPATSVVQHSHLRESNSSLQLQHHDTTHEAATYGSMRPYRESPLLARARRTESFHSYRDFQTINLNRNVERAVPENGNLGPIQAEVKGATGECNISERKSPGVEIKSLRELDSGLEVHKIAEGFSESKKRSSEDENENKIEFRKKGGFEGGGFLGRKKVPYLASSPSTSDGGTDSPGTASPSPTKTTPSPRHKKSDSSGQEYSL

SEQ ID NO: 24190 - protein, 169 aa, Homo sapiens
MRPYRESPLLARARRTESFHSYRDFQTINLNRNVERAVPENGNLGPIQAEVKGATGECNISERKSPGVEIKSLRELDSGLEVHKIAEGFSESKKRSSEDENENKIEFRKKGGFEGGGFLGRKKVPYLASSPSTSDGGTDSPGTASPSPTKTTPSPRHKKSDSSGQEYSL

SEQ ID NO: 24191 - protein, 257 aa, Homo sapiens
MSRPLITRSPASPLNNQGIPTPAQLTKSNAPVHIDVGGHMYTSSLATLTKYPESRIGRLFDGTEPIVLDSLKQHYFIDRDGQMFRYILNFLRTSKLLIPDDFKDYTLLYEEAKYFQLQPMLLEMERWKQDRETGRFSRPCECLVVRVAPDLGERITLSGDKSLIEEVFPEIGDVMCNSVNAGWNHDSTHVIRFPLNGYCHLNSVQVLERLQQRGFEIVGSCGGGVDSSQFSEYVLRRELRRTPRVPSVIRIKQEPLD

SEQ ID NO: 24192 - protein, 265 aa, Homo sapiens
MAAAVPKRMRGPAQAKLLPGSAIQALVGLARPLVLALLLVSAALSSVVSRTDSPSPTVLNSHISTPNVNALTHENQTKPSISQISTTLPPTTSTKKSGGASVVPHPSPTPLSQEEADNNEDPSIEEEDLLMLNSSPSTAKDTLDNGDYGEPDYDWTTGPRDDDESDDTLEENRGYMEIEQSVKSFKMPSSNIEEEDSHFFFHLIIFAFCIAVVYITYHNKRKIFLLVQSRKWRDGLCSKTVEYHRLDQNVNEAMPSLKITNDYIF

SEQ ID NO: 24193 - protein, 83 aa, Homo sapiens
MCCNYYRNCCGGCGYGSGWSSGCGYGCGYGCGYGSGCRYGSGYGTGCGYGCGYGSGCGYGCGYSSSCCGYRPLCYRRCYSSCY

SEQ ID NO: 24194 - protein, 121 aa, Homo sapiens
MASCSTSGTCGSSCCQPSCCETSCCQPSCCQTSSCGTGCGIGGGIGYGQEGSGGSVSTRIRWCHPDCHVEGTCLPPCYLVSCTPPSCCQLHHAEASCCRPSYCGQSCCRPACCCHCCEPTC

SEQ ID NO: 24195 - protein, 103 aa, Homo sapiens
MCGSYYRNYNGGHGYGCCGYGGLGCGYGGCGYGCCGYGGLGFGYGGLDCGYGGLGCGYGSFCGCGYRGLDCGYGCGYGYVSHSFCGCGYRCGSGYGSSFGYYY

SEQ ID NO: 24196 - protein, 128 aa, Homo sapiens
MTGSCCGSTFSSLSYGGGCCQPCCCRDPCCCRPVTCQTTVCRPVTCVPRCTRPICEPCRRPVCCDPCSLQEGCCRPITCCPSSCTAVVCRPCCWATTCCQPVSVQSPCCRPPCGQPTPCSTTCRTSSC

SEQ ID NO: 24197 - protein, 123 aa, Homo sapiens
MTGSCCGSTFSSLSYGGGCCQPCCCRDPCCCRPVTCQTTVCRPVTCVPRCTRPICEPCRRPVCCDPCSLQEGCCRPITCCPSSCTAVVCRPCCWATTCCQPVSVQSPCGQPTPCSTTCRTSSC

SEQ ID NO: 24198 - protein, 288 aa, Homo sapiens
MAAAAYVDHFAAECLVSMSSRAVVHGPREGPESRPEGAAVAATPTLPRVEERRDGKDSASLFVVARILADLNQQAPAPAPAERREGAAARKARTPCRLPPPAPEPTSPGAEGAAAAPPSPAWSEPEPEAGLEPEREPGPAGSGEPGLRQRVRRGRSRADLESPQRKHKCHYAGCEKVYGKSSHLKAHLRTHTGERPFACSWQDCNKKFARSDELARHYRTHTGEKKFSCPICEKRFMRSDHLTKHARRHANFHPGMLQRRGGGSRTGSLSDYSRSDASSPTISPASSP

SEQ ID NO: 24199 - protein, 302 aa, Homo sapiens
MDVLASYSIFQELQLVHDTGYFSALPSLEETWQQTCLELERYLQTEPRRISETFGEDLDCFLHASPPPCIEESFRRLDPLLLPVEAAICEKSSAVDILLSRDKLLSETCLSLQPASSSLDSYTAVNQAQLNAVTSLTPPSSPELSRHLVKTSQTLSAVDGTVTLKLVAKKAALSSVKVGGVATAAAAVTAAGAVKSGQSDSDQGGLGAEACPENKKRVHRCQFNGCRKVYTKSSHLKAHQRTHTGEKPYKCSWEGCEWRFARSDELTRHYRKHTGAKPFKCNHCDRCFSRSDHLALHMKRHI

SEQ ID NO: 24200 - protein, 269 aa, Homo sapiens
MTCLELERYLQTEPRRISETFGEDLDCFLHASPPPCIEESFRRLDPLLLPVEAAICEKSSAVDILLSRDKLLSETCLSLQPASSSLDSYTAVNQAQLNAVTSLTPPSSPELSRHLVKTSQTLSAVDGTVTLKLVAKKAALSSVKVGGVATAAAAVTAAGAVKSGQSDSDQGGLGAEACPENKKRVHRCQFNGCRKVYTKSSHLKAHQRTHTGEKPYKCSWEGCEWRFARSDELTRHYRKHTGAKPFKCNHCDRCFSRSDHLALHMKRHI

SEQ ID NO: 24201 - protein, 230 aa, Homo sapiens
MDVLASYSIFQELQLVHDTGYFSALPSLEETWQQTCLELERYLQTEPRRISETFGEDLDCFLHASPPPCIEESFRRLDPLLLPVEAAICEKSSAVDILLSRDKLLSETCLSLQPASSSLDSYTAVNQAQLNAVTSLTPPSSPELSRHLVKTSQTLSAVDGTVTLKLVAKKAALSSVKVRSLISAHGRDVSGVLHEAMSSRGTTGNTQVQSPSNATTATGVFPGLTILPST

SEQ ID NO: 24202 - protein, 274 aa, Homo sapiens
MFPSWPTCLELERYLQTEPRRISETFGEDLDCFLHASPPPCIEESFRRLDPLLLPVEAAICEKSSAVDILLSRDKLLSETCLSLQPASSSLDSYTAVNQAQLNAVTSLTPPSSPELSRHLVKTSQTLSAVDGTVTLKLVAKKAALSSVKVGGVATAAAAVTAAGAVKSGQSDSDQGGLGAEACPENKKRVHRCQFNGCRKVYTKSSHLKAHQRTHTGEKPYKCSWEGCEWRFARSDELTRHYRKHTGAKPFKCNHCDRCFSRSDHLALHMKRHI

SEQ ID NO: 24203 - protein, 112 aa, Homo sapiens
MDVLASYSIFQELQLVHDTGYFSALPSLEETWQQTCLELERYLQTEPRRISETFGEKPYKCSWEGCEWRFARSDELTRHYRKHTGAKPFKCNHCDRCFSRSDHLALHMKRHI

SEQ ID NO: 24204 - protein, 87 aa, Homo sapiens
MDVLASYSIFQELQLVHDTGYFSALPSLEETWQQVRSLISAHGRDVSGVLHEAMSSRGTTGNTQVQSPSNATTATGVFPGLTILPST

SEQ ID NO: 24205 - protein, 346 aa, Homo sapiens
MPSPLALRPYLRSEFSPSVDARPCSSPSELPAKLLLGATLPRAPRLPRRLAWCSIDWEQVCLLQRLGAGGFGSVYKATYRGVPVAIKQVNKCTKNRLASRRSFWAELNVARLRHDNIVRVVAASTRTPAGSNSLGTIIMEFGGNVTLHQVIYGAAGHPEGDAGEPHCRTGGQLSLGKCLKYSLDVVNGLLFLHSQSIVHLDLKPANILISEQDVCKISDFGCSEKLEDLLCFQTPSYPLGGTYTHRAPELLKGEGVTPKADIYSFAITLWQMTTKQAPYSGERQHILYAVVAYDLRPSLSAAVFEDSLPGQRLGDVIQRCWRPSAAQRPSARLLLVDLTSLKAELG

SEQ ID NO: 24206 - protein, 349 aa, Homo sapiens
MEEEKYLPELMAEKDSLDPSFVHASRLLAEEIEKFQGSDGKKEDEEKKYLDVISNKNIKLSERVLIPVKQYPKFNFVGKLLGPRGNSLKRLQEETGAKMSILGKGSMRDKAKEEELRKSGEAKYAHLSDELHVLIEVFAPPGEAYSRMSHALEEIKKFLVPDYNDEIRQEQLRELSYLNGSEDSGRGRGIRGRGIRIAPTAPSRGRGGAIPPPPPPGRGVLTPRGSTVTRGALPVPPVARGVPTPRARGAPTVPGYRAPPPPAHEAYEEYGYDDGYGGEYDDQTYETYDNSYATQTQSVPEYYDYGHGVSEDAYDSYAPEEWATTRSSLKAPPQRSARGGYREHPYGRY

SEQ ID NO: 24207 - protein, 2004 aa, Homo sapiens
MVKLANPLYTEWILEAIKKVKKQKQRPSEERICNAVSSSHGLDRKTVLEQLELSVKDGTILKVSNKGLNSYKDPDNPGRIALPKPRNHGKLDNKQNVDWNKLIKRAVEGLAESGGSTLKSIERFLKGQKDVSALFGGSAASGFHQQLRLAIKRAIGHGRLLKDGPLYRLNTKATNVDGKESCESLSCLPPVSLLPHEKDKPVAEPIPICSFCLGTKEQNREKKPEELISCADCGNSGHPSCLKFSPELTVRVKALRWQCIECKTCSSCRDQGKNADNMLFCDSCDRGFHMECCDPPLTRMPKGMWICQICRPRKKGRKLLQKKAAQIKRRYTNPIGRPKNRLKKQNTVSKGPFSKVRTGPGRGRKRKITLSSQSASSSSEEGYLERIDGLDFCRDSNVSLKFNKKTKGLIDGLTKFFTPSPDGRKARGEVVDYSEQYRIRKRGNRKSSTSDWPTDNQDGWDGKQENEERLFGSQEIMTEKDMELFRDIQEQALQKVGVTGPPDPQVRCPSVIEFGKYEIHTWYSSPYPQEYSRLPKLYLCEFCLKYMKSRTILQQHMKKCGWFHPPANEIYRKNNISVFEVDGNVSTIYCQNLCLLAKLFLDHKTLYYDVEPFLFYVLTQNDVKGCHLVGYFSKEKHCQQKYNVSCIMILPQYQRKGYGRFLIDFSYLLSKREGQAGSPEKPLSDLGRLSYMAYWKSVILECLYHQNDKQISIKKLSKLTGICPQDITSTLHHLRMLDFRSDQFVIIRREKLIQDHMAKLQLNLRPVDVDPECLRWTPVIVSNSVVSEEEEEEAEEGENEEPQCQERELEISVGKSVSHENKEQDSYSVESEKKPEVMAPVSSTRLSKQVLPHDSLPANSQPSRRGRWGRKNRKTQERFGDKDSKLLLEETSSAPQEQYGECGEKSEATQEQYTESEEQLVASEEQPSQDGKPDLPKRRLSEGVEPWRGQLKKSPEALKCRLTEGSERLPRRYSEGDRAVLRGFSESSEEEEEPESPRSSSPPILTKPTLKRKKPFLHRRRRVRKRKHHNSSVVTETISETTEVLDEPFEDSDSERPMPRLEPTFEIDEEEEEEDENELFPREYFRRLSSQDVLRCQSSSKRKSKDEEEDEESDDADDTPILKPVSLLRKRDVKNSPLEPDTSTPLKKKKGWPKGKSRKPIHWKKRPGRKPGFKLSREIMPVSTQACVIEPIVSIPKAGRKPKIQESEETVEPKEDMPLPEERKEEEEMQAEAEEAEEGEEEDAASSEVPAASPADSSNSPETETKEPEVEEEEEKPRVSEEQRQSEEEQQELEEPEPEEEEDAAAETAQNDDHDADDEDDGHLESTKKKELEEQPTREDVKEEPGVQESFLDANMQKSREKIKDKEETELDSEEEQPSHDTSVVSEQMAGSEDDHEEDSHTKEELIELKEEEEIPHSELDLETVQAVQSLTQEESSEHEGAYQDCEETLAACQTLQSYTQADEDPQMSMVEDCHASEHNSPISSVQSHPSQSVRSVSSPNVPALESGYTQISPEQGSLSAPSMQNMETSPMMDVPSVSDHSQQVVDSGFSDLGSIESTTENYENPSSYDSTMGGSICGNSSSQSSCSYGGLSSSSSLTQSSCVVTQQMASMGSSCSMMQQSSVQPAANCSIKSPQSCVVERPPSNQQQQPPPPPPQQPQPPPPQPQPAPQPPPPQQQPQQQPQPQPQQPPPPPPPQQQPPLSQCSMNNSFTPAPMIMEIPESGSTGNISIYERIPGDFGAGSYSQPSATFSLAKLQQLTNTIMDPHAMPYSHSPAVTSYATSVSLSNTGLAQLAPSHPLAGTPQAQATMTPPPNLASTTMNLTSPLLQCNMSATNIGIPHTQRLQGQMPVKGHISIRSKSAPLPSAAAHQQQLYGRSPSAVAMQAGPRALAVQRGMNMGVNLMPTPAYNVNSMNMNTLNAMNSYRMTQPMMNSSYHSNPAYMNQTAQYPMQMQMGMMGSQAYTQQPMQPNPHGNMMYTGPSHHSYMNAAGVPKQSLNGPYMRR

SEQ ID NO: 24208 - protein, 621 aa, Homo sapiens
MLMAGQRGAWTMGDVVEKSLEGPLAPSTDEPSQKTGDLVEILNGEKVKFDDAGLSLILQNGLETLRMENALTDVILCVDIQEFSCHRVVLAAASNYFRAMFCNDLKEKYEKRIIIKGVDAETMHTLLDYTYTSKALITKQNVQRVLEAANLFQFLRMVDACASFLTEALNPENCVGILRLADTHSLDSLKKQVQSYIIQNFVQILNSEEFLDLPVDTLHHILKSDDLYVTEEAQVFETVMSWVRHKPSERLCLLPYVLENVRLPLLDPWYFVETVEADPLIRQCPEVFPLLQEARMYHLSGNEIISERTKPRMHEFQSEVFMIIGGCTKDERFVAEVTCLDPLRRSRLEVAKLPLTEHELESENKKWVEFACVTLKNEVYISGGKETQHDVWKYNSSINKWIQIEYLNIGRWRHKMVVLGGKVYVIGGFDGLQRINNVETYDPFHNCWSEAAPLLVHVSSFAATSHKKKLYVIGGGPNGKLATDKTQCYDPSTNKWSLKAAMPVEAKCINAVSFRDRIYVVGGAMRALYAYSPLEDSWCLVTQLSHERASCGIAPCNNRLYITGGRDEKNEVIATVLCWDPEAQKLTEECVLPRGVSHHGSVTIRKSYTHIRRIVPGAVSV

SEQ ID NO: 24209 - protein, 1107 aa, Homo sapiens
MPVMKGLLAPQNTFLDTIATRFDGTHSNFILANAQVAKGFPIVYCSDGFCELAGFARTEVMQKSCSCKFLFGVETNEQLMLQIEKSLEEKTEFKGEIMFYKKNGSPFWCLLDIVPIKNEKGDVVLFLASFKDITDTKVKITPEDKKEDKVKGRSRAGTHFDSARRRSRAVLYHISGHLQRREKNKLKINNNVFVDKPAFPEYKVSDAKKSKFILLHFSTFKAGWDWLILLATFYVAVTVPYNVCFIGNDDLSTTRSTTVSDIAVEILFIIDIILNFRTTYVSKSGQVIFEARSICIHYVTTWFIIDLIAALPFDLLYAFNVTVVSLVHLLKTVRLLRLLRLLQKLDRYSQHSTIVLTLLMSMFALLAHWMACIWYVIGKMEREDNSLLKWEVGWLHELGKRLESPYYGNNTLGGPSIRSAYIAALYFTLSSLTSVGFGNVSANTDAEKIFSICTMLIGALMHALVFGNVTAIIQRMYSRWSLYHTRTKDLKDFIRVHHLPQQLKQRMLEYFQTTWSVNNGIDSNELLKDFPDELRSDITMHLNKEILQLSLFECASRGCLRSLSLHIKTSFCAPGEYLLRQGDALQAIYFVCSGSMEVLKDSMVLAILGKGDLIGANLSIKDQVIKTNADVKALTYCDLQCIILKGLFEVLDLYPEYAHKFVEDIQHDLTYNLREGHESDVISRLSNKSMVSQSEPKGNGNINKRLPSIVEDEEEEEEGEEEEAVSLSPICTRGSSSRNKKVGSNKAYLGLSLKQLASGTVPFHSPIRVSRSNSPKTKQEIDPPNHNKRKEKNLKLQLSTLNNAGPPDLSPRIVDGIEDGNSSEESQTFDFGSERIRSEPRISPPLGDPEIGAAVLFIKAEETKQQINKLNSEVTTLTQEVSQLGKDMRNVIQLLENVLSPQQPSRFCSLHSTSVCPSRESLQTRTSWSAHQPCLHLQTGGAAYTQAQLCSSNITSDIWSVDPSSVGSSPQRTGAHEQNPADSELYHSPSLDYSPSHYQVVQEGHLQFLRCISPHSDSTLTPLQSISATLSSSVCSSSETSLHLVLPSRSEEGSFSQGTVSSFSLENLPGSWNQEGMASASTKPLENLPLEVVTSTAEVKDNKAINV

SEQ ID NO: 24210 - protein, 185 aa, Homo sapiens
MSMFALLAHWMACIWYVIGKMEREDNSLLKWEVGWLHELGKRLESPYYGNNTLGGPSIRSAYIAALYFTLSSLTSVGFGNVSANTDAEKIFSICTMLIGVSQFQVCPRPSWIICWFRNHFGFILLMTTLMHALVFGNVTAIIQRMYSRWSLYHTRTKDLKDFIRVHHLPQQLKQRMLEYFQTTCF

SEQ ID NO: 24211 - protein, 494 aa, Homo sapiens
MDGSGERSLPEPGSQSSAASDDIEIVVNVGGVRQVLYGDLLSQYPETRLAELINCLAGGYDTIFSLCDDYDPGKREFYFDRDPDAFKCVIEVYYFGEVHMKKGICPICFKNEMDFWKVDLKFLDDCCKSHLSEKREELEEIARRVQLILDDLGVDAAEGRWRRCQKCVWKFLEKPESSCPARVVAVLSFLLILVSSVVMCMGTIPELQVLDAEGNRVEHPTLENVETACIGWFTLEYLLRLFSSPNKLHFALSFMNIVDVLAILPFYVSLTLTHLGARMMELTNVQQAVQALRIMRIARIFKLARHSSGLQTLTYALKRSFKELGLLLMYLAVGIFVFSALGYTMEQSHPETLFKSIPQSFWWAIITMTTVGYGDIYPKTTLGKLNAAISFLCGVIAIALPIHPIINNFVRYYNKQRVLETAAKHELELMELNSSSGGEGKTGGSRSDLDNLPPEPAGKEAPSCSSRLKLSHSDTFIPLLTEEKHHRTRLQSCK

SEQ ID NO: 24212 - protein, 748 aa, Homo sapiens
MSGSGRKDFDVKHILRLRWKLFSHPSPSTGGPAGGGCLQQDGSGSFEHWGPSQSRLLKSQERSGVSTFWKKPSSSSSSSSSPSSSSSSFNPLNGTLLPVATRLQQGAPGQGTQQPARTLFYVESLEEEVVPGMDFPGPHEKGLVLQELKVEPDNSSQATGEGCGHRLSSTGHSMTPQSDLDSSSSEEFYQAVHHAEQTFRKMESYLKQQQLCDVILIVGNRKIPAHRLVLSSVSDYFAAMFTSDVCEAKQEEIKMEGIDPNALWDLVQFAYTGCLELKEDTIENLLAAACLLQLPQVVEVCCHFLMKLLHPSNCLGIRAFADAQGCIELMKVAHSYTMENIMEVIRNQEFLLLPAEELHKLLASDDVNVPDEETIFHALMMWVKYDMQSRCNDLSMLLAFIRLPLLPPQILADLENHALFKNDLECQKLILEAMKYHLLPERRTLMQSPRTKPRKSTVGTLYAVGGMDNNKGATTIEKYDLRTNLWIQAGMMNGRRLQFGVAVIDDKLFVIGGRDGLKTLNTVECYNPKTKTWTVLPPMSTHRHGLGVTVLEGPIYAVGGHDGWSYLNTVERWDPQSQQWTFVASMSIARSTVGVAALNGKLYSVGGRDGSSCLSSMEYYDPHTNKWNMCAPMCKRRGGVGVATCDGFLYAVGGHDAPASNHCSRLLDYVERYDPKTDTWTMVAPLSMPRDAVGVCLLGDRLYAVGGYDGQTYLNTMESYDPQTNEWTQMASLNIGRAGACVVVIKQP

SEQ ID NO: 24213 - protein, 718 aa, Homo sapiens
MSVSGKKEFDVKQILRLRWRWFSHPFQGSTNTGSCLQQEGYEHRGTPVQGRLKSHSRDRNGLKKSNSPVHHNILAPVPGPAPAHQRAVQNLQQHNLIVHFQANEDTPKSVPEKNLFKEACEKRAQDLEMMADDNIEDSTARLDTQHSEDMNATRSEEQFHVINHAEQTLRKMENYLKEKQLCDVLLIAGHLRIPAHRLVLSAVSDYFAAMFTNDVLEAKQEEVRMEGVDPNALNSLVQYAYTGVLQLKEDTIESLLAAACLLQLTQVIDVCSNFLIKQLHPSNCLGIRSFGDAQGCTELLNVAHKYTMEHFIEVIKNQEFLLLPANEISKLLCSDDINVPDEETIFHALMQWVGHDVQNRQGELGMLLSYIRLPLLPPQLLADLETSSMFTGDLECQKLLMEAMKYHLLPERRSMMQSPRTKPRKSTVGALYAVGGMDAMKGTTTIEKYDLRTNSWLHIGTMNGRRLQFGVAVIDNKLYVVGGRDGLKTLNTVECFNPVGKIWTVMPPMSTHRHGLGVATLEGPMYAVGGHDGWSYLNTVERWDPEGRQWNYVASMSTPRSTVGVVALNNKLYAIGGRDGSSCLKSMEYFDPHTNKWSLCAPMSKRRGGVGVATYNGFLYVVGGHDAPASNHCSRLSDCVERYDPKGDSWSTVAPLSVPRDAVAVCPLGDKLYVVGGYDGHTYLNTVESYDAQRNEWKEEVPVNIGRAGACVVVVKLP

SEQ ID NO: 24214 - protein, 720 aa, Homo sapiens
MSVSGKKEFDVKQILRLRWRWFSHPFQGSTNTGSCLQQEGYEHRGTPVQGRLKSHSRDRNGLKKSNSPVHHNILAPVPGPAPAHQRAVQNLQQHNLIVHFQANEDTPKSVPEKNLFKEACEKRAQDLEMMADDNIEDSTARLDTQHSEDMNATRSEEQFHVINHAEQTLRKMENYLKEKQLCDVLLIAGHLRIPAHRLVLSAVSDYFAAMFTNDVLEAKQEEVRMEGVDPNALNSLVQYAYTGVLQLKEDTIESLLAAACLLQLTQVIDVCSNFLIKQLHPSNCLGIRSFGDAQGCTELLNVAHKYTMEHFIEVIKNQEFLLLPANEISKLLCSDDINVPDEETIFHALMQWVGHDVQNRQGELGMLLSYIRLPLLPPQLLADLETSSMFTGDLECQKLLMEAMKYHLLPERRSMMQSPRTKPRKSTVGALYAVGGMDAMKGTTTIEKYDLRTNSWLHIGTMNGRRLQFGVAVIDNKLYVVGGRDGLKTLNTVECFNPVGKIWTVMPPMSTHRHGLGVATLEGPMYAVGGHDGWSYLNTVERWDPEGRQWNYVASMSTPRSTVGVVALNNKLYAIGGRDGSSCLKSMEYFDPHTNKWSLCAPMSKRRGGVGVATYNGFLYVVGGHDAPASNHCSRLSDCVERYDPKGDSWSTVAPLSVPRDAVAVCPLGDKLYVVGGYDGHTYLNTVESYDAQRNEWKESMQELLQNFYTTQKLKETLGH

SEQ ID NO: 24215 - protein, 393 aa, Homo sapiens
MRSTTLLALLALVLLYLVSGALVFRALEQPHEQQAQRELGEVREKFLRAHPCVSDQELGLLIKEVADALGGGADPETNSTSNSSHSAWDLGSAFFFSGTIITTIGYGNVALRTDAGRLFCIFYALVGIPLFGILLAGVGDRLGSSLRHGIGHIEAIFLKWHVPPELVRVLSAMLFLLIGCLLFVLTPTFVFCYMEDWSKLEAIYFVIVTLTTVGFGDYVAGADPRQDSPAYQPLVWFWILLGLAYFASVLTTIGNWLRVVSRRTRAEMGGLTAQAASWTGTVTARVTQRAGPAAPPPEKEQPLLPPPPCPAQPLGRPRSPSPPEKAQPPSPPTASALDYPSENLAFIDESSDTQSERGCPLPRAPRGRRRPNPPRKPVRPRGPGRPRDKGVPV

SEQ ID NO: 24216 - protein, 419 aa, Homo sapiens
MTTAPQEPPARPLQAGSGAGPAPGRAMRSTTLLALLALVLLYLVSGALVFRALEQPHEQQAQRELGEVREKFLRAHPCVSDQELGLLIKEVADALGGGADPETNSTSNSSHSAWDLGSAFFFSGTIITTIGYGNVALRTDAGRLFCIFYALVGIPLFGILLAGVGDRLGSSLRHGIGHIEAIFLKWHVPPELVRVLSAMLFLLIGCLLFVLTPTFVFCYMEDWSKLEAIYFVIVTLTTVGFGDYVAGADPRQDSPAYQPLVWFWILLGLAYFASVLTTIGNWLRVVSRRTRAEMGGLTAQAASWTGTVTARVTQRAGPAAPPPEKEQPLLPPPPCPAQPLGRPRSPSPPEKAQPPSPPTASALDYPSENLAFIDESSDTQSERGCPLPRAPRGRRRPNPPRKPVRPRGPGRPRDKGVPV

SEQ ID NO: 24217 - protein, 994 aa, Homo sapiens
MPVRRGHVAPQNTYLDTIIRKFEGQSRKFLIANAQMENCAIIYCNDGFCELFGYSRVEVMQQPCTCDFLTGPNTPSSAVSRLAQALLGAEECKVDILYYRKDASSFRCLVDVVPVKNEDGAVIMFILNFEDLAQLLAKCSSRSLSQRLLSQSFLGSEGSHGRPGGPGPGTGRGKYRTISQIPQFTLNFVEFNLEKHRSSSTTEIEIIAPHKVVERTQNVTEKVTQVLSLGADVLPEYKLQAPRIHRWTILHYSPFKAVWDWLILLLVIYTAVFTPYSAAFLLSDQDESRRGACSYTCSPLTVVDLIVDIMFVVDIVINFRTTYVNTNDEVVSHPRRIAVHYFKGWFLIDMVAAIPFDLLIFRTGSDETTTLIGLLKTARLLRLVRVARKLDRYSEYGAAVLFLLMCTFALIAHWLACIWYAIGNVERPYLEHKIGWLDSLGVQLGKRYNGSDPASGPSVQDKYVTALYFTFSSLTSVGFGNVSPNTNSEKVFSICVMLIGSLMYASIFGNVSAIIQRLYSGTARYHTQMLRVKEFIRFHQIPNPLRQRLEEYFQHAWSYTNGIDMNAVLKGFPECLQADICLHLHRALLQHCPAFSGAGKGCLRALAVKFKTTHAPPGDTLVHLGDVLSTLYFISRGSIEILRDDVVVAILGKNDIFGEPVSLHAQPGKSSADVRALTYCDLHKIQRADLLEVLDMYPAFAESFWSKLEVTFNLRDAAGGLHSSPRQAPGSQDHQGFFLSDNQSGSPHELGPQFPSKGYSLLGPGSQNSMGAGPCAPGHPDAAPPLSISDASGLWPELLQEMPPRHSPQSPQEDPDCWPLKLGSRLEQLQAQMNRLESRVSSDLSRILQLLQKPMPQGHASYILEAPASNDLALVPIASETTSPGPRLPQGFLPPAQTPSYGDLDDCSPKHRNSSPRMPHLAVATDKTLAPSSEQEQPEGLWPPLASPLHPLEVQGLICGPCFSSLPEHLGSVPKQLDFQRHGSDPGFAGSWGH

SEQ ID NO: 24218 - protein, 905 aa, Homo sapiens
MPVRRGHVAPQNTYLDTIIRKFEGQSRKFLIANAQMENCAIIYCNDGFCELFGYSRVEVMQQPCTCDFLTGPNTPSSAVSRLAQALLGAEECKVDILYYRKDASSFRCLVDVVPVKNEDGAVIMFILNFEDLAQLLAKCSSRSLSQRLLSQSFLGSEGSHGRPGGPGPGTGRGKYRTISQIPQFTLNFVEFNLEKHRSSSTTEIEIIAPHKVVERTQNVTEKVTQVLSLGADVLPEYKLQAPRIHRWTILHYSPFKAVWDWLILLLVIYTAVFTPYSAAFLLSDQDESRRGACSYTCSPLTVVDLIVDIMFVVDIVINFRTTYVNTNDEVVSHPRRIAVHYFKGWFLIDMVAAIPFDLLIFRTGSDETTTLIGLLKTARLLRLVRVARKLDRYSEYGAAVLFLLMCTFALIAHWLACICSLTSVGFGNVSPNTNSEKVFSICVMLIGSLMYASIFGNVSAIIQRLYSGTARYHTQMLRVKEFIRFHQIPNPLRQRLEEYFQHAWSYTNGIDMNAVLKGFPECLQADICLHLHRALLQHCPAFSGAGKGCLRALAVKFKTTHAPPGDTLVHLGDVLSTLYFISRGSIEILRDDVVVAILGKNDIFGEPVSLHAQPGKSSADVRALTYCDLHKIQRADLLEVLDMYPAFAESFWSKLEVTFNLRDAAGGLHSSPRQAPGSQDHQGFFLSDNQSDAAPPLSISDASGLWPELLQEMPPRHSPQSPQEDPDCWPLKLGSRLEQLQAQMNRLESRVSSDLSRILQLLQKPMPQGHASYILEAPASNDLALVPIASETTSPGPRLPQGFLPPAQTPSYGDLDDCSPKHRNSSPRMPHLAVATDKTLAPSSEQEQPEGLWPPLASPLHPLEVQGLICGPCFSSLPEHLGSVPKQLDFQRHGSDPGFAGSWGH

SEQ ID NO: 24219 - protein, 502 aa, Homo sapiens
MPVRRGHVAPQNTYLDTIIRKFEGQSRKFLIANAQMENCAIIYCNDGFCELFGYSRVEVMQQPCTCDFLTGPNTPSSAVSRLAQALLGAEECKVDILYYRKDASSFRCLVDVVPVKNEDGAVIMFILNFEDLAQLLAKCSSRSLSQRLLSQSFLGSEGSHGRPGGPGPGTGRGKYRTISQIPQFTLNFVEFNLEKHRSSSTTEIEIIAPHKVVERTQNVTEKVTQVLSLGADVLPEYKLQAPRIHRWTILHYSPFKAVWDWLILLLVIYTAVFTPYSAAFLLSDQDESRRGACSYTCSPLTVVDLIVDIMFVVDIVINFRTTYVNTNDEVVSHPRRIAVHYFKGWFLIDMVAAIPFDLLIFRTGSDETTTLIGLLKTARLLRLVRVARKLDRYSEYGAAVLFLLMCTFALIAHWLACIWYAIGNVERPYLEHKIGWLDSLGVQLGKRYNGSDPASGPSVQDKYVTALYFTFSSLTSVGFGNVSPNTNSEKVFSICVMLIGCE

SEQ ID NO: 24220 - protein, 1317 aa, Homo sapiens
MASVKVAVRVRPMNRREKDLEAKFIIQMEKSKTTITNLKIPEGGTGDSGRERTKTFTYDFSFYSADTKSPDYVSQEMVFKTLGTDVVKSAFEGYNACVFAYGQTGSGKSYTMMGNSGDSGLIPRICEGLFSRINETTRWDEASFRTEVSYLEIYNERVRDLLRRKSSKTFNLRVREHPKEGPYVEDLSKHLVQNYGDVEELMDAGNINRTTAATGMNDVSSRSHAIFTIKFTQAKFDSEMPCETVSKIHLVDLAGSERADATGATGVRLKEGGNINKSLVTLGNVISALADLSQDAANTLAKKKQVFVPYRDSVLTWLLKDSLGGNSKTIMIATISPADVNYGETLSTLRYANRAKNIINKPTINEDANVKLIRELRAEIARLKTLLAQGNQIALLDSPTALSMEEKLQQNEARVQELTKEWTNKWNETQNILKEQTLALRKEGIGVVLDSELPHLIGIDDDLLSTGIILYHLKEGQTYVGRDDASTEQDIVLHGLDLESEHCIFENIGGTVTLIPLSGSQCSVNGVQIVEATHLNQGAVILLGRTNMFRFNHPKEAAKLREKRKSGLLSSFSLSMTDLSKSRENLSAVMLYNPGLEFERQQREELEKLESKRKLIEEMEEKQKSDKAELERMQQEVETQRKETEIVQLQIRKQEESLKRRSFHIENKLKDLLAEKEKFEEERLREQQEIELQKKRQEEETFLRVQEELQRLKELNNNEKAEKFQIFQELDQLQKEKDEQYAKLELEKKRLEEQEKEQVMLVAHLEEQLREKQEMIQLLRRGEVQWVEEEKRDLEGIRESLLRVKEARAGGDEDGEELEKAQLRFFEFKRRQLVKLVNLEKDLVQQKDILKKEVQEEQEILECLKCEHDKESRLLEKHDESVTDVTEVPQDFEKIKPVEYRLQYKERQLQYLLQNHLPTLLEEKQRAFEILDRGPLSLDNTLYQVEKEMEEKEEQLAQYQANANQLQKLQATFEFTANIARQEEKVRKKEKEILESREKQQREALERALARLERRHSALQRHSTLGMEIEEQRQKLASLNSGSREQSGLQASLEAEQEALEKDQERLEYEIQQLKQKIYEVDGVQKDHHGTLEGKVASSSLPVSAEKSHLVPLMDARINAYIEEEVQRRLQDLHRVISEGCSTSADTMKDNEKLHNGTIQRKLKYERMVSRSLGANPDDLKDPIKISIPRYVLCGQGKDAHFEFEVKITVLDETWTVFRRYSRFREMHKTLKLKYAELAALEFPPKKLFGNKDERVIAERRSHLEKYLRDFFSVMLQSATSPLHINKVGLTLSKHTICEFSPFFKKGVFDYSSHGTG

SEQ ID NO: 24221 - protein, 1392 aa, Homo sapiens
MASVKVAVRVRPMNRREKDLEAKFIIQMEKSKTTITNLKIPEGGTGDSGRERTKTFTYDFSFYSADTKSPDYVSQEMVFKTLGTDVVKSAFEGYNACVFAYGQTGSGKSYTMMGNSGDSGLIPRICEGLFSRINETTRWDEASFRTEVSYLEIYNERVRDLLRRKSSKTFNLRVREHPKEGPYVEDLSKHLVQNYGDVEELMDAGNINRTTAATGMNDVSSRSHAIFTIKFTQAKFDSEMPCETVSKIHLVDLAGSERADATGATGVRLKEGGNINKSLVTLGNVISALADLSQDAANTLAKKKQVFVPYRDSVLTWLLKDSLGGNSKTIMIATISPADVNYGETLSTLRYANRAKNIINKPTINEDANVKLIRELRAEIARLKTLLAQGNQIALLDSPTALSMEEKLQQNEARVQELTKEWTNKWNETQNILKEQTLALRKEGIGVVLDSELPHLIGIDDDLLSTGIILYHLKEGQTYVGRDDASTEQDIVLHGLDLESEHCIFENIGGTVTLIPLSGSQCSVNGVQIVEATHLNQGAVILLGRTNMFRFNHPKEAAKLREKRKSGLLSSFSLSMTDLSKSRENLSAVMLYNPGLEFERQQREELEKLESKRKLIEEMEEKQKSDKAELERMQQEVETQRKETEIVQLQIRKQEESLKRRSFHIENKLKDLLAEKEKFEEERLREQQEIELQKKRQEEETFLRVQEELQRLKELNNNEKAEKFQIFQELDQLQKEKDEQYAKLELEKKRLEEQEKEQVMLVAHLEEQLREKQEMIQLLRRGEVQWVEEEKRDLEGIRESLLRVKEARAGGDEDGEELEKAQLRFFEFKRRQLVKLVNLEKDLVQQKDILKKEVQEEQEILECLKCEHDKESRLLEKHDESVTDVTEVPQDFEKIKPVEYRLQYKERQLQYLLQNHLPTLLEEKQRAFEILDRGPLSLDNTLYQVEKEMEEKEEQLAQYQANANQLQKLQATFEFTANIARQEEKVRKKEKEILESREKQQREALERALARLERRHSALQRHSTLGMEIEEQRQKLASLNSGSREQSGLQASLEAEQEALEKDQERLEYEIQQLKQKIYEVDGVQKDHHGTLEGKVASSSLPVSAEKSHLVPLMDARINAYIEEEVQRRLQDLHRVISEGCSTSADTMKDNEKLHNGTIQRKLKYELCRDLLCVLMPEPDAAACANHPLLQQDLVQLSLDWKTEIPDLVLPNGVQVSSKFQTTLVDMIYFLHGNMEVNVPSLAEVQLLLYTTVKVMGDSGHDQCQSLVLLNTHIALVKEDCVFYPRIRSRNIPPPGAQFDVIKCHALSEFRCVVVPEKKNVSTVELVFLQKLKPSVGSRNSPPEHLQEAPNVQLFTTPLYLQGSQNVAPEVWKLTFNSQDEALWLISHLTRL

SEQ ID NO: 24222 - protein, 1287 aa, Homo sapiens
MASVKVAVRVRPMNRREKDLEAKFIIQMEKSKTTITNLKIPEGGTGDSGRERTKTFTYDFSFYSADTKSPDYVSQEMVFKTLGTDVVKSAFEGYNACVFAYGQTGSGKSYTMMGNSGDSGLIPRICEGLFSRINETTRWDEASFRTEVSYLEIYNERVRDLLRRKSSKTFNLRVREHPKEGPYVEDLSKHLVQNYGDVEELMDAGNINRTTAATGMNDVSSRSHAIFTIKFTQAKFDSEMPCETVSKIHLVDLAGSERADATGATGVRLKEGGNINKSLVTLGNVISALADLSQDAANTLAKKKQVFVPYRDSVLTWLLKDSLGGNSKTIMIATISPADVNYGETLSTLRYANRAKNIINKPTINEDANVKLIRELRAEIARLKTLLAQGNQIALLDSPTALSMEEKLQQNEARVQELTKEWTNKWNETQNILKEQTLALRKEGIGVVLDSELPHLIGIDDDLLSTGIILYHLKEGQTYVGRDDASTEQDIVLHGLDLESEHCIFENIGGTVTLIPLSGSQCSVNGVQIVEATHLNQGAVILLGRTNMFRFNHPKEAAKLREKRKSGLLSSFSLSMTDLSKSRENLSAVMLYNPGLEFERQQREELEKLESKRKLIEEMEEKQKSDKAELERMQQEVETQRKETEIVQLQIRKQEESLKRRSFHIENKLKDLLAEKEKFEEERLREQQEIELQKKRQEEETFLRVQEELQRLKELNNNEKAEKFQIFQELDQLQKEKDEQYAKLELEKKRLEEQEKEQVMLVAHLEEQLREKQEMIQLLRRGEVQWVEEEKRDLEGIRESLLRVKEARAGGDEDGEELEKAQLRFFEFKRRQLVKLVNLEKDLVQQKDILKKEVQEEQEILECLKCEHDKESRLLEKHDESVTDVTEVPQDFEKIKPVEYRLQYKERQLQYLLQNHLPTLLEEKQRAFEILDRGPLSLDNTLYQVEKEMEEKEEQLAQYQANANQLQKLQATFEFTANIARQEEKVRKKEKEILESREKQQREALERALARLERRHSALQRHSTLGMEIEEQRQKLASLNSGSREQSGLQASLEAEQEALEKDQERLEYEIQQLKQKIYEVDGVQKDHHGTLEGKVASSSLPVSAEKSHLVPLMDARINAYIEEEVQRRLQDLHRVISEGCSTSADTMKDNEKLHNGTIQRKLKYERMVSRSLGANPDDLKDPIKISIPRYVLCGQGKDAHFEFEVKLAALEFPPKKLFGNKDERVIAERRSHLEKYLRDFFSVMLQSATSPLHINKVGLTLSKHTICEFSPFFKKGVFDYSSHGTG

SEQ ID NO: 24223 - protein, 1161 aa, Homo sapiens
MASVKVAVRVRPMNRREKDLEAKFIIQMEKSKTTITNLKIPEGGTGDSGRERTKTFTYDFSFYSADTKSPDYVSQEMVFKTLGTDVVKSAFEGYNACVFAYGQTGSGKSYTMMGNSGDSGLIPRICEGLFSRINETTRWDEASFRTEVSYLEIYNERVRDLLRRKSSKTFNLRVREHPKEGPYVEDLSKHLVQNYGDVEELMDAGNINRTTAATGMNDVSSRSHAIFTIKFTQAKFDSEMPCETVSKIHLVDLAGSERADATGATGVRLKEGGNINKSLVTLGNVISALADLSQDAANTLAKKKQVFVPYRDSVLTWLLKDSLGGNSKTIMIATISPADVNYGETLSTLRYANRAKNIINKPTINEDANVKLIRELRAEIARLKTLLAQGNQIALLDSPTALSMEEKLQQNEARVQELTKEWTNKWNETQNILKEQTLALRKEGIGVVLDSELPHLIGIDDDLLSTGIILYHLKEGQTYVGRDDASTEQDIVLHGLDLESEHCIFENIGGTVTLIPLSGSQCSVNGVQIVEATHLNQGAVILLGRTNMFRFNHPKEAAKLREKRKSGLLSSFSLSMTDLSKSRENLSAVMLYNPGLEFERQQREELEKLESKRKLIEEMEEKQKSDKAELERMQQEVETQRKETEIVQLQIRKQEESLKRRSFHIENKLKDLLAEKEKFEEERLKDLVQQKDILKKEVQEEQEILECLKCEHDKESRLLEKHDESVTDVTEVPQDFEKIKPVEYRLQYKERQLQYLLQNHLPTLLEEKQRAFEILDRGPLSLDNTLYQVEKEMEEKEEQLAQYQANANQLQKLQATFEFTANIARQEEKVRKKEKEILESREKQQREALERALARLERRHSALQRHSTLGMEIEEQRQKLASLNSGSREQSGLQASLEAEQEALEKDQERLEYEIQQLKQKIYEVDGVQKDHHGTLEGKVASSSLPVSAEKSHLVPLMDARINAYIEEEVQRRLQDLHRVISEGCSTSADTMKDNEKLHNGTIQRKLKYERMVSRSLGANPDDLKDPIKISIPRYVLCGQGKDAHFEFEVKITVLDETWTVFRRYSRFREMHKTLKLKYAELAALEFPPKKLFGNKDERVIAERRSHLEKYLRDFFSVMLQSATSPLHINKVGLTLSKHTICEFSPFFKKGVFDYSSHGTG

SEQ ID NO: 24224 - protein, 1276 aa, Homo sapiens
MASVKVAVRVRPMNRREKDLEAKFIIQMEKSKTTITNLKIPEGGTGDSGRERTKTFTYDFSFYSADTKSPDYVSQEMVFKTLGTDVVKSAFEGYNACVFAYGQTGSGKSYTMMGNSGDSGLIPRICEGLFSRINETTRWDEASFRTEVSYLEIYNERVRDLLRRKSSKTFNLRVREHPKEGPYVEDLSKHLVQNYGDVEELMDAGNINRTTAATGMNDVSSRSHAIFTIKFTQAKFDSEMPCETVSKIHLVDLAGSERADATGATGVRLKEGGNINKSLVTLGNVISALADLSQDAANTLAKKKQVFVPYRDSVLTWLLKDSLGGNSKTIMIATISPADVNYGETLSTLRYANRAKNIINKPTINEDANVKLIRELRAEIARLKTLLAQGNQIALLDSPTALSMEEKLQQNEARVQELTKEWTNKWNETQNILKEQTLALRKEGIGVVLDSELPHLIGIDDDLLSTGIILYHLKEGQTYVGRDDASTEQDIVLHGLDLESEHCIFENIGGTVTLIPLSGSQCSVNGVQIVEATHLNQGAVILLGRTNMFRFNHPKEAAKLREKRKSGLLSSFSLSMTDLSKSRENLSAVMLYNPGLEFERQQREELEKLESKRKLIEEMEEKQKSDKAELERMQQEVETQRKETEIVQLQIRKQEESLKRRSFHIENKLKDLLAEKEKFEEERLREQQEIELQKKRQEEETFLRVQEELQRLKELNNNEKAEKFQIFQELDQLQKEKDEQYAKLELEKKRLEEQEKEQVMLVAHLEEQLREKQEMIQLLRRGEVQWVEEEKRDLEGIRESLLRVKEARAGGDEDGEELEKAQLRFFEFKRRQLVKLVNLEKDLVQQKDILKKEVQEEQEILECLKCEHDKESRLLEKHDESVTDVTEVPQDFEKIKPVEYRLQYKERQLQYLLQNHLPTLLEEKQRAFEILDRGPLSLDNTLYQVEKEMEEKEEQLAQYQANANQLQKLQATFEFTANIARQEEKVRKKEKEILESREKQQREALERALARLERRHSALQRHSTLGMEIEEQRQKLASLNSGSREQSGLQASLEAEQEALEKDQERLEYEIQQLKQKIYEVDGVQKDHHGTLEGKVASSSLPVSAEKSHLVPLMDARINAYIEEEVQRRLQDLHRVISEGCSTSADTMKDNEKLHNGTIQRKLKYEITVLDETWTVFRRYSRFREMHKTLKLKYAELAALEFPPKKLFGNKDERVIAERRSHLEKYLRDFFSVMLQSATSPLHINKVGLTLSKHTICEFSPFFKKGVFDYSSHGTG

SEQ ID NO: 24225 - protein, 1674 aa, Homo sapiens
MLGAPDESSVRVAVRIRPQLAKEKIEGCHICTSVTPGEPQVFLGKDKAFTFDYVFDIDSQQEQIYIQCIEKLIEGCFEGYNATVFAYGQTGAGKTYTMGTGFDVNIVEEELGIISRAVKHLFKSIEEKKHIAIKNGLPAPDFKVNAQFLELYNEEVLDLFDTTRDIDAKSKKSNIRIHEDSTGGIYTVGVTTRTVNTESEMMQCLKLGALSRTTASTQMNVQSSRSHAIFTIHVCQTRVCPQIDADNATDNKIISESAQMNEFETLTAKFHFVDLAGSERLKRTGATGERAKEGISINCGLLALGNVISALGDKSKRATHVPYRDSKLTRLLQDSLGGNSQTIMIACVSPSDRDFMETLNTLKYANRARNIKNKVMVNQDRASQQINALRSEITRLQMELMEYKTGKRIIDEEGVESINDMFHENAMLQTENNNLRVRIKAMQETVDALRSRITQLVSDQANHVLARAGEGNEEISNMIHSYIKEIEDLRAKLLESEAVNENLRKNLTRATARAPYFSGSSTFSPTILSSDKETIEIIDLAKKDLEKLKRKEKRKKKRLQKLEESNREERSVAGKEDNTDTDQEKKEEKGVSERENNELEVEESQEVSDHEDEEEEEEEEEDDIDGGESSDESDSESDEKANYQADLANITCEIAIKQKLIDELENSQKRLQTLKKQYEEKLMMLQHKIRDTQLERDQVLQNLGSVESYSEEKAKKVRSEYEKKLQAMNKELQRLQAAQKEHARLLKNQSQYEKQLKKLQQDVMEMKKTKVRLMKQMKEEQEKARLTESRRNREIAQLKKDQRKRDHQLRLLEAQKRNQEVVLRRKTEEVTALRRQVRPMSDKVAGKVTRKLSSSDAPAQDTGSSAAAVETDASRTGAQQKMRIPVARVQALPTPATNGNRKKYQRKGLTGRVFISKTARMKWQLLERRVTDIIMQKMTISNMEADMNRLLKQREELTKRREKLSKRREKIVKENGEGDKNVANINEEMESLTANIDYINDSISDCQANIMQMEEAKEEGETLDVTAVINACTLTEARYLLDHFLSMGINKGLQAAQKEAQIKVLEGRLKQTEITSATQNQLLFHMLKEKAELNPELDALLGHALQDLDSVPLENVEDSTDEDAPLNSPGSEGSTLSSDLMKLCGEVKPKNKARRRTTTQMELLYADSSELASDTSTGDASLPGPLTPVAEGQEIGMNTETSGTSAREKELSPPPGLPSKIGSISRQSSLSEKKIPEPSPVTRRKAYEKAEKSKAKEQKHSDSGTSEASLSPPSSPPSRPRNELNVFNRLTVSQGNTSVQQDKSDESDSSLSEVHRSSRRGIINPFPASKGIRAFPLQCIHIAEGHTKAVLCVDSTDDLLFTGSKDRTCKVWNLVTGQEIMSLGGHPNNVVSVKYCNYTSLVFTVSTSYIKVWDIRDSAKCIRTLTSSGQVTLGDACSASTSRTVAIPSGENQINQIALNPTGTFLYAASGNAVRMWDLKRFQSTGKLTGHLGPVMCLTVDQISSGQDLIITGSKDHYIKMFDVTEGALGTVSPTHNFEPPHYDGIEALTIQGDNLFSGSRDNGIKKWDLTQKDLLQQVPNAHKDWVCALGVVPDHPVLLSGCRGGILKVWNMDTFMPVGEMKGHDSPINAICVNSTHIFTAADDRTVRIWKARNLQDGQISDTGDLGEDIASN

SEQ ID NO: 24226 - protein, 1661 aa, Homo sapiens
MLGAPDESSVRVAVRIRPQLAKEKIEGCHICTSVTPGEPQVFLGKDKAFTFDYVFDIDSQQEQIYIQCIEKLIEGCFEGYNATVFAYGQTGAGKTYTMGTGFDVNIVEEELGIISRAVKHLFKSIEEKKHIAIKNGLPAPDFKVNAQFLELYNEEVLDLFDTTRDIDAKSKKSNIRIHEDSTGGIYTVGVTTRTVNTESEMMQCLKLGALSRTTASTQMNVQSSRSHAIFTIHVCQTRVCPQIDADNATDNKIISESAQMNEFETLTAKFHFVDLAGSERLKRTGATGERAKEGISINCGLLALGNVISALGDKSKRATHVPYRDSKLTRLLQDSLGGNSQTIMIACVSPSDRDFMETLNTLKYANRARNIKNKVMVNQDRASQQINALRSEITRLQMELMEYKTGKRIIDEEGVESINDMFHENAMLQTENNNLRVRIKAMQETVDALRSRITQLVSDQANHVLARAGEGNEEISNMIHSYIKEIEDLRAKLLESEAVNENLRKNLTRATARAPYFSGSSTFSPTILSSDKETIEIIDLAKKDLEKLKRKEKRKKKSVAGKEDNTDTDQEKKEEKGVSERENNELEVEESQEVSDHEDEEEEEEEEEDDIDGGESSDESDSESDEKANYQADLANITCEIAIKQKLIDELENSQKRLQTLKKQYEEKLMMLQHKIRDTQLERDQVLQNLGSVESYSEEKAKKVRSEYEKKLQAMNKELQRLQAAQKEHARLLKNQSQYEKQLKKLQQDVMEMKKTKVRLMKQMKEEQEKARLTESRRNREIAQLKKDQRKRDHQLRLLEAQKRNQEVVLRRKTEEVTALRRQVRPMSDKVAGKVTRKLSSSDAPAQDTGSSAAAVETDASRTGAQQKMRIPVARVQALPTPATNGNRKKYQRKGLTGRVFISKTARMKWQLLERRVTDIIMQKMTISNMEADMNRLLKQREELTKRREKLSKRREKIVKENGEGDKNVANINEEMESLTANIDYINDSISDCQANIMQMEEAKEEGETLDVTAVINACTLTEARYLLDHFLSMGINKGLQAAQKEAQIKVLEGRLKQTEITSATQNQLLFHMLKEKAELNPELDALLGHALQDLDSVPLENVEDSTDEDAPLNSPGSEGSTLSSDLMKLCGEVKPKNKARRRTTTQMELLYADSSELASDTSTGDASLPGPLTPVAEGQEIGMNTETSGTSAREKELSPPPGLPSKIGSISRQSSLSEKKIPEPSPVTRRKAYEKAEKSKAKEQKHSDSGTSEASLSPPSSPPSRPRNELNVFNRLTVSQGNTSVQQDKSDESDSSLSEVHRSSRRGIINPFPASKGIRAFPLQCIHIAEGHTKAVLCVDSTDDLLFTGSKDRTCKVWNLVTGQEIMSLGGHPNNVVSVKYCNYTSLVFTVSTSYIKVWDIRDSAKCIRTLTSSGQVTLGDACSASTSRTVAIPSGENQINQIALNPTGTFLYAASGNAVRMWDLKRFQSTGKLTGHLGPVMCLTVDQISSGQDLIITGSKDHYIKMFDVTEGALGTVSPTHNFEPPHYDGIEALTIQGDNLFSGSRDNGIKKWDLTQKDLLQQVPNAHKDWVCALGVVPDHPVLLSGCRGGILKVWNMDTFMPVGEMKGHDSPINAICVNSTHIFTAADDRTVRIWKARNLQDGQISDTGDLGEDIASN

SEQ ID NO: 24227 - protein, 1627 aa, Homo sapiens
MLGAPDESSVRVAVRIRPQLAKEKIEGCHICTSVTPGEPQVFLGKDKAFTFDYVFDIDSQQEQIYIQCIEKLIEGCFEGYNATVFAYGQTGAGKTYTMGTGFDVNIVEEELGIISRAVKHLFKSIEEKKHIAIKNGLPAPDFKVNAQFLELYNEEVLDLFDTTRDIDAKSKKSNIRIHEDSTGGIYTVGVTTRTVNTESEMMQCLKLGALSRTTASTQMNVQSSRSHAIFTIHVCQTRVCPQIDADNATDNKIISESAQMNEFETLTAKFHFVDLAGSERLKRTGATGERAKEGISINCGLLALGNVISALGDKSKRATHVPYRDSKLTRLLQDSLGGNSQTIMIACVSPSDRDFMETLNTLKYANRARNIKNKVMVNQDRASQQINALRSEITRLQMELMEYKTGKRIIDEEGVESINDMFHENAMLQTENNNLRVRIKAMQETVDALRSRITQLVSDQANHVLARAGEGNEEISNMIHSYIKEIEDLRAKLLESEAVNENLRKNLTRATARAPYFSGSSTFSPTILSSDKETIEIIDLAKKDLEKLKRKEKRKKKRLQKLEESNREERSVAGKEDNTDTDQEKKEEKGVSERENNELEVEESQEVSDHEDEEEEEEEEEDDIDGGESSDESDSESDEKANYQADLANITCEIAIKQKLIDELENSQKRLQTLKKQYEEKLMMLQHKIRDTQLERDQVLQNLGSVESYSEEKAKKVRSEYEKKLQAMNKELQRLQAAQKEHARLLKNQSQYEKQLKKLQQDVMEMKKTKVRLMKQMKEEQEKARLTESRRNREIAQLKKDQRKRDHQLRLLEAQKRNQEVVLRRKTEEVTALRRQVRPMSDKVAGKVTRKLSSSDAPAQDTGSSAAAVETDASRTGAQQKMRIPVARVQALPTPATNGNRKKYQRKGLTGRVFISKTARMKWQLLERRVTDIIMQKMTISNMEADMNRLLKQREELTKRREKLSKRREKIVKENGEGDKNVANINEEMESLTANIDYINDSISDCQANIMQMEEAKEEGETLDVTAVINACTLTEARYLLDHFLSMGINKGLQAAQKEAQIKVLEGRLKQTEITSATQNQLLFHMLKEKAELNPELDALLGHALQDLDSVPLENVEDSTDEDAPLNSPGSEGSTLSSDLMKLCGEVKPKNKARRRTTTQMELLYADSSELASDTSTGDASLPGPLTPVAEGQEIGMNTETSGTSAREKELSPPPGLPSKIGSISRQSSLSEKKIPEPSPVTRRKAYEKAEKSKAKEQKQSDESDSSLSEVHRGIINPFPASKGIRAFPLQCIHIAEGHTKAVLCVDSTDDLLFTGSKDRTCKVWNLVTGQEIMSLGGHPNNVVSVKYCNYTSLVFTVSTSYIKVWDIRDSAKCIRTLTSSGQVTLGDACSASTSRTVAIPSGENQINQIALNPTGTFLYAASGNAVRMWDLKRFQSTGKLTGHLGPVMCLTVDQISSGQDLIITGSKDHYIKMFDVTEGALGTVSPTHNFEPPHYDGIEALTIQGDNLFSGSRDNGIKKWDLTQKDLLQQVPNAHKDWVCALGVVPDHPVLLSGCRGGILKVWNMDTFMPVGEMKGHDSPINAICVNSTHIFTAADDRTVRIWKARNLQDGQISDTGDLGEDIASN

SEQ ID NO: 24228 - protein, 1675 aa, Homo sapiens
MLGAPDESSVRVAVRIRPQLAKEKIEGCHICTSVTPGEPQVFLGKDKAFTFDYVFDIDSQQEQIYIQCIEKLIEGCFEGYNATVFAYGQTGAGKTYTMGTGFDVNIVEEELGIISRAVKHLFKSIEEKKHIAIKNGLPAPDFKVNAQFLELYNEEVLDLFDTTRDIDAKSKKSNIRIHEDSTGGIYTVGVTTRTVNTESEMMQCLKLGALSRTTASTQMNVQSSRSHAIFTIHVCQTRVCPQIDADNATDNKIISESAQMNEFETLTAKFHFVDLAGSERLKRTGATGERAKEGISINCGLLALGNVISALGDKSKRATHVPYRDSKLTRLLQDSLGGNSQTIMIACVSPSDRDFMETLNTLKYANRARNIKNKVMVNQDRASQQINALRSEITRLQMELMEYKTGKRIIDEEGVESINDMFHENAMLQTENNNLRVRIKAMQETVDALRSRITQLVSDQANHVLARAGEGNEEISNMIHSYIKEIEDLRAKLLESEAVNENLRKNLTRATARAPYFSGSSTFSPTILSSDKETIEIIDLAKKDLEKLKRKEKRKKKRLQKLEESNREERSVAGKEDNTDTDQEKKEEKGVSERENNELEVEESQEVSDHEDEEEEEEEEEDDIDGGESSDESDSESDEKANYQADLANITCEIAIKQKLIDELENSQKRLQTLKKQYEEKLMMLQHKIRDTQLERDQVLQNLGSVESYSEEKAKKVRSEYEKKLQAMNKELQRLQAAQKEHARLLKNQSQYEKQLKKLQQDVMEMKKTKVRLMKQMKEEQEKARLTESRRNREIAQLKKDQRKRDHQLRLLEAQKRNQEVVLRRKTEEVTALRRQVRPMSDKVAGKVTRKLSSSDAPAQDTGSSAAAVETDASRTGAQQKMRIPVARVQALPTPATNGNRKKYQRKGLTGRVFISKTARMKWQLLERRVTDIIMQKMTISNMEADMNRLLKQREELTKRREKLSKRREKIVKENGEGDKNVANINEEMESLTANIDYINDSISDCQANIMQMEEAKEEGETLDVTAVINACTLTEARYLLDHFLSMGINKGLQAAQKEAQIKVLEGRLKQTEITSATQNQLLFHMLKEKAELNPELDALLGHALQDLDSVPLENVEDSTDEDAPLNSPGSEGSTLSSDLMKLCGEVKPKNKARRRTTTQMELLYADSSELASDTSTGDASLPGPLTPVAEGQEIGMNTETSGTSAREKELSPPPGLPSKIGSISRQSSLSEKKIPEPSPVTRRKAYEKAEKSKAKEQKHSDSGTSEASLSPPSSPPSRPRNELNVFNRLTVSQGNTSVQQDKSDESDSSLSEVHSRSSRRGIINPFPASKGIRAFPLQCIHIAEGHTKAVLCVDSTDDLLFTGSKDRTCKVWNLVTGQEIMSLGGHPNNVVSVKYCNYTSLVFTVSTSYIKVWDIRDSAKCIRTLTSSGQVTLGDACSASTSRTVAIPSGENQINQIALNPTGTFLYAASGNAVRMWDLKRFQSTGKLTGHLGPVMCLTVDQISSGQDLIITGSKDHYIKMFDVTEGALGTVSPTHNFEPPHYDGIEALTIQGDNLFSGSRDNGIKKWDLTQKDLLQQVPNAHKDWVCALGVVPDHPVLLSGCRGGILKVWNMDTFMPVGEMKGHDSPINAICVNSTHIFTAADDRTVRIWKARNLQDGQISDTGDLGEDIASN

SEQ ID NO: 24229 - protein, 1637 aa, Homo sapiens
MLGAPDESSVRVAVRIRPQLAKEKIEGCHICTSVTPGEPQVFLGKDKAFTFDYVFDIDSQQEQIYIQCIEKLIEGCFEGYNATVFAYGQTGAGKTYTMGTGFDVNIVEEELGIISRAVKHLFKSIEEKKHIAIKNGLPAPDFKVNAQFLELYNEEVLDLFDTTRDIDAKSKKSNIRIHEDSTGGIYTVGVTTRTVNTESEMMQCLKLGALSRTTASTQMNVQSSRSHAIFTIHVCQTRVCPQIDADNATDNKIISESAQMNEFETLTAKFHFVDLAGSERLKRTGATGERAKEGISINCGLLALGNVISALGDKSKRATHVPYRDSKLTRLLQDSLGGNSQTIMIACVSPSDRDFMETLNTLKYANRARNIKNKVMVNQDRASQQINALRSEITRLQMELMEYKTGKRIIDEEGVESINDMFHENAMLQTENNNLRVRIKAMQETVDALRSRITQLVSDQANHVLARAGEGNEEISNMIHSYIKEIEDLRAKLLESEAVNENLRKNLTRATARAPYFSGSSTFSPTILSSDKETIEIIDLAKKDLEKLKRKEKRKKKSVAGKEDNTDTDQEKKEEKGVSERENNELEVEESQEVSDHEDEEEEEEEEEDDIDGGESSDESDSESDEKANYQADLANITCEIAIKQKLIDELENSQKRLQTLKKQYEEKLMMLQHKIRDTQLERDQVLQNLGSVESYSEEKAKKVRSEYEKKLQAMNKELQRLQAAQKEHARLLKNQSQYEKQLKKLQQDVMEMKKTKVRLMKQMKEEQEKARLTESRRNREIAQLKKDQRKRDHQLRLLEAQKRNQEVVLRRKTEEVTALRRQVRPMSDKVAGKVTRKLSSSDAPAQDTGSSAAAVETDASRTGAQQKMRIPVARVQALPTPATNGNRKKYQRKGLTGRVFISKTARMKWQLLERRVTDIIMQKMTISNMEADMNRLLKQREELTKRREKLSKRREKIVKENGEGDKNVANINEEMESLTANIDYINDSISDCQANIMQMEEAKEEGETLDVTAVINACTLTEARYLLDHFLSMGINKGLQAAQKEAQIKVLEGRLKQTEITSATQNQLLFHMLKEKAELNPELDALLGHALQENVEDSTDEDAPLNSPGSEGSTLSSDLMKLCGEVKPKNKARRRTTTQMELLYADSSELASDTSTGDASLPGPLTPVAEGQEIGMNTETSGTSAREKELSPPPGLPSKIGSISRQSSLSEKKIPEPSPVTRRKAYEKAEKSKAKEQKHSDSGTSEASLSPPSSPPSRPRNELNVFNRLTVSQGNTSVQQDKGIINPFPASKGIRAFPLQCIHIAEGHTKAVLCVDSTDDLLFTGSKDRTCKVWNLVTGQEIMSLGGHPNNVVSVKYCNYTSLVFTVSTSYIKVWDIRDSAKCIRTLTSSGQVTLGDACSASTSRTVAIPSGENQINQIALNPTGTFLYAASGNAVRMWDLKRFQSTGKLTGHLGPVMCLTVDQISSGQDLIITGSKDHYIKMFDVTEGALGTVSPTHNFEPPHYDGIEALTIQGDNLFSGSRDNGIKKWDLTQKDLLQQVPNAHKDWVCALGVVPDHPVLLSGCRGGILKVWNMDTFMPVGEMKGHDSPINAICVNSTHIFTAADDRTVRIWKARNLQDGQISDTGDLGEDIASN

SEQ ID NO: 24230 - protein, 1621 aa, Homo sapiens
MLGAPDESSVRVAVRIRPQLAKEKIEGCHICTSVTPGEPQVFLGKDKAFTFDYVFDIDSQQEQIYIQCIEKLIEGCFEGYNATVFAYGQTGAGKTYTMGTGFDVNIVEEELGIISRAVKHLFKSIEEKKHIAIKNGLPAPDFKVNAQFLELYNEEVLDLFDTTRDIDAKSKKSNIRIHEDSTGGIYTVGVTTRTVNTESEMMQCLKLGALSRTTASTQMNVQSSRSHAIFTIHVCQTRVCPQIDADNATDNKIISESAQMNEFETLTAKFHFVDLAGSERLKRTGATGERAKEGISINCGLLALGNVISALGDKSKRATHVPYRDSKLTRLLQDSLGGNSQTIMIACVSPSDRDFMETLNTLKYANRARNIKNKVMVNQDRASQQINALRSEITRLQMELMEYKTGKRIIDEEGVESINDMFHENAMLQTENNNLRVRIKAMQETVDALRSRITQLVSDQANHVLARAGEGNEEISNMIHSYIKEIEDLRAKLLESEAVNENLRKNLTRATARAPYFSGSSTFSPTILSSDKETIEIIDLAKKDLEKLKRKEKRKKKSVAGKEDNTDTDQEKKEEKGVSERENNELEVEESQEVSDHEDEEEEEEEEEDDIDGGESSDESDSESDEKANYQADLANITCEIAIKQKLIDELENSQKRLQTLKKQYEEKLMMLQHKIRDTQLERDQVLQNLGSVESYSEEKAKKVRSEYEKKLQAMNKELQRLQAAQKEHARLLKNQSQYEKQLKKLQQDVMEMKKTKVRLMKQMKEEQEKARLTESRRNREIAQLKKDQRKRDVTALRRQVRPMSDKVAGKVTRKLSSSDAPAQDTGSSAAAVETDASRTGAQQKMRIPVARVQALPTPATNGNRKKYQRKGLTGRVFISKTARMKWQLLERRVTDIIMQKMTISNMEADMNRLLKQREELTKRREKLSKRREKIVKENGEGDKNVANINEEMESLTANIDYINDSISDCQANIMQMEEAKEEGETLDVTAVINACTLTEARYLLDHFLSMGINKGLQAAQKEAQIKVLEGRLKQTEITSATQNQLLFHMLKEKAELNPELDALLGHALQDLDSVPLENVEDSTDEDAPLNSPGSEGSTLSSDLMKLCGEVKPKNKARRRTTTQMELLYADSSELASDTSTGDASLPGPLTPVAEGQEIGMNTETSGTSAREKELSPPPGLPSKIGSISRQSSLSEKKIPEPSPVTRRKAYEKAEKSKAKEQKHSDSGTSEASLSPPSSPPSRPRNELNVFNRLTVSQGNTSVQQDKGIINPFPASKGIRAFPLQCIHIAEGHTKAVLCVDSTDDLLFTGSKDRTCKVWNLVTGQEIMSLGGHPNNVVSVKYCNYTSLVFTVSTSYIKVWDIRDSAKCIRTLTSSGQVTLGDACSASTSRTVAIPSGENQINQIALNPTGTFLYAASGNAVRMWDLKRFQSTGKLTGHLGPVMCLTVDQISSGQDLIITGSKDHYIKMFDVTEGALGTVSPTHNFEPPHYDGIEALTIQGDNLFSGSRDNGIKKWDLTQKDLLQQVPNAHKDWVCALGVVPDHPVLLSGCRGGILKVWNMDTFMPVGEMKGHDSPINAICVNSTHIFTAADDRTVRIWKARNLQDGQISDTGDLGEDIASN

SEQ ID NO: 24231 - protein, 384 aa, Homo sapiens
MEVSGHPQARRCCPEALGKLFPGLCFLCFLVTYALVGAVVFSAIEDGQVLVAADDGEFEKFLEELCRILNCSETVVEDRKQDLQGHLQKVKPQWFNRTTHWSFLSSLFFCCTVFSTVGYGYIYPVTRLGKYLCMLYALFGIPLMFLVLTDTGDILATILSTSYNRFRKFPFFTRPLLSKWCPKSLFKKKPDPKPADEAVPQIIISAEELPGPKLGTCPSRPSCSMELFERSHALEKQNTLQLPPQAMERSNSCPELVLGRLSYSIISNLDEVGQQVERLDIPLPIIALIVFAYISCAAAILPFWETQLDFENAFYFCFVTLTTIGFGDTVLEHPNFFLFFSIYIIVGMEIVFIAFKLVQNRLIDIYKNVMLFFAKGKFYHLVKK

SEQ ID NO: 24232 - protein, 348 aa, Homo sapiens
MSLMVVSMACVGFFLLQGAWPHEGVHRKPSLLAHPGRLVKSEETVILQCWSDVRFEHFLLHREGKFKDTLHLIGEHHDGVSKANFSIGPMMQDLAGTYRCYGSVTHSPYQLSAPSDPLDIVITGLYEKPSLSAQPGPTVLAGESVTLSCSSRSSYDMYHLSREGEAHECRFSAGPKVNGTFQADFPLGPATHGGTYRCFGSFRDSPYEWSNSSDPLLVSVIGNPSNSWPSPTEPSSKTGNPRHLHILIGTSVVIILFILLFFLLHRWCSNKKNAAVMDQESAGNRTANSEDSDEQDPQEVTYTQLNHCVFTQRKITRPSQRPKTPPTDIIVYAELPNAESRSKVVSCP

SEQ ID NO: 24233 - protein, 419 aa, Homo sapiens
MNVHRGSDSDRLLRQEASCLVDDTLAVAQEKEANSLASSGPHNLTYPLGPRNEDLSLDYASQPANLQFPHIMPLAEDIKGSCFQSGNKRNHEPFIAPERFGNSSVGFGSNSHSQAPEKVTLLVDGTRFVVNPQIFTAHPDTMLGRMFGPGREYNFTRPNEKGEYEIAEGISATVFRTVLDYYKTGIINCPDGISIPDLRDTCDYLCINFDFNTIRCQDLSALLHELSNDGAHKQFDHYLEELILPIMVGCAKKGERECHIVVLTDEDSVDWDEDHPPPMGEEYSQILYSSKLYRFFKYIENRDVAKTVLKERGLKNIRIGIEGYPTCKEKIKRRPGGRSEVIYNYVQRPFIQMSWEKEEGKSRHVDFQCVRSKSLTNLVAAGDDVLEDQEILMHHPPQVDELDRLNAPLSQMASNDFQD

SEQ ID NO: 24234 - protein, 253 aa, Homo sapiens
MNVHRGSDSDRLLRQEASCLVDDTLAVAQEKEANSLASSGPHNLTYPLGPRNEGALLHELSNDGAHKQFDHYLEELILPIMVGCAKKGERECHIVVLTDEDSVDWDEDHPPPMGEEYSQILYSSKLYRFFKYIENRDVAKTVLKERGLKNIRIGIEGYPTCKEKIKRRPGGRSEVIYNYVQRPFIQMSWEKEEGKSRHVDFQCVRSKSLTNLVAAGDDVLEDQEILMHHPPQVDELDRLNAPLSQMASNDFQD

SEQ ID NO: 24235 - protein, 274 aa, Homo sapiens
MFGPGREYNFTRPNEKGEYEIAEGISATVFRTVLDYYKTGIINCPDGISIPDLRDTCDYLCINFDFNTIRCQDLSALLHELSNDGAHKQFDHYLEELILPIMVGCAKKGERECHIVVLTDEDSVDWDEDHPPPMGEEYSQILYSSKLYRFFKYIENRDVAKTVLKERGLKNIRIGIEGYPTCKEKIKRRPGGRSEVIYNYVQRPFIQMSWEKEEGKSRHVDFQCVRSKSLTNLVAAGDDVLEDQEILMHHPPQVDELDRLNAPLSQMASNDFQD

SEQ ID NO: 24236 - protein, 890 aa, Homo sapiens
MSQGILSPPAGLLSDDDVVVSPMFESTAADLGSVVRKNLLSDCSVVSTSLEDKQQVPSEDSMEKVKVYLRVRPLLPSELERQEDQGCVRIENVETLVLQAPKDSFALKSNERGIGQATHRFTFSQIFGPEVGQASFFNLTVKEMVKDVLKGQNWLIYTYGVTNSGKTHTIQGTIKDGGILPRSLALIFNSLQGQLHPTPDLKPLLSNEVIWLDSKQIRQEEMKKLSLLNGGLQEEELSTSLKRSVYIESRIGTSTSFDSGIAGLSSISQCTSSSQLDETSHRWAQPDTAPLPVPANIRFSIWISFFEIYNELLYDLLEPPSQQRKRQTLRLCEDQNGNPYVKDLNWIHVQDAEEAWKLLKVGRKNQSFASTHLNQNSSRSHSIFSIRILHLQGEGDIVPKISELSLCDLAGSERCKDQKSGERLKEAGNINTSLHTLGRCIAALRQNQQNRSKQNLVPFRDSKLTRVFQGFFTGRGRSCMIVNVNPCASTYDETLHVAKFSAIASQLVHAPPMQLGFPSLHSFIKEHSLQVSPSLEKGAKADTGLDDDIENEADISMYGKEELLQVVEAMKTLLLKERQEKLQLEMHLRDEICNEMVEQMQQREQWCSEHLDTQKELLEEMYEEKLNILKESLTSFYQEEIQERDEKIEELEALLQEARQQSVAHQQSGSELALRRSQRLAASASTQQLQEVKAKLQQCKAELNSTTEELHKYQKMLEPPPSAKPFTIDVDKKLEEGQKNIRLLRTELQKLGESLQSAERACCHSTGAGKLRQALTTCDDILIKQDQTLAELQNNMVLVKLDLRKKAACIAEQYHTVLKLQGQVSAKKRLGTNQENQQPNQQPPGKKPFLRNLLPRTPTCQSSTDCSPYARILRSRRSPLLKSGPFGKKY

SEQ ID NO: 24237 - protein, 872 aa, Homo sapiens
MSQGILSPPAGLLSDDDVVVSPMFESTAADLGSVVRKNLLSDCSVVSTSLEDKQQVPSEDSMEKEDQGCVRIENVETLVLQAPKDSFALKSNERGIGQATHRFTFSQIFGPEVGQASFFNLTVKEMVKDVLKGQNWLIYTYGVTNSGKTHTIQGTIKDGGILPRSLALIFNSLQGQLHPTPDLKPLLSNEVIWLDSKQIRQEEMKKLSLLNGGLQEEELSTSLKRSVYIESRIGTSTSFDSGIAGLSSISQCTSSSQLDETSHRWAQPDTAPLPVPANIRFSIWISFFEIYNELLYDLLEPPSQQRKRQTLRLCEDQNGNPYVKDLNWIHVQDAEEAWKLLKVGRKNQSFASTHLNQNSSRSHSIFSIRILHLQGEGDIVPKISELSLCDLAGSERCKDQKSGERLKEAGNINTSLHTLGRCIAALRQNQQNRSKQNLVPFRDSKLTRVFQGFFTGRGRSCMIVNVNPCASTYDETLHVAKFSAIASQLVHAPPMQLGFPSLHSFIKEHSLQVSPSLEKGAKADTGLDDDIENEADISMYGKEELLQVVEAMKTLLLKERQEKLQLEMHLRDEICNEMVEQMQQREQWCSEHLDTQKELLEEMYEEKLNILKESLTSFYQEEIQERDEKIEELEALLQEARQQSVAHQQSGSELALRRSQRLAASASTQQLQEVKAKLQQCKAELNSTTEELHKYQKMLEPPPSAKPFTIDVDKKLEEGQKNIRLLRTELQKLGESLQSAERACCHSTGAGKLRQALTTCDDILIKQDQTLAELQNNMVLVKLDLRKKAACIAEQYHTVLKLQGQVSAKKRLGTNQENQQPNQQPPGKKPFLRNLLPRTPTCQSSTDCSPYARILRSRRSPLLKSGPFGKKY

SEQ ID NO: 24238 - protein, 1029 aa, Homo sapiens
MASEAVKVVVRCRPMNQRERELRCQPVVTVDCARAQCCIQNPGAADEPPKQFTFDGAYHVDHVTEQIYNEIAYPLVEGVTEGYNGTIFAYGQTGSGKSFTMQGLPDPPSQRGIIPRAFEHVFESVQCAENTKFLVRASYLEIYNEDVRDLLGADTKQKLELKEHPEKGVYVKGLSMHTVHSVAQCEHIMETGWKNRSVGYTLMNKDSSRSHSIFTISIEMSAVDERGKDHLRAGKLNLVDLAGSERQSKTGATGERLKEATKINLSLSALGNVISALVDGRCKHVPYRDSKLTRLLQDSLGGNTKTLMVACLSPADNNYDETLSTLRYANRAKNIRNKPRINEDPKDALLREYQEEIKKLKAILTQQMSPSSLSALLSRQVPPDPVQVEEKLLPQPVIQHDVEAEKQLIREEYEERLARLKADYKAEQESRARLEEDITAMRNSYDVRLSTLEENLRKETEAVLQVGVLYKAEVMSRAEFASSAEYPPAFQYETVVKPKVFSTTDTLPSDDVSKTQVSSRFAELPKVEPSKSEISLGSSESSSLEETSVSEAFPGPEEPSNVEVSMPTEESRSRYFLDECLGQEAAGHLLGEQNYLPQEEPQEVPLQGLLGLQDPFAEVEAKLARLSSTVARTDAPQADVPKVPVQVPAPTDLLEPSDARPEAEAADDFPPRPEVDLASEVALEVVRTAEPGVWLEAQAPVALVAQPEPLPATAGVKRESVGMEVAVLTDDPLPVVDQQQVLARLQLLEQQVVGGEQAKNKDLKEKHKRRKRYADERRKQLVAALQNSDEDSGDWVLLNVYDSIQEEVRAKSKLLEKMQRKLRAAEVEIKDLQSEFQLEKIDYLATIRRQERDSMLLQQLLEQVQPLIRRDCNYSNLEKILRESCWDEDNGFWKIPHPVITKTSLPVAVSTGPQNKPARKTSAADNGEPNMEDDRYRLMLSRSNSENIASNYFRSKRASQILSTDARKSLTHHNSPPGLSCPLSNNSAIPPTQAPEMPQPRPFRLESLDIPFTKAKRKKSKSNFGSEPL

SEQ ID NO: 24239 - protein, 1028 aa, Homo sapiens
MASEAVKVVVRCRPMNQRERELRCQPVVTVDCARAQCCIQNPGAADEPPKQFTFDGAYHVDHVTEQIYNEIAYPLVEGVTEGYNGTIFAYGQTGSGKSFTMQGLPDPPSQRGIIPRAFEHVFESVQCAENTKFLVRASYLEIYNEDVRDLLGADTKQKLELKEHPEKGVYVKGLSMHTVHSVAQCEHIMETGWKNRSVGYTLMNKDSSRSHSIFTISIEMSAVDERGKDHLRAGKLNLVDLAGSERQSKTGATGERLKEATKINLSLSALGNVISALVDGRCKHVPYRDSKLTRLLQDSLGGNTKTLMVACLSPADNNYDETLSTLRYANRAKNIRNKPRINEDPKDALLREYQEEIKKLKAILTQQMSPSSLSALLSRQVPPDPVQVEEKLLPQPVIQHDVEAEKQLIREEYEERLARLKADYKAEQESRARLEEDITAMRNSYDVRLSTLEENLRKETEAVLQVGVLYKAEVMSRAEFASSAEYPPAFQYETVVKPKVFSTTDTLPSDDVSKTQVSSRFAELPKVEPSKSEISLGSSESSSLEETSVSEAFPGPEEPSNVEVSMPTEESRSRYFLDECLGQEAAGHLLGEQNYLPQEEPQEVPLQGLLGLQDPFAEVEAKLARLSSTVARTDAPQADVPKVPVQVPAPTDLLEPSDARPEAEAADDFPPRPEVDLASEVALEVVRTAEPGVWLEAQAPVALVAQPEPLPATAGVKRESVGMEVAVLTDDPLPVVDQQQVLARLQLLEQQVVGGEQAKNKDLKEKHKRRKRYADERRKQLVAALQNSDEDSGDWVLLNVYDSIQEEVRAKSKLLEKMQRKLRAAEVEIKDLQSEFQLEKIDYLATIRRQERDSMLLQQLLEQVQPLIRRDCNYSNLEKILRESCWDEDNGFWKIPHPVITKTSLPVVSTGPQNKPARKTSAADNGEPNMEDDRYRLMLSRSNSENIASNYFRSKRASQILSTDARKSLTHHNSPPGLSCPLSNNSAIPPTQAPEMPQPRPFRLESLDIPFTKAKRKKSKSNFGSEPL

SEQ ID NO: 24240 - protein, 360 aa, Homo sapiens
MDSSNCKVIAPLLSQRYRRMVTKDGHSTLQMDGAQRGLAYLRDAWGILMDMRWRWMMLVFSASFVVHWLVFAVLWYVLAEMNGDLELDHDAPPENHTICVKYITSFTAAFSFSLETQLTIGYGTMFPSGDCPSAIALLAIQMLLGLMLEAFITGAFVAKIARPKNRAFSIRFTDTAVVAHMDGKPNLIFQVANTRPSPLTSVRVSAVLYQERENGKLYQTSVDFHLDGISSDECPFFIFPLTYYHSITPSSPLATLLQHENPSHFELVVFLSAMQEGTGEICQRRTSYLPSEIMLHHCFASLLTRGSKGEYQIKMENFDKTVPEFPTPLVSKSPNRTDLDIHINGQSIDNFQISETGLTE

SEQ ID NO: 24241 - protein, 94 aa, Homo sapiens
MDSSNCKVIAPLLSQRYRRMVTKDGHSTLQMDGAQRGLAYLRDAWGILMDMRWRWMMLVFSASFVVHWLVFAVLWCFCGEDCPAKKSSFFNSLY

SEQ ID NO: 24242 - protein, 3256 aa, Homo sapiens
MWPTRRLVTIKRSGVDGPHFPLSLSTCLFGRGIECDIRIQLPVVSKQHCKIEIHEQEAILHNFSSTNPTQVNGSVIDEPVRLKHGDVITIIDRSFRYENESLQNGRKSTEFPRKIREQEPARRVSRSSFSSDPDEKAQDSKAYSKITEGKVSGNPQVHIKNVKEDSTADDSKDSVAQGTTNVHSSEHAGRNGRNAADPISGDFKEISSVKLVSRYGELKSVPTTQCLDNSKKNESPFWKLYESVKKELDVKSQKENVLQYCRKSGLQTDYATEKESADGLQGETQLLVSRKSRPKSGGSGHAVAEPASPEQELDQNKGKGRDVESVQTPSKAVGASFPLYEPAKMKTPVQYSQQQNSPQKHKNKDLYTTGRRESVNLGKSEGFKAGDKTLTPRKLSTRNRTPAKVEDAADSATKPENLSSKTRGSIPTDVEVLPTETEIHNEPFLTLWLTQVERKIQKDSLSKPEKLGTTAGQMCSGLPGLSSVDINNFGDSINESEGIPLKRRRVSFGGHLRPELFDENLPPNTPLKRGEAPTKRKSLVMHTPPVLKKIIKEQPQPSGKQESGSEIHVEVKAQSLVISPPAPSPRKTPVASDQRRRSCKTAPASSSKSQTEVPKRGGRKSGNLPSKRVSISRSQHDILQMICSKRRSGASEANLIVAKSWADVVKLGAKQTQTKVIKHGPQRSMNKRQRRPATPKKPVGEVHSQFSTGHANSPCTIIIGKAHTEKVHVPARPYRVLNNFISNQKMDFKEDLSGIAEMFKTPVKEQPQLTSTCHIAISNSENLLGKQFQGTDSGEEPLLPTSESFGGNVFFSAQNAAKQPSDKCSASPPLRRQCIRENGNVAKTPRNTYKMTSLETKTSDTETEPSKTVSTANRSGRSTEFRNIQKLPVESKSEETNTEIVECILKRGQKATLLQQRREGEMKEIERPFETYKENIELKENDEKMKAMKRSRTWGQKCAPMSDLTDLKSLPDTELMKDTARGQNLLQTQDHAKAPKSEKGKITKMPCQSLQPEPINTPTHTKQQLKASLGKVGVKEELLAVGKFTRTSGETTHTHREPAGDGKSIRTFKESPKQILDPAARVTGMKKWPRTPKEEAQSLEDLAGFKELFQTPGPSEESMTDEKTTKIACKSPPPESVDTPTSTKQWPKRSLRKADVEEEFLALRKLTPSAGKAMLTPKPAGGDEKDIKAFMGTPVQKLDLAGTLPGSKRQLQTPKEKAQALEDLAGFKELFQTPGHTEELVAAGKTTKIPCDSPQSDPVDTPTSTKQRPKRSIRKADVEGELLACRNLMPSAGKAMHTPKPSVGEEKDIIIFVGTPVQKLDLTENLTGSKRRPQTPKEEAQALEDLTGFKELFQTPGHTEEAVAAGKTTKMPCESSPPESADTPTSTRRQPKTPLEKRDVQKELSALKKLTQTSGETTHTDKVPGGEDKSINAFRETAKQKLDPAASVTGSKRHPKTKEKAQPLEDLAGLKELFQTPVCTDKPTTHEKTTKIACRSQPDPVDTPTSSKPQSKRSLRKVDVEEEFFALRKRTPSAGKAMHTPKPAVSGEKNIYAFMGTPVQKLDLTENLTGSKRRLQTPKEKAQALEDLAGFKELFQTRGHTEESMTNDKTAKVACKSSQPDPDKNPASSKRRLKTSLGKVGVKEELLAVGKLTQTSGETTHTHTEPTGDGKSMKAFMESPKQILDSAASLTGSKRQLRTPKGKSEVPEDLAGFIELFQTPSHTKESMTNEKTTKVSYRASQPDLVDTPTSSKPQPKRSLRKADTEEEFLAFRKQTPSAGKAMHTPKPAVGEEKDINTFLGTPVQKLDQPGNLPGSNRRLQTRKEKAQALEELTGFRELFQTPCTDNPTTDEKTTKKILCKSPQSDPADTPTNTKQRPKRSLKKADVEEEFLAFRKLTPSAGKAMHTPKAAVGEEKDINTFVGTPVEKLDLLGNLPGSKRRPQTPKEKAKALEDLAGFKELFQTPGHTEESMTDDKITEVSCKSPQPDPVKTPTSSKQRLKISLGKVGVKEEVLPVGKLTQTSGKTTQTHRETAGDGKSIKAFKESAKQMLDPANYGTGMERWPRTPKEEAQSLEDLAGFKELFQTPDHTEESTTDDKTTKIACKSPPPESMDTPTSTRRRPKTPLGKRDIVEELSALKQLTQTTHTDKVPGDEDKGINVFRETAKQKLDPAASVTGSKRQPRTPKGKAQPLEDLAGLKELFQTPICTDKPTTHEKTTKIACRSPQPDPVGTPTIFKPQSKRSLRKADVEEESLALRKRTPSVGKAMDTPKPAGGDEKDMKAFMGTPVQKLDLPGNLPGSKRWPQTPKEKAQALEDLAGFKELFQTPGTDKPTTDEKTTKIACKSPQPDPVDTPASTKQRPKRNLRKADVEEEFLALRKRTPSAGKAMDTPKPAVSDEKNINTFVETPVQKLDLLGNLPGSKRQPQTPKEKAEALEDLVGFKELFQTPGHTEESMTDDKITEVSCKSPQPESFKTSRSSKQRLKIPLVKVDMKEEPLAVSKLTRTSGETTQTHTEPTGDSKSIKAFKESPKQILDPAASVTGSRRQLRTRKEKARALEDLVDFKELFSAPGHTEESMTIDKNTKIPCKSPPPELTDTATSTKRCPKTRPRKEVKEELSAVERLTQTSGQSTHTHKEPASGDEGIKVLKQRAKKKPNPVEEEPSRRRPRAPKEKAQPLEDLAGFTELSETSGHTQESLTAGKATKIPCESPPLEVVDTTASTKRHLRTRVQKVQVKEEPSAVKFTQTSGETTDADKEPAGEDKGIKALKESAKQTPAPAASVTGSRRRPRAPRESAQAIEDLAGFKDPAAGHTEESMTDDKTTKIPCKSSPELEDTATSSKRRPRTRAQKVEVKEELLAVGKLTQTSGETTHTDKEPVGEGKGTKAFKQPAKRKLDAEDVIGSRRQPRAPKEKAQPLEDLASFQELSQTPGHTEELANGAADSFTSAPKQTPDSGKPLKISRRVLRAPKVEPVGDVVSTRDPVKSQSKSNTSLPPLPFKRGGGKDGSVTGTKRLRCMPAPEEIVEELPASKKQRVAPRARGKSSEPVVIMKRSLRTSAKRIEPAEELNSNDMKTNKEEHKLQDSVPENKGISLRSRRQNKTEAEQQITEVFVLAERIEINRNEKKPMKTSPEMDIQNPDDGARKPIPRDKVTENKRCLRSARQNESSQPKVAEESGGQKSAKVLMQNQKGKGEAGNSDSMCLRSRKTKSQPAASTLESKSVQRVTRSVKRCAENPKKAEDNVCVKKIRTRSHRDSEDI

SEQ ID NO: 24243 - protein, 2896 aa, Homo sapiens
MWPTRRLVTIKRSGVDGPHFPLSLSTCLFGRGIECDIRIQLPVVSKQHCKIEIHEQEAILHNFSSTNPTQVNGSVIDEPVRLKHGDVITIIDRSFRYENESLQNGRKSTEFPRKIREQEPARRVSRSSFSSDPDESEGIPLKRRRVSFGGHLRPELFDENLPPNTPLKRGEAPTKRKSLVMHTPPVLKKIIKEQPQPSGKQESGSEIHVEVKAQSLVISPPAPSPRKTPVASDQRRRSCKTAPASSSKSQTEVPKRGGRKSGNLPSKRVSISRSQHDILQMICSKRRSGASEANLIVAKSWADVVKLGAKQTQTKVIKHGPQRSMNKRQRRPATPKKPVGEVHSQFSTGHANSPCTIIIGKAHTEKVHVPARPYRVLNNFISNQKMDFKEDLSGIAEMFKTPVKEQPQLTSTCHIAISNSENLLGKQFQGTDSGEEPLLPTSESFGGNVFFSAQNAAKQPSDKCSASPPLRRQCIRENGNVAKTPRNTYKMTSLETKTSDTETEPSKTVSTANRSGRSTEFRNIQKLPVESKSEETNTEIVECILKRGQKATLLQQRREGEMKEIERPFETYKENIELKENDEKMKAMKRSRTWGQKCAPMSDLTDLKSLPDTELMKDTARGQNLLQTQDHAKAPKSEKGKITKMPCQSLQPEPINTPTHTKQQLKASLGKVGVKEELLAVGKFTRTSGETTHTHREPAGDGKSIRTFKESPKQILDPAARVTGMKKWPRTPKEEAQSLEDLAGFKELFQTPGPSEESMTDEKTTKIACKSPPPESVDTPTSTKQWPKRSLRKADVEEEFLALRKLTPSAGKAMLTPKPAGGDEKDIKAFMGTPVQKLDLAGTLPGSKRQLQTPKEKAQALEDLAGFKELFQTPGHTEELVAAGKTTKIPCDSPQSDPVDTPTSTKQRPKRSIRKADVEGELLACRNLMPSAGKAMHTPKPSVGEEKDIIIFVGTPVQKLDLTENLTGSKRRPQTPKEEAQALEDLTGFKELFQTPGHTEEAVAAGKTTKMPCESSPPESADTPTSTRRQPKTPLEKRDVQKELSALKKLTQTSGETTHTDKVPGGEDKSINAFRETAKQKLDPAASVTGSKRHPKTKEKAQPLEDLAGLKELFQTPVCTDKPTTHEKTTKIACRSQPDPVDTPTSSKPQSKRSLRKVDVEEEFFALRKRTPSAGKAMHTPKPAVSGEKNIYAFMGTPVQKLDLTENLTGSKRRLQTPKEKAQALEDLAGFKELFQTRGHTEESMTNDKTAKVACKSSQPDPDKNPASSKRRLKTSLGKVGVKEELLAVGKLTQTSGETTHTHTEPTGDGKSMKAFMESPKQILDSAASLTGSKRQLRTPKGKSEVPEDLAGFIELFQTPSHTKESMTNEKTTKVSYRASQPDLVDTPTSSKPQPKRSLRKADTEEEFLAFRKQTPSAGKAMHTPKPAVGEEKDINTFLGTPVQKLDQPGNLPGSNRRLQTRKEKAQALEELTGFRELFQTPCTDNPTTDEKTTKKILCKSPQSDPADTPTNTKQRPKRSLKKADVEEEFLAFRKLTPSAGKAMHTPKAAVGEEKDINTFVGTPVEKLDLLGNLPGSKRRPQTPKEKAKALEDLAGFKELFQTPGHTEESMTDDKITEVSCKSPQPDPVKTPTSSKQRLKISLGKVGVKEEVLPVGKLTQTSGKTTQTHRETAGDGKSIKAFKESAKQMLDPANYGTGMERWPRTPKEEAQSLEDLAGFKELFQTPDHTEESTTDDKTTKIACKSPPPESMDTPTSTRRRPKTPLGKRDIVEELSALKQLTQTTHTDKVPGDEDKGINVFRETAKQKLDPAASVTGSKRQPRTPKGKAQPLEDLAGLKELFQTPICTDKPTTHEKTTKIACRSPQPDPVGTPTIFKPQSKRSLRKADVEEESLALRKRTPSVGKAMDTPKPAGGDEKDMKAFMGTPVQKLDLPGNLPGSKRWPQTPKEKAQALEDLAGFKELFQTPGTDKPTTDEKTTKIACKSPQPDPVDTPASTKQRPKRNLRKADVEEEFLALRKRTPSAGKAMDTPKPAVSDEKNINTFVETPVQKLDLLGNLPGSKRQPQTPKEKAEALEDLVGFKELFQTPGHTEESMTDDKITEVSCKSPQPESFKTSRSSKQRLKIPLVKVDMKEEPLAVSKLTRTSGETTQTHTEPTGDSKSIKAFKESPKQILDPAASVTGSRRQLRTRKEKARALEDLVDFKELFSAPGHTEESMTIDKNTKIPCKSPPPELTDTATSTKRCPKTRPRKEVKEELSAVERLTQTSGQSTHTHKEPASGDEGIKVLKQRAKKKPNPVEEEPSRRRPRAPKEKAQPLEDLAGFTELSETSGHTQESLTAGKATKIPCESPPLEVVDTTASTKRHLRTRVQKVQVKEEPSAVKFTQTSGETTDADKEPAGEDKGIKALKESAKQTPAPAASVTGSRRRPRAPRESAQAIEDLAGFKDPAAGHTEESMTDDKTTKIPCKSSPELEDTATSSKRRPRTRAQKVEVKEELLAVGKLTQTSGETTHTDKEPVGEGKGTKAFKQPAKRKLDAEDVIGSRRQPRAPKEKAQPLEDLASFQELSQTPGHTEELANGAADSFTSAPKQTPDSGKPLKISRRVLRAPKVEPVGDVVSTRDPVKSQSKSNTSLPPLPFKRGGGKDGSVTGTKRLRCMPAPEEIVEELPASKKQRVAPRARGKSSEPVVIMKRSLRTSAKRIEPAEELNSNDMKTNKEEHKLQDSVPENKGISLRSRRQNKTEAEQQITEVFVLAERIEINRNEKKPMKTSPEMDIQNPDDGARKPIPRDKVTENKRCLRSARQNESSQPKVAEESGGQKSAKVLMQNQKGKGEAGNSDSMCLRSRKTKSQPAASTLESKSVQRVTRSVKRCAENPKKAEDNVCVKKIRTRSHRDSEDI

SEQ ID NO: 24244 - protein, 234 aa, Homo sapiens
MSCINLPTVLPGSPSKTRGQIQVILGPMFSGKSTELMRRVRRFQIAQYKCLVIKYAKDTRYSSSFCTHDRNTMEALPACLLRDVAQEALGVAVIGIDEGQFFPDIVEFCEAMANAGKTVIVAALDGTFQRKPFGAILNLVPLAESVVKLTAVCMECFREAAYTKRLGTEKEVEVIGGADKYHSVCRLCYFKKASGQPAGPDNKENCPVPGKPGEAVAARKLFAPQQILQCSPAN

SEQ ID NO: 24245 - protein, 262 aa, Homo sapiens
MDPRLSTVRQTCCCFNVRIATTALAIYHVIMSVLLFIEHSVEVAHGKASCKLSQMGYLRIADLISSFLLITMLFIISLSLLIGVVKNREKYLLPFLSLQIMDYLLCLLTLLGSYIELPAYLKLASRSRASSSKFPLMTLQLLDFCLSILTLCSSYMEVPTYLNFKSMNHMNYLPSQEDMPHNQFIKMMIIFSIAFITVLIFKVYMFKCVWRCYRLIKCMNSVEEKRNSKMLQKVVLPSYEEALSLPSKTPEGGPAPPPYSEV

SEQ ID NO: 24246 - protein, 366 aa, Homo sapiens
MQPLWLCWALWVLPLASPGAALTGEQLLGSLLRQLQLKEVPTLDRADMEELVIPTHVRAQYVALLQRSHGDRSRGKRFSQSFREVAGRFLALEASTHLLVFGMEQRLPPNSELVQAVLRLFQEPVPKAALHRHGRLSPRSARARVTVEWLRVRDDGSNRTSLIDSRLVSVHESGWKAFDVTEAVNFWQQLSRPRQPLLLQVSVQREHLGPLASGAHKLVRFASQGAPAGLGEPQLELHTLDLGDYGAQGDCDPEAPMTEGTRCCRQEMYIDLQGMKWAENWVLEPPGFLAYECVGTCRQPPEALAFKWPFLGPRQCIASETDSLPMIVSIKEGGRTRPQVVSLPNMRVQKCSCASDGALVPRRLQP

SEQ ID NO: 24247 - protein, 738 aa, Homo sapiens
MTSDQDAKVVAEPQTQRVQEGKDSAHLMNGPISQTTSQTSSIPPLSQVPATKVSELNPNAEVWGAPVLHLEASSAADGVSAAWEEVAGHHADRGPQGSDANGDGDQGHENAALPDPQESDPADMNALALGPSEYDSLPENSETGGNESQPDSQEDPREVLKKTLEFCLSRENLASDMYLISQMDSDQYVPITTVANLDHIKKLSTDVDLIVEVLRSLPLVQVDEKGEKVRPNQNRCIVILREISESTPVEEVEALFKGDNLPKFINCEFAYNDNWFITFETEADAQQAYKYLREEVKTFQGKPIKARIKAKAIAINTFLPKNGFRPLDVSLYAQQRYATSFYFPPMYSPQQQFPLYSLITPQTWSATHSYLDPPLVTPFPNTGFINGFTSPAFKPAASPLTSLRQYPPRSRNPSKSHLRHAIPSAERGPGLLESPSIFNFTADRLINGVRSPQTRQAGQTRTRIQNPSAYAKREAGPGRVEPGSLESSPGLGRGRKNSFGYRKKREEKFTSSQTQSPTPPKPPSPSFELGLSSFPPLPGAAGNLKTEDLFENRLSSLIIGPSKERTLSADASVNTLPVVVSREPSVPASCAVSATYERSPSPAHLPDDPKVAEKQRETHSVDRLPSALTATACKSVQVNGAATELRKPSYAEICQRTSKEPPSSPLQPQKEQKPNTVGCGKEEKKLAEPAERYREPPALKSTPGAPRDQRRPAGGRPSPSAMGKRLSREQSTPPKSPQ

SEQ ID NO: 24248 - protein, 548 aa, Homo sapiens
MAGLRARGGPGPGLLALSALGFCLMLQVSAKRPPKTPPCPPSCSCTRDTAFCVDSKAVPRNLPSEVISLTLVNAAFSEIQDGAFSHLPLLQFLLLNSNKFTLIGDNAFTGLSHLQYLFIENNDIWALSKFTFRGLKSLTHLSLANNNLQTLPRDIFRPLDILNDLDLRGNSLNCDCKVKWLVEWLAHTNTTVAPIYCASPPRFQEHKVQDLPLREFDCITTDFVLYQTLAFPAVSAEPFLYSSDLYLALAQPGVSACTILKWDYVERQLRDYDRIPAPSAVHCKPMVVDSQLYVVVAQLFGGSYIYHWDPNTTRFTRLQDIDPQRVRKPNDLEAFRIDGDWYFAVADSSKAGATSLYRWHQNGFYSHQALHPWHRDTDLEFVDGEGKPRLIVSSSSQAPVIYQWSRTQKQFVAQGEVTQVPDAQAVKHFRAGRDSYLCLSRYIGDSKILRWEGTRFSEVQALPSRGSLALQPFLVGGRRYLALGSDFSFTQIYQWDEGRQKFVRFQELAVQAPRAFCYMPAGDAQLLLAPSFKGQTLVYRHIVVDLSA

SEQ ID NO: 24249 - protein, 524 aa, Homo sapiens
MAGLRARGGPGPGLLALSALGFCLMLQVSAKRPPKTPPCPPSCSCTRDTAFCVDSKAVPRNLPSEVISLTLVNAAFSEIQDGAFSHLPLLQFLLLNSNKFTLIGDNAFTGLSHLQYLSLANNNLQTLPRDIFRPLDILNDLDLRGNSLNCDCKVKWLVEWLAHTNTTVAPIYCASPPRFQEHKVQDLPLREFDCITTDFVLYQTLAFPAVSAEPFLYSSDLYLALAQPGVSACTILKWDYVERQLRDYDRIPAPSAVHCKPMVVDSQLYVVVAQLFGGSYIYHWDPNTTRFTRLQDIDPQRVRKPNDLEAFRIDGDWYFAVADSSKAGATSLYRWHQNGFYSHQALHPWHRDTDLEFVDGEGKPRLIVSSSSQAPVIYQWSRTQKQFVAQGEVTQVPDAQAVKHFRAGRDSYLCLSRYIGDSKILRWEGTRFSEVQALPSRGSLALQPFLVGGRRYLALGSDFSFTQIYQWDEGRQKFVRFQELAVQAPRAFCYMPAGDAQLLLAPSFKGQTLVYRHIVVDLSA

SEQ ID NO: 24250 - protein, 377 aa, Homo sapiens
MTQEPFREELAYDRMPTLERGRQDPASYAPDAKPSDLQLSKRLPPCFSHKTWVFSVLMGSCLLVTSGFSLYLGNVFPAEMDYLRCAAGSCIPSAIVSFTVSRRNANVIPNFQILFVSTFAVTTTCLIWFGCKLVLNPSAININFNLILLLLLELLMAATVIIAARSSEEDCKKKKGSMSDSANILDEVPFPARVLKSYSVVEVIAGISAVLGGIIALNVDDSVSGPHLSVTFFWILVACFPSAIASHVAAECPSKCLVEVLIAISSLTSPLLFTASGYLSFSIMRIVEMFKDYPPAIKPSYDVLLLLLLLVLLLQAGLNTGTAIQCVRFKVSARLQGASWDTQNGPQERLAGEVARSPLKEFDKEKAWRAVVVQMAQ

SEQ ID NO: 24251 - protein, 347 aa, Homo sapiens
MTQEPFREELAYDRMPTLERGRQDPASYAPDAKPSDLQLSKRLPPCFSHKTWVFSVLMGCIPSAIVSFTVSRRNANVIPNFQILFVSTFAVTTTCLIWFGCKLVLNPSAININFNLILLLLLELLMAATVIIAARSSEEDCKKKKGSMSDSANILDEVPFPARVLKSYSVVEVIAGISAVLGGIIALNVDDSVSGPHLSVTFFWILVACFPSAIASHVAAECPSKCLVEVLIAISSLTSPLLFTASGYLSFSIMRIVEMFKDYPPAIKPSYDVLLLLLLLVLLLQAGLNTGTAIQCVRFKVSARLQGASWDTQNGPQERLAGEVARSPLKEFDKEKAWRAVVVQMAQ

SEQ ID NO: 24252 - protein, 1503 aa, Homo sapiens
MAAPAEPCAGQGVWNQTEPEPAATSLLSLCFLRTAGVWVPPMYLWVLGPIYLLFIHHHGRGYLRMSPLFKAKMVLGFALIVLCTSSVAVALWKIQQGTPEAPEFLIHPTVWLTTMSFAVFLIHTERKKGVQSSGVLFGYWLLCFVLPATNAAQQASGAGFQSDPVRHLSTYLCLSLVVAQFVLSCLADQPPFFPEDPQQSNPCPETGAAFPSKATFWWVSGLVWRGYRRPLRPKDLWSLGRENSSEELVSRLEKEWMRNRSAARRHNKAIAFKRKGGSGMKAPETEPFLRQEGSQWRPLLKAIWQVFHSTFLLGTLSLIISDVFRFTVPKLLSLFLEFIGDPKPPAWKGYLLAVLMFLSACLQTLFEQQNMYRLKVLQMRLRSAITGLVYRKVLALSSGSRKASAVGDVVNLVSVDVQRLTESVLYLNGLWLPLVWIVVCFVYLWQLLGPSALTAIAVFLSLLPLNFFISKKRNHHQEEQMRQKDSRARLTSSILRNSKTIKFHGWEGAFLDRVLGIRGQELGALRTSGLLFSVSLVSFQVSTFLVALVVFAVHTLVAENAMNAEKAFVTLTVLNILNKAQAFLPFSIHSLVQARVSFDRLVTFLCLEEVDPGVVDSSSSGSAAGKDCITIHSATFAWSQESPPCLHRINLTVPQGCLLAVVGPVGAGKSSLLSALLGELSKVEGFVSIEGAVAYVPQEAWVQNTSVVENVCFGQELDPPWLERVLEACALQPDVDSFPEGIHTSIGEQGMNLSGGQKQRLSLARAVYRKAAVYLLDDPLAALDAHVGQHVFNQVIGPGGLLQGTTRILVTHALHILPQADWIIVLANGAIAEMGSYQELLQRKGALMCLLDQARQPGDRGEGETEPGTSTKDPRGTSAGRRPELRRERSIKSVPEKDRTTSEAQTEVPLDDPDRAGWPAGKDSIQYGRVKATVHLAYLRAVGTPLCLYALFLFLCQQVASFCRGYWLSLWADDPAVGGQQTQAALRGGIFGLLGCLQAIGLFASMAAVLLGGARASRLLFQRLLWDVVRSPISFFERTPIGHLLNRFSKETDTVDVDIPDKLRSLLMYAFGLLEVSLVVAVATPLATVAILPLFLLYAGFQSLYVVSSCQLRRLESASYSSVCSHMAETFQGSTVVRAFRTQAPFVAQNNARVDESQRISFPRLVADRWLAANVELLGNGLVFAAATCAVLSKAHLSAGLVGFSVSAALQVTQTLQWVVRNWTDLENSIVSVERMQDYAWTPKEAPWRLPTCAAQPPWPQGGQIEFRDFGLRYRPELPLAVQGVSFKIHAGEKVGIVGRTGAGKSSLASGLLRLQEAAEGGIWIDGVPIAHVGLHTLRSRISIIPQDPILFPGSLRMNLDLLQEHSDEAIWAALETVQLKALVASLPGQLQYKCADRGEDLSVGQKQLLCLARALLRKTQILILDEATAAVDPGTELQMQAMLGSWFAQCTVLLIAHRLRSVMDCARVLVMDKGQVAESGSPAQLLAQKGLFYRLAQESGLV

SEQ ID NO: 24253 - protein, 99 aa, Homo sapiens
MAAPAEPCAGQGVWNQTEPEPAATSLLSLCFLRTAGVWVPPMYLWVLGPIYLLFIHHHGRGYLRMSPLFKAKMVAAIPGSLEPGNVRGRQGTGWNLVKS

SEQ ID NO: 24254 - protein, 871 aa, Homo sapiens
MAAPAEPCAGQGVWNQTEPEPAATSLLSLCFLRTAGVWVPPMYLWVLGPIYLLFIHHHGRGYLRMSPLFKAKMVLGFALIVLCTSSVAVALWKIQQGTPEAPEFLIHPTVWLTTMSFAVFLIHTERKKGVQSSGVLFGYWLLCFVLPATNAAQQASGAGFQSDPVRHLSTYLCLSLVVAQFVLSCLADQPPFFPEDPQQSNPCPETGAAFPSKATFWWVSGLVWRGYRRPLRPKDLWSLGRENSSEELVSRLEKEWMRNRSAARRHNKAIAFKRKGGSGMKAPETEPFLRQEGSQWRPLLKAIWQVFHSTFLLGTLSLIISDVFRFTVPKLLSLFLEFIGDPKPPAWKGYLLAVLMFLSACLQTLFEQQNMYRLKVLQMRLRSAITGLVYRKVLALSSGSRKASAVGDVVNLVSVDVQRLTESVLYLNGLWLPLVWIVVCFVYLWQLLGPSALTAIAVFLSLLPLNFFISKKRNHHQEEQMRQKDSRARLTSSILRNSKTIKFHGWEGAFLDRVLGIRGQELGALRTSGLLFSVSLVSFQVSTFLVALVVFAVHTLVAENAMNAEKAFVTLTVLNILNKAQAFLPFSIHSLVQARVSFDRLVTFLCLEEVDPGVVDSSSSGSAAGKDCITIHSATFAWSQESPPCLHRINLTVPQGCLLAVVGPVGAGKSSLLSALLGELSKVEGFVSIEGAVAYVPQEAWVQNTSVVENVCFGQELDPPWLERVLEACALQPDVDSFPEGIHTSIGEQGMNLSGGQKQRLSLARAVYRKAAVYLLDDPLAALDAHVGQHVFNQVIGPGGLLQGTKQNLGPAPRTPEAPLQAGGPSLDARGPSSQSLRRTVPLQKPRQRFLWMTLTGQDGQQERTASNTAG

SEQ ID NO: 24255 - protein, 1359 aa, Homo sapiens
MVGEGPYLISDLDQRGRRRSFAERYDPSLKTMIPVRPCARLAPNPVDDAGLLSFATFSWLTPVMVKGYRQRLTVDTLPPLSTYDSSDTNAKRFRVLWDEEVARVGPEKASLSHVVWKFQRTRVLMDIVANILCIIMAAIGPVILIHQILQQTERTSGKVWVGIGLCIALFATEFTKVFFWALAWAINYRTAIRLKVALSTLVFENLVSFKTLTHISVGEVLNILSSDSYSLFEAALFCPLPATIPILMVFCAAYAFFILGPTALIGISVYVIFIPVQMFMAKLNSAFRRSAILVTDKRVQTMNEFLTCIRLIKMYAWEKSFTNTIQDIRRRERKLLEKAGFVQSGNSALAPIVSTIAIVLTLSCHILLRRKLTAPVAFSVIAMFNVMKFSIAILPFSIKAMAEANVSLRRMKKILIDKSPPSYITQPEDPDTVLLLANATLTWEHEASRKSTPKKLQNQKRHLCKKQRSEAYSERSPPAKGATGPEEQSDSLKSVLHSISFVVRKGKILGICGNVGSGKSSLLAALLGQMQLQKGVVAVNGTLAYVSQQAWIFHGNVRENILFGEKYDHQRYQHTVRVCGLQKDLSNLPYGDLTEIGERGLNLSGGQRQRISLARAVYSDRQLYLLDDPLSAVDAHVGKHVFEECIKKTLRGKTVVLVTHQLQFLESCDEVILLEDGEICEKGTHKELMEERGRYAKLIHNLRGLQFKDPEHLYNAAMVEAFKESPAEREEDAGIIVLAPGNEKDEGKESETGSEFVDTKVPEHQLIQTESPQEGTVTWKTYHTYIKASGGYLLSLFTVFLFLLMIGSAAFSNWWLGLWLDKGSRMTCGPQGNRTMCEVGAVLADIGQHVYQWVYTASMVFMLVFGVTKGFVFTKTTLMASSSLHDTVFDKILKSPMSFFDTTPTGRLMNRFSKDMDELDVRLPFHAENFLQQFFMVVFILVILAAVFPAVLLVVASLAVGFFILLRIFHRGVQELKKVENVSRSPWFTHITSSMQGLGIIHAYGKKESCITYHLLYFNCALRWFALRMDVLMNILTFTVALLVTLSFSSISTSSKGLSLSYIIQLSGLLQVCVRTGTETQAKFTSVELLREYISTCVPECTHPLKVGTCPKDWPSRGEITFRDYQMRYRDNTPLVLDSLNLNIQSGQTVGIVGRTGSGKSSLGMALFRLVEPASGTIFIDEVDICILSLEDLRTKLTVIPQDPVLFVGTVRYNLDPFESHTDEMLWQVLERTFMRDTIMKLPEKLQAEVTENGENFSVGERQLLCVARALLRNSKIILLDEATASMDSKTDTLVQNTIKDAFKGCTVLTIAHRLNTVLNCDHVLVMENGKVIEFDKPEVLAEKPDSAFAMLLAAEVRL

SEQ ID NO: 24256 - protein, 1009 aa, Homo sapiens
MVGEGPYLISDLDQRGRRRSFAERYDPSLKTMIPVRPCARLAPNPVDDAGLLSFATFSWLTPVMVKGYRQRLTVDTLPPLSTYDSSDTNAKRFRVLWDEEVARVGPEKASLSHVVWKFQRTRVLMDIVANILCIIMAAIGPTVLIHQILQQTERTSGKVWVGIGLCIALFATEFTKVFFWALAWAINYRTAIRLKVALSTLVFENLVSFKTLTHISVGEVLNILSSDSYSLFEAALFCPLPATIPILMVFCAAYAFFILGPTALIGISVYVIFIPVQMFMAKLNSAFRRSAILVTDKRVQTMNEFLTCIRLIKMYAWEKSFTNTIQDIRRRERKLLEKAGFVQSGNSALAPIVSTIAIVLTLSCHILLRRKLTAPVAFSVIAMFNVMKFSIAILPFSIKAMAEANVSLRRMKKILIDKSPPSYITQPEDPDTVLLLANATLTWEHEASRKSTPKKLQNQKRHLCKKQRSEAYSERSPPAKGATGPEEQSDSLKSVLHSISFVVRKGKILGICGNVGSGKSSLLAALLGQMQLQKGVVAVNGTLAYVSQQAWIFHGNVRENILFGEKYDHQRYQHTVRVCGLQKDLSNLPYGDLTEIGERGLNLSGGQRQRISLARAVYSDRQLYLLDDPLSAVDAHVGKHVFEECIKKTLRGKTVVLVTHQLQFLESCDEVILLEDGEICEKGTHKELMEERGRYAKLIHNLRGLQFKDPEHLYNAAMVEAFKESPAEREEDAVLAPGNEKDEGKESETGSEFVDTKVPEHQLIQTESPQEGTVTWKTYHTYIKASGGYLLSLFTVFLFLLMIGSAAFSNWWLGLWLDKGSRMTCGPQGNRTMCEVGAVLADIGQHVYQWVYTASMVFMLVFGVTKGFVFTKTTLMASSSLHDTVFDKILKSPMSFFDTTPTGRLMNRFSKDMDELDVRLPFHAENFLQQFFMVVFILVILAAVFPAVLLVVASLAVGFFILLRIFHRGVQELKKVENVSRSPWFTHITSSMQGLGIIHAYGKKESCIT

SEQ ID NO: 24257 - protein, 935 aa, Homo sapiens
MVGEGPYLISDLDQRGRRRSFAERYDPSLKTMIPVRPCARLAPNPVDDAGLLSFATFSWLTPVMVKGYRQRLTVDTLPPLSTYDSSDTNAKRFRVLWDEEVARVGPEKASLSHVVWKFQRTRVLMDIVANILCIIMAAIGPTVLIHQILQQTERTSGKVWVGIGLCIALFATEFTKVFFWALAWAINYRTAIRLKVALSTLVFENLVSFKTLTHISVGEVLNILSSDSYSLFEAALFCPLPATIPILMVFCAAYAFFILGPTALIGISVYVIFIPVQMFMAKLNSAFRRSAILVTDKRVQTMNEFLTCIRLIKMYAWEKSFTNTIQDIRRRERKLLEKAGFVQSGNSALAPIVSTIAIVLTLSCHILLRRKLTAPVAFSVIAMFNVMKFSIAILPFSIKAMAEANVSLRRMKKILIDKSPPSYITQPEDPDTVLLLANATLTWEHEASRKSTPKKLQNQKRHLCKKQRSEAYSERSPPAKGATGPEEQSDSLKSVLHSISFVVRKGKILGICGNVGSGKSSLLAALLGQMQLQKGVVAVNGTLAYVSQQAWIFHGNVRENILFGEKYDHQRYQHTVRVCGLQKDLSNLPYGDLTEIGERGLNLSGGQRQRISLARAVYSDRQLYLLDDPLSAVDAHVGKHVFEECIKKTLRGKTVVLVTHQLQFLESCDEVILLEDGEICEKGTHKELMEERGRYAKLIHNLRGLQFKDPEHLYNAAMVEAFKESPAEREEDAVLAPGNEKDEGKESETGSEFVDTKVPEHQLIQTESPQEGTVTWKTYHTYIKASGGYLLSLFTVFLFLLMIGSAAFSNWWLGLWLDKGSRMTCGPQGNRTMCEVGAVLADIGQHVYQWVYTASMVFMLVFGVTKGFVFTKTTLMASSSLHDTVFDKHFPQRSPGAQEGGECQPVTLVHPHHLLHAGPGHHSRLWQEGELHHLV

SEQ ID NO: 24258 - protein, 633 aa, Homo sapiens
MVGEGPYLISDLDQRGRRRSFAERYDPSLKTMIPVRPCARLAPNPVDDAGLLSFATFSWLTPVMVKGYRQRLTVDTLPPLSTYDSSDTNAKRFRVLWDEEVARVGPEKASLSHVVWKFQRTRVLMDIVANILCIIMAAIGPTVLIHQILQQTERTSGKVWVGIGLCIALFATEFTKVFFWALAWAINYRTAIRLKVALSTLVFENLVSFKTLTHISVGEVLNILSSDSYSLFEAALFCPLPATIPILMVFCAAYAFFILGPTALIGISVYVIFIPVQMFMAKLNSAFRRSAILVTDKRVQTMNEFLTCIRLIKMYAWEKSFTNTIQDIRRRERKLLEKAGFVQSGNSALAPIVSTIAIVLTLSCHILLRRKLTAPVAFSVIAMFNVMKFSIAILPFSIKAMAEANVSLRRMKKILIDKSPPSYITQPEDPDTVLLLANATLTWEHEASRKSTPKKLQNQKRHLCKKQRSEAYSERSPPAKGATGPEEQSDSLKSVLHSISFVVRKGKILGICGNVGSGKSSLLAALLGQMQLQKGVVAVNGTLAYVSQQAWIFHGNVRENILFGEKYDHQRLGSGASTSLGGRGRGLAWPALSTPTVSSTCWTTPCRPWTPTWGSTSLRSALRRRSGERQSSW

SEQ ID NO: 24259 - protein, 930 aa, Homo sapiens
MVGEGPYLISDLDQRGRRRSFAERYDPSLKTMIPVRPCARLAPNPVDDAGLLSFATFSWLTPVMVKGYRQRLTVDTLPPLSTYDSSDTNAKRFRVLWDEEVARVGPEKASLSHVVWKFQRTRVLMDIVANILCIIMAAIGPTVLIHQILQQTERTSGKVWVGIGLCIALFATEFTKVFFWALAWAINYRTAIRLKVALSTLVFENLVSFKTLTHISVGEMFMAKLNSAFRRSAILVTDKRVQTMNEFLTCIRLIKMYAWEKSFTNTIQDIRRRERKLLEKAGFVQSGNSALAPIVSTIAIVLTLSCHILLRRKLTAPVAFSVIAMFNVMKFSIAILPFSIKAMAEANVSLRRMKKILIDKSPPSYITQPEDPDTVLLLANATLTWEHEASRKSTPKKLQNQKRHLCKKQRSEAYSERSPPAKGATGPEEQSDSLKSVLHSISFVVRKGKILGICGNVGSGKSSLLAALLGQMQLQKGVVAVNGTLAYVSQQAWIFHGNVRENILFGEKYDHQRYQHTVRVCGLQKDLSNLPYGDLTEIGERGLNLSGGQRQRISLARAVYSDRQLYLLDDPLSAVDAHVGKHVFEECIKKTLRGKTVVLVTHQLQFLESCDEVILLEDGEICEKGTHKELMEERGRYAKLIHNLRGLQFKDPEHLYNAAMVEAFKESPAEREEDAGIIVPEHQLIQTESPQEGTVTWKTYHTYIKASGGYLLSLFTVFLFLLMIGSAAFSNWWLGLWLDKGSRMTCGPQGNRTMCEVGAVLADIGQHVYQWVYTASMVFMLVFGVTKGFVFTKTTLMASSSLHDTVFDKILKSPMSFFDTTPTGRLMNRFSKDMDELDVRLPFHAENFLQQFFMVVFILVILAAVFPAVLLVVASLAVGFFILLRIFHRGVQELKKVENVSRSPWFTHITSSMQGLGIIHAYGKKESCIT

SEQ ID NO: 24260 - protein, 1320 aa, Homo sapiens
MFGLDQFEPQVNSRNAGQGERNFNETGLSMNTHFKAPAFHTGGPPGPVDPAMSALGEPPILGMNMEPYGFHARGHSELHAGGLQAQPVHGFFGGQQPHHGHPGSHHPHQHHPHFGGNFGGPDPGASCLHGGRLLGYGGAAGGLGSQPPFAEGYEHMAESQGPESFGPQRPGNLPDFHSSGASSHAVPAPCLPLDQSPNRAASFHGLPSSSGSDSHSLEPRRVTNQGAVDSLEYNYPGEAPSGHFDMFSPSDSEGQLPHYAAGRQVPGGAFPGASAMPRAAGMVGLSKMHAQPPQQQPQQQQQPQQQQQQHGVFFERFSGARKMPVGLEPSVGSRHPLMQPPQQAPPPPQQQPPQQPPQQQPPPPPGLLVRQNSCPPALPRPQQGEAGTPSGGLQDGGPMLPSQHAQFEYPIHRLENRSMHPYSEPVFSMQHPPPQQAPNQRLQHFDAPPYMNVAKRPRFDFPGSAGVDRCASWNGSMHNGALDNHLSPSAYPGLPGEFTPPVPDSFPSGPPLQHPAPDHQSLQQQQQQQQQQQQQQQQQQQQQQQQQQQQRQNAALMIKQMASRNQQQRLRQPNLAQLGHPGDVGQGGLVHGGPVGGLAQPNFEREGGSTGAGRLGTFEQQAPHLAQESAWFSGPHPPPGDLLPRRMGGSGLPADCGPHDPSLAPPPPPGGSGVLFRGPLQEPMRMPGEGHVPALPSPGLQFGGSLGGLGQLQSPGAGVGLPSAASERRPPPPDFATSALGGQPGFPFGAAGRQSTPHSGPGVNSPPSAGGGGGSSGGGGGGGAYPPQPDFQPSQRTSASKLGALSLGSFNKPSSKDNLFGQSCLAALSTACQNMIASLGAPNLNVTFNKKNPPEGKRKLSQNETDGAAVAGNPGSDYFPGGTAPGAPGPGGPSGTSSSGSKASGPPNPPAQGDGTSLSPNYTLESTSGNDGKPVSGGGGRGRGRRKRDSGHVSPGTFFDKYSAAPDSGGAPGVSPGQQQASGAAVGGSSAGETRGAPTPHEKALTSPSWGKGAELLLGDQPDLIGSLDGGAKSDSSSPNVGEFASDEVSTSYANEDEVSSSSDNPQALVKASRSPLVTGSPKLPPRGVGAGEHGPKAPPPALGLGIMSNSTSTPDSYGGGGGPGHPGTPGLEQVRTPTSSSGAPPPDEIHPLEILQAQIQLQRQQFSISEDQPLGLKGGKKGECAVGASGAQNGDSELGSCCSEAVKSAMSTIDLDSLMAEHSAAWYMPADKALVDSADDDKTLAPWEKAKPQNPNSKEAHDLPANKASASQPGSHLQCLSVHCTDDVGDAKARASVPTWRSLHSDISNRFGTFVAALT

SEQ ID NO: 24261 - protein, 916 aa, Homo sapiens
METSQETSLFLVKILEELDSKQNTVSYQDLCKSLCARFDLSQLAKLRSVLFYTACLDPNFPATLFKDKMKCTVNNQQSKKIMVAADIVTIFNLIQMNGGAAKEKLPTGRQKVRKKEASFESCRSDTEICNAAECEPLNCELSERSFSRGYPIRQSSKCRKMDCKDCPQFVPASEPNFLLGVSKEVKNRAASLDRLQALAPYSVTSPQPCEMQRTYFPMNIENESISDQDSLPINQSIKETFISNEEPFVVQSCVQKRNIFKEDFHNLMAVSPSLVGPISKAENEHREPQSRKEPHKPPFFNHSFEMPYNSQYLNPVYSPVPDKRRAKHESLDDLQASTYFGPTPVMGTQEARRCLGKPNKQTPWPAKSWSLNTEEVPDFERSFFNRNPSEEKLHYPNASSQTPNFPAPERRPTYLVPKDQQPILPIAYAAKQNGLKSKEISSPVDLEKHEPVKKFKDKSINCTSGQLSSDTSSVGTQTEHVLEPKKCRDLCTSGQGKYSDRHTMKHSDDDSEIVSDDISDIFRFLDDMSISGSTGVIQSSCYNSTGSLSQLHKSDCDSSPEHNLTKIANGVPNSKGDKGNRPENTHHSEEELKTSVCKLVLRIGEIERKLESLSGVRDEISQVLGKLNKLDQKMQQPEKVSVQIDLNSLTSEGPSDDSASPRMFHAHSGSHGPKLENNPDWCCSDASGSNSESLRVKALKKSLFTRPSSRSLTEENSATESKIASISNSPRDWRTITYTNRVGLNEEEIKDTGPGDNKDWHRKSKEADRQYDIPPQHRLPKQPKDGFLVEQVFSPHPYPASLKAHMKSNPLYTDMRLTELAEVKRGQPSWTIEEYARNAGDKGKLTALDLQTQESLNPNNLEYWMEDIYTPGYDSLLKRKEAEFRRAKVCKIAALIAAAACTVILVIVVPICTMKS

SEQ ID NO: 24262 - protein, 491 aa, Homo sapiens
MAQSGGEARPGPKTAVQIRVAIQEAEDVDELEDEEEGAETRGAGDPARYLSPGWGSASEEEPSRGHSGTTASGGENEREDLEQEWKPPDEELIKKLVDQIEFYFSDENLEKDAFLLKHVRRNKLGYVSVKLLTSFKKVKHLTRDWRTTAHALKYSVVLELNEDHRKVRRTTPVPLFPNENLPSKMLLVYDLYLSPKLWALATPQKNGRVQEKVMEHLLKLFGTFGVISSVRILKPGRELPPDIRRISSRYSQVGTQECAIVEFEEVEAAIKAHEFMITESQGKENMKAVLIGMKPPKKKPAKDKNHDEEPTASIHLNKSLNKRVEELQYMGDESSANSSSDPESNPTSPMAGRRHAATNKLSPSGHQNLFLSPNASPCTSPWSSPLAQRKGVSRKSPLAEEGRLNCSTSPEIFRKCMDYSSDSSVTPSGSPWVRRRRQAEMGTQEKSPGTSPLLSRKMQTADGLPVGVLRLPRGPDNTRGFHGHERSRACV

SEQ ID NO: 24263 - protein, 93 aa, Homo sapiens
MAQSGGEARPGPKTAVQIRVAIQEAEDVDELEDEEEGAETRGAGDPARYLSPGWGSASEEEPSRGHRNRSSVNSRTMLASFIVSSAPSTAPST

SEQ ID NO: 24264 - protein, 507 aa, Homo sapiens
MAGAGPKRRALAAPAAEEKEEAREKMLAAKSADGSAPAGEGEGVTLQRNITLLNGVAIIVGTIIGSGIFVTPTGVLKEAGSPGLALVVWAACGVFSIVGALCYAELGTTISKSGGDYAYMLEVYGSLPAFLKLWIELLIIRPSSQYIVALVFATYLLKPLFPTCPVPEEAAKLVACLCVLLLTAVNCYSVKAATRVQDAFAAAKLLALALIILLGFVQIGKGDVSNLDPNFSFEGTKLDVGNIVLALYSGLFAYGGWNYLNFVTEEMINPYRNLPLAIIISLPIVTLVYVLTNLAYFTTLSTEQMLSSEAVAVDFGNYHLGVMSWIIPVFVGLSCFGSVNGSLFTSSRLFFVGSREGHLPSILSMIHPQLLTPVPSLVFTCVMTLLYAFSKDIFSVINFFSFFNWLCVALAIIGMIWLRHRKPELERPIKVNLALPVFFILACLFLIAVSFWKTPVECGIGFTIILSGLPVYFFGVWWKNKPKWLLQGIFSTTVLCQKLMQVVPQET

SEQ ID NO: 24265 - protein, 569 aa, Homo sapiens
MAPTLATAHRRRWWMACTAVLENLLFSAVLLGWGSLLIMLKSEGFYSYLCTEPENVTNGTVGGTAEPGHEEVSWMNGWLSCQAQDEMLNLAFTVGSFLLSAITLPLGIVMDKYGPRKLRLLGSACFAVSCLLIAYGASKPNALSVLIFIALALNGFGGMCMTFTSLTLPNMFGDLRSTFIALMIGSYASSAVTFPGIKLIYDAGVSFIVVLVVWAGCSGLVFLNCFFNWPLEPFPGPEDMDYSVKIKFSWLGFDHKITGKQFYKQVTTVGRRLSVGSSMRSAKEQVALQEGHKLCLSTVDLEVKCQPDAAVAPSFMHSVFSPILLLSLVTMCVTQLRLIFYMGAMNNILKFLVSGDQKTVGLYTSIFGVLQLLCLLTAPVIGYIMDWRLKECEDASEEPEEKDANQGEKKKKKRDRQIQKITNAMRAFAFTNLLLVGFGVTCLIPNLPLQILSFILHTIVRGFIHSAVGGLYAAVYPSTQFGSLTGLQSLISALFALLQQPLFLAMMGPLQGDPLWVNVGLLLLSLLGFCLPLYLICYRRQLERQLQQRQEDDKLFLKINGSSNQEAFV

SEQ ID NO: 24266 - protein, 489 aa, Homo sapiens
MAPTLATAHRRRWWMACTAVLENLLFSAVLLGWGSLLIMLKSEGFYSYLCTEPENVTNGTVGGTAEPGHEEVSWMNGWLSCQAQDEMLNLAFTVGSFLLSAITLPLGIVMDKYGPRKLRLLGSACFAVSCLLIAYGASKPNALSVLIFIALALNGFGGMCMTFTSLTLPNMFGDLRSTFIALMIGSYASSAVTFPGIKLIYDAGVSFIVVLVVWAGCSGLVFLNCFFNWPLEPFPGPEDMDYSVKIKFSWLGFDHKITGKQFYKQVTTVGRRLSVGSSMRSAKEQVALQEGHKLCLSTVDLEVKCQPDAAVAPSFMHSVFSPILLLSLVTMCVTQLRLIFYMGAMNNILKFLVSGDQKTVGLYTSIFGVLQLLCLLTAPVIGYIMDWRLKECEDASEEPEEKDANQCVGRAGAPAPSPQPLQKDPRAACQAQGGWDRGREQCTPAPPGALRETHSFSSACVSTAPLFMEIVWNAMEMLKFEARCGDSCL

SEQ ID NO: 24267 - protein, 573 aa, Homo sapiens
MAPTLATAHRRRWWMACTAVLENLLFSAVLLGWGSLLIMLKSEGFYSYLCTEPENVTNGTVGGTAEPGHEEVSWMNGWLSCQAQDEMLNLAFTVGSFLLSAITLPLGIVMDKYGPRKLRLLGSACFAVSCLLIAYGASKPNALSVLIFIALALNGFGGMCMTFTSLTLPNMFGDLRSTFIALMIGSYASSAVTFPGIKLIYDAGVSFIVVLVVWAGCSGLVFLNCFFNWPLEPFPGPEDMDYSVKIKFSWLGFDHKITGKQFYKQVTTVGRRLSVGSSMRSAKEQVALQEGHKLCLSTVDLEVKCQPDAAVAPSFMHSVFSPILLLSLVTMCVTQLRLIFYMGAMNNILKFLVSGDQKTVMATVGLYTSIFGVLQLLCLLTAPVIGYIMDWRLKECEDASEEPEEKDANQGEKKKKKRDRQIQKITNAMRAFAFTNLLLVGFGVTCLIPNLPLQILSFILHTIVRGFIHSAVGGLYAAVYPSTQFGSLTGLQSLISALFALLQQPLFLAMMGPLQGDPLWVNVGLLLLSLLGFCLPLYLICYRRQLERQLQQRQEDDKLFLKINGSSNQEAFV

SEQ ID NO: 24268 - protein, 432 aa, Homo sapiens
MTYGSPQANASPSDAVALDHGEVSRRQQQELPNMFGDLRSTFIALMIGSYASSAVTFPGIKLIYDAGVSFIVVLVVWAGCSGLVFLNCFFNWPLEPFPGPEDMDYSVKIKFSWLGFDHKITGKQFYKQVTTVGRRLSVGSSMRSAKEQVALQEGHKLCLSTVDLEVKCQPDAAVAPSFMHSVFSPILLLSLVTMCVTQLRLIFYMGAMNNILKFLVSGDQKTVGLYTSIFGVLQLLCLLTAPVIGYIMDWRLKECEDASEEPEEKDANQGEKKKKKRDRQIQKITNAMRAFAFTNLLLVGFGVTCLIPNLPLQILSFILHTIVRGFIHSAVGGLYAAVYPSTQFGSLTGLQSLISALFALLQQPLFLAMMGPLQGDPLWVNVGLLLLSLLGFCLPLYLICYRRQLERQLQQRQEDDKLFLKINGSSNQEAFV

SEQ ID NO: 24269 - protein, 418 aa, Homo sapiens
MPMLLPHPHQHFLKGLLRAPFRCYHFIFHSSTHLGSGIPCAQPFNSLGLHCTKWMLLSDGLKRKLCVQTTLKDHTEGLSDKEQRFVDKLYTGLIQGQRACLAEAITLVESTHSRKKELAQVLLQKVLLYHREQEQSNKGKPLAFRVGLSGPPGAGKSTFIEYFGKMLTERGHKLSVLAVDPSSCTSGGSLLGDKTRMTELSRDMNAYIRPSPTRGTLGGVTRTTNEAILLCEGAGYDIILIETVGVGQSEFAVADMVDMFVLLLPPAGGDELQGIKRGIIEMADLVAVTKSDGDLIVPARRIQAEYVSALKLLRKRSQVWKPKVIRISARSGEGISEMWDKMKDFQDLMLASGELTAKRRKQQKVWMWNLIQESVLEHFRTHPTVREQIPLLEQKVLIGALSPGLAADFLLKAFKSRD

SEQ ID NO: 24270 - protein, 250 aa, Homo sapiens
MAVCGLGSRLGLGSRLGLRGCFGAARLLYPRFQSRGPQGVEDGDRPQPSSKTPRIPKIYTKTGDKGFSSTFTGERRPKDDQVFEAVGTTDELSSAIGFALELVTEKGHTFAEELQKIQCTLQDVGSALATPCSSAREAHLKYTTFKAGPILELEQWIDKYTSQLPPLTAFILPSGGKISSALHFCRAVCRRAERRVVPLVQMGETDANVAKFLNRLSDYLFTLARYAAMKEGNQEKIYMKNDPSAESEGL

SEQ ID NO: 24271 - protein, 1453 aa, Homo sapiens
MIKCLSVEVQAKLRSGLAISSLGQCVEELALNSIDAEAKCVAVRVNMETFQVQVIDNGFGMGSDDVEKVGNRYFTSKCHSVQDLENPRFYGFRGEALANIADMASAVEISSKKNRTMKTFVKLFQSGKALKACEADVTRASAGTTVTVYNLFYQLPVRRKCMDPRLEFEKVRQRIEALSLMHPSISFSLRNDVSGSMVLQLPKTKDVCSRFCQIYGLGKSQKLREISFKYKEFELSGYISSEAHYNKNMQFLFVNKRLVLRTKLHKLIDFLLRKESIICKPKNGPTSRQMNSSLRHRSTPELYGIYVINVQCQFCEYDVCMEPAKTLIEFQNWDTLLFCIQEGVKMFLKQEKLFVELSGEDIKEFSEDNGFSLFDATLQKRVTSDERSNFQEACNNILDSYEMFNLQSKAVKRKTTAENVNTQSSRDSEATRKNTNDAFLYIYESGGPGHSKMTEPSLQNKDSSCSESKMLEQETIVASEAGENEKHKKSFLEHSSLENPCGTSLEMFLSPFQTPCHFEESGQDLEIWKESTTVNGMAANILKNNRIQNQPKRFKDATEVGCQPLPFATTLWGVHSAQTEKEKKKESSNCGRRNVFSYGRVKLCSTGFITHVVQNEKTKSTETEHSFKNYVRPGPTRAQETFGNRTRHSVETPDIKDLASTLSKESGQLPNKKNCRTNISYGLENEPTATYTMFSAFQEGSKKSQTDCILSDTSPSFPWYRHVSNDSRKTDKLIGFSKPIVRKKLSLSSQLGSLEKFKRQYGKVENPLDTEVEESNGVTTNLSLQVEPDILLKDKNRLENSDVCKITTMEHSDSDSSCQPASHILNSEKFPFSKDEDCLEQQMPSLRESPMTLKELSLFNRKPLDLEKSSESLASKLSRLKGSERETQTMGMMSRFNELPNSDSSRKDSKLCSVLTQDFCMLFNNKHEKTENGVIPTSDSATQDNSFNKNSKTHSNSNTTENCVISETPLVLPYNNSKVTGKDSDVLIRASEQQIGSLDSPSGMLMNPVEDATGDQNGICFQSEESKARACSETEESNTCCSDWQRHFDVALGRMVYVNKMTGLSTFIAPTEDIQAACTKDLTTVAVDVVLENGSQYRCQPFRSDLVLPFLPRARAERTVMRQDNRDTVDDTVSSESLQSLFSEWDNPVFARYPEVAVDVSSGQAESLAVKIHNILYPYRFTKGMIHSMQVLQQVDNKFIACLMSTKTEENGEAGGNLLVLVDQHAAHERIRLEQLIIDSYEKQQAQGSGRKKLLSSTLIPPLEITVTEEQRRLLWCYHKNLEDLGLEFVFPDTSDSLVLVGKVPLCFVEREANELRRGRSTVTKSIVEEFIREQLELLQTTGGIQGTLPLTVQKVLASQACHGAIKFNDGLSLQESCRLIEALSSCQLPFQCAHGRPSMLPLADIDHLEQEKQIKPNLTKLRKMAQAWRLFGKAECDTRQSLQQSMPPCEPP

SEQ ID NO: 24272 - protein, 1429 aa, Homo sapiens
MIKCLSVEVQAKLRSGLAISSLGQCVEELALNSIDAEAKCVAVRVNMETFQVQVIDNGFGMGSDDVEKVGNRYFTSKCHSVQDLENPRFYGFRGEALANIADMASAVEISSKKNRTMKTFVKLFQSGKALKACEADVTRASAGTTVTVYNLFYQLPVRRKCMDPRLEFEKVRQRIEALSLMHPSISFSLRNDVSGSMVLQLPKTKDVCSRFCQIYGLGKSQKLREISFKYKEFELSGYISSEAHYNKNMQFLFVNKRLVLRTKLHKLIDFLLRKESIICKPKNGPTSRQMNSSLRHRSTPELYGIYVINVQCQFCEYDVCMEPAKTLIEFQNWDTLLFCIQEGVKMFLKQEKLFVELSGEDIKEFSEDNGFSLFDATLQKRVTSDERSNFQEACNNILDSYEMFNLQSKAVKRKTTAENVNTQSSRDSEATRKNTNDAFLYIYESGGPGHSKMTEPSLQNKDSSCSESKMLEQETIVASEAGENEKHKKSFLEHSSLENPCGTSLEMFLSPFQTPCHFEESGQDLEIWKESTTVNGMAANILKNNRIQNQPKRFKDATEVGCQPLPFATTLWGVHSAQTEKEKKKESSNCGRRNVFSYGRVKLCSTGFITHVVQNEKTKSTETEHSFKNYVRPGPTRAQETFGNRTRHSVETPDIKDLASTLSKESGQLPNKKNCRTNISYGLENEPTATYTMFSAFQEGSKKSQTDCILSDTSPSFPWYRHVSNDSRKTDKLIGFSKPIVRKKLSLSSQLGSLEKFKRQYGKVENPLDTEVEESNGVTTNLSLQVEPDILLKDKNRLENSDVCKITTMEHSDSDSSCQPASHILNSEKFPFSKDEDCLEQQMPSLRESPMTLKELSLFNRKPLDLEKSSESLASKLSRLKGSERETQTMGMMSRFNELPNSDSSRKDSKLCSVLTQDFCMLFNNKHEKTENGVIPTSDSATQDNSFNKNSKTHSNSNTTENCVISETPLVLPYNNSKVTGKDSDVLIRASEQQIGSLDSPSGMLMNPVEDATGDQNGICFQSEESKARACSETEESNTCCSDWQRHFDVALGRMVYVNKMTGLSTFIAPTEDIQAACTKDLTTVAVDVVLENGSQYRCQPFRSDLVLPFLPRARAERTVMRQDNRDTVDDTVSSESLQSLFSEWDNPVFARYPEVAVDVSSGQAESLAVKIHNILYPYRFTKGMIHSMQVLQQVDNKFIACLMSTKTEENGEADSYEKQQAQGSGRKKLLSSTLIPPLEITVTEEQRRLLWCYHKNLEDLGLEFVFPDTSDSLVLVGKVPLCFVEREANELRRGRSTVTKSIVEEFIREQLELLQTTGGIQGTLPLTVQKVLASQACHGAIKFNDGLSLQESCRLIEALSSCQLPFQCAHGRPSMLPLADIDHLEQEKQIKPNLTKLRKMAQAWRLFGKAECDTRQSLQQSMPPCEPP

SEQ ID NO: 24273 - protein, 282 aa, Homo sapiens
MEPKVAELKQKIEDTLCPFGFEVYPFQVAWYNELLPPAFHLPLPGPTLAFLVLSTPAMFDRALKPFLQSCHLRMLTDPVDQCVAYHLGRVRESLPELQIEIIADYEVHPNRRPKILAQTAAHVAGAAYYYQRQDVEADPWGNQRISGVCIHPRFGGWFAIRGVVLLPGIEVPDLPPRKPHDCVPTRADRIALLEGFNFHWRDWTYRDAVTPQERYSEEQKAYFSTPPAQRLALLGLAQPSEKPSSPSPDLPFTTPAPKKPGNPSRARSWLSPRVSPPASPGP

SEQ ID NO: 24274 - protein, 233 aa, Homo sapiens
MAGVRSLRCSRGCAGGCECGDKGKCSDSSLLGKRLSEDSSRHQLLQKWASMWSSMSEDASVADMERAQLEEEAAAAEERPLVFLCSGCRRPLGDSLSWVASQEDTNCILLRCVSCNVSVDKEQKLSKREKENGCVLETLCCAGCSLNLGYVYRCTPKNLDYKRDLFCLSVEAIESYVLGSSEKQIVSEDKELFNLESRVEIEKSLTQMEDVLKALQMKLWEAESKLSFATCKS

SEQ ID NO: 24275 - protein, 132 aa, Homo sapiens
MTGELEVKNMDMKPGSTLKITGSIADGTDGFVINLGQGTDKLNLHFNPRFSESTIVCNSLDGSNWGQEQREDHLCFSPGSEVKFTVTFESDKFKVKLPDGHELTFPNRLGHSHLSYLSVRGGFNMSSFKLKE

SEQ ID NO: 24276 - protein, 98 aa, Homo sapiens
MSSDDKSKSNDPKTEPKNCDPKCEQKCESKCQPSCLKKLLQRCFEKCPWEKCPAPPKCLPCPSQSPSSCPPQPCTKPCPPKCPSSCPHACPPPCPPPE

SEQ ID NO: 24277 - protein, 670 aa, Homo sapiens
MSLADLTKTNIDEHFFGVALENNRRSAACKRSPGTGDFSRNSNASNKSVDYSRSQCSCGSLSSQYDYSEDFLCDCSEKAINRNYLKQPVVKEKEKKKYNVSKISQSKGQKEISVEKKHTWNASLFNSQIHMIAQRRDAMAHRILSARLHKIKGLKNELADMHHKLEAILTENQFLKQLQLRHLKAIGKYENSQNNLPQIMAKHQNEVKNLRQLLRKSQEKERTLSRKLRETDSQLLKTKDILQALQKLSEDKNLAEREELTHKLSIITTKMDANDKKIQSLEKQLRLNCRAFSRQLAIETRKTLAAQTATKTLQVEVKHLQQKLKEKDRELEIKNIYSHRILKNLHDTEDYPKVSSTKSVQADRKILPFTSMRHQGTQKSDVPPLTTKGKKATGNIDHKEKSTEINHEIPHCVNKLPKQEDSKRKYEDLSGEEKHLEVQILLENTGRQKDKKEDQEKKNIFVKEEQELPPKIIEVIHPERESNQEDVLVREKFKRSMQRNGVDDTLGKGTAPYTKGPLRQRRHYSFTEATENLHHGLPASGGPANAGNMRYSHSTGKHLSNREEMELEHSDSGYEPSFGKSSRIKVKDTTFRDKKSSLMEELFGSGYVLKTDQSSPGVAKGSEEPLQSKESHPLPPSQASTSHAFGDSKVTVVNSIKPSSPTEGKRKIII

SEQ ID NO: 24278 - protein, 491 aa, Homo sapiens
MAFYSYNSVLAIARTRFPSHFVHPTCSSYSPSCAFLHLPDSHLNKTCMKNYESKKYSDPSQPGNTVLHPGTRLIQKLHTSTCWLQEVPGKPQLEQATKHPQVTSPQATKETGMEIKEGKQSYRQKIMDELKYYYNGFYLLWIDAKVAARMVWRLLHGQVLTRRERRRLLRTCVDFFRLVPFMVFLIVPFMEFLLPVFLKLFPEMLPSTFESESKKEEKQKKKMAVKLELAKFLQETMTEMARRNRAKMGDASTQLSSYVKQVQTGHKPSTKEIVRFSKLFEDQLALEHLDRPQLVALCKLLELQTFGTNNLLRFQLLMKLKSIKADDEIIAKEGVTALSVSELQAACRARGMRSLGLTEEQLRQQLTEWQDLHLKENVPPSLLLLSRTFYLIDVKPKPIEIPLSGEAPKTDILVELPTFTESKENMVDLAPQLKGTKDEDFIQPPPVTSSPITPSTPISLPKGPITSSEEPTLQAKSQMTAQNSKASSKGA

SEQ ID NO: 24279 - protein, 444 aa, Homo sapiens
MKNYESKKYSDPSQPGNTVLHPGTRLIQKLHTSTCWLQEVPGKPQLEQATKHPQVTSPQATKETGMEIKEGKQSYRQKIMDELKYYYNGFYLLWIDAKVAARMVWRLLHGQVLTRRERRRLLRTCVDFFRLVPFMVFLIVPFMEFLLPVFLKLFPEMLPSTFESESKKEEKQKKKMAVKLELAKFLQETMTEMARRNRAKMGDASTQLSSYVKQVQTGHKPSTKEIVRFSKLFEDQLALEHLDRPQLVALCKLLELQTFGTNNLLRFQLLMKLKSIKADDEIIAKEGVTALSVSELQAACRARGMRSLGLTEEQLRQQLTEWQDLHLKENVPPSLLLLSRTFYLIDVKPKPIEIPLSGEAPKTDILVELPTFTESKENMVDLAPQLKGTKDEDFIQPPPVTSSPITPSTPISLPKGPITSSEEPTLQAKSQMTAQNSKASSKGA

SEQ ID NO: 24280 - protein, 396 aa, Homo sapiens
MKNYESKKYSDPSQPGNTVLHPGTRLIQKLHTSTCWLQEVPGKPQLEQATKHPQVTSPQATKETGMEIKEGKQSYRQKIMDELKYYYNGFYLLWIDAKVAARMVWRLLHGQVLTRRERRREEKQKKKMAVKLELAKFLQETMTEMARRNRAKMGDASTQLSSYVKQVQTGHKPSTKEIVRFSKLFEDQLALEHLDRPQLVALCKLLELQTFGTNNLLRFQLLMKLKSIKADDEIIAKEGVTALSVSELQAACRARGMRSLGLTEEQLRQQLTEWQDLHLKENVPPSLLLLSRTFYLIDVKPKPIEIPLSGEAPKTDILVELPTFTESKENMVDLAPQLKGTKDEDFIQPPPVTSSPITPSTPISLPKGPITSSEEPTLQAKSQMTAQNSKASSKGA

SEQ ID NO: 24281 - protein, 277 aa, Homo sapiens
MEEKQKKKMAVKLELAKFLQETMTEMARRNRAKMGDASTQLSSYVKQVQTGHKPSTKEIVRFSKLFEDQLALEHLDRPQLVALCKLLELQTFGTNNLLRFQLLMKLKSIKADDEIIAKEGVTALSVSELQAACRARGMRSLGLTEEQLRQQLTEWQDLHLKENVPPSLLLLSRTFYLIDVKPKPIEIPLSGEAPKTDILVELPTFTESKENMVDLAPQLKGTKDEDFIQPPPVTSSPITPSTPISLPKGPITSSEEPTLQAKSQMTAQNSKASSKGA

SEQ ID NO: 24282 - protein, 289 aa, Homo sapiens
MALVPGRSKEDGLWTRNSPGSSQHPESPRLPNPLWDRGKIGKVEGHQHIQVSTSSACVWQLAYPPVWPNLPAVPIQDFSQKSHLPSIVVESSEVNEESGDLHLPHEELLLLTDGEEEDAEAFFQDQSEEPGWAWSPQDPRSPLRTFNAGLSWGQDQDEEDACWILEDTACLEATNHCPFWDSTGSRVCRSGFVEYSHLLPPNSFEGAEEEAVQTPAGVESGAASEAPGGRGCDRPRADHAAPPQEAGVQCTCQHYTVREEAQKTPPADPACPEREDSHGSGSPFKASQD

SEQ ID NO: 24283 - protein, 263 aa, Homo sapiens
MALVPGRSKEDGLWTRNSPGSSQHPESPRLPNPLWDRGKIGKVEGHQHIQDFSQKSHLPSIVVESSEVNEESGDLHLPHEELLLLTDGEEEDAEAFFQDQSEEPGWAWSPQDPRSPLRTFNAGLSWGQDQDEEDACWILEDTACLEATNHCPFWDSTGSRVCRSGFVEYSHLLPPNSFEGAEEEAVQTPAGVESGAASEAPGGRGCDRPRADHAAPPQEAGVQCTCQHYTVREEAQKTPPADPACPEREDSHGSGSPFKASQD

SEQ ID NO: 24284 - protein, 1786 aa, Homo sapiens
MGLLQLLAFSFLALCRARVRAQEPEFSYGCAEGSCYPATGDLLIGRAQKLSVTSTCGLHKPEPYCIVSHLQEDKKCFICNSQDPYHETLNPDSHLIENVVTTFAPNRLKIWWQSENGVENVTIQLDLEAEFHFTHLIMTFKTFRPAAMLIERSSDFGKTWGVYRYFAYDCEASFPGISTGPMKKVDDIICDSRYSDIEPSTEGEVIFRALDPAFKIEDPYSPRIQNLLKITNLRIKFVKLHTLGDNLLDSRMEIREKYYYAVYDMVVRGNCFCYGHASECAPVDGFNEEVEGMVHGHCMCRHNTKGLNCELCMDFYHDLPWRPAEGRNSNACKKCNCNEHSISCHFDMAVYLATGNVSGGVCDDCQHNTMGRNCEQCKPFYYQHPERDIRDPNFCERCTCDPAGSQNEGICDSYTDFSTGLIAGQCRCKLNVEGEHCDVCKEGFYDLSSEDPFGCKSCACNPLGTIPGGNPCDSETGHCYCKRLVTGQHCDQCLPEHWGLSNDLDGCRPCDCDLGGALNNSCFAESGQCSCRPHMIGRQCNEVEPGYYFATLDHYLYEAEEANLGPGVSIVERQYIQDRIPSWTGAGFVRVPEGAYLEFFIDNIPYSMEYDILIRYEPQLPDHWEKAVITVQRPGRIPTSSRCGNTIPDDDNQVVSLSPGSRYVVLPRPVCFEKGTNYTVRLELPQYTSSDSDVESPYTLIDSLVLMPYCKSLDIFTVGGSGDGVVTNSAWETFQRYRCLENSRSVVKTPMTDVCRNIIFSISALLHQTGLACECDPQGSLSSVCDPNGGQCQCRPNVVGRTCNRCAPGTFGFGPSGCKPCECHLQGSVNAFCNPVTGQCHCFQGVYARQCDRCLPGHWGFPSCQPCQCNGHADDCDPVTGECLNCQDYTMGHNCERCLAGYYGDPIIGSGDHCRPCPCPDGPDSGRQFARSCYQDPVTLQLACVCDPGYIGSRCDDCASGYFGNPSEVGGSCQPCQCHNNIDTTDPEACDKETGRCLKCLYHTEGEHCQFCRFGYYGDALQQDCRKCVCNYLGTVQEHCNGSDCQCDKATGQCLCLPNVIGQNCDRCAPNTWQLASGTGCDPCNCNAAHSFGPSCNEFTGQCQCMPGFGGRTCSECQELFWGDPDVECRACDCDPRGIETPQCDQSTGQCVCVEGVEGPRCDKCTRGYSGVFPDCTPCHQCFALWDVIIAELTNRTHRFLEKAKALKISGVIGPYRETVDSVERKVSEIKDILAQSPAAEPLKNIGNLFEEAEKLIKDVTEMMAQVEVKLSDTTSQSNSTAKELDSLQTEAESLDNTVKELAEQLEFIKNSDIRGALDSITKYFQMSLEAEERVNASTTEPNSTVEQSALMRDRVEDVMMERESQFKEKQEEQARLLDELAGKLQSLDLSAAAEMTCGTPPGASCSETECGGPNCRTDEGERKCGGPGCGGLVTVAHNAWQKAMDLDQDVLSALAEVEQLSKMVSEAKLRADEAKQSAEDILLKTNATKEKMDKSNEELRNLIKQIRNFLTQDSADLDSIEAVANEVLKMEMPSTPQQLQNLTEDIRERVESLSQVEVILQHSAADIARAEMLLEEAKRASKSATDVKVTADMVKEALEEAEKAQVAAEKAIKQADEDIQGTQNLLTSIESETAASEETLFNASQRISELERNVEELKRKAAQNSGEAEYIEKVVYTVKQSAEDVKKTLDGELDEKYKKVENLIAKKTEESADARRKAEMLQNEAKTLLAQANSKLQLLKDLERKYEDNQRYLEDKAQELARLEGEVRSLLKDISQKVAVYSTCL

SEQ ID NO: 24285 - protein, 325 aa, Homo sapiens
MDSELKEEIPVHEEFILCGGAETQVLKCGPWTDLFHDQSVKRPKLLIFIIPGNPGFSAFYVPFAKALYSLTNRRFPVWTISHAGHALAPKDKKILTTSEDSNAQEIKDIYGLNGQIEHKLAFLRTHVPKDMKLVLIGHSIGSYFTLQMLKRVPELPVIRAFLLFPTIERMSESPNGRIATPLLCWFRYVLYVTGYLLLKPCPETIKSLLIRRGLQVMNLENEFSPLNILEPFCLANAAYLGGQEMMEVVKRDDETIKEHLCKLTFYYGTIDPWCPKEYYEDIKKDFPEGDIRLCEKNIPHAFITHFNQEMADMIADSLKDDLSKM

SEQ ID NO: 24286 - protein, 331 aa, Homo sapiens
MDSELKEEIPVHEEFILCGGAETQVLKCGPWTDLFHDQSVKRPKLLIFIIPGERKSLGNPGFSAFYVPFAKALYSLTNRRFPVWTISHAGHALAPKDKKILTTSEDSNAQEIKDIYGLNGQIEHKLAFLRTHVPKDMKLVLIGHSIGSYFTLQMLKRVPELPVIRAFLLFPTIERMSESPNGRIATPLLCWFRYVLYVTGYLLLKPCPETIKSLLIRRGLQVMNLENEFSPLNILEPFCLANAAYLGGQEMMEVVKRDDETIKEHLCKLTFYYGTIDPWCPKEYYEDIKKDFPEGDIRLCEKNIPHAFITHFNQEMADMIADSLKDDLSKM

SEQ ID NO: 24287 - protein, 277 aa, Homo sapiens
MDSELKEEIPVHEEFILCGGAETQVLKCGPWTDLFHDQSVKRPKLLIFIIPDSNAQEIKDIYGLNGQIEHKLAFLRTHVPKDMKLVLIGHSIGSYFTLQMLKRVPELPVIRAFLLFPTIERMSESPNGRIATPLLCWFRYVLYVTGYLLLKPCPETIKSLLIRRGLQVMNLENEFSPLNILEPFCLANAAYLGGQEMMEVVKRDDETIKEHLCKLTFYYGTIDPWCPKEYYEDIKKDFPEGDIRLCEKNIPHAFITHFNQEMADMIADSLKDDLSKM

SEQ ID NO: 24288 - protein, 195 aa, Homo sapiens
MKLVLIGHSIGSYFTLQMLKRVPELPVIRAFLLFPTIERMSESPNGRIATPLLCWFRYVLYVTGYLLLKPCPETIKSLLIRRGLQVMNLENEFSPLNILEPFCLANAAYLGGQEMMEVVKRDDETIKEHLCKLTFYYGTIDPWCPKEYYEDIKKDFPEGDIRLCEKNIPHAFITHFNQEMADMIADSLKDDLSKM

SEQ ID NO: 24289 - protein, 120 aa, Homo sapiens
MRLPAQLLGLLMLWIPGSSADIVMTQTPLSLSVTPGQPASISCKSSQSLLHSDGKTYLYWYLQKPGQPPQLLIYEVSNRFSGVPDRFSGSGSGTDFTLKISRVEAEDVGVYYCMQSIQLP

SEQ ID NO: 24290 - protein, 1172 aa, Homo sapiens [sequence omitted]

SEQ ID NO: 24291 - protein, 118 aa, Homo sapiens
MSCQQSQQQCQPPPKCTPKCPPKCPTPKCPPKCPPKCPPVSSCCSVSSGGCCGSSSGGSCGSSSGGCCSSGGGGCCLSHHRHHRSHRHRPQSSDCCSQPSGGSSCCGGGSGQHSGGCC

SEQ ID NO: 24292 - protein, 110 aa, Homo sapiens
MSCQQNQQQCQPPPKCPPKCTPKCPPKCPPKCPPQCPAPCSPAVSSCCGPSSGSCCGPSSGGCCSSGGGGCCLSHHRPRLFHRRRHQSPDCCESEPSGASGCCHSSGGCC

SEQ ID NO: 24293 - protein, 95 aa, Homo sapiens
MSCQQNQQQCQPLPKCPSPKCPPKSSAQCLPPASSCCAPRPGCCGGPSSEGGCCLSHHRCCRSHRCRRQSSNSCDRGSGQQDGASDCGYGSGGCC

SEQ ID NO: 24294 - protein, 303 aa, Homo sapiens
MAPAADMTSLPLGVKVEDSAFGKPAGGGAGQAPSAAAATAAAMGADEEGAKPKVSPSLLPFSVEALMADHRKPGAKESALAPSEGVQAAGGSAQPLGVPPGSLGAPDAPSSPRPLGHFSVGGLLKLPEDALVKAESPEKPERTPWMQSPRFSPPPARRLSPPACTLRKHKTNRKPRTPFTTAQLLALERKFRQKQYLSIAERAEFSSSLSLTETQVKIWFQNRRAKAKRLQEAELEKLKMAAKPMLPPAAFGLSFPLGGPAAVAAAAGASLYGASGPFQRAALPVAPVGLYTAHVGYSMYHLT

SEQ ID NO: 24295 - protein, 56 aa, Homo sapiens
MADVSERTLQLSVLVAFASGVLLGWQANRLRRRYLDWRKRRLQDKLAATQKKLDLA

SEQ ID NO: 24296 - protein, 138 aa, Homo sapiens
MLANDVRHQQEMWGFRKVEGGVVQSLGKSSVEGETDGTISEFREIQRLAAFASFLSHAPPLNARRLLTPPPRRRPRCTPAAAMADVSERTLQLSVLVAFASGVLLGWQANRLRRRYLDWRKRRLQDKLAATQKKLDLA

SEQ ID NO: 24297 - protein, 412 aa, Homo sapiens
MGSPWNGSDGPEGAREPPWPALPPCDERRCSPFPLGALVPVTAVCLCLFVVGVSGNVVTVMLIGRYRDMRTTTNLYLGSMAVSDLLILLGLPFDLYRLWRSRPWVFGPLLCRLSLYVGEGCTYATLLHMTALSVERYLAICRPLRARVLVTRRRVRALIAVLWAVALLSAGPFLFLVGVEQDPGISVVPGLNGTARIASSPLASSPPLWLSRAPPPSPPSGPETAEAAALFSRECRPSPAQLGALRVMLWVTTAYFFLPFLCLSILYGLIGRELWSSRRPLRGPAASGRERGHRQTVRVLLVVVLAFIICWLPFHVGRIIYINTEDSRMMYFSQYFNIVALQLFYLSASINPILYNLISKKYRAAAFKLLLARKSRPRGFHRSRDTAGEVAGDTGGDTVGYTETSANVKTMG

SEQ ID NO: 24298 - protein, 386 aa, Homo sapiens
MGSPWNGSDGPEGAREPPWPALPPCDERRCSPFPLGALVPVTAVCLCLFVVGVSGNVVTVMLIGRYRDMRTTTNLYLGSMAVSDLLILLGLPFDLYRLWRSRPWVFGPLLCRLSLYVGEGCTYATLLHMTALSVERYLAICRPLRARVLVTRRRVRALIAVLWAVALLSAGPFLFLVGVEQDPGISVVPGLNGTARIASSPLASSPPLWLSRAPPPSPPSGPETAEAAALFSRECRPSPAQLGALRVMLWVTTAYFFLPFLCLSILYGLIGRELWSSRRPLRGPAASGRERGHRQTVRVLRKWSRRGSKDACLQSAPPGTAQTLGPLPLLAQLWAPLPAPFPISIPASTRRGGGSGIYNLLVALPRWQNHLHKHGRFADDVLLSVL

SEQ ID NO: 24299 - protein, 267 aa, Homo sapiens
MASPSKGNDLFSPDEEGPAVVAGPGPGPGGAEGAAEERRVKVSSLPFSVEALMSDKKPPKEASPLPAESASAGATLRPLLLSGHGAREAHSPGPLVKPFETASVKSENSEDGAAWMQEPGRYSPPPRHMSPTTCTLRKHKTNRKPRTPFTTSQLLALERKFRQKQYLSIAERAEFSSSLNLTETQVKIWFQNRRAKAKRLQEAELEKLKMAAKPMLPSSFSLPFPISSPLQAASIYGASYPFHRPVLPIPPVGLYATPVGYGMYHLS

SEQ ID NO: 24300 - protein, 1042 aa, Homo sapiens
MADAFGDELFSVFEGDSTTAAGTKKDKEKDKGKWKGPPGSADKAGKRFDGKLQSESTNNGKNKRDVDFEGTDEPIFGKKPRIEESITEDLSLADLMPRVKVQSVETVEGCTHEVALPAEEDYLPLKPRVGKAAKEYPFILDAFQREAIQCVDNNQSVLVSAHTSAGKTVCAEYAIALALREKQRVIFTSPIKALSNQKYREMYEEFQDVGLMTGDVTINPTASCLVMTTEILRSMLYRGSEVMREVAWVIFDEIHYMRDSERGVVWEETIILLPDNVHYVFLSATIPNARQFAEWICHLHKQPCHVIYTDYRPTPLQHYIFPAGGDGLHLVVDENGDFREDNFNTAMQVLRDAGDLAKGDQKGRKGGTKGPSNVFKIVKMIMERNFQPVIIFSFSKKDCEAYALQMTKLDFNTDEEKKMVEEVFSNAIDCLSDEDKKLPQVEHVLPLLKRGIGIHHGGLLPILKETIEILFSEGLIKALFATETFAMGINMPARTVLFTNARKFDGKDFRWISSGEYIQMSGRAGRRGMDDRGIVILMVDEKMSPTIGKQLLKGSADPLNSAFHLTYNMVLNLLRVEEINPEYMLEKSFYQFQHYRAIPGVVEKVKNSEEQYNKIVIPNEESVVIYYKIRQQLAKLGKEIEEYIHKPKYCLPFLQPGRLVKVKNEGDDFGWGVVVNFSKKSNVKPNSGELDPLYVVEVLLRCSKESLKNSATEAAKPAKPDEKGEMQVVPVLVHLLSAISSVRLYIPKDLRPVDNRQSVLKSIQEVQKRFPDGIPLLDPIDDMGIQDQGLKKVIQKVEAFEHRMYSHPLHNDPNLETVYTLCEKKAQIAIDIKSAKRELKKARTVLQMDELKCRKRVLRRLGFATSSDVIEMKGRVACEISSADELLLTEMMFNGLFNDLSAEQATALLSCFVFQENSSEMPKLTEQLAGPLRQMQECAKRIAKVSAEAKLEIDEETYLSSFKPHLMDVVYTWATGATFAHICKMTDVFEGSIIRCMRRLEELLRQMCQAAKAIGNTELENKFAEGITKIKRDIVFAASLYL

SEQ ID NO: 24301 - protein, 603 aa, Homo sapiens
MASASTSKYNSHSLENESIKRTSRDGVNRDLTEAVPRLPGETLITDKEVIYICPFNGPIKGRVYITNYRLYLRSLETDSSLILDVPLGVISRIEKMGGATSRGENSYGLDITCKDMRNLRFALKQEGHSRRDMFEILTRYAFPLAHSLPLFAFLNEEKFNVDGWTVYNPVEEYRRQGLPNHHWRITFINKCYELCDTYPALLVVPYRASDDDLRRVATFRSRNRIPVLSWIHPENKTVIVRCSQPLVGMSGKRNKDDEKYLDVIRETNKQISKLTIYDARPSVNAVANKATGGGYESDDAYHNAELFFLDIHNIHVMRESLKKVKDIVYPNVEESHWLSSLESTHWLEHIKLVLTGAIQVADKVSSGKSSVLVHCSDGWDRTAQLTSLAMLMLDSFYRSIEGFEILVQKEWISFGHKFASRIGHGDKNHTDADRSPIFLQFIDCVWQMSKQFPTAFEFNEQFLIIILDHLYSCRFGTFLFNCESARERQKVTERTVSLWSLINSNKEKFKNPFYTKEINRVLYPVASMRHLELWVNYYIRWNPRIKQQQPNPVEQRYMELLALRDEYIKRLEELQLANSAKLSDPPTSPSSPSQMMPHVQTHF

SEQ ID NO: 24302 - protein, 566 aa, Homo sapiens
MASASTSKYNSHSLENESIKRTSRDGVNRDLTEAVPRLPGETLITDKEVIYICPFNGPIKGRVYITNYRLYLRSLETDMRNLRFALKQEGHSRRDMFEILTRYAFPLAHSLPLFAFLNEEKFNVDGWTVYNPVEEYRRQGLPNHHWRITFINKCYELCDTYPALLVVPYRASDDDLRRVATFRSRNRIPVLSWIHPENKTVIVRCSQPLVGMSGKRNKDDEKYLDVIRETNKQISKLTIYDARPSVNAVANKATGGGYESDDAYHNAELFFLDIHNIHVMRESLKKVKDIVYPNVEESHWLSSLESTHWLEHIKLVLTGAIQVADKVSSGKSSVLVHCSDGWDRTAQLTSLAMLMLDSFYRSIEGFEILVQKEWISFGHKFASRIGHGDKNHTDADRSPIFLQFIDCVWQMSKQFPTAFEFNEQFLIIILDHLYSCRFGTFLFNCESARERQKVTERTVSLWSLINSNKEKFKNPFYTKEINRVLYPVASMRHLELWVNYYIRWNPRIKQQQPNPVEQRYMELLALRDEYIKRLEELQLANSAKLSDPPTSPSSPSQMMPHVQTHF

SEQ ID NO: 24303 - protein, 80 aa, Homo sapiens
MSQQKQQSWKPPNVPKCSPPQRSNPCLAPYSTPCGAPHSEGCHSSSQRPEVQKPRRARQKLRCLSRGTTYHCKEEECEGD

SEQ ID NO: 24304 - protein, 61 aa, Homo sapiens
MDPNCSCATGGSCTCTGSCKCKECKCTSCKKSCCSCCPMSCAKCAQGCICKGASEKCSCCA

SEQ ID NO: 24305 - protein, 381 aa, Homo sapiens
MSWTVPVVRASQRVSSVGANFLCLGMALCPRQATRIPLNGTWLFTPVSKMATVKSELIERFTSEKPVHHSKVSIIGTGSVGMACAISILLKGLSDELALVDLDEDKLKGETMDLQHGSPFTKMPNIVCSKDYFVTANSNLVIITAGARQEKGETRLNLVQRNVAIFKLMISSIVQYSPHCKLIIVSNPVDILTYVAWKLSAFPKNRIIGSGCNLDTARFRFLIGQKLGIHSESCHGWILGEHGDSSVPVWSGVNIAGVPLKDLNSDIGTDKDPEQWKNVHKEVTATAYEIIKMKGYTSWAIGLSVADLTESILKNLRRIHPVSTIIKGLYGIDEEVFLSIPCILGENGITNLIKIKLTPEEEAHLKKSAKTLWEIQNKLKL

SEQ ID NO: 24306 - protein, 62 aa, Homo sapiens
MDPNCSCAAAGVSCTCASSCKCKECKCTSCKKSCCSCCPVGCAKCAQGCICKGASEKCSCCA

SEQ ID NO: 24307 - protein, 61 aa, Homo sapiens
MDPNCSCAAGVSCTCASSCKCKECKCTSCKKSCCSCCPVGCAKCAQGCICKGASEKCSCCA

SEQ ID NO: 24308 - protein, 61 aa, Homo sapiens
MDPNCSCEAGGSCACAGSCKCKKCKCTSCKKSCCSCCPLGCAKCAQGCICKGASEKCSCCA

SEQ ID NO: 24309 - protein, 212 aa, Homo sapiens
MAARRGALIVLEGVDRAGKSTQSRKLVEALCAAGHRAELLRFPERSTEIGKLLSSYLQKKSDVEDHSVHLLFSANRWEQVPLIKEKLSQGVTLVVDRYAFSGVAFTGAKENFSLDWCKQPDVGLPKPDLVLFLQLQLADAAKRGAFGHERYENGAFQERALRCFHQLMKDTTLNWKMVDASKSIEAVHEDIRVLSEDAIRTATEKPLGELWK

SEQ ID NO: 24310 - protein, 188 aa, Homo sapiens
MAARRGALIVLEGVDRAGKSTQSRKLVEALCAAGHRAELLRFPERSTEIGKLLSSYLQKKSDVEDHSVHLLFSANRWEQVPLIKEKLSQGVTLVVDRYAFSGVAFTGAKELQLADAAKRGAFGHERYENGAFQERALRCFHQLMKDTTLNWKMVDASKSIEAVHEDIRVLSEDAIRTATEKPLGELWK

SEQ ID NO: 24311 - protein, 643 aa, Homo sapiens
MEKSSSCESLGSQPAAARPPSVDSLSSASTSHSENSVHTKSASVVSSDSISTSADNFSPDLRVLRESNKLAEMEEPPLLPGENIKDMAKDVTYICPFTGAVRGTLTVTNYRLYFKSMERDPPFVLDASLGVINRVEKIGGASSRGENSYGLETVCKDIRNLRFAHKPEGRTRRSIFENLMKYAFPVSNNLPLFAFEYKEVFPENGWKLYDPLLEYRRQGIPNESWRITKINERYELCDTYPALLVVPANIPDEELKRVASFRSRGRIPVLSWIHPESQATITRCSQPMVGVSGKRSKEDEKYLQAIMDSNAQSHKIFIFDARPSVNAVANKAKGGGYESEDAYQNAELVFLDIHNIHVMRESLRKLKEIVYPNIEETHWLSNLESTHWLEHIKLILAGALRIADKVESGKTSVVVHCSDGWDRTAQLTSLAMLMLDGYYRTIRGFEVLVEKEWLSFGHRFQLRVGHGDKNHADADRSPVFLQFIDCVWQMTRQFPTAFEFNEYFLITILDHLYSCLFGTFLCNSEQQRGKENLPKRTVSLWSYINSQLEDFTNPLYGSYSNHVLYPVASMRHLELWVGYYIRWNPRMKPQEPIHNRYKELLAKRAELQKKVEELQREISNRSTSSSERASSPAQCVTPVQTVV

SEQ ID NO: 24312 - protein, 571 aa, Homo sapiens
MEEPPLLPGENIKDMAKDVTYICPFTGAVRGTLTVTNYRLYFKSMERDPPFVLDASLGVINRVEKIGGASSRGENSYGLETVCKDIRNLRFAHKPEGRTRRSIFENLMKYAFPVSNNLPLFAFEYKEVFPENGWKLYDPLLEYRRQGIPNESWRITKINERYELCDTYPALLVVPANIPDEELKRVASFRSRGRIPVLSWIHPESQATITRCSQPMVGVSGKRSKEDEKYLQAIMDSNAQSHKIFIFDARPSVNAVANKAKGGGYESEDAYQNAELVFLDIHNIHVMRESLRKLKEIVYPNIEETHWLSNLESTHWLEHIKLILAGALRIADKVESGKTSVVVHCSDGWDRTAQLTSLAMLMLDGYYRTIRGFEVLVEKEWLSFGHRFQLRVGHGDKNHADADRSPVFLQFIDCVWQMTRQFPTAFEFNEYFLITILDHLYSCLFGTFLCNSEQQRGKENLPKRTVSLWSYINSQLEDFTNPLYGSYSNHVLYPVASMRHLELWVGYYIRWNPRMKPQEPIHNRYKELLAKRAELQKKVEELQREISNRSTSSSERASSPAQCVTPVQTVV

SEQ ID NO: 24313 - protein, 698 aa, Homo sapiens
MRRFLLLYATQQGQAKAIAEEICEQAVVHGFSADLHCISESDKYDLKTETAPLVVVVSTTGTGDPPDTARKFVKEIQNQTLPVDFFAHLRYGLLGLGDSEYTYFCNGGKIIDKRLQELGARHFYDTGHADDCVGLELVVEPWIAGLWPALRKHFRSSRGQEEISGALPVASPASSRTDLVKSELLHIESQVELLRFDDSGRKDSEVLKQNAVNSNQSNVVIEDFESSLTRSVPPLSQASLNIPGLPPEYLQVHLQESLGQEESQVSVTSADPVFQVPISKAVQLTTNDAIKTTLLVELDISNTDFSYQPGDAFSVICPNSDSEVQSLLQRLQLEDKREHCVLLKIKADTKKKGATLPQHIPAGCSLQFIFTWCLEIRAIPKKAFLRALVDYTSDSAEKRRLQELCSKQGAADYSRFVRDACACLLDLLLAFPSCQPPLSLLLEHLPKLQPRPYSCASSSLFHPGKLHFVFNIVEFLSTATTEVLRKGVCTGWLALLVASVLQPNIHASHEDSGKALAPKISISPRTTNSFHLPDDPSIPIIMVGPGTGIAPFIGFLQHREKLQEQHPDGNFGAMWLFFGCRHKDRDYLFRKELRHFLKHGILTHLKVSFSRDAPVGEEEAPAKYVQDNIQLHGQQVARILLQENGHIYVCGDAKNMAKDVHDALVQIISKEVGVEKLEAMKTLATLKEEKRYLQDIWS

SEQ ID NO: 24314 - protein, 725 aa, Homo sapiens
MGAASVRAGARLVEVALCSFTVTCLEVMRRFLLLYATQQGQAKAIAEEICEQAVVHGFSADLHCISESDKYDLKTETAPLVVVVSTTGTGDPPDTARKFVKEIQNQTLPVDFFAHLRYGLLGLGDSEYTYFCNGGKIIDKRLQELGARHFYDTGHADDCVGLELVVEPWIAGLWPALRKHFRSSRGQEEISGALPVASPASSRTDLVKSELLHIESQVELLRFDDSGRKDSEVLKQNAVNSNQSNVVIEDFESSLTRSVPPLSQASLNIPGLPPEYLQVHLQESLGQEESQVSVTSADPVFQVPISKAVQLTTNDAIKTTLLVELDISNTDFSYQPGDAFSVICPNSDSEVQSLLQRLQLEDKREHCVLLKIKADTKKKGATLPQHIPAGCSLQFIFTWCLEIRAIPKKAFLRALVDYTSDSAEKRRLQELCSKQGAADYSRFVRDACACLLDLLLAFPSCQPPLSLLLEHLPKLQPRPYSCASSSLFHPGKLHFVFNIVEFLSTATTEVLRKGVCTGWLALLVASVLQPNIHASHEDSGKALAPKISISPRTTNSFHLPDDPSIPIIMVGPGTGIAPFIGFLQHREKLQEQHPDGNFGAMWLFFGCRHKDRDYLFRKELRHFLKHGILTHLKVSFSRDAPVGEEEAPAKYVQDNIQLHGQQVARILLQENGHIYVCGDAKNMAKDVHDALVQIISKEVGVEKLEAMKTLATLKEEKRYLQDIWS

SEQ ID NO: 24315 - protein, 107 aa, Homo sapiens
MAGEDVGAPPDHLWVHQEGIYRDEYQRTWVAVVEEETSFLRARVQQIQVPLGDAARPSHLLTSQLPLMWQLYPEERYMDNNSRLWQIQHHLMVRGVQELLLKLLPDD

SEQ ID NO: 24316 - protein, 399 aa, Homo sapiens
MAQRAFPNPYADYNKSLAEGYFDAAGRLTPEFSQRLTNKIRELLQQMERGLKSADPRDGTGYTGWAGIAVLYLHLYDVFGDPAYLQLAHGYVKQSLNCLTKRSITFLCGDAGPLAVAAVLYHKMNNEKQAEDCITRLIHLNKIDPHAPNEMLYGRIGYIYALLFVNKNFGVEKIPQSHIQQICETILTSGENLARKRNFTAKSPLMYEWYQEYYVGAAHGLAGIYYYLMQPSLQVSQGKLHSLVKPSVDYVCQLKFPSGNYPPCIGDNRDLLVHWCHGAPGVIYMLIQAYKVFREEKYLCDAYQCADVIWQYGLLKKGYGLCHGSAGNAYAFLTLYNLTQDMKYLYRACKFAEWCLEYGEHGCRTPDTPFSLFEGMAGTIYFLADLLVPTKARFPAFEL

SEQ ID NO: 24317 - protein, 347 aa, Homo sapiens
MTVPVRGFSLLRGRLGRAPALGRSTAPSVRAPGEPGSAFRGFRSSGVRHEAIIISGTEMAKHIQKEIQRGVESWVSLGNRRPHLSIILVGDNPASHTYVRNKIRAASAVGICSELILKPKDVSQEELLDVTDQLNMDPRVSGILVQLPLPDHVDERTICNGIAPEKDVDGFHIINIGRLCLDQHSLIPATASAVWEIIKRTGIQTFGKNVVVAGRSKNVGMPIAMLLHTDGEHERPGGDATVTIAHRYTPKEQLKIHTQLADIIIVAAGIPKLITSDMVKEGAAVIDVGINYVHDPVTGKTKLVGDVDFEAVKKKAGFITPVPGGVGPMTVAMLLKNTLLAAKKIIY

SEQ ID NO: 24318 - protein, 289 aa, Homo sapiens
MAKHIQKEIQRGVESWVSLGNRRPHLSIILVGDNPASHTYVRNKIRAASAVGICSELILKPKDVSQEELLDVTDQLNMDPRVSGILVQLPLPDHVDERTICNGIAPEKDVDGFHIINIGRLCLDQHSLIPATASAVWEIIKRTGIQTFGKNVVVAGRSKNVGMPIAMLLHTDGEHERPGGDATVTIAHRYTPKEQLKIHTQLADIIIVAAGIPKLITSDMVKEGAAVIDVGINYVHDPVTGKTKLVGDVDFEAVKKKAGFITPVPGGVGPMTVAMLLKNTLLAAKKIIY

SEQ ID NO: 24319 - protein, 70 aa, Homo sapiens
MVKEGAAVIDVGINYVHDPVTGKTKLVGDVDFEAVKKKAGFITPVPGGVGPMTVAMLLKNTLLAAKKIIY

SEQ ID NO: 24320 - protein, 223 aa, Homo sapiens
MAKHIQKEIQRGVESWVSLGNRRPHLSIILVGDNPASHTYVRNKIRAASAVGICSELILKPKDVSQEELLDVTDQLNMDPRVSGILVQLPLPDHVDERTICNGIAPEKDVDGFHIINIGRLCLDQHSLIPATASAVWEIIKRTGIQTFGKNVVVAGRSKNVGMPIAMLLHTDGEHERPGGDATVTIAHRYTPKEQLKIHTQLADIIIVAAERFHHFAQDLSNS

SEQ ID NO: 24321 - protein, 305 aa, Homo sapiens
MTVPVRGFSLLRGRLGRAPALGRSTAPSVRAPGEPGSAFRGFRSSGVRHEAIIISGTEMAKHIQKEIQRGVESWVSLGNRRPHLSIILVGDNPASHTYVRNKIRAASAVGICSELILKPKDVSQEELLDVTDQLNMDPRVSGILVQLPLPDHVDERTICNGIAPEKDVDGFHIINIGRLCLDQHSLIPATASAVWEIIKRTGIQTFGKNVVVAGRSKNVGMPIAMLLHTDGEHERPGGDATVTIAHRYTPKEQLKIHTQLADIIIVAAAVKKKAGFITPVPGGVGPMTVAMLLKNTLLAAKKIIY

SEQ ID NO: 24322 - protein, 218 aa, Homo sapiens
MALVPYEETTEFGLQKFHKPLATFSFANHTIQIRQDWRHLGVAAVVWDAAIVLSTYLEMGAVELRGRSAVELGAGTGLVGIVAALLGAHVTITDRKVALEFLKSNVQANLPPHIQTKTVVKELTWGQNLGSFSPGEFDLILGADIIYLEETFTDLLQTLEHLCSNHSVILLACRIRYERDNNFLAMLERQFTVRKVHYDPEKDVHIYEAQKRNQKEDL

SEQ ID NO: 24323 - protein, 90 aa, Homo sapiens
MALVPYEETTEFGLQKFHKPLATFSFANHTIQIRQDWRHLGVAAVVWDAAIVLSTYLEMGAVELRGRSAVELGAGTGLVGIVAALLGGGI

SEQ ID NO: 24324 - protein, 420 aa, Homo sapiens
MDTKRCFANRFDDYQGSLLAGQCEEAVAPLVTATIERILQELPPLGGGAEARGATAGASACQGGLYGGVAGVAYMLYHVSQSPLFATARERYLRSAKRLIDACARAEEWGEPDADTRAAFLLGGAGVYAVATLVYHALGRSDYVQPLGKFRALCAVCAPVSFLECGSDELFVGRAGYLCAALVLKQKLAQEVLTPAQIKSICQAILDSGKQYAIKKRKPFPLMYSYYGTEYLGAAHGLSSILQMLLSYHEHLKPSDRELVWQSVDFLMEQEQNCNWPPELGETIERENELVHWCHGAPGIAYLFAKAYLVSKKPQYLDTCIRCGELTWQKGLLKKGPGICHGVAGSAYVFLLLYRLTGNSKYIYRAQRFAQFLFTEEFKAGSRVLESIYSLYEGFSGTVCFLIDLLQPNQAEFPLFSVFV

SEQ ID NO: 24325 - protein, 388 aa, Homo sapiens
MDTKRCFANRFDDYQGSLLAGQCEEAVAPLVTATIERILQELPPLGGGAEARGATAGASACQGGLYGGVAGVAYMLYHVSQSPLFATARERYLRSAKRLIDACARAEEWGEPDADTRAAFLLGGAGVYAVATLVYHALGRSDYVQPLGKFRALCAVCAPVSFLECGSDELFVGRAGYLCAALVLKQKLAQEVLTPAQIKSICQAILDSGKQYAIKKRKPFPLMYSYYGTEYLGAAHGLSSILQMLLSYHEHLKPSDRELVWQSVDFLMEQEQNCNWPPELGETIERENELVHWCHGAPGIAYLFAKAYLVSKKPQYLDTCIRCGELTWQKGLLKKGPGICHGVAGSAYVFLLLYRLTGNSKYIYRAQSSFPVNLIKMEHLLYTRQHCF

SEQ ID NO: 24326 - protein, 264 aa, Homo sapiens
MDVCLSSAQQPGRRGEGLSSPGGWLEAEKKGAPQKDSTGGVLEESNKIEPSLHSLQKFVPTDYASYTQEHYRFAGKEIVIQESIESYGAVVWPGAMALCQYLEEHAEELNFQDAKILEIGAGPGLVSIVASILGAQVTATDLPDVLGNLQYNLLKNTLQCTAHLPEVKELVWGEDLDKNFPKSAFYYDYVLASDVVYHHYFLDKLLTTMVYLSQPGTVLLWANKFRFSTDYEFLDKFKQVFDTTLLAEYPESSVKLFKGILKWD

SEQ ID NO: 24327 - protein, 229 aa, Homo sapiens
MADTLESSLEDPLRSFVRVLEKRDGTVLRLQQYSSGGVGCVVWDAAIVLSKYLETPEFSGDGAHALSRRSVLELGSGTGAVGLMAATLGADVVVTDLEELQDLLKMNINMNKHLVTGSVQAKVLKWGEEIEGFPSPPDFILMADCIYYEESLEPLLKTLKDISGFETCIICCYEQRTMGKNPEIEKKYFELLQLDFDFEKIPLEKHDEEYRSEDIHIIYIRKKKSKFPS

SEQ ID NO: 24328 - protein, 144 aa, Homo sapiens
MADTLESSLEDPLRSFVRVLEKRDGTVLRLQQYSSGGVGCVVWDAAIVLSKYLETPEFSGDGAHALSRRSVLELGSGTGAVGLMAATLGADVVVTDLEELQDLLKMNINMNKHLVTGSVQAKGGRNRRLSFSTRLHTDGRLHIL

SEQ ID NO: 24329 - protein, 123 aa, Homo sapiens
MWGRLLQAFPPVPTPQSTLFYRADVVVTDLEELQDLLKMNINMNKHLVTGSVQAKVLKWGEEIEGFPSPPDFILMADCIYYEESLEPLLKTLKDISGFETCIICCYEQRTMGKNPEIEKKYFE

SEQ ID NO: 24330 - protein, 89 aa, Homo sapiens
MADTLESSLEDPLRSFVRVLEKRDGTVLRLQQYSSGGVGCVVWDAAIVLSKYLETPEFSGDGAHALSRRSVLELGSGTGAVGLMAATLG

SEQ ID NO: 24331 - protein, 194 aa, Homo sapiens
MADTLESSLEDPLRSFVRVLEKRDGTVLRLQQYSSGGVGCVVWDAAIVLSKYLETPEFSGDGAHALSRRSVLELGSGTGAVGLMAATLGADVVVTDLEELQDLLKMNINMNKHLVTGSVQAKVLKWGEEIEGFPSPPDFILMADCIYYEESLEPLLKTLKDISGFETCIICCYEQRTMGKNPEIEKKYFEKFPS

SEQ ID NO: 24332 - protein, 179 aa, Homo sapiens
MVQAWYMDDAPGDPRQPHRPDPGRPVGLEQLRRLGVLYWKLDADKYENDPELEKIRRERNYSWMDIITICKDKLPNYEEKIKMFYEEHLHLDDEIRYILDGSGYFDVRDKEDQWIRIFMEKGDMVTLPAGIYHRFTVDEKNYTKAMRLFVGEPVWTAYNRPADHFEARGQYVKFLAQTA

SEQ ID NO: 24333 - protein, 173 aa, Homo sapiens
MSVKSSKLMFLCHGSSRSLHSGSLTSCNTGVCCSLDADKYENDPELEKIRRERNYSWMDIITICKDKLPNYEEKIKMFYEEHLHLDDEIRYILDGSGYFDVRDKEDQWIRIFMEKGDMVTLPAGIYHRFTVDEKNYTKAMRLFVGEPVWTAYNRPADHFEARGQYVKFLAQTA

SEQ ID NO: 24334 - protein, 271 aa, Homo sapiens [sequence omitted]

SEQ ID NO: 24335 - protein, 1827 aa, Homo sapiens
MADERKDEAKAPHWTSAPLTEASAHSHPPEIKDQGGAGEGLVRSANGFPYREDEEGAFGEHGSQGTYSNTKENGINGELTSADRETAEEVSARIVQVVTAEAVAVLKGEQEKEAQHKDQTAALPLAAEETANLPPSPPPSPASEQTVTVEEDLLTASKMEFHDQQELTPSTAEPSDQKEKESEKQSKPGEDLKHAALVSQPETTKTYPDKKDMQGTEEEKAPLALFGHTLVASLEDMKQKTEPSLVVPGIDLPKEPPTPKEQKDWFIEMPTEAKKDEWGLVAPISPGPLTPMREKDVFDDIPKWEGKQFDSPMPSPFQGGSFTLPLDVMKNEIVTETSPFAPAFLQPDDKKSLQQTSGPATAKDSFKIEEPHEAKPDKMAEAPPSEAMTLPKDAHIPVVEEHVMGKVLEEEKEAINQETVQQRDTFTPSGQEPILTEKETELKLEEKTTISDKEAVPKESKPPKPADEEIGIIQTSTEHTFSEQKDQEPTTDMLKQDSFPVSLEQAVTDSAMTSKTLEKAMTEPSALIEKSSIQELFEMRVDDKDKIEGVGAATSAELDMPFYEDKSGMSKYFETSALKEEATKSIEPGSDYYELSDTRESVHESIDTMSPMHKNGDKEFQTGKESQPSPPAQEAGYSTLAQSYPSDLPEEPSSPQERMFTIDPKVYGEKRDLHSKNKDDLTLSRSLGLGGRSAIEQRSMSINLPMSCLDSIALGFNFGRGHDLSPLASDILTNTSGSMDEGDDYLPATTPALEKAPCFPVESKEEEQIEKVKATGEESTQAEISCESPFLAKDFYKNGTVMAPDLPEMLDLAGTRSRLASVSADAEVARRKSVPSETVVEDSRTGLPPVTDENHVIVKTDSQLEDLGYCVFNKYTVPLPSPVQDSENLSGESGTFYEGTDDKVRRDLATDLSLIEVKLAAAGRVKDEFSVDKEASAHISGDKSGLSKEFDQEKKANDRLDTVLEKSEEHADSKEHAKKTEEAGDEIETFGLGVTYEQALAKDLSIPTDASSEKAEKGLSSVPEIAEVEPSKKVEQGLDFAVQGQLDVKISDFGQMASGLNIDDRRATELKLEATQDMTPSSKAPQEADAFMGVESGHMKEGTKVSETEVKEKVAKPDLVHQEAVDKEESYESSGEHESLTMESLKADEGKKETSPESSLIQDEIAVKLSVEIPCPPAVSEADLATDERADVQMEFIQGPKEESKETPDISITPSDVAEPLHETIVSEPAEIQSEEEEIEAQGEYDKLLFRSDTLQITDLGVSGAREEFVETCPSEHKGVIESVVTIEDDFITVVQTTTDEGESGSHSVRFAALEQPEVERRPSPHDEEEFEVEEAAEAQAEPKDGSPEAPASPEREEVALSEYKTETYDDYKDETTIDDSIMDADSLWVDTQDDDRSIMTEQLETIPKEEKAEKEARRSSLEKHRKEKPFKTGRGRISTPERKVAKKEPSTVSRDEVRRKKAVYKKAELAKKTEVQAHSPSRKFILKPAIKYTRPTHLSCVKRKTTAAGGESALAPSVFKQAKDKVSDGVTKSPEKRSSLPRPSSILPPRRGVSGDRDENSFSLNSSISSSARRTTRSEPIRRAGKSGTSTPTTPGSTAITPGTPPSYSSRTPGTPGTPSYPRTPHTPGTPKSAILVPSEKKVAIIRTPPKSPATPKQLRLINQPLPDLKNVKSKIGSTDNIKYQPKGGQVQIVTKKIDLSHVTSKCGSLKNIRHRPGGGRVKIESVKLDFKEKAQAKVGSLDNAHHVPGGGNVKIDSQKLNFREHAKARVDHGAEIITQSPGRSSVASPRRLSNVSSSGSINLLESPQLATLAEDVTAALAKQGL

SEQ ID NO: 24336 - protein, 471 aa, Homo sapiens
MADERKDEAKAPHWTSAPLTEASAHSHPPEIKDQGGAGEGLVRSANGFPYREDEEGAFGEHGSQGTYSNTKENGINGELTSADRETAEEVSARIVQVVTAEAVAVLKGEQEKEAQHKDQTAALPLAAEETANLPPSPPPSPASEQTVTVEEAAGGESALAPSVFKQAKDKVSDGVTKSPEKRSSLPRPSSILPPRRGVSGDRDENSFSLNSSISSSARRTTRSEPIRRAGKSGTSTPTTPGSTAITPGTPPSYSSRTPGTPGTPSYPRTPHTPGTPKSAILVPSEKKVAIIRTPPKSPATPKQLRLINQPLPDLKNVKSKIGSTDNIKYQPKGGQVQIVTKKIDLSHVTSKCGSLKNIRHRPGGGRVKIESVKLDFKEKAQAKVGSLDNAHHVPGGGNVKIDSQKLNFREHAKARVDHGAEIITQSPGRSSVASPRRLSNVSSSGSINLLESPQLATLAEDVTAALAKQGL

SEQ ID NO: 24337 - protein, 1823 aa, Homo sapiens
MADERKDEAKAPHWTSAPLTEASAHSHPPEIKDQGGAGEGLVRSANGFPYREDEEGAFGEHGSQGTYSNTKENGINGELTSADRETAEEVSARIVQVVTAEAVAVLKGEQEKEAQHKDQTAALPLAAEETANLPPSPPPSPASEQTVTVEEASKMEFHDQQELTPSTAEPSDQKEKESEKQSKPGEDLKHAALVSQPETTKTYPDKKDMQGTEEEKAPLALFGHTLVASLEDMKQKTEPSLVVPGIDLPKEPPTPKEQKDWFIEMPTEAKKDEWGLVAPISPGPLTPMREKDVFDDIPKWEGKQFDSPMPSPFQGGSFTLPLDVMKNEIVTETSPFAPAFLQPDDKKSLQQTSGPATAKDSFKIEEPHEAKPDKMAEAPPSEAMTLPKDAHIPVVEEHVMGKVLEEEKEAINQETVQQRDTFTPSGQEPILTEKETELKLEEKTTISDKEAVPKESKPPKPADEEIGIIQTSTEHTFSEQKDQEPTTDMLKQDSFPVSLEQAVTDSAMTSKTLEKAMTEPSALIEKSSIQELFEMRVDDKDKIEGVGAATSAELDMPFYEDKSGMSKYFETSALKEEATKSIEPGSDYYELSDTRESVHESIDTMSPMHKNGDKEFQTGKESQPSPPAQEAGYSTLAQSYPSDLPEEPSSPQERMFTIDPKVYGEKRDLHSKNKDDLTLSRSLGLGGRSAIEQRSMSINLPMSCLDSIALGFNFGRGHDLSPLASDILTNTSGSMDEGDDYLPATTPALEKAPCFPVESKEEEQIEKVKATGEESTQAEISCESPFLAKDFYKNGTVMAPDLPEMLDLAGTRSRLASVSADAEVARRKSVPSETVVEDSRTGLPPVTDENHVIVKTDSQLEDLGYCVFNKYTVPLPSPVQDSENLSGESGTFYEGTDDKVRRDLATDLSLIEVKLAAAGRVKDEFSVDKEASAHISGDKSGLSKEFDQEKKANDRLDTVLEKSEEHADSKEHAKKTEEAGDEIETFGLGVTYEQALAKDLSIPTDASSEKAEKGLSSVPEIAEVEPSKKVEQGLDFAVQGQLDVKISDFGQMASGLNIDDRRATELKLEATQDMTPSSKAPQEADAFMGVESGHMKEGTKVSETEVKEKVAKPDLVHQEAVDKEESYESSGEHESLTMESLKADEGKKETSPESSLIQDEIAVKLSVEIPCPPAVSEADLATDERADVQMEFIQGPKEESKETPDISITPSDVAEPLHETIVSEPAEIQSEEEEIEAQGEYDKLLFRSDTLQITDLGVSGAREEFVETCPSEHKGVIESVVTIEDDFITVVQTTTDEGESGSHSVRFAALEQPEVERRPSPHDEEEFEVEEAAEAQAEPKDGSPEAPASPEREEVALSEYKTETYDDYKDETTIDDSIMDADSLWVDTQDDDRSIMTEQLETIPKEEKAEKEARRSSLEKHRKEKPFKTGRGRISTPERKVAKKEPSTVSRDEVRRKKAVYKKAELAKKTEVQAHSPSRKFILKPAIKYTRPTHLSCVKRKTTAAGGESALAPSVFKQAKDKVSDGVTKSPEKRSSLPRPSSILPPRRGVSGDRDENSFSLNSSISSSARRTTRSEPIRRAGKSGTSTPTTPGSTAITPGTPPSYSSRTPGTPGTPSYPRTPHTPGTPKSAILVPSEKKVAIIRTPPKSPATPKQLRLINQPLPDLKNVKSKIGSTDNIKYQPKGGQVQIVTKKIDLSHVTSKCGSLKNIRHRPGGGRVKIESVKLDFKEKAQAKVGSLDNAHHVPGGGNVKIDSQKLNFREHAKARVDHGAEIITQSPGRSSVASPRRLSNVSSSGSINLLESPQLATLAEDVTAALAKQGL

SEQ ID NO: 24338 - protein, 559 aa, Homo sapiens
MADERKDEAKAPHWTSAPLTEASAHSHPPEIKDQGGAGEGLVRSANGFPYREDEEGAFGEHGSQGTYSNTKENGINGELTSADRETAEEVSARIVQVVTAEAVAVLKGEQEKEAQHKDQTAALPLAAEETANLPPSPPPSPASEQTVTVEEAAGGESALAPSVFKQAKDKVSNSTLSKIPALQGSTKSPRYSSACPSTTKRATFSDSLLIQPTSAGSTDRLPYSKSGNKDGVTKSPEKRSSLPRPSSILPPRRGVSGDRDENSFSLNSSISSSARRTTRSEPIRRAGKSGTSTPTTPGSTAITPGTPPSYSSRTPGTPGTPSYPRTPHTPGTPKSAILVPSEKKVAIIRTPPKSPATPKQLRLINQPLPDLKNVKSKIGSTDNIKYQPKGGQVRILNKKIDFSKVQSRCGSKDNIKHSAGGGNVQIVTKKIDLSHVTSKCGSLKNIRHRPGGGRVKIESVKLDFKEKAQAKVGSLDNAHHVPGGGNVKIDSQKLNFREHAKARVDHGAEIITQSPGRSSVASPRRLSNVSSSGSINLLESPQLATLAEDVTAALAKQGL

SEQ ID NO: 24339 - protein, 399 aa, Homo sapiens
MQSLSLGQTSISKGLNYLTIMAPGNLWHMRNNFLFGSRCWMTRFSAENIFKSVSFRLFGVKCHNTDSEPLKNEDLLKNLLTMGVDIDMARKRQPGVFHRMITNEQDLKMFLLSKGASKEVIASIISRYPRAITRTPENLSKRWDLWRKIVTSDLEIVNILERSPESFFRSNNNLNLENNIKFLYSVGLTRKCLCRLLTNAPRTFSNSLDLNKQMVEFLQAAGLSLGHNDPADFVRKIIFKNPFILIQSTKRVKANIEFLRSTFNLNSEELLVLICGPGAEILDLSNDYARRSYANIKEKLFSLGCTEEEVQKFVLSYPDVIFLAEKKFNDKIDCLMEENISISQIIENPRVLDSSISTLKSRIKELVNAGCNLSTLNITLLSWSKKRYEAKLKKLSRFA

SEQ ID NO: 24340 - protein, 385 aa, Homo sapiens
MLWKLLLRSQSCRLCSFRKMRSPPKYRPFLACFTYTTDKQSSKENTRTVEKLYKCSVDIRKIRRLKGWVLLEDETYVEEIANILQELGADETAVASILERCPEAIVCSPTAVNTQRKLWQLVCKNEEELIKLIEQFPESFFTIKDQENQKLNVQFFQELGLKNVVISRLLTAAPNVFHNPVEKNKQMVRILQESYLDVGGSEANMKVWLLKLLSQNPFILLNSPTAIKETLEFLQEQGFTSFEILQLLSKLKGFLFQLCPRSIQNSISFSKNAFKCTDHDLKQLVLKCPALLYYSVPVLEERMQGLLREGISIAQIRETPMVLELTPQIVQYRIRKLNSSGYRIKDGHLANLNGSKKEFEANFGKIQAKKVRPLFNPVAPLNVEE

SEQ ID NO: 24341 - protein, 151 aa, Homo sapiens
MFSTKALLLAGLISTALAGPWANICAGKSSNEIRTCDRHGCGQYSAQRSQRPHQGVDILCSAGSTVYAPFTGMIVGQEKPYQNKNAINNGVRISGRGFCVKMFYIKPIKYKGPIKKGEKLGTLLPLQKVYPGIQSHVHIENCDSSDPTAYL

SEQ ID NO: 24342 - protein, 421 aa, Homo sapiens
MQALRHVVCALSGGVDSAVAALLLRRRGYQVTGVFMKNWDSLDEHGVCTADKDCEDAYRVCQILDIPFHQVSYVKEYWNDVFSDFLNEYEKGRTPNPDIVCNKHIKFSCFFHYAVDNLGADAIATGHYARTSLEDEEVFEQKHVKKPEGLFRNRFEVRNAVKLLQAADSFKDQTFFLSQVSQDALRRTIFPLGGLTKEFVKKIAAENRLHHVLQKKESMGMCFIGKRNFEHFLLQYLQPRPGHFISIEDNKVLGTHKGWFLYTLGQRANIGGLREPWYVVEKDSVKGDVFVAPRTDHPALYRDLLRTSRVHWIAEEPPAALVRDKMMECHFRFRHQMALVPCVLTLNQDGTVWVTAVQAVRALATGQFAVFYKGDECLGSGKILRLGPSAYTLQKGQRRAGMATESPSDSPEDGPGLSPLL

SEQ ID NO: 24343 - protein, 376 aa, Homo sapiens
MQALRHVVCALSGGVDSAVAALLLRRRGYQVTGVFMKNWDSLDEHGVCTADKDCEDAYRVCQILDIPFHQVSYVKEYWNDVFSDFLNEYEKGRTPNPDIVCNKHIKFSCFFHYAVDNLGADAIATGHYARTSLEDEEVFEQKHVKKPEGLFRNRFEVRNAVKLLQAADSFKDQTFFLSQVSQDALRRTIFPLGGLTKEFVKKIAAENRLHHVLQKKESMGMCFIGKRNFEHFLLQYLQPRPGHFISIEDNKVLGTHKGWFLYTLGQRANIGGLREPWYVVEKDSVKGDVFVAPRTDHPALYRDLLRTSRVHWIAEEPPAALVRDKMMECHFRFRHQMALVCCVLQGGRVPGQREDPAAGAVCLHAPEGPAQSWDGH

SEQ ID NO: 24344 - protein, 222 aa, Homo sapiens
MKKSLSRSTLRSPKGFSEIGLKLEMVSQDALRRTIFPLGGLTKEFVKKIAAENRLHHVLQKKESMGMCFIGKRNFEHFLLQYLQPRPGHFISIEDNKVLGTHKGWFLYTLGQRANIGGLREPWYVVEKDSVKGDVFVAPRTDHPALYRDLLRTSRVHWIAEEPPAALVRDKMMECHFRFRHQMALVCCVLQGGRVPGQREDPAAGAVCLHAPEGPAQSWDGH

SEQ ID NO: 24345 - protein, 267 aa, Homo sapiens
MKKSLSRSTLRSPKGFSEIGLKLEMVSQDALRRTIFPLGGLTKEFVKKIAAENRLHHVLQKKESMGMCFIGKRNFEHFLLQYLQPRPGHFISIEDNKVLGTHKGWFLYTLGQRANIGGLREPWYVVEKDSVKGDVFVAPRTDHPALYRDLLRTSRVHWIAEEPPAALVRDKMMECHFRFRHQMALVPCVLTLNQDGTVWVTAVQAVRALATGQFAVFYKGDECLGSGKILRLGPSAYTLQKGQRRAGMATESPSDSPEDGPGLSPLL

SEQ ID NO: 24346 - protein, 166 aa, Homo sapiens
MQALRHVVCALSGGVDSAVAALLLRRRGYQVTGVFMKNWDSLDEHGVCTADKDCEDAYRVCQILDIPFHQVSYVKEYWNDVFSDFLNEYEKGRTPNPDIVCNKHIKFSCFFHYAVDNLGADAIATGHYARTSLEDEEVFEQKHVKKPEGLFRNRFEVRNARFPRMP

SEQ ID NO: 24347 - protein, 61 aa, Homo sapiens
MDPNCSCAAGDSCTCAGSCKCKECKCTSCKKSCCSCCPVGCAKCAQGCICKGASDKCSCCA

SEQ ID NO: 24348 - protein, 131 aa, Homo sapiens
MDFQQLADVAEKWCSNTPFELIATEETERRMDFYADPGVSFYVLCPDNGCGDNFHVWSESEDCLPFLQLAQDYISSCGKKTLHEVLEKVFKSFRPLLGLPDADDDAFEEYSADVEEEEPEADHPQMGVSQQ

SEQ ID NO: 24349 - protein, 124 aa, Homo sapiens
MDFQQLADVAEKWCSNTPFELIATEETERRMDFYADPGVSFYVLCPDNGCGDNFHVWSESEDCLPFLQLAQDYISSCGKKTLHEVLEKVFKSFRGLISAVHALPVETWLFFVLWQTGALEVVYV

SEQ ID NO: 24350 - protein, 98 aa, Homo sapiens
MATHCPLYCVGADLMMNRAGEHVWSESEDCLPFLQLAQDYISSCGKKTLHEVLEKVFKSFRPLLGLPDADDDAFEEYSADVEEEEPEADHPQMGVSQQ

SEQ ID NO: 24351 - protein, 90 aa, Homo sapiens
MDFQQLADVAEKWCSNTPFELIATEETERRMDFYADPGVSFYVLCPDNGCGDNFLLGLPDADDDAFEEYSADVEEEEPEADHPQMGVSQQ

SEQ ID NO: 24352 - protein, 176 aa, Homo sapiens
MKPLLLAVSLGLIAALQAHHLLASDEEIQDVSGTWYLKAMTVDREFPEMNLESVTPMTLTTLEGGNLEAKVTMLISGRCQEVKAVLEKTDEPGKYTADGGKHVAYIIRSHVKDHYIFYCEGELHGKPVRGVKLVGRDPKNNLEALEDFEKAAGARGLSTESILIPRQSETCSPGSD

SEQ ID NO: 24353 - protein, 143 aa, Homo sapiens
MRDADADAGGGADGGDGRGGHSCRGGVDTAAAPAGGAPPAHAPGPGRDAASAARGSRMRPHIFTLSVPFPTPLEAEIAHGSLAPDAEPHQRVVGKDLTVSGRILVVRWKAEDCRLLRISVINFLDQLSLVVRTMQRFGPPVSR

SEQ ID NO: 24354 - protein, 753 aa, Homo sapiens
MGEHSPDNNIIYFEAEEDELTPDDKMLRFVDKNGLVPSSSGTVYDRTTVLIEQDPGTLEDEDDDGQCGEHLPFLVGGEEGFHLIDHEAMSQGYVQHIISPDQIHLTINPGSTPMPRNIEGATLTLQSECPETKRKEVKRYQCTFEGCPRTYSTAGNLRTHQKTHRGEYTFVCNQEGCGKAFLTSYSLRIHVRVHTKEKPFECDVQGCEKAFNTLYRLKAHQRLHTGKTFNCESEGCSKYFTTLSDLRKHIRTHTGEKPFRCDHDGCGKAFAASHHLKTHVRTHTGERPFFCPSNGCEKTFSTQYSLKSHMKGHDNKGHSYNALPQHNGSEDTNHSLCLSDLSLLSTDSELRENSSTTQGQDLSTISPAIIFESMFQNSDDTAIQEDPQQTASLTESFNGDAESVSDVPPSTGNSASLSLPLVLQPGLSEPPQPLLPASAPSAPPPAPSLGPGSQQAAFGNPPALLQPPEVPVPHSTQFAANHQEFLPHPQAPQPIVPGLSVVAGASASAAAVASAVAAPAPPQSTTEPLPAMVQTLPLGANSVLTNNPTITITPTPNTAILQSSLVMGEQNLQWILNGATSSPQNQEQIQQASKVEKVFFTTAVPVASSPGSSVQQIGLSVPVIIIKQEEACQCQCACRDSAKERASSRRKGCSSPPPPEPSPQAPDGPSLQLPAQTFSSAPVPGSSSSTLPSSCEQSRQAETPSDPQTETLSAMDVSEFLSLQSLDTPSNLIPIEALLQGEEEMGLTSSFSK

SEQ ID NO: 24355 - protein, 381 aa, Homo sapiens
MASPSLERPEKGAGKSEFRNQKPKPENQDESELLTVPDGWKEPAFSKEDNPRGLLEESSFATLFPKYREAYLKECWPLVQKALNEHHVNATLDLIEGSMTVCTTKKTFDPYIIIRARDLIKLLARSVSFEQAVRILQDDVACDIIKIGSLVRNKERFVKRRQRLIGPKGSTLKALELLTNCYIMVQGNTVSAIGPFSGLKEVRKVVLDTMKNIHPIYNIKSLMIKRELAKDSELRSQSWERFLPQFKHKNVNKRKEPKKKTVKKEYTPFPPPQPESQIDKELASGEYFLKANQKKRQKMEAIKAKQAEAISKRQEERNKAFIPPKEKPIVKPKEASTETKIDVASIKEKVKKAKNKKLGALTAEEIALKMEADEKKKKKKK

SEQ ID NO: 24356 - protein, 324 aa, Homo sapiens
MASPSLERPEKGAGKSEFRNQKPKPENQDESELLTVPDGWKEPAFSKEDNPRGLLEESSFATLFPKYREAYLKECWPLVQKALNEHHVNATLDLIEGSMTVCTTKKTFDPYIIIRARDLIKLLARSVSFEQAVRILQDDVACDIIKIGSLVRNKERFVKRRQRLIGPKGSTLKALELLTNCYIMVQGNTVSAIGPFSGLKEVRKVVLDTMKNIHPIYNIKIDKELASGEYFLKANQKKRQKMEAIKAKQAEAISKRQEERNKAFIPPKEKPIVKPKEASTETKIDVASIKEKVKKAKNKKLGALTAEEIALKMEADEKKKKKKK

SEQ ID NO: 24357 - protein, 436 aa, Homo sapiens
MLYAKPPPTINGIKGLQRKERLKPAHIHLQQLTCFSITCSSTMSYSCCLPSLGCRTSCSSRPCVPPSCHGYTLPGACNIPANVSNCNWFCEGSFNGSEKETMQFLNDRLASYLEKVRQLERDNAELEKLIQERSQQQEPLLCPSYQSYFKTIEELQQKILCAKAENARLVVNIDNAKLASDDFRSKYQTEQSLRLLVESDINSIRRILDELTLCKSDLESQVESLREELICLKKNHEEEVNTLRSQLGDRLNVEVDTAPTVDLNQVLNETRSQYEALVEINRREVEQWFATQTEELNKQVVSSSEQLQSCQAEIIELRRTVNALEIELQAQHNLRDSLENTLTESEAHYSSQLSQVQSLITNVESQLAEIRCDLERQNQEYQVLLDVRARLECEINTYRSLLESEDCKLPCNPCATTNASGNSCGPCGTSQKGCCN

SEQ ID NO: 24358 - protein, 1700 aa, Homo sapiens
MSSAQCPALVCVMSRLRFWGPWPLLMWQLLWLLVKEAQPLEWVKDPLQLTSNPLGPPDSWSSHSSHFPRESPHAPTLPADPWDFDHLGPSASSEMPAPPQESTENLVPFLDTWDSAGEQPLEPEQFLASQQDLKDKLSPQERLPVSPKKLKKDPAQRWSLAEIIGITRQLSTPQSQKQTLQNEYSSTDTPYPGSLPPELRVKSDEPPGPSEQVGPSQFHLEPETQNPETLEDIQSSSLQQEAPAQLPQLLEEEPSSMQQEAPALPPESSMESLTLPNHEVSVQPPGEDQAYYHLPNITVKPADVEVTITSEPTNETESSQAQQETPIQFPEEVEPSATQQEAPIEPPVPPMEHELSISEQQQPVQPSESPREVESSPTQQETPGQPPEHHEVTVSPPGHHQTHHLASPSVSVKPPDVQLTIAAEPSAEVGTSLVHQEATTRLSGSGNDVEPPAIQHGGPPLLPESSEEAGPLAVQQETSFQSPEPINNENPSPTQQEAAAEHPQTAEEGESSLTHQEAPAQTPEFPNVVVAQPPEHSHLTQATVQPLDLGFTITPESKTEVELSPTMKETPTQPPKKVVPQLRVYQGVTNPTPGQDQAQHPVSPSVTVQLLDLGLTITPEPTTEVGHSTPPKRTIVSPKHPEVTLPHPDQVQTQHSHLTRATVQPLDLGFTITPKSMTEVEPSTALMTTAPPPGHPEVTLPPSDKGQAQHSHLTQATVQPLDLELTITTKPTTEVKPSPTTEETSTQPPDLGLAIIPEPTTETRHSTALEKTTAPRPDRVQTLHRSLTEVTGPPTELEPAQDSLVQSESYTQNKALTAPEEHKASTSTNICELCTCGDEMLSCIDLNPEQRLRQVPVPEPNTHNGTFTILNFQGNYISYIDGNVWKAYSWTEKLILRENNLTELHKDSFEGLLSLQYLDLSCNKIQSIERHTFEPLPFLKFINLSCNVITELSFGTFQAWHGMQFLHKLILNHNPLTTVEDPYLFKLPALKYLDMGTTLVPLTTLKNILMMTVELEKLILPSHMACCLCQFKNSIEAVCKTVKLHCNSACLTNTTHCPEEASVGNPEGAFMKVLQARKNYTSTELIVEPEEPSDSSGINLSGFGSEQLDTNDESDFISTLSYILPYFSAVNLDVKSLLLPFIKLPTTGNSLAKIQTVGQNRQRVKRVLMGPRSIQKRHFKEVGRQSIRREQGAQASVENAAEEKRLGSPAPREVEQPHTQQGPEKLAGNAVYTKPSFTQEHKAAVSVLKPFSKGAPSTSSPAKALPQVRDRWKDLTHAISILESAKARVTNTKTSKPIVHARKKYRFHKTRSHVTHRTPKVKKSPKVRKKSYLSRLMLANRLPFSAAKSLINSPSQGAFSSLGDLSPQENPFLEVSAPSEHFIENNNTKHTTARNAFEENDFMENTNMPEGTISENTNYNHPHEADSAGTAFNLGPTVKQTETKWEYNNVGTDLSPEPKSFNYPLLSSPGDQFEIQLTQQLQSLIPNNNVRRLIAHVIRTLKMDCSGAHVQVTCAKLISRTGHLMKLLSGQQEVKASKIEWDTDQWKIENYINESTEAQSEQKEKSLELKKEVPGYGYTDKLILALIVTGILTILIILFCLIVICCHRRSLQEDEEGFSRGIFRFLPWRGCSSRRESQDGLSSFGQPLWFKDMYKPLSATRINNHAWKLHKKSSNEDKILNRDPGDSEAPTEEEESEALP

SEQ ID NO: 24359 - protein, 288 aa, Homo sapiens
MAAVLQRVERLSNRVVRVLGCNPGPMTLQGTNTYLVGTGPRRILIDTGEPAIPEYISCLKQALTEFNTAIQEIVVTHWHRDHSGGIGDICKSINNDTTYCIKKLPRNPQREEIIGNGEQQYVYLKDGDVIKTEGATLRVLYTPGHTDDHMALLLEEENAIFSGDCILGEGTTVFEDLYDYMNSLKELLKIKADIIYPGHGPVIHNAEAKIQQYISHRNIREQQILTLFRENFEKSFTVMELVKIIYKNTPENLHEMAKHNLLLHLKKLEKEGKIFSNTDPDKKWKAHL

SEQ ID NO: 24360 - protein, 99 aa, Homo sapiens
MKIPVLPAVVLLSLLVLHSAQGATLGGPEEESTIENYASRPEAFNTPFLNIDKLRSAFKADEFLNWHALFESIKRKLPFLNWDAFPKLKGLRSATPDAQ

SEQ ID NO: 24361 - protein, 85 aa, Homo sapiens
MKIPVLPAVVLLSLLVLHSAQGATLGGPEEESTIENYASRPEAFKADEFLNWHALFESIKRKLPFLNWDAFPKLKGLRSATPDAQ

SEQ ID NO: 24362 - protein, 593 aa, Homo sapiens
MDAATAPKQAWPPWPPLLFLLLLPGGSGGSCPAVCDCTSQPQAVLCGHRQLEAVPGGLPLDTELLDLSGNRLWGLQQGMLSRLSLLQELDLSYNQLSTLEPGAFHGLQSLLTLRLQGNRLRIMGPGVFSGLSALTLLDLRLNQIVLFLDGAFGELGSLQKLEVGDNHLVFVAPGAFAGLAKLSTLTLERCNLSTVPGLALARLPALVALRLRELDIGRLPAGALRGLGQLKELEIHLWPSLEALDPGSLVGLNLSSLAITRCNLSSVPFQALYHLSFLRVLDLSQNPISAIPARRLSPLVRLQELRLSGACLTSIAAHAFHGLTAFHLLDVADNALQTLEETAFPSPDKLVTLRLSGNPLTCDCRLLWLLRLRRHLDFGMSPPACAGPHHVQGKSLKEFSDILPPGHFTCKPALIRKSGPRWVIAEEGGHAVFSCSGDGDPAPTVSWMRPHGAWLGRAGRVRVLEDGTLEIRSVQLRDRGAYVCVVSNVAGNDSLRTWLEVIQVEPPNGTLSDPNITVPGIPGPFFLDSRGVAMVLAVGFLPFLTSVTLCFGLIALWSKGKGRVKHHMTFDFVAPRPSGDKNSGGNRVTAKLF

SEQ ID NO: 24363 - protein, 428 aa, Homo sapiens
MGGLFSRWRTKPSTVEVLESIDKEIQALEEFREKNQRLQKLWVGRLILYSSVLYLFTCLIVYLWYLPDEFTARLAMTLPFFAFPLIIWSIRTVIIFFFSKRTERNNEALDDLKSQRKKILEEVMEKETYKTAKLILERFDPDSKKAKECEPPSAGAAVTARPGQEIRQRTAAQRNLSPTPASPNQGPPPQVPVSPGPPKDSSAPGGPPERTVTPALSSNVLPRHLGSPATSVPGMGLHPPGPPLARPILPRERGALDRIVEYLVGDGPQNRYALICQQCFSHNGMALKEEFEYIAFRCAYCFFLNPARKTRPQAPRLPEFSFEKRQVVEGSSSVGPLPSGSVLSSDNQFNEESLEHDVLDDNTEQTDDKIPATEQTNQVIEKASDSEEPEEKQETENEEASVIETNSTVPGADSIPDPELSGESLTAE

SEQ ID NO: 24364 - protein, 423 aa, Homo sapiens
MEGKTKPSTVEVLESIDKEIQALEEFREKNQRLQKLWVGRLILYSSVLYLFTCLIVYLWYLPDEFTARLAMTLPFFAFPLIIWSIRTVIIFFFSKRTERNNEALDDLKSQRKKILEEVMEKETYKTAKLILERFDPDSKKAKECEPPSAGAAVTARPGQEIRQRTAAQRNLSPTPASPNQGPPPQVPVSPGPPKDSSAPGGPPERTVTPALSSNVLPRHLGSPATSVPGMGLHPPGPPLARPILPRERGALDRIVEYLVGDGPQNRYALICQQCFSHNGMALKEEFEYIAFRCAYCFFLNPARKTRPQAPRLPEFSFEKRQVVEGSSSVGPLPSGSVLSSDNQFNEESLEHDVLDDNTEQTDDKIPATEQTNQVIEKASDSEEPEEKQETENEEASVIETNSTVPGADSIPDPELSGESLTAE

SEQ ID NO: 24365 - protein, 305 aa, Homo sapiens
MEKETYKTAKLILERFDPDSKKAKECEPPSAGAAVTARPGQEIRQRTAAQRNLSPTPASPNQGPPPQVPVSPGPPKDSSAPGGPPERTVTPALSSNVLPRHLGSPATSVPGMGLHPPGPPLARPILPRERGALDRIVEYLVGDGPQNRYALICQQCFSHNGMALKEEFEYIAFRCAYCFFLNPARKTRPQAPRLPEFSFEKRQVVEGSSSVGPLPSGSVLSSDNQFNEESLEHDVLDDNTEQTDDKIPATEQTNQVIEKASDSEEPEEKQETENEEASVIETNSTVPGADSIPDPELSGESLTAE

SEQ ID NO: 24366 - protein, 459 aa, Homo sapiens
MGGLFSRWRTKPSTVEVLESIDKEIQALEEFREKNQRLQKLWVGRLILYSSVLYLFTCLIVYLWYLPDEFTARLAMTLPFFAFPLIIWSIRTVIIFFFSKRTERNNEALDDLKSQRKKILEEVMEKETYKTAKLILERFDPDSKKAKECEPPSAGAAVTARPGQEIRQRTAAQRNLSPTPASPNQGPPPQVPVSPGPPKDSSAPGGPPERTVTPALSSNVLPRHLGSPATSVPGMEMGLPHIAQAGLEHLSSSDLSTSTSQSAGITGLHPPGPPLARPILPRERGALDRIVEYLVGDGPQNRYALICQQCFSHNGMALKEEFEYIAFRCAYCFFLNPARKTRPQAPRLPEFSFEKRQVVEGSSSVGPLPSGSVLSSDNQFNEESLEHDVLDDNTEQTDDKIPATEQTNQVIEKASDSEEPEEKQETENEEASVIETNSTVPGADSIPDPELSGESLTAE

SEQ ID NO: 24367 - protein, 812 aa, Homo sapiens
MAAPEAWRARSCWFCEVAAATTMEATSREAAPAKSSASGPNAPPALFELCGRAVSAHMGVLESGVWALPGPILQSILPLLNIYYLERIEETALKKGLSTQAIWRRLWDELMKTRPSSLESVTCWRAKFMEAFFSHVLRGTIDVSSDRRLCDQRFSPLLHSSRHVRQLTICNMLQGATELVAEPNRRVLETLASSLHTLKFRHLLFSDVAAQQSLRQLLHQLIHHGAVSQVSLYSWPVPESALFILILTMSAGFWQPGPGGPPCRLCGEASRGRAPSRDEGSLLLGSRRPRRDAAERCAAALMASRRKSEAKQMPRAAPATRVTRRSTQESLTAGGTDLKRELHPPATSHEAPGTKRSPSAPAATSSASSSTSSYKRAPASSAPQPKPLKRFKRAAGKKGARTRQGPGAESEDLYDFVFIVAGEKEDGEEMEIGEVACGALDGSDPSCLGLPALEASQRFRSISTLELFTVPLSTEAALTLCHLLSSWVSLESLTLSYNGLGSNIFRLLDSLRALSGQAGCRLRALHLSDLFSPLPILELTRAIVRALPLLRVLSIRVDHPSQRDNPGVPGNAGPPSHIIGDEEIPENCLEQLEMGFPRGAQPAPLLCSVLKASGSLQQLSLDSATFASPQDFGLVLQTLKEYNLALKRLSFHDMNLADCQSEVLFLLQNLTLQEITFSFCRLFEKRPAQFLPEMVAAMKGNSTLKGLRLPGNRLGNAGLLALADVFSEDSSSSLCQLDISSNCIKPDGLLEFAKRLERWGRGAFGHLRLFQNWLDQDAVTAREAIRRLRATCHVVSDSWDSSQAFADYVSTM

SEQ ID NO: 24368 - protein, 729 aa, Homo sapiens
MAAPEAWRARSCWFCEVAAATTMEATSREAAPAKSSASGPNAPPALFELCGRAVSAHMGVLESGVWALPGPILQSILPLLNIYYLERIEETALKKGLSTQAIWRRLWDELMKTRPSSLESVTCWRAKFMEAFFSHVLRGTIDVSSDRRLCDQRFSPLLHSSRHVRQLTICNMLQGATELVAEPNRRVLETLASSLHTLKFRHLLFSDVAAQQSLRQLLHQLIHHGAVSQVSLYSWPVPESALFILILTMSAGFWQPGPGGPPCRLCGEASRGRAPSRDEGSLLLGSRRPRRDAAERCAAALMASRRKSEAKQMPRAAPATRVTRRSTQESLTAGGTDLKRELHPPATSHEAPGTKRSPSAPAATSSASSSTSSYKRAPASSAPQPKPLKRFKRAAGKKGARTRQGPGAESEDLYDFVFIVAGEKEDGEEMEIGEVACGALDGSDPSCLGLPALEASQRFRSISTLELFTVPLSTEAALTLCHLLSSWVSLESLTLSYNGLGSNIFRLLDSLRALSGQAGCRLRALHLSDLFSPLPILELTRAIVRALPLLRVLSIRVDHPSQRDNPGVPGNAGPPSHIIGDEEIPENCLEQLEMGFPRGAQPAPLLCSVLKASGSLQQLSLDSATFASPQDFGLVLQTLKEYNLALKRLSFHDMNLADCQSEVLFLLQNLTLQEITFSFCRLFEKRPAQFLPEMVAAMKGNSTLKGLRLPGNRLGGGQTLGRERGKELG

SEQ ID NO: 24369 - protein, 117 aa, Homo sapiens
MAFSGRARPCIIPENEEIPRAALNTVHEANGTEDERAVSKLQRRHSDVKVYKEFCDFYAKFNMANALASATCERCKGGFAPAETIVNSNGELYHEQCFVCAQCFQQFPEGLFYEERT

SEQ ID NO: 24370 - protein, 248 aa, Homo sapiens
MAFSGRARPCIIPENEEIPRAALNTVHEANGTEDERAVSKLQRRHSDVKVYKEFCDFYAKFNMANALASATCERCKGGFAPAETIVNSNGELYHEQCFVCAQCFQQFPEGLFYEFEGRKYCEHDFQMLFAPCCHQCGEFIIGRVIKAMNNSWHPECFRCDLCQEVLADIGFVKNAGRHLCRPCHNREKARGLGKYICQKCHAIIDEQPLIFKNDPYHPDHFNCANCGQEGSDCRCTGAERGAILPAMP

SEQ ID NO: 24371 - protein, 103 aa, Homo sapiens
MADKEKKKKESILDLSKYIDKTIRVKFQGGREASGILKGFDPLLNLVLDGTIEYMRDPDDQYKLTEDTRQLGLVVCRGTSVVLICPQDGMEAIPNPFIQQQDA

SEQ ID NO: 24372 - protein, 194 aa, Homo sapiens
MFLTAVNPQPLSTPSWQIETKYSTKVLTGNWMEERRKFTRDTDKTPQSIYRKEYIPFPDHRPDQISRWYGKRKVEGLPYKHLITHHQEPPHRYLISTYDDHYNRHGYNPGLPPLRTWNGQKLLWLPEKSDFPLLAPPTNYGLYEQLKQRQLTPKAGLKQSTYTSSYPRPPLCAMSWREHAVPVPPHRLHPFPHF

SEQ ID NO: 24373 - protein, 656 aa, Homo sapiens
MKCPMLRSRLGQESVHCGPMFIQVSRPLPLWRDNRQTPWLLSLRGELVASLEDASLMGLYVDMNATTVTVQSPRQGLLQRWEVSGGQQALPGVSFQPESEVLVHIPKQRLGLVKRGSYIEETLSLRFLRVHQSNIFMVTENKDFVVVSIPAAGVLQVQRCQEVGGTPGTQAFYRVDLSLEFAEMAAPVLWTVESFFQCVGSGTESPASTAALRTTPSPPSPGPETPPAGVPPAASSQVWAAGPAAQEWLSRDLLHRPSDALAKKGLGPFLQTAKPARRGQTSASILPRVVQAQRGPQPPPGEAGIPGHPTPPATLPSEPVEGVQASPWRPRPVLPTHPALTLPVSSDASSPSPPAPRPERPESLLVSGPSVTLTEGLGTVRPEQDPAKSPGSPLLLRGLSSGDVAAPEPIMGEPGQASEEFQPLARPWRATLAAEELVSHRSPGEPQETCSGTEVERPRQTGPGLPREGARGHMDLSSSEPSQDIEGPGLSILPARDATFSTPSVRQPDPSAWLSSGPELTGMPRVRLAAPLAVLPMEPLPPEPVRPAALLTPEASSVGGPDQARYLESAPGWPVGQEEWGVAHTSSPPSTQTLSLWAPTGVLLPSLVELEYPFQAGRGASLQQELTEPTLALSAESHRPPELQDSVEGLSERPSR

SEQ ID NO: 24374 - protein, 648 aa, Homo sapiens
MKCPMLRSRLGQESVHCGPMFIQVSRPLPLWRDNRQTPWLLSLRGELVASLEDASLMGLYVDMNATTVTVQSPRQGLLQRWEVLNTSAELLPLWLVSGHHAYSLEAACPPVSFQPESEVLVHIPKQRLGLVKRGSYIEETLSLRFLRVHQSNIFMVTENKDFVVVSIPAAGVLQVQRCQEVGGTPGTQAFYRVDLSLEFAEMAAPVLWTVESFFQCVGSGTESPASTAALRTTPSPPSPGPETPPAGVPPAASSQKGLGPFLQTAKPARRGQTSASILPRVVQAQRGPQPPPGEAGIPGHPTPPATLPSEPVEGVQASPWRPRPVLPTHPALTLPVSSDASSPSPPAPRPERPESLLVSGPSVTLTEGLGTVRPEQDPAKSPGSPLLLRGLSSGDVAAPEPIMGEPGQASEEFQPLARPWRATLAAEELVSHRSPGEPQETCSGTEVERPRQTGPGLPREGARGHMDLSSSEPSQDIEGPGLSILPARDATFSTPSVRQPDPSAWLSSGPELTGMPRVRLAAPLAVLPMEPLPPEPVRPAALLTPEASSVGGPDQARYLESAPGWPVGQEEWGVAHTSSPPSTQTLSLWAPTGVLLPSLVELEYPFQAGRGASLQQELTEPTLALSAESHRPPELQDSVEGLSERPSR

SEQ ID NO: 24375 - protein, 247 aa, Homo sapiens
MTILFLTMVISYFGCMKAAPMKEANIRGQGGLAYPGVRTHGTLESVNGPKAGSRGLTSLADTFEHVIEELLDEDQKVRPNEENNKDADLYTSRVMLSSQVPLEPPLLFLLEEYKNYLDAANMSMRVRRHSDPARRGELSVCDSISEWVTAADKKTAVDMSGGTVTVLEKVPVSKGQLKQYFYETKCNPMGYTKEGCRGIDKRHWNSQCRTTQSYVRALTMDSKKRIGWRFIRIDTSCVCTLTIKRGR

SEQ ID NO: 24376 - protein, 255 aa, Homo sapiens
MFHQVRRVMTILFLTMVISYFGCMKAAPMKEANIRGQGGLAYPGVRTHGTLESVNGPKAGSRGLTSLADTFEHVIEELLDEDQKVRPNEENNKDADLYTSRVMLSSQVPLEPPLLFLLEEYKNYLDAANMSMRVRRHSDPARRGELSVCDSISEWVTAADKKTAVDMSGGTVTVLEKVPVSKGQLKQYFYETKCNPMGYTKEGCRGIDKRHWNSQCRTTQSYVRALTMDSKKRIGWRFIRIDTSCVCTLTIKRGR

SEQ ID NO: 24377 - protein, 262 aa, Homo sapiens
MQSREEEWFHQVRRVMTILFLTMVISYFGCMKAAPMKEANIRGQGGLAYPGVRTHGTLESVNGPKAGSRGLTSLADTFEHVIEELLDEDQKVRPNEENNKDADLYTSRVMLSSQVPLEPPLLFLLEEYKNYLDAANMSMRVRRHSDPARRGELSVCDSISEWVTAADKKTAVDMSGGTVTVLEKVPVSKGQLKQYFYETKCNPMGYTKEGCRGIDKRHWNSQCRTTQSYVRALTMDSKKRIGWRFIRIDTSCVCTLTIKRGR

SEQ ID NO: 24378 - protein, 329 aa, Homo sapiens
MCGATSFLHECTRLILVTTQNAEFLQKGLQVHTCFGVYPHASVWHDCASQKKGCAVYLHVSVEFNKLIPENGFIKFHQVRRVMTILFLTMVISYFGCMKAAPMKEANIRGQGGLAYPGVRTHGTLESVNGPKAGSRGLTSLADTFEHVIEELLDEDQKVRPNEENNKDADLYTSRVMLSSQVPLEPPLLFLLEEYKNYLDAANMSMRVRRHSDPARRGELSVCDSISEWVTAADKKTAVDMSGGTVTVLEKVPVSKGQLKQYFYETKCNPMGYTKEGCRGIDKRHWNSQCRTTQSYVRALTMDSKKRIGWRFIRIDTSCVCTLTIKRGR

SEQ ID NO: 24379 - protein, 276 aa, Homo sapiens
MLCAISLCARVRKLRSAGRCGKFHQVRRVMTILFLTMVISYFGCMKAAPMKEANIRGQGGLAYPGVRTHGTLESVNGPKAGSRGLTSLADTFEHVIEELLDEDQKVRPNEENNKDADLYTSRVMLSSQVPLEPPLLFLLEEYKNYLDAANMSMRVRRHSDPARRGELSVCDSISEWVTAADKKTAVDMSGGTVTVLEKVPVSKGQLKQYFYETKCNPMGYTKEGCRGIDKRHWNSQCRTTQSYVRALTMDSKKRIGWRFIRIDTSCVCTLTIKRGR

SEQ ID NO: 24380 - protein, 484 aa, Homo sapiens [sequence omitted]

SEQ ID NO: 24381 - protein, 853 aa, Homo sapiens
MFLPHMNHLTLEQTFFSQVLPKTVKLFDDMMYELTSQARGLSSQNLEIQTTLRNILQTMVQLLGALTGCVQHICATQESIILENIQSLPSSVLHIIKSTFVHCKNSESVYSGCLHLVSDLLQALFKEAYSLQKQLMELLDMVCMDPLVDDNDDILNMVIVIHSLLDICSVISSMDHAFHANTWKFIIKQSLKHQSIIKSQLKHKDIITSLCEDILFSFHSCLQLAEQMTQSDAQDNADYRLFQKTLKLCRFFANSLLHYAKEFLPFLSDSCCTLHQLYLQIHSKFPPSLYATRISKAHQEEIAGAFLVTLDPLISQLLTFQPFMQVVLDSKLDLPCELQFPQCLLLVVVMDKLPSQPKEVQTLWCTDSQVSETTTRISLLKAVFYSFEQCSGELSLPVHLQGLKSKGKAEVAVTLYQHVCVHLCTFITSFHPSLFAELDAALLNAVLSANMITSLLAMDAWCFLARYGTAELCAHHVTIVAHLIKSCPGECYQLINLSILLKRLFFFMAPPHQLEFIQKFSPKEAENLPLWQHISFQALPPELREQTVHEVTTVGTAECRKWLSRSRTLGELESLNTVLSALLAVCNSAGEALDTGKQTAIIEVVSQLWAFLNIKQVADQPYVQQTFSLLLPLLGFFIQTLDPKLILQAVTLQTSLLKLELPDYVRLAMLDFVSSLGKLFIPEAIQDRILPNLSCMFALLLADRSWLLEQHTLEAFTQFAEGTNHEEIVPQCLSSEETKNKVVSFLEKTGFVDETEAAKVERVKQEKGIFWEPFANVTVEEAKRSSLQPYAKRARQEFPWEEEYRSALHTIAGALEATESLLQKGPAPAWLSMEMEALQERMDKLKRYIHTLG

SEQ ID NO: 24382 - protein, 718 aa, Homo sapiens
MELLDMVCMDPLVDDNDDILNMVIVIHSLLDICSVISSMDHAFHANTWKFIIKQSLKHQSIIKSQLKHKDIITSLCEDILFSFHSCLQLAEQMTQSDAQDNADYRLFQKTLKLCRFFANSLLHYAKEFLPFLSDSCCTLHQLYLQIHSKFPPSLYATRISKAHQEEIAGAFLVTLDPLISQLLTFQPFMQVVLDSKLDLPCELQFPQCLLLVVVMDKLPSQPKEVQTLWCTDSQVSETTTRISLLKAVFYSFEQCSGELSLPVHLQGLKSKGKAEVAVTLYQHVCVHLCTFITSFHPSLFAELDAALLNAVLSANMITSLLAMDAWCFLARYGTAELCAHHVTIVAHLIKSCPGECYQLINLSILLKRLFFFMAPPHQLEFIQKFSPKEAENLPLWQHISFQALPPELREQTVHEVTTVGTAECRKWLSRSRTLGELESLNTVLSALLAVCNSAGEALDTGKQTAIIEVVSQLWAFLNIKQVADQPYVQQTFSLLLPLLGFFIQTLDPKLILQAVTLQTSLLKLELPDYVRLAMLDFVSSLGKLFIPEAIQDRILPNLSCMFALLLADRSWLLEQHTLEAFTQFAEGTNHEEIVPQCLSSEETKNKVVSFLEKTGFVDETEAAKVERVKQEKGIFWEPFANVTVEEAKRSSLQPYAKRARQEFPWEEEYRSALHTIAGALEATESLLQKGPAPAWLSMEMEALQERMDKLKRYIHTLG

SEQ ID NO: 24383 - protein, 530 aa, Homo sapiens
MQVVLDSKLDLPCELQFPQCLLLVVVMDKLPSQPKEVQTLWCTDSQVSETTTRISLLKAVFYSFEQCSGELSLPVHLQGLKSKGKAEVAVTLYQHVCVHLCTFITSFHPSLFAELDAALLNAVLSANMITSLLAMDAWCFLARYGTAELCAHHVTIVAHLIKSCPGECYQLINLSILLKRLFFFMAPPHQLEFIQKFSPKEAENLPLWQHISFQALPPELREQTVHEVTTVGTAECRKWLSRSRTLGELESLNTVLSALLAVCNSAGEALDTGKQTAIIEVVSQLWAFLNIKQVADQPYVQQTFSLLLPLLGFFIQTLDPKLILQAVTLQTSLLKLELPDYVRLAMLDFVSSLGKLFIPEAIQDRILPNLSCMFALLLADRSWLLEQHTLEAFTQFAEGTNHEEIVPQCLSSEETKNKVVSFLEKTGFVDETEAAKVERVKQEKGIFWEPFANVTVEEAKRSSLQPYAKRARQEFPWEEEYRSALHTIAGALEATESLLQKGPAPAWLSMEMEALQERMDKLKRYIHTLG

SEQ ID NO: 24384 - protein, 270 aa, Homo sapiens
MQGNNLQPPSPRPLECWSLHREAPQRTEASRTHPSPFLALPGSHRTANQAQVVPGLVHHPQENTQRLRIRAGLSPFPRARLAAIGSTHGHRWVPGICLPRCLCPASCALHACPPHCNNAEAHSWLRLGGPLQSRSVEHQQHACGWGWVTHATYGERGTSQAAERQRIAHTRALSVGNCPRSHFQCEFSSISKWSEGTGTFSPRPRAVKSGVGGQPSPHIRITWRSCTTLTSKPCSRAITPECVVGWSRRSRHWYSDMRTGECQGLSPITR

SEQ ID NO: 24385 - protein, 211 aa, Homo sapiens
MQRTGGGAPRPGRNHGLPGSLRQPDPVALLMLLVDADQPEPMRSGARELALFLTPEPGAEAKEVEETIEGMLLRLEEFCSLADLIRSDTSQILEENIPVLKAKLTEMRGIYAKVDRLEAFVKMVGHHVAFLEADVLQAERDHGAFPQALRRWLGSAGLPSFRNVECSGTIPARCNLRLPGSSDSPASASQVAGITEVTCTGARDVRAAHTV

SEQ ID NO: 24386 - protein, 147 aa, Homo sapiens
MQRTGGGAPRPGRNHGLPGSLRQPDPVALLMLLVDADQPEPMRSGARELALFLTPEPGAEAKEVEETIEGMLLRLEEFCSLADLIRSDTSQILEENIPVLKAKLTEMRGIYAKVDRLEKSPAPVPVTYELPTLYRTEDYFPVDAGEA

SEQ ID NO: 24387 - protein, 203 aa, Homo sapiens
MQRTGGGAPRPGRNHGLPGSLRQPDPVALLMLLVDADQPEPMRSGARELALFLTPEPGAEAKEVEETIEGMLLRLEEFCSLADLIRSDTSQILEENIPVLKAKLTEMRGIYAKVDRLEAFVKMVGHHVAFLEADVLQAERDHGAFPQALRRWLGSAGLPSFRNKSPAPVPVTYELPTLYRTEDYFPVDAGEAQHHPRTCPRPL

SEQ ID NO: 24388 - protein, 1512 aa, Homo sapiens
MPSSSDTALGGGGGLSWAEKKLEERRKRRRFLSPQQPPLLLPLLQPQLLQPPPPPPPLLFLAAPGTAAAAAAAAAASSSCFSPGPPLEVKRLARGKRRAGGRQKRRRGPRAGQEAEKRRVFSLPQPQQDGGGGASSGGGVTPLVEYEDVSSQSEQGLLLGGASAATAATAAGGTGGSGGSPASSSGTQRRGEGSERRPRRDRRSSSGRSKERHREHRRRDGQRGGSEASKSRSRHSHSGEERAEVAKSGSSSSSGGRRKSASATSSSSSSRKDRDSKAHRSRTKSSKEPPSAYKEPPKAYREDKTEPKAYRRRRSLSPLGGRDDSPVSHRASQSLRSRKSPSPAGGGSSPYSRRLPRSPSPYSRRRSPSYSRHSSYERGGDVSPSPYSSSSWRRSRSPYSPVLRRSGKSRSRSPYSSRHSRSRSRHRLSRSRSRHSSISPSTLTLKSSLAAELNKNKKARAAEAARAAEAAKAAEATKAAEAAAKAAKASNTSTPTKGNTETSASASQTNHVKDVKKIKIEHAPSPSSGGTLKNDKAKTKPPLQVTKVENNLIVDKATKKAVIVGKESKSAATKEESVSLKEKTKPLTPSIGAKEKEQHVALVTSTLPPLPLPPMLPEDKEADSLRGNISVKAVKKEVEKKLRCLLADLPLPPELPGGDDLSKSPEEKKTATQLHSKRRPKICGPRYGETKEKDIDWGKRCVDKFDIIGIIGEGTYGQVYKARDKDTGEMVALKKVRLDNEKEGFPITAIREIKILRQLTHQSIINMKEIVTDKEDALDFKKDKGAFYLVFEYMDHDLMGLLESGLVHFNENHIKSFMRQLMEGLDYCHKKNFLHRDIKCSNILLNNRGQIKLADFGLARLYSSEESRPYTNKVITLWYRPPELLLGEERYTPAIDVWSCGCILGELFTKKPIFQANQELAQLELISRICGSPCPAVWPDVIKLPYFNTMKPKKQYRRKLREEFVFIPAAALDLFDYMLALDPSKRCTAEQALQCEFLRDVEPSKMPPPDLPLWQDCHELWSKKRRRQKQMGMTDDVSTIKAPRKDLSLGLDDSRTNTPQGVLPSSQLKSQGSSNVAPVKTGPGQHLNHSELAILLNLLQSKTSVNMADFVQVLNIKVNSETQQQLNKINLPAGILATGEKQTDPSTPQQESSKPLGGIQPSSQTIQPKVETDAAQAAVQSAFAVLLTQLIKAQQSKQKDVLLEERENGSGHEASLQLRPPPEPSTPVSGQDDLIQHQDMRILELTPEPDRPRILPPDQRPPEPPEPPPVTEEDLDYRTENQHVPTTSSSLTDPHAGVKAALLQLLAQHQPQDDPKREGGIDYQAGDTYVSTSDYKDNFGSSSFSSAPYVSNDGLGSSSAPPLERRSFIGNSDIQSLDNYSTASSHSGGPPQPSAFSESFPSSVAGYGDIYLNAGPMLFSGDKDHRFEYSHGPIAVLANSSDPSTGPESTHPLPAKMHNYNYGGNLQENPSGPSLMHGQTWTSPAQGPGYSQGYRGHISTSTGRGRGRGLPY

SEQ ID NO: 24389 - protein, 1452 aa, Homo sapiens
MPSSSDTALGGGGGLSWAEKKLEERRKRRRFLSPQQPPLLLPLLQPQLLQPPPPPPPLLFLAAPGTAAAAAAAAAASSSCFSPGPPLEVKRLARGKRRAGGRQKRRRGPRAGQEAEKRRVFSLPQPQQDGGGGASSGGGVTPLVEYEDVSSQSEQGLLLGGASAATAATAAGGTGGSGGSPASSSGTQRRGEGSERRPRRDRRSSSGRSKERHREHRRRDGQRGGSEASKSRSRHSHSGEERAEVAKSGSSSSSGGRRKSASATSSSSSSRKDRDSKAHRSRTKSSKEPPSAYKEPPKAYREDKTEPKAYRRRRSLSPLGGRDDSPVSHRASQSLRSRKSPSPAGGGSSPYSRRLPRSPSPYSRRRSPSYSRHSSYERGGDVSPSPYSSSSWRRSRSPYSPVLRRSGKSRSRSPYSSRHSRSRSRHRLSRSRSRHSSISPSTLTLKSSLAAELNKNKKARAAEAARAAEAAKAAEATKAAEAAAKAAKASNTSTPTKGNTETSASASQTNHVKDVKKIKIEHAPSPSSGGTLKNDKAKTKPPLQVTKVENNLIVDKATKKAVIVGKESKSAATKEESVSLKEKTKPLTPSIGAKEKEQHVALVTSTLPPLPLPPMLPEDKEADSLRGNISVKAVKKEVEKKLRCLLADLPLPPELPGGDDLSKSPEEKKTATQLHSKRRPKICGPRYGETKEKDIDWGKRCVDKFDIIGIIGEGTYGQVYKARDKDTGEMVALKKVRLDNEKEGFPITAIREIKILRQLTHQSIINMKEIVTDKEDALDFKKDKGAFYLVFEYMDHDLMGLLESGLVHFNENHIKSFMRQLMEGLDYCHKKNFLHRDIKCSNILLNNRGQIKLADFGLARLYSSEESRPYTNKVITLWYRPPELLLGEERYTPAIDVWSCGCILGELFTKKPIFQANQELAQLELISRICGSPCPAVWPDVIKLPYFNTMKPKKQYRRKLREEFVFIPAAALDLFDYMLALDPSKRCTAEQALQCEFLRDVEPSKMPPPDLPLWQDCHELWSKKRRRQKQMGMTDDVSTIKAPRKDLSLGLDDSRTNTPQGVLPSSQLKSQGSSNVAPGEKQTDPSTPQQESSKPLGGIQPSSQTIQPKVETDAAQAAVQSAFAVLLTQLIKAQQSKQKDVLLEERENGSGHEASLQLRPPPEPSTPVSGQDDLIQHQDMRILELTPEPDRPRILPPDQRPPEPPEPPPVTEEDLDYRTENQHVPTTSSSLTDPHAGVKAALLQLLAQHQPQDDPKREGGIDYQAGDTYVSTSDYKDNFGSSSFSSAPYVSNDGLGSSSAPPLERRSFIGNSDIQSLDNYSTASSHSGGPPQPSAFSESFPSSVAGYGDIYLNAGPMLFSGDKDHRFEYSHGPIAVLANSSDPSTGPESTHPLPAKMHNYNYGGNLQENPSGPSLMHGQTWTSPAQGPGYSQGYRGHISTSTGRGRGRGLPY

SEQ ID NO: 24390 - protein, 3114 aa, Homo sapiens
MSWALEEWKEGLPTRALQKIQELEGQLDKLKKEKQQRQFQLDSLEAALQKQKQKVENEKTEGTNLKRENQRLMEICESLEKTKQKISHELQVKESQVNFQEGQLNSGKKQIEKLEQELKRCKSELERSQQAAQSADVSLNPCNTPQKIFTTPLTPSQYYSGSKYEDLKEKYNKEVEERKRLEAEVKALQAKKASQTLPQATMNHRDIARHQASSSVFSWQQEKTPSHLSSNSQRTPIRRDFSASYFSGEQEVTPSRSTLQIGKRDANSSFFDNSSSPHLLDQLKAQNQELRNKINELELRLQGHEKEMKGQVNKFQELQLQLEKAKVELIEKEKVLNKCRDELVRTTAQYDQASTKYTALEQKLKKLTEDLSCQRQNAESARCSLEQKIKEKEKEFQEELSRQQRSFQTLDQECIQMKARLTQELQQAKNMHNVLQAELDKLTSVKQQLENNLEEFKQKLCRAEQAFQASQIKENELRRSMEEMKKENNLLKSHSEQKAREVCHLEAELKNIKQCLNQSQNFAEEMKAKNTSQETMLRDLQEKINQQENSLTLEKLKLAVADLEKQRDCSQDLLKKREHHIEQLNDKLSKTEKESKALLSALELKKKEYEELKEEKTLFSCWKSENEKLLTQMESEKENLQSKINHLETCLKTQQIKSHEYNERVRTLEMDRENLSVEIRNLHNVLDSKSVEVETQKLAYMELQQKAEFSDQKHQKEIENMCLKTSQLTGQVEDLEHKLQLLSNEIMDKDRCYQDLHAEYESLRDLLKSKDASLVTNEDHQRSLLAFDQQPAMHHSFANIIGEQGSMPSERSECRLEADQSPKNSAILQNRVDSLEFSLESQKQMNSDLQKQCEELVQIKGEIEENLMKAEQMHQSFVAETSQRISKLQEDTSAHQNVVAETLSALENKEKELQLLNDKVETEQAEIQELKKSNHLLEDSLKELQLLSETLSLEKKEMSSIISLNKREIEELTQENGTLKEINASLNQEKMNLIQKSESFANYIDEREKSISELSDQYKQEKLILLQRCEETGNAYEDLSQKYKAAQEKNSKLECLLNECTSLCENRKNELEQLKEAFAKEHQEFLTKLAFAEERNQNLMLELETVQQALRSEMTDNQNNSKSEAGGLKQEIMTLKEEQNKMQKEVNDLLQENEQLMKVMKTKHECQNLESEPIRNSVKERESERNQCNFKPQMDLEVKEISLDSYNAQLVQLEAMLRNKELKLQESEKEKECLQHELQTIRGDLETSNLQDMQSQEISGLKDCEIDAEEKYISGPHELSTSQNDNAHLQCSLQTTMNKLNELEKICEILQAEKYELVTELNDSRSECITATRKMAEEVGKLLNEVKILNDDSGLLHGELVEDIPGGEFGEQPNEQHPVSLAPLDESNSYEHLTLSDKEVQMHFAELQEKFLSLQSEHKILHDQHCQMSSKMSELQTYVDSLKAENLVLSTNLRNFQGDLVKEMQLGLEEGLVPSLSSSCVPDSSSLSSLGDSSFYRALLEQTGDMSLLSNLEGAVSANQCSVDEVFCSSLQEENLTRKETPSAPAKGVEELESLCEVYRQSLEKLEEKMESQGIMKNKEIQELEQLLSSERQELDCLRKQYLSENEQWQQKLTSVTLEMESKLAAEKKQTEQLSLELEVARLQLQGLDLSSRSLLGIDTEDAIQGRNESCDISKEHTSETTERTPKHDVHQICDKDAQQDLNLDIEKITETGAVKPTGECSGEQSPDTNYEPPGEDKTQGSSECISELSFSGPNALVPMDFLGNQEDIHNLQLRVKETSNENLRLLHVIEDRDRKVESLLNEMKELDSKLHLQEVQLMTKIEACIELEKIVGELKKENSDLSEKLEYFSCDHQELLQRVETSEGLNSDLEMHADKSSREDIGDNVAKVNDSWKERFLDVENELSRIRSEKASIEHEALYLEADLEVVQTEKLCLEKDNENKQKVIVCLEEELSVVTSERNQLRGELDTMSKKTTALDQLSEKMKEKTQELESHQSECLHCIQVAEAEVKEKTELLQTLSSDVSELLKDKTHLQEKLQSLEKDSQALSLTKCELENQIAQLNKEKELLVKESESLQARLSESDYEKLNVSKALEAALVEKGEFALRLSSTQEEVHQLRRGIEKLRVRIEADEKKQLHIAEKLKERERENDSLKDKVENLERELQMSEENQELVILDAENSKAEVETLKTQIEEMARSLKVFELDLVTLRSEKENLTKQIQEKQGQLSELDKLLSSFKSLLEEKEQAEIQIKEESKTAVEMLQNQLKELNEAVAALCGDQEIMKATEQSLDPPIEEEHQLRNSIEKLRARLEADEKKQLCVLQQLKESEHHADLLKGRVENLERELEIARTNQEHAALEAENSKGEVETLKAKIEGMTQSLRGLELDVVTIRSEKENLTNELQKEQERISELEIINSSFENILQEKEQEKVQMKEKSSTAMEMLQTQLKELNERVAALHNDQEACKAKEQNLSSQVECLELEKAQLLQGLDEAKNNYIVLQSSVNGLIQEVEDGKQKLEKKDEEISRLKNQIQDQEQLVSKLSQVEGEHQLWKEQNLELRNLTVELEQKIQVLQSKNASLQDTLEVLQSSYKNLENELELTKMDKMSFVEKVNKMTAKETELQREMHEMAQKTAELQEELSGEKNRLAGELQLLLEEIKSSKDQLKELTLENSELKKSLDCMHKDQVEKEGKVREEIAEYQLRLHEAEKKHQALLLDTNKQYEVEIQTYREKLTSKEECLSSQKLEIDLLKSSKEELNNSLKATTQILEELKKTKMDNLKYVNQLKKENERAQGKMKLLIKSCKQLEEEKEILQKELSQLQAAQEKQKTGTVMDTKVDELTTEIKELKETLEEKTKEADEYLDKYCSLLISHEKLEKAKEMLETQVAHLCSQQSKQDSRGSPLLGPVVPGPSPIPSVTEKRLSSGQNKASGKRQRSSGIWENGRGPTPATPESFSKKSKKAVMSGIHPAEDTEGTEFEPEGLPEVVKKGFADIPTGKTSPYILRRTTMATRTSPRLAAQKLALSPLSLGKENLAESSKPTAGGSRSQKVKVAQRSPVDSGTILREPTTKSVPVNNLPERSPTDSPREGLRVKRGRLVPSPKAGLESNGSENCKVQ

SEQ ID NO: 24391 - protein, 574 aa, Homo sapiens
MEASLGIQMDEPMAFSPQRDRFQAEGSLKKNEQNFKLAGVKKDIEKLYEAVPQLSNVFKIEDKIGEGTFSSVYLATAQLQVGPEEKIALKHLIPTSHPIRIAAELQCLTVAGGQDNVMGVKYCFRKNDHVVIAMPYLEHESFLDILNSLSFQEVREYMLNLFKALKRIHQFGIVHRDVKPSNFLYNRRLKKYALVDFGLAQGTHDTKIELLKFVQSEAQQERCSQNKSHIITGNKIPLSGPVPKELDQQSTTKASVKRPYTNAQIQIKQGKDGKEGSVGLSVQRSVFGERNFNIHSSISHESPAVKLMKQSKTVDVLSRKLATKKKAISTKVMNSAVMRKTASSCPASLTCDCYATDKVCSICLSRRQQVAPRAGTPGFRAPEVLTKCPNQTTAIDMWSAGVIFLSLLSGRYPFYKASDDLTALAQIMTIRGSRETIQAAKTFGKSILCSKEVPAQDLRKLCERLRGMDSSTPKLTSDIQGHASHQPAISEKTDHKASCLVQTPPGQYSGNSFKKGDSNSCEHCFDEYNTNLEGWNEVPDEAYDLLDKLLDLNPASRITAEEALLHPFFKDMSL

SEQ ID NO: 24392 - protein, 394 aa, Homo sapiens
MALLDLALEGMAVFGFVLFLVLWLMHFMAIIYTRLHLNKKATDKQPYSKLPGVSLLKPLKGVDPNLINNLETFFELDYPKYEVLLCVQDHDDPAIDVCKKLLGKYPNVDARLFIGGKKVGINPKINNLMPGYEVAKYDLIWICDSGIRVIPDTLTDMVNQMTEKVGLVHGLPYVADRQGFAATLEQVYFGTSHPRYYISANVTGFKCVTGMSCLMRKDVLDQAGGLIAFAQYIAEDYFMAKAIADRGWRFAMSTQVAMQNSGSYSISQFQSRMIRWTKLRINMLPATIICEPISECFVASLIIGWAAHHVFRWDIMVFFMCHCLAWFIFDYIQLRGVQGGTLCFSKLDYAVAWFIRESMTIYIFLSALWDPTISWRTGRYRLRCGGTAEEILDV

SEQ ID NO: 24393 - protein, 268 aa, Homo sapiens
MSGKANASKKNAQQLKRNPKRKKDNEEVVLSENKVRNTVKKNKNHLKDLSSEGQTKHTNLKHGKTAASKRKTWQPLSKSTRDHLQTMMESVIMTILSNSIKEKEEIQYHLNFLKKRLLQQCETLKVPPKKMEDLTNVSSLLNMERARDKANEEGLALLQEEIDKMVETTELMTGNIQSLKNKIQILASEVEEEEERVKQMHQINSSGVLSLPELSQKTLKAPTLQKEILALIPNQNALLKDLDILHNSSQMKSMSTFIEEAYKKLDAS

SEQ ID NO: 24394 - protein, 344 aa, Homo sapiens
MKDLGAEHLAGHEGVQLLGLLNVYLEQEERFQPREKGLSLIEATPENDNTLCPGLRNAKVEDLRSLANFFGSCTETFVLAVNILDRFLALMKVKPKHLSCIGVCSFLLAARIVEEDCNIPSTHDVIRISQCKCTASDIKRMEKIISEKLHYELEATTALNFLHLYHTIILCHTSERKEILSLDKLEAQLKACNCRLIFSKAKPSVLALCLLNLEVETLKSVELLEILLLVKKHSKINDTEFFYWRELVSKCLAEYSSPECCKPDLKKLVWIVSRRTAQNLHNSYYSVPELPTIPEGGCFDESESEDSCEDMSCGEESLSSSPPSDQECTFFFNFKVAQTLCFPS

SEQ ID NO: 24395 - protein, 304 aa, Homo sapiens
MKDLGAEHLAGHEGVQLLGLLNVYLEQEERFQPREKGLSLIEATPENDNTLCPGLRNAKVEDLRSLANFFGSCTETFVLAVNILDRFLALMKVKPKHLSCIGVCSFLLAARIVEEDCNIPSTHDVIRISQCKCTASDIKRMEKIISEKLHYELEATTALNFLHLYHTIILCHTSERKEILSLDKLEAQLKACNCRLIFSKAKPSVLALCLLNLEVETLKSVELLEILLLVKKHSKINDTEFFYWRELVSKCLAEYSSPECCKPDLKKLVWIVSRRTAQNLHNSYYSVPELPTIPEGGCFDESER

SEQ ID NO: 24396 - protein, 355 aa, Homo sapiens
MTTSLDTVETFGTTSYYDDVGLLCEKADTRALMAQFVPPLYSLVFTVGLLGNVVVVMILIKYRRLRIMTNIYLLNLAISDLLFLVTLPFWIHYVRGHNWVFGHGMCKLLSGFYHTGLYSEIFFIILLTIDRYLAIVHAVFALRARTVTFGVITSIVTWGLAVLAALPEFIFYETEELFEETLCSALYPEDTVYSWRHFHTLRMTIFCLVLPLLVMAICYTGIIKTLLRCPSKKKYKAIRLIFVIMAVFFIFWTPYNVAILLSSYQSILFGNDCERSKHLDLVMLVTEVIAYSHCCMNPVIYAFVGERFRKYLRHFFHRHLLMHLGRYIPFLPSEKLERTSSVSPSTAEPELSIVF

SEQ ID NO: 24397 - protein, 376 aa, Homo sapiens
MPFGIRMLLRAHKPGSSRRSEMTTSLDTVETFGTTSYYDDVGLLCEKADTRALMAQFVPPLYSLVFTVGLLGNVVVVMILIKYRRLRIMTNIYLLNLAISDLLFLVTLPFWIHYVRGHNWVFGHGMCKLLSGFYHTGLYSEIFFIILLTIDRYLAIVHAVFALRARTVTFGVITSIVTWGLAVLAALPEFIFYETEELFEETLCSALYPEDTVYSWRHFHTLRMTIFCLVLPLLVMAICYTGIIKTLLRCPSKKKYKAIRLIFVIMAVFFIFWTPYNVAILLSSYQSILFGNDCERSKHLDLVMLVTEVIAYSHCCMNPVIYAFVGERFRKYLRHFFHRHLLMHLGRYIPFLPSEKLERTSSVSPSTAEPELSIVF

SEQ ID NO: 24398 - protein, 315 aa, Homo sapiens
MACAEFSFHVPSLEELAGVMQKGLKDNFADVQVSVVDCPDLTKEPFTFPVKGICGKTRIAEVGGVPYLLPLVNQKKVYDLNKIAKEIKLPGAFILGAGAGPFQTLGFNSEFMPVIQTESEHKPPVNGSYFAHVNPADGGCLLEKYSEKCHDFQCALLANLFASEGQPGKVIEVKAKRRTGPLNFVTCMRETLEKHYGNKPIGMGGTFIIQKGKVKSHIMPAEFSSCPLNSDEEVNKWLHFYEMKAPLVCLPVFVSRDPGFDLRLEHTHFFSRHGEGGHYHYDTTPDIVEYLGYFLPAEFLYRIDQPKETHSIGRD

SEQ ID NO: 24399 - protein, 296 aa, Homo sapiens
MQKGLKDNFADVQVSVVDCPDLTKEPFTFPVKGICGKTRIAEVGGVPYLLPLVNQKKVYDLNKIAKEIKLPGAFILGAGAGPFQTLGFNSEFMPVIQTESEHKPPVNGSYFAHVNPADGGCLLEKYSEKCHDFQCALLANLFASEGQPGKVIEVKAKRRTGPLNFVTCMRETLEKHYGNKPIGMGGTFIIQKGKVKSHIMPAEFSSCPLNSDEEVNKWLHFYEMKAPLVCLPVFVSRDPGFDLRLEHTHFFSRHGEGGHYHYDTTPDIVEYLGYFLPAEFLYRIDQPKETHSIGRD

SEQ ID NO: 24400 - protein, 265 aa, Homo sapiens
MACAEFSFHVPSLEELAGVMQKGLKDNFADVQVSVVDCPDLTKEPFTFPVKGICGKTRIAEVGGVPYLLPLVNQKKVYDLNKIAKEIKLPGAFILGAGAGPFQTLGFNSEFMPVIQTESEHKPPVNGSYFAHVNPADGGCLLEKYSEKCHDFQCALLANLFASEGQPGKPAEFSSCPLNSDEEVNKWLHFYEMKAPLVCLPVFVSRDPGFDLRLEHTHFFSRHGEGGHYHYDTTPDIVEYLGYFLPAEFLYRIDQPKETHSIGRD

SEQ ID NO: 24401 - protein, 204 aa, Homo sapiens
MPVIQTESEHKPPVNGSYFAHVNPADGGCLLEKYSEKCHDFQCALLANLFASEGQPGKVIEVKAKRRTGPLNFVTCMRETLEKHYGNKPIGMGGTFIIQKGKVKSHIMPAEFSSCPLNSDEEVNKWLHFYEMKAPLVCLPVFVSRDPGFDLRLEHTHFFSRHGEGGHYHYDTTPDIVEYLGYFLPAEFLYRIDQPKETHSIGRD

SEQ ID NO: 24402 - protein, 193 aa, Homo sapiens
MPEEGSGCSVRRRPYGCVLRAALVPLVAGLVICLVVCIQRFAQAQQQLPLESLGWDVAELQLNHTGPQQDPRLYWQGGPALGRSFLHGPELDKGQLRIHRDGIYMVHIQVTLAICSSTTASRHHPTTLAVGICSPASRSISLLRLSFHQGCTIASQRLTPLARGDTLCTNLTGTLLPSRNTDETFFGVQWVRP

SEQ ID NO: 24403 - protein, 208 aa, Homo sapiens
MPEEGSGCSVRRRPYGCVLRAALVPLVAGLVICLVVCIQRFAQAQQQLPLESLGWDVAELQLNHTGPQQDPRLYWQGGPALGRSFLHGPELDKGQLRIHRDGIYMVHIQVTLAICSSTTASRHHPTTLAVGICSPASRSISLLRLSFHQGLFGFWNWGLKVKCFLRHLIWTAHCFIPLTQLVFMQALQSWRNHHCSHFTDEENRGVNR

SEQ ID NO: 24404 - protein, 449 aa, Homo sapiens
MMKTLLLFVGLLLTWESGQVLGDQTVSDNELQEMSNQGSKYVNKEIQNAVNGVKQIKTLIEKTNEERKTLLSNLEEAKKKKEDALNETRESETKLKELPGVCNETMMALWEECKPCLKQTCMKFYARVCRSGSGLVGRQLEEFLNQSSPFYFWMNGDRIDSLLENDRQQTHMLDVMQDHFSRASSIIDELFQDRFFTREPQDTYHYLPFSLPHRRPHFFFPKSRIVRSLMPFSPYEPLNFHAMFQPFLEMIHEAQQAMDIHFHSPAFQHPPTEFIREGDDDRTVCREIRHNSTGCLRMKDQCDKCREILSVDCSTNNPSQAKLRRELDESLQVAERLTRKYNELLKSYQWKMLNTSSLLEQLNEQFNWVSRLANLTQGEDQYYLRVTTVASHTSDSDVPSGVTEVVVKLFDSDPITVTVPVEVSRKNPKFMETVAEKALQEYRKKHREE

SEQ ID NO: 24405 - protein, 501 aa, Homo sapiens
MQVCSQPQRGCVREQSAINTAPPSAHNAASPGGARGHRVPLTEACKDSRIGGMMKTLLLFVGLLLTWESGQVLGDQTVSDNELQEMSNQGSKYVNKEIQNAVNGVKQIKTLIEKTNEERKTLLSNLEEAKKKKEDALNETRESETKLKELPGVCNETMMALWEECKPCLKQTCMKFYARVCRSGSGLVGRQLEEFLNQSSPFYFWMNGDRIDSLLENDRQQTHMLDVMQDHFSRASSIIDELFQDRFFTREPQDTYHYLPFSLPHRRPHFFFPKSRIVRSLMPFSPYEPLNFHAMFQPFLEMIHEAQQAMDIHFHSPAFQHPPTEFIREGDDDRTVCREIRHNSTGCLRMKDQCDKCREILSVDCSTNNPSQAKLRRELDESLQVAERLTRKYNELLKSYQWKMLNTSSLLEQLNEQFNWVSRLANLTQGEDQYYLRVTTVASHTSDSDVPSGVTEVVVKLFDSDPITVTVPVEVSRKNPKFMETVAEKALQEYRKKHREE

SEQ ID NO: 24406 - protein, 274 aa, Homo sapiens
MQDHFSRASSIIDELFQDRFFTREPQDTYHYLPFSLPHRRPHFFFPKSRIVRSLMPFSPYEPLNFHAMFQPFLEMIHEAQQAMDIHFHSPAFQHPPTEFIREGDDDRTVCREIRHNSTGCLRMKDQCDKCREILSVDCSTNNPSQAKLRRELDESLQVAERLTRKYNELLKSYQWKMLNTSSLLEQLNEQFNWVSRLANLTQGEDQYYLRVTTVASHTSDSDVPSGVTEVVVKLFDSDPITVTVPVEVSRKNPKFMETVAEKALQEYRKKHREE

SEQ ID NO: 24407 - protein, 416 aa, Homo sapiens
MSNQGSKYVNKEIQNAVNGVKQIKTLIEKTNEERKTLLSNLEEAKKKKEDALNETRESETKLKELPGVCNETMMALWEECKPCLKQTCMKFYARVCRSGSGLVGRQLEEFLNQSSPFYFWMNGDRIDSLLENDRQQTHMLDVMQDHFSRASSIIDELFQDRFFTREPQDTYHYLPFSLPHRRPHFFFPKSRIVRSLMPFSPYEPLNFHAMFQPFLEMIHEAQQAMDIHFHSPAFQHPPTEFIREGDDDRTVCREIRHNSTGCLRMKDQCDKCREILSVDCSTNNPSQAKLRRELDESLQVAERLTRKYNELLKSYQWKMLNTSSLLEQLNEQFNWVSRLANLTQGEDQYYLRVTTVASHTSDSDVPSGVTEVVVKLFDSDPITVTVPVEVSRKNPKFMETVAEKALQEYRKKHREE

SEQ ID NO: 24408 - protein, 460 aa, Homo sapiens
MEACKDSRIGGMMKTLLLFVGLLLTWESGQVLGDQTVSDNELQEMSNQGSKYVNKEIQNAVNGVKQIKTLIEKTNEERKTLLSNLEEAKKKKEDALNETRESETKLKELPGVCNETMMALWEECKPCLKQTCMKFYARVCRSGSGLVGRQLEEFLNQSSPFYFWMNGDRIDSLLENDRQQTHMLDVMQDHFSRASSIIDELFQDRFFTREPQDTYHYLPFSLPHRRPHFFFPKSRIVRSLMPFSPYEPLNFHAMFQPFLEMIHEAQQAMDIHFHSPAFQHPPTEFIREGDDDRTVCREIRHNSTGCLRMKDQCDKCREILSVDCSTNNPSQAKLRRELDESLQVAERLTRKYNELLKSYQWKMLNTSSLLEQLNEQFNWVSRLANLTQGEDQYYLRVTTVASHTSDSDVPSGVTEVVVKLFDSDPITVTVPVEVSRKNPKFMETVAEKALQEYRKKHREE

SEQ ID NO: 24409 - protein, 429 aa, Homo sapiens
MGDQTVSDNELQEMSNQGSKYVNKEIQNAVNGVKQIKTLIEKTNEERKTLLSNLEEAKKKKEDALNETRESETKLKELPGVCNETMMALWEECKPCLKQTCMKFYARVCRSGSGLVGRQLEEFLNQSSPFYFWMNGDRIDSLLENDRQQTHMLDVMQDHFSRASSIIDELFQDRFFTREPQDTYHYLPFSLPHRRPHFFFPKSRIVRSLMPFSPYEPLNFHAMFQPFLEMIHEAQQAMDIHFHSPAFQHPPTEFIREGDDDRTVCREIRHNSTGCLRMKDQCDKCREILSVDCSTNNPSQAKLRRELDESLQVAERLTRKYNELLKSYQWKMLNTSSLLEQLNEQFNWVSRLANLTQGEDQYYLRVTTVASHTSDSDVPSGVTEVVVKLFDSDPITVTVPVEVSRKNPKFMETVAEKALQEYRKKHREE

SEQ ID NO: 24410 - protein, 327 aa, Homo sapiens
MTHLQAGLSPETLEKARLELNENPDTLHQDIQEVRDMVITRPDIGFLRTDDAFILRFLRARKFHHFEAFRLLAQYFEYRQQNLDMFKSFKATDPGIKQALKDGFPGGLANLDHYGRKILVLFAANWDQSRYTLVDILRAILLSLEAMIEDPELQVNGFVLIIDWSNFTFKQASKLTPSMLRLAIEGLQDSFPARFGGIHFVNQPWYIHALYTVIRPFLKEKTRKRIFLHGNNLNSLHQLIHPEILPSEFGGMLPPYDMGTWARTLLDHEYDDDSEYNVDSYSMPVKEVEKELSPKSMKRSQSVVDPTVLKRMDKNEEENMQPLLSLD

SEQ ID NO: 24411 - protein, 181 aa, Homo sapiens
MIEDPELQVNGFVLIIDWSNFTFKQASKLTPSMLRLAIEGLQDSFPARFGGIHFVNQPWYIHALYTVIRPFLKEKTRKRIFLHGNNLNSLHQLIHPEILPSEFGGMLPPYDMGTWARTLLDHEYDDDSEYNVDSYSMPVKEVEKELSPKSMKRSQSVVDPTVLKRMDKNEEENMQPLLSLD

SEQ ID NO: 24412 - protein, 707 aa, Homo sapiens
MLGSLVLRRKALAPRLLLRLLRSPTLRGHGGASGRNVTTGSLGEPQWLRVATGGRPGTSPALFSGRGAATGGRQGGRFDTKCLAAATWGRLPGPEETLPGQDSWNGVPSRAGLGMCALAAALVVHCYSKSPSNKDAALLEAARANNMQEVSRLLSEGADVNAKHRLGWTALMVAAINRNNSVVQVLLAAGADPNLGDDFSSVYKTAKEQGIHSLEDGGQDGASRHITNQWTSALEFRRWLGLPAGVLITREDDFNNRLNNRASFKGCTALHYAVLADDYRTVKELLDGGANPLQRNEMGHTPLDYAREGEVMKLLRTSEAKYQEKQRKREAEERRRFPLEQRLKEHIIGQESAIATVGAAIRRKENGWYDEEHPLVFLFLGSSGIGKTELAKQTAKYMHKDAKKGFIRLDMSEFQERHEVAKFIGSPPGYVGHEEGGQLTKKLKQCPNAVVLFDEVDKAHPDVLTIMLQLFDEGRLTDGKGKTIDCKDAIFIMTSNVASDEIAQHALQLRQEALEMSRNRIAENLGDVQISDKITISKNFKENVIRPILKAHFRRDEFLGRINEIVYFLPFCHSELIQLVNKELNFWAKRAKQRHNITLLWDREVADVLVDGYNVHYGARSIKHEVERRVVNQLAAAYEQDLLPGGCTLRITVEDSDKQLLKSPELPSPQAEKRLPKLRLEIIDKDSKTRRLDIRAPLHPEKVCNTI

SEQ ID NO: 24413 - protein, 677 aa, Homo sapiens
MLGSLVLRRKALAPRLLLRLLRSPTLRGHGGASGRNVTTGSLGEPQWLRVATGGRPGTSPALFSGRGAATGGRQGGRFDTKCLAAATWGRLPGPEETLPGQDSWNGVPSRAGLGMCALAAALVVHCYSKSPSNKDAALLEAARANNMQEVSRLLSEGADVNAKHRLGWTALMVAAINRNNSVVQVLLAAGADPNLGDDFSSVYKTAKEQGIHSLEVLITREDDFNNRLNNRASFKGCTALHYAVLADDYRTVKELLDGGANPLQRNEMGHTPLDYAREGEVMKLLRTSEAKYQEKQRKREAEERRRFPLEQRLKEHIIGQESAIATVGAAIRRKENGWYDEEHPLVFLFLGSSGIGKTELAKQTAKYMHKDAKKGFIRLDMSEFQERHEVAKFIGSPPGYVGHEEGGQLTKKLKQCPNAVVLFDEVDKAHPDVLTIMLQLFDEGRLTDGKGKTIDCKDAIFIMTSNVASDEIAQHALQLRQEALEMSRNRIAENLGDVQISDKITISKNFKENVIRPILKAHFRRDEFLGRINEIVYFLPFCHSELIQLVNKELNFWAKRAKQRHNITLLWDREVADVLVDGYNVHYGARSIKHEVERRVVNQLAAAYEQDLLPGGCTLRITVEDSDKQLLKSPELPSPQAEKRLPKLRLEIIDKDSKTRRLDIRAPLHPEKVCNTI

SEQ ID NO: 24414 - protein, 648 aa, Homo sapiens
MLGSLVLRRKALAPRLLLRLLRSPTLRGHGGASGRNVTTGSLGEPQWLRVATGGRPGTSPALFSGRGAATGGRQGGRFDTKCLAAATWGRLPGPEETLPGQDSWNGVPSRAGLGMCALAAALVVHCYSKSPSNKDAALLEAARANNMQEVSSVVQVLLAAGADPNLGDDFSSVYKTAKEQGIHSLEVLITREDDFNNRLNNRASFKGCTALHYAVLADDYRTVKELLDGGANPLQRNEMGHTPLDYAREGEVMKLLRTSEAKYQEKQRKREAEERRRFPLEQRLKEHIIGQESAIATVGAAIRRKENGWYDEEHPLVFLFLGSSGIGKTELAKQTAKYMHKDAKKGFIRLDMSEFQERHEVAKFIGSPPGYVGHEEGGQLTKKLKQCPNAVVLFDEVDKAHPDVLTIMLQLFDEGRLTDGKGKTIDCKDAIFIMTSNVASDEIAQHALQLRQEALEMSRNRIAENLGDVQISDKITISKNFKENVIRPILKAHFRRDEFLGRINEIVYFLPFCHSELIQLVNKELNFWAKRAKQRHNITLLWDREVADVLVDGYNVHYGARSIKHEVERRVVNQLAAAYEQDLLPGGCTLRITVEDSDKQLLKSPELPSPQAEKRLPKLRLEIIDKDSKTRRLDIRAPLHPEKVCNTI

SEQ ID NO: 24415 - protein, 662 aa, Homo sapiens
MPRGCHLGTPSWSRRNTPRTGQLERGPQQGRTGHVRPGRSAGGSLLQQESVQQGCSPVGSCPCQQYARSQQPQETAKNDAQSRSWAGLNAGVSLKNTKISSSEWPLRLLSEGADVNAKHRLGWTALMVAAINRNNSVVQVLLAAGADPNLGDDFSSVYKTAKEQGIHSLEDGGQDGASRHITNQWTSALEFRRWLGLPAGVLITREDDFNNRLNNRASFKGCTALHYAVLADDYRTVKELLDGGANPLQRNEMGHTPLDYAREGEVMKLLRTSEAKYQEKQRKREAEERRRFPLEQRLKEHIIGQESAIATVGAAIRRKENGWYDEEHPLVFLFLGSSGIGKTELAKQTAKYMHKDAKKGFIRLDMSEFQERHEVAKFIGSPPGYVGHEEGGQLTKKLKQCPNAVVLFDEVDKAHPDVLTIMLQLFDEGRLTDGKGKTIDCKDAIFIMTSNVASDEIAQHALQLRQEALEMSRNRIAENLGDVQISDKITISKNFKENVIRPILKAHFRRDEFLGRINEIVYFLPFCHSELIQLVNKELNFWAKRAKQRHNITLLWDREVADVLVDGYNVHYGARSIKHEVERRVVNQLAAAYEQDLLPGGCTLRITVEDSDKQLLKSPELPSPQAEKRLPKLRLEIIDKDSKTRRLDIRAPLHPEKVCNTI

SEQ ID NO: 24416 - protein, 506 aa, Homo sapiens
MVAAINRNNSVVQVLLAAGADPNLGDDFSSVYKTAKEQGIHSLEVLITREDDFNNRLNNRASFKGCTALHYAVLADDYRTVKELLDGGANPLQRNEMGHTPLDYAREGEVMKLLRTSEAKYQEKQRKREAEERRRFPLEQRLKEHIIGQESAIATVGAAIRRKENGWYDEEHPLVFLFLGSSGIGKTELAKQTAKYMHKDAKKGFIRLDMSEFQERHEVAKFIGSPPGYVGHEEGGQLTKKLKQCPNAVVLFDEVDKAHPDVLTIMLQLFDEGRLTDGKGKTIDCKDAIFIMTSNVASDEIAQHALQLRQEALEMSRNRIAENLGDVQISDKITISKNFKENVIRPILKAHFRRDEFLGRINEIVYFLPFCHSELIQLVNKELNFWAKRAKQRHNITLLWDREVADVLVDGYNVHYGARSIKHEVERRVVNQLAAAYEQDLLPGGCTLRITVEDSDKQLLKSPELPSPQAEKRLPKLRLEIIDKDSKTRRLDIRAPLHPEKVCNTI

SEQ ID NO: 24417 - protein, 232 aa, Homo sapiens
MPGWFKKAWYGLASLLSFSSFILIIVALVVPHWLSGKILCQTGVDLVNATDRELVKFIGDIYYGLFRGCKVRQCGLGGRQSQFTIFPHLVKELNAGLHVMILLLLFLALALALVSMGFAILNMIQVPYRAVSGPGGICLWNVLAGGVVALAIASFVAAVKFHDLTERIANFQEKLFQFVVVEEQYEESFWICVASASAHAANLVVVAISQIPLPEIKTKIEEATVTAEDILY

SEQ ID NO: 24418 - protein, 335 aa, Homo sapiens
MIREWKNDCQRIEKQRASDTMVQERKNEKPVRIFNTNSSFQDQAPTCCQEDLSSASPLRIWSKFYRSDPRIALGKYSPLEKEILRLGGIHTIAARRLLAYKQEEECRMLKELQLLSPDYKQAMEYKKKHSSPCAICVPLEKIWTAKVIAPLEAFKMPQREQVNVSKHIERMRLARALGNHQPLPYIERFTRSSFLSGVGLGPMAKNKARRKEDNYDTHNCDDANQDKKEEAEGKNTKRREIKMNVVFKSKEPKKCLTYHGNDRKSFLPAKKPERSIAGLTNRNLFCISEFPGDLMLMNQDFISRRDHFSDLVKTYSLEEESIWKERMRKATPYHY

SEQ ID NO: 24419 - protein, 1288 aa, Homo sapiens
MASVAWAVLKVLLLLPTQTWSPVGAGNPPDCDSPLASALPRSSFSSSSELSSSHGPGFSRLNRRDGAGGWTPLVSNKYQWLQIDLGERMEVTAVATQGGYGSSDWVTSYLLMFSDGGRNWKQYRREESIWGFPGNTNADSVVHYRLQPPFEARFLRFLPLAWNPRGRIGMRIEVYGCAYKSEVVYFDGQSALLYTLDKKPLKPIRDVISLKFKAMQSNGILLHREGQHGNHITLELIKGKLVFFLNSGNAKLPSTIAPVTLTLGSLLDDQHWHSVLIELLDTQVNFTVDKHTHHFQAKGDSSNLDLNFEISFGGILSPGRSRAFTRKSFHGCLENLYYNGVDVTELAKKHKPQILMMGNVSFSCPQPQTVPVTFLSSRSYLALPGNSGEDKVSVTFQFRTWNRAGHLLFGELQRGSGSFVLFLKDGKLKLSLFQAGQSPRNVTAGAGLNDGQWHSVSFSAKWSHMNVVVDDDTAVQPLVAVLIDSGDTYYFGGCLGNSSGSGCKSPLGGFQGCLRLITIGDKAVDPILVQQGALGSFRDLQIDSCGITDRCLPSYCEHGGECSQSWDTFSCDCLGTGYTGETCHSSLYEQSCEAHKHRGNPSGLYYIDADGSGPLGPFLVYCNMTADSAWTVVRHGGPDAVTLRGAPSGHPLSAVSFAYAAGAGQLRAAVNLAERCEQRLALRCGTARRPDSRDGTPLSWWVGRTNETHTSWGGSLPDAQKCTCGLEGNCIDSQYYCNCDAGQNEWTSDTIVLSQKEHLPVTQIVMTDTGQPHSEADYTLGPLLCRGDKSFWNSASFNTETSYLHFPAFHGELTADVCFFFKTTVSSGVFMENLGITDFIRIELRAPTEVTFSFDVGNGPCEVTVQSPTPFNDNQWHHVRAERNVKGASLQVDQLPQKMQPAPADGHVRLQLNSQLFIGGTATRQRGFLGCIRSLQLNGVALDLEERATVTPGVEPGCAGHCSTYGHLCRNGGRCREKRRGVTCDCAFSAYDGPFCSNEISAYFATGSSMTYHFQEHYTLSENSSSLVSSLHRDVTLTREMITLSFRTTRTPSLLLYVSSFYEEYLSVILANNGSLQIRYKLDRHQNPDAFTFDFKNMADGQLHQVKINREEAVVMVEVNQSAKKQVILSSGTEFNAVKSLILGKVLEAAGADPDTRRAATSGFTGCLSAVRFGCAAPLKAALRPSGPSRVTVRGHVAPMARCAAGAASGSPARELAPRLAGGAGRSGPVDEGEPLVNADRRDSAVIGGVIAVEIFILLCITAIAIRIYQQRKLRKENESKVSKKEEC

SEQ ID NO: 24420 - protein, 604 aa, Homo sapiens
MASVAWAVLKVLLLLPTQTWSPVGAGNPPDCDSPLASALPRSSFSSSSELSSSHGPGFSRLNRRDGAGGWTPLVSNKYQWLQIDLGERMEVTAVATQGGYGSSDWVTSYLLMFSDGGRNWKQYRREESIWGFPGNTNADSVVHYRLQPPFEARFLRFLPLAWNPRGRIGMRIEVYGCAYKSEVVYFDGQSALLYTLDKKPLKPIRDVISLKFKAMQSNGILLHREGQHGNHITLELIKGKLVFFLNSGNAKLPSTIAPVTLTLGSLLDDQHWHSVLIELLDTQVNFTVDKHTHHFQAKGDSSNLDLNFEISFGGILSPGRSRAFTRKSFHGCLENLYYNGVDVTELAKKHKPQILMMGNVSFSCPQPQTVPVTFLSSRSYLALPGNSGEDKVSVTFQFRTWNRAGHLLFGELQRGSGSFVLFLKDGKLKLSLFQAGQSPRNVTAGAGLNDGQWHSVSFSAKWSHMNVVVDDDTAVQPLVAVLIDSGDTYYFGALYEQSCEAHKHRGNPSGLYYIDADGSGPLGPFLVYCNMTDSAWTVVRHGGPDAVTLRGAPSGHPLSAVSFAYAAGAGQLRAAVNLAERCEQRLALRCGTARRPDSRGLVTQ

SEQ ID NO: 24421 - protein, 1673 aa, Homo sapiens
MWRAEGKWLPKTSRKSVSQSVFCGTSTYCVLNTVPPIEDDHGNSNSSHVKIFLPKKLLECLPKCSSLPKERHRWNTNEEIAAYLITFEKHEEWLTTSPKTRPQNGSMILYNRKKVKYRKDGYCWKKRKDGKTTREDHMKLKVQGVECLYGCYVHSSIIPTFHRRCYWLLQNPDIVLVHYLNVPAIEDCGKPCGPILCSINTDKKEWAKWTKEELIGQLKPMFHGIKWTCSNGNSSSGFSVEQLVQQILDSHQTKPQPRTHNCLCTGSLGAGGSVHHKCNSAKHRIISPKVEPRTGGYGSHSEVQHNDVSEGKHEHSHSKGSSREKRNGKVAKPVLLHQSSTEVSSTNQVEVPDTTQSSPVSISSGLNSDPDMVDSPVVTGVSGMAVASVMGSLSQSATVFMSEVTNEAVYTMSPTAGPNHHLLSPDASQGLVLAVSSDGHKFAFPTTGSSESLSMLPTNVSEELVLSTTLDGGRKIPETTMNFDPDCFLNNPKQGQTYGGGGLKAEMVSSNIRHSPPGERSFSFTTVLTKEIKTEDTSFEQQMAKEAYSSSAAAVAASSLTLTAGSSLLPSGGGLSPSTTLEQMDFSAIDSNKDYTSSFSQTGHSPHIHQTPSPSFFLQDASKPLPVEQNTHSSLSDSGGTFVMPTVKTEASSQTSSCSGHVETRIESTSSLHLMQFQANFQAMTAEGEVTMETSQAAEGSEVLLKSGELQACSSEHYLQPETNGVIRSAGGVPILPGNVVQGLYPVAQPSLGNASNMELSLDHFDISFSNQFSDLINDFISVEGGSSTIYGHQLVSGDSTALSQSEDGARAPFTQAEMCLPCCSPQQGSLQLSSSEGGASTMAYMHVAEVVSAASAQGTLGMLQQSGRVFMVTDYSPEWSYPEGGVKVLITGPWQEASNNYSCLFDQISVPASLIQPGVLRCYCPAHDTGLVTLQVAFNNQIISNSVVFEYKARALPTLPSSQHDWLSLDDNQFRMSILERLEQMERRMAEMTGSQQHKQASGGGSSGGGSGSGNGGSQAQCASGTGALGSCFESRVVVVCEKMMSRACWAKSKHLIHSKTFRGMTLLHLAAAQGYATLIQTLIKWRTKHADSIDLELEVDPLNVDHFSCTPLMWACALGHLEAAVVLYKWDRRAISIPDSLGRLPLGIARSRGHVKLAECLEHLQRDEQAQLGQNPRIHCPASEEPSTESWMAQWHSEAISSPEIPKGVTVIASTNPELRRPRSEPSNYYSSESHKDYPAPKKHKLNPEYFQTRQEKLLPTALSLEEPNIRKQSPSSKQSVPETLSPSEGVRDFSRELSPPTPETAAFQASGSQPVGKWNSKDLYIGVSTVQVTGNPKGTSVGKEAAPSQVRPREPMSVLMMANREVVNTELGSYRDSAENEECGQPMDDIQVNMMTLAEHIIEATPDRIKQENFVPMESSGLERTDPATISSTMSWLASYLADADCLPSAAQIRSAYNEPLTPSSNTSLSPVGSPVSEIAFEKPNLPSAADWSEFLSASTSEKVENEFAQLTLSDHEQRELYEAARLVQTAFRKYKGRPLREQQEVAAAVIQRCYRKYKQYALYKKMTQAAILIQSKFRSYYEQKKFQQSRRAAVLIQKYYRSYKKCGKRRQARRTAVIVQQKLRSSLLTKKQDQAARKIMRFLRRCRHSPLVDHRLYKRSERIEKGQGT

SEQ ID NO: 24422 - protein, 1659 aa, Homo sapiens
MWRAEGKWLPKTSRKSVSQSVFCGTSTYCVLNTVPPIEDDHGNSNSSHVKIFLPKKLLECLPKCSSLPKERHRWNTNEEIAAYLITFEKHEEWLTTSPKTRPQNGSMILYNRKKVKYRKDGYCWKKRKDGKTTREDHMKLKVQGVECLYGCYVHSSIIPTFHRRCYWLLQNPDIVLVHYLNVPAIEDCGKPCGPILCSINTDKKEWAKWTKEELIGQLKPMFHGIKWTCSNGNSSSGFSVEQLVQQILDSHQTKPQPRTHNCLCTGSLGAGGSVHHKCNSAKHRIISPKVEPRTGGYGSHSEVQHNDVSEGKHEHSHSKGSSREKRNGKVAKPVLLHQSSTEVSSTNQVEVPDTTQSSPVSISSGLNSDPDMVDSPVVTGVSGMAVASVMGSLSQSATVFMSEVTNEAVYTMSPTAGPNHHLLSPDASQGLVLAVSSDGHKFAFPTTGSSESLSMLPTNVSEELVLSTTLDGGRKIPETTMNFDPDCFLNNPKQGQTYGGGGLKAEMVSSNIRHSPPGERSFSFTTVLTKEIKTEDTSFEQQMAKEAYSSSAAAVAASSLTLTAGSSLLPSGGGLSPSTTLEQMDFSAIDSNKDYTSSFSQTGHSPHIHQTPSPSFFLQDASKPLPVEQNTHSSLSDSGGTFVMPTVKTEASSQTSSCSGHVETRIESTSSLHLMQFQANFQAMTAEGEVTMETSQAAEGSEVLLKSGELQACSSEHYLQPETNGVIRSAGGVPILPGNVVQGLYPVAQPSLGNASNMELSLDHFDISFSNQFSDLINDFISVEGGSSTIYGHQLVSGDSTALSQSEDGARAPFTQAEMCLPCCSPQQGSLQLSSSEGGASTMAYMHVAEVVSAASAQGTLGMLQQSGRVFMVTDYSPEWSYPEGGVKVLITGPWQEASNNYSCLFDQISVPASLIQPGVLRCYCPAHDTGLVTLQVAFNNQIISNSVVFEYKARALPTLPSSQHDWLSLDDNQFRMSILERLEQMERRMAEMTGSQQHKQASGGGSSGGGSGSGNGGSQAQCASGTGALGSCFESRVVVVCEKMMSRACWAKSKHLIHSKTFRGMTLLHLAAAQGYATLIQTLIKWRTKHADSIDLELEVDPLNVDHFSCTPLMWACALGHLEAAVVLYKWDRRAISIPDSLGRLPLGIARSRGHVKLAECLEHLQRDEQAQLGQNPRIHCPASEEPSTESWMAQWHSEAISSPEIPKGVTVIASTNPELRRPRSEPSNYYSSESHKDYPAPKKHKLNPEYFQTRQEKLLPTALSLEEPNIRKQSPSSKQSVPETLSPSEGVRDFSRELSPPTPETAAFQASGSQPVGKWNSKDLYIGVSTVQVTGNPKGTSVGKEAAPSQVRPREPMSVLMMANREVVNTELGSYRDSAENEECGQPMDDIQVNMMTLAEHIIEATPDRIKQENFVPMESSGLERTDPATISSTMSWLASYLADADCLPSAAQIRLSPVGSPVSEIAFEKPNLPSAADWSEFLSASTSEKVENEFAQLTLSDHEQRELYEAARLVQTAFRKYKGRPLREQQEVAAAVIQRCYRKYKQYALYKKMTQAAILIQSKFRSYYEQKKFQQSRRAAVLIQKYYRSYKKCGKRRQARRTAVIVQQKLRSSLLTKKQDQAARKIMRFLRRCRHRVKELKKAKELEDIQQHPLAM

SEQ ID NO: 24423 - protein, 80 aa, Homo sapiens
MWRAEGKWLPKTSRKSVSQSVFCGTSTYCVLNTVPPIEDDHGNSNSSHVKIFLPKKLLECLPKCSSLPKERHRWNTNERS

SEQ ID NO: 24424 - protein, 101 aa, Homo sapiens
MWRAEGKWLPKTSRKSVSQSVFCGTSTYCVLNTVPPIEDDHGNSNSSHVKIFLPKKLLECLPKCSSLPKERHRWNTNEALTTHLFMGAAKKRDPQSWSHEG

SEQ ID NO: 24425 - protein, 705 aa, Homo sapiens
MTIEDLPDFPLEGNPLFGRYPFIFSASDTPVIFSISAAPMPSDCEFSFFDPNDASCQEILFDPKTSVSELFAILRQWVPQVQQNIDIIGNEILKRGCNVNDRDGLTDMTLLHYTCKSGAHGIGDVETAVKFATQLIDLGADISLRSRWTNMNALHYAAYFDVPELIRVILKTSKPKDVDATCSDFNFGTALHIAAYNLCAGAVKCLLEQGANPAFRNDKGQIPADVVPDPVDMPLEMADAAATAKEIKQMLLDAVPLSCNISKAMLPNYDHVTGKAMLTSLGLKLGDRVVIAGQKVGTLRFCGTTEFASGQWAGIELDEPEGKNNGSVGKVQYFKCAPKYGIFAPLSKISKAKGRRKNITHTPSTKAAVPLIRSQKIDVAHVTSKVNTGLMTSKKDSASESTLSLPPGEELKTVTEKDVALLGSVSSCSSTSSLEHRQSYPKKQNAISSNKKTMSKSPSLSSRASAGLNSSATSTANNSRCEGELRLGERVLVVGQRLGTIRFFGTTNFAPGYWYGIELEKPHGKNDGSVGGVQYFSCSPRYGIFAPPSRVQRVTDSLDTLSEISSNKQNHSYPGFRRSFSTTSASSQKEINRRNAFSKSKAALRRSWSSTPTAGGIEGSVKLHEGSQVLLTSSNEMGTVRYVGPTDFASGIWLGLELRSAKGKNDGSVGDKRYFTCKPNHGVLVRPSRVTYRGINGSKLVDENC

SEQ ID NO: 24426 - protein, 601 aa, Homo sapiens
MTIEDLPDFPLEGNPLFGRYPFIFSASDTPVIFSISAAPMPSDCEFSFFDPNDASCQEILFDPKTSVSELFAILRQWVPQVQQNIDIIGNEILKRGCNVNDRDGLTDMTLLHYTCKSGAHGIGDVETAVKFATQLIDLGADISLRSRWTNMNALHYAAYFDVPELIRVILKTSKPKDVDATCSDFNFGTALHIAAYNLCAGAVKCLLEQGANPAFRNDKGQIPADVVPDPVDMPLEMADAAATAKEIKQMLLDAVPLSCNISKAMLPNYDHVTGKAMLTSLGLKLGDRVVIAGQKVGTLRFCGTTEFASGQWAGIELDEPEGKNNGSVGKVQYFKCAPKYGIFAPLSKISKAKGRRKNITHTPSTKAAVPLIRSQKIDVAHVTSKVNTGLMTSKKDSASESTLSLPPGEELKTVTEKDVALLGSVSSCSSTSSLEHRQSYPKKQNAISSNKKTMSKSPSLSSRASAGLNSSATSTANNSRCEGELRLGERVLVVGQRLGTIRFFGTTNFAPVLGYWYGIELEKPHGKNDGSVGGVQYFSCSPRYGIFAPPSRVQRVTDSLDTLSEISSNKQNHSYPGFRRSFSTTSASSQKEINRRNAFSK

SEQ ID NO: 24427 - protein, 599 aa, Homo sapiens
MTIEDLPDFPLEGNPLFGRYPFIFSASDTPVIFSISAAPMPSDCEFSFFDPNDASCQEILFDPKTSVSELFAILRQWVPQVQQNIDIIGNEILKRGCNVNDRDGLTDMTLLHYTCKSGAHGIGDVETAVKFATQLIDLGADISLRSRWTNMNALHYAAYFDVPELIRVILKTSKPKDVDATCSDFNFGTALHIAAYNLCAGAVKCLLEQGANPAFRNDKGQIPADVVPDPVDMPLEMADAAATAKEIKQMLLDAVPLSCNISKAMLPNYDHVTGKAMLTSLGLKLGDRVVIAGQKVGTLRFCGTTEFASGQWAGIELDEPEGKNNGSVGKVQYFKCAPKYGIFAPLSKISKAKGRRKNITHTPSTKAAVPLIRSQKIDVAHVTSKVNTGLMTSKKDSASESTLSLPPGEELKTVTEKDVALLGSVSSCSSTSSLEHRQSYPKKQNAISSNKKTMSKSPSLSSRASAGLNSSATSTANNSRCEGELRLGERVLVVGQRLGTIRFFGTTNFAPGYWYGIELEKPHGKNDGSVGGVQYFSCSPRYGIFAPPSRVQRVTDSLDTLSEISSNKQNHSYPGFRRSFSTTSASSQKEINRRNAFSK

SEQ ID NO: 24428 - protein, 345 aa, Homo sapiens
MNALHYAAYFDVPELIRVILKTSKPKDVDATCSDFNFGTALHIAAYNLCAGAVKCLLEQGANPAFRNDKGQIPADVVPDPVDMPLEMADAAATAKEIKQMLLDAVPLSCNISKAMLPNYDHVTGKAMLTSLGLKLGDRVVIAGQKVGTLRFCGTTEFASGQWAGIELDEPEGKNNGSVGKVQYFKCAPKYGIFAPLSKISKAKGRRKNITHTPSTKAAVPLIRSQKIDVAHVTSKVNTGLMTSKKDSASESTLSLPPGEELKTVTEKDVALLGSVSSCSSTSSLEHRQSYPKKQNAISSNKKTMSKSPSLSSRASAGIYGFFNQAFLVFFILVCLFEFLSNIYSK

SEQ ID NO: 24429 - protein, 1046 aa, Homo sapiens
MQKPSGLKPPGRGGKHSSPMGRTSTGSASSSAAVAASSKEGSPLHKQSSGPSSSPAAAAAPEKPGPKAAEVGDDFLGDFVVGERVWVNGVKPGVVQYLGETQFAPGQWAGVVLDDPVGKNDGAVGGVRYFECPALQGIFTRPSKLTRQPTAEGSGSDAHSVESLTAQNLSLHSGTATPPLTSRVIPLRESVLNSSVKTGNESGSNLSDSGSVKRGEKDLRLGDRVLVGGTKTGVVRYVGETDFAKGEWCGVELDEPLGKNDGAVAGTRYFQCPPKFGLFAPIHKVIRIGFPSTSPAKAKKTKRMAMGVSALTHSPSSSSISSVSSVASSVGGRPSRSGLLTETSSRYARKISGTTALQEALKEKQQHIEQLLAERDLERAEVAKATSHICEVEKEIALLKAQHEQYVAEAEEKLQRARLLVESVRKEKVDLSNQLEEERRKVEDLQFRVEEESITKGDLETQTQLEHARIGELEQSLLLEKAQAERLLRELADNRLTTVAEKSRVLQLEEELTLRRGEIEELQQCLLHSGPPPPDHPDAAEILRLRERLLSASKEHQRESGVLRDKYEKALKAYQAEVDKLRAANEKYAQEVAGLKDKVQQATSENMGLMDNWKSKLDSLASDHQKSLEDLKATLNSGPGAQQKEIGELKAVMEGIKMEHQLELGNLQAKHDLETAMHVKEKEALREKLQEAQEELAGLQRHWRAQLEVQASQHRLELQEAQDQRRDAELRVHELEKLDVEYRGQAQAIEFLKEQISLAEKKMLDYERLQRAEAQGKQEVESLREKLLVAENRLQAVEALCSSQHTHMIESNDISEETIRTKETVEGLQDKLNKRDKEVTALTSQTEMLRAQVSALESKCKSGEKKVDALLKEKRRLEAELETVSRKTHDASGQLVLISQELLRKERSLNELRVLLLEANRHSPGPERDLSREVHKAEWRIKEQKLKDDIRGLREKLTGLDKEKSLSDQRRYSLIDRSSAPELLRLQHQLMSTEDALRDALDQAQQVEKLMEAMRSCPDKAQTIGNSGSANGIHQQDKAQKQEDKH

SEQ ID NO: 24430 - protein, 1011 aa, Homo sapiens
MQKPSGLKPPGRGGKHSSPMGRTSTGSASSSAAVAASSKEGSPLHKQSSGPSSSPAAAAAPEKPGPKAAEVGDDFLGDFVVGERVWVNGVKPGVVQYLGETQFAPGQWAGVVLDDPVGKNDGAVGGVRYFECPALQGIFTRPSKLTRQPTAEGSGSDAHSVESLTAQNLSLHSGTATPPLTSRVIPLRESVLNSSVKTGNESGSNLSDSGSVKRGEKDLRLGDRVLVGGTKTGVVRYVGETDFAKGEWCGVELDEPLGKNDGAVAGTRYFQCPPKFGLFAPIHKVIRIGFPSTSPAKAKKTKRMAMGVSALTHSPSSSSISSVSSVASSVGGRPSRSGLLTETSSRYARKISGTTALQEALKEKQQHIEQLLAERDLERAEVAKATSHICEVEKEIALLKAQHEQYVAEAEEKLQRARLLVESVRKEKVDLSNQLEEERRKVEDLQFRVEEESITKGDLELTTVAEKSRVLQLEEELTLRRGEIEELQQCLLHSGPPPPDHPDAAEILRLRERLLSASKEHQRESGVLRDKYEKALKAYQAEVDKLRAANEKYAQEVAGLKDKVQQATSENMGLMDNWKSKLDSLASDHQKSLEDLKATLNSGPGAQQKEIGELKAVMEGIKMEHQLELGNLQAKHDLETAMHVKEKEALREKLQEAQEELAGLQRHWRAQLEVQASQHRLELQEAQDQRRDAELRVHELEKLDVEYRGQAQAIEFLKEQISLAEKKMLDYERLQRAEAQGKQEVESLREKLLVAENRLQAVEALCSSQHTHMIESNDISEETIRTKETVEGLQDKLNKRDKEVTALTSQTEMLRAQVSALESKCKSGEKKVDALLKEKRRLEAELETVSRKTHDASGQLVLISQELLRKERSLNELRVLLLEANRHSPGPERDLSREVHKAEWRIKEQKLKDDIRGLREKLTGLDKEKSLSDQRRYSLIDRSSAPELLRLQHQLMSTEDALRDALDQAQQVEKLMEAMRSCPDKAQTIGNSGSANGIHQQDKAQKQEDKH

SEQ ID NO: 24431 - protein, 112 aa, Homo sapiens
MSYPVTSQPQCATTSCYQTQLSDWHTGLTDCCNDMPVCLCGTFAPLCLACRISDDFGECCCAPYLPGGLHSIRTGMRERYHIQGSVGHDWAALTFCLPCALCQMARELKIRE

SEQ ID NO: 24432 - protein, 574 aa, Homo sapiens
MPPQLQETRMNRSIPVEVDESEPYPSQLLKPIPEYSPEEESEPPAPNIRNMAPNSLSAPTMLHNSSGDFSQAHSTLKLANHQRPVSRQVTCLRTQVLEDSEDSFCRRHPGLGKAFPSGCSAVSEPASESVVGALPAEHQFSFMEKRNQWLVSQLSAASPDTGHDSDKSDQSLPNASADSLGGSQEMVQRPQPHRNRAGLDLPTIDTGYDSQPQDVLGIRQLERPLPLTSVCYPQDLPRPLRSREFPQFEPQRYPACAQMLPPNLSPHAPWNYHYHCPGSPDHQVPYGHDYPRAAYQQVIQPALPGQPLPGASVRGLHPVQKVILNYPSPWDHEERPAQRDCSFPGLPRHQDQPHHQPPNRAGAPGESLECPAELRPQVPQPPSPAAVPRPPSNPPARGTLKTSNLPEELRKVFITYSMDTAMEVVKFVNFLLVNGFQTAIDIFEDRIRGIDIIKWMERYLRDKTVMIIVAISPKYKQDVEGAESQLDEDEHGLHTKYIHRMMQIEFIKQGSMNFRFIPVLFPNAKKEHVPTWLQNTHVYSWPKNKKNILLRLLREEEYVAPPRGPLPTLQVVPL

SEQ ID NO: 24433 - protein, 565 aa, Homo sapiens
MNRSIPVEVDESEPYPSQLLKPIPEYSPEEESEPPAPNIRNMAPNSLSAPTMLHNSSGDFSQAHSTLKLANHQRPVSRQVTCLRTQVLEDSEDSFCRRHPGLGKAFPSGCSAVSEPASESVVGALPAEHQFSFMEKRNQWLVSQLSAASPDTGHDSDKSDQSLPNASADSLGGSQEMVQRPQPHRNRAGLDLPTIDTGYDSQPQDVLGIRQLERPLPLTSVCYPQDLPRPLRSREFPQFEPQRYPACAQMLPPNLSPHAPWNYHYHCPGSPDHQVPYGHDYPRAAYQQVIQPALPGQPLPGASVRGLHPVQKVILNYPSPWDHEERPAQRDCSFPGLPRHQDQPHHQPPNRAGAPGESLECPAELRPQVPQPPSPAAVPRPPSNPPARGTLKTSNLPEELRKVFITYSMDTAMEVVKFVNFLLVNGFQTAIDIFEDRIRGIDIIKWMERYLRDKTVMIIVAISPKYKQDVEGAESQLDEDEHGLHTKYIHRMMQIEFIKQGSMNFRFIPVLFPNAKKEHVPTWLQNTHVYSWPKNKKNILLRLLREEEYVAPPRGPLPTLQVVPL

SEQ ID NO: 24434 - protein, 153 aa, Homo sapiens
MEVVKFVNFLLVNGFQTAIDIFEDRIRGIDIIKWMERYLRDKTVMIIVAISPKYKQDVEGAESQLDEDEHGLHTKYIHRMMQIEFIKQGSMNFRFIPVLFPNAKKEHVPTWLQNTHVYSWPKNKKNILLRLLREEEYVAPPRGPLPTLQVVPL

SEQ ID NO: 24435 - protein, 109 aa, Homo sapiens
MIIVAISPKYKQDVEGAESQLDEDEHGLHTKYIHRMMQIEFIKQGSMNFRFIPVLFPNAKKEHVPTWLQNTHVYSWPKNKKNILLRLLREEEYVAPPRGPLPTLQVVPL

SEQ ID NO: 24436 - protein, 564 aa, Homo sapiens
MNRSIPVEVDESEPYPSQLLKPIPEYSPEEESEPPAPNIRNMAPNSLSAPTMLHNSSGDFSQAHSTLKLANHQRPVSRQVTCLRTQVLEDSEDSFCRRHPGLGKAFPSGCSAVSEPASESVVGALPAEHQFSFMEKRNQWLVSQLSAASPDTGHDSDKSDQSLPNASADSLGGSQEMVQRPQPHRNRAGLDLPTIDTGYDSQPQDVLGIRQLERPLPLTSVCYPQDLPRPLRSREFPQFEPQRYPACAQMLPPNLSPHAPWNYHYHCPGSPDHQVPYGHDYPRAAYQQVIQPALPGQPLPGASVRGLHPVQKVILNYPSPWDHEERPAQRDCSFPGLPRHQDQPHHQPPNRAGAPGESLECPAELRPQVPQPPSPAAVPRPPSNPPARGTLKTSNLPEELRKVFITYSMDTAMEVVKFVNFLLVNGFQTAIDIFEDRIRGIDIIKWMERYLRDTVMIIVAISPKYKQDVEGAESQLDEDEHGLHTKYIHRMMQIEFIKQGSMNFRFIPVLFPNAKKEHVPTWLQNTHVYSWPKNKKNILLRLLREEEYVAPPRGPLPTLQVVPL

SEQ ID NO: 24437 - protein, 1156 aa, Homo sapiens
MASLLPLLCLCVVAAHLAGARDATPTEEPMATALGLERRSVYTGQPSPALEDWEEASEWTSWFNVDHPGGDGDFESLAAIRFYYGPARVCPRPLALEARTTDWALPSAVGERVHLNPTRGFWCLNREQPRGRRCSNYHVRFRCPLEASWGAWGPWGPCSGSCGPGRRLRRRHCPSPAGDACPGRPLEAQKCVRPRCPGCSLDTCECPDHILLGSVVTPSGQPLLGARVSLRDQPGTVATSDAHGTFRVPGVCADSRANIRAQMDGFSAGEAQAQANGSISVVTIILDKLEKPYLVKHPESRVREAGQNVTFCCKASGTPMPKKYSWFHNGTLLDRRAHGYGAHLELRGLRPDQAGIYHCKAWNEAGAVRSGTARLTVLAPGQPACDPRPREYLIKLPEDCGQPGSGPAYLDVGLCPDTRCPSLAGSSPRCGDASSRCCSVRRLERREIHCPGYVLPVKVVAECGCQKCLPPRGLVRGRVVAADSGEPLRFARILLGQEPIGFTAYQGDFTIEVPPSTQRLVVTFVDPSGEFMDAVRVLPFDPRGAGVYHEVKAMRKKAPVILHTSQSNTIPLGELEDEAPLGELVLPSGAFRRADGKPYSGPVEARVTFVDPRDLTSAASAPSDLRFVDSDGELAPLRTYGMFSVDLRAPGSAEQLQVGPVAVRVAASQIHMPGHVEALKLWSLNPETGLWEEESGFRREGSSGPRVRREERVFLVGNVEIRERRLFNLDVPERRRCFVKVRAYANDKFTPSEQVEGVVVTLVNLEPAPGFSANPRAWGRFDSAVTGPNGACLPAFCDADRPDAYTALVTATLGGEELEPAPSLPRPLPATVGVTQPYLDRLGYRRTDHDDPAFKRNGFRINLAKPRPGDPAEANGPVYPWRSLRECQGAPVTASHFRFARVEADKYEYNVVPFREGTPASWTGDLLAWWPNPQEFRACFLKVKIQGPQEYMVRSHNAGGSHPRTRGQLYGLRDARSVRDPERPGTSAACVEFKCSGMLFDQRQVDRTLVTIMPQGSCRRVAVNGLLRDYLTRHPPPVPAEDPAAFSMLAPLDPLGHNYGVYTVTDQSPRLAKEIAIGRCFDGSSDGFSREMKADAGTAVTFQCREPPAGRPSLFQRLLESPATALGDIRREMSEAAQAQARASGPLRTRRGRVRQ

SEQ ID NO: 24438 - protein, 213 aa, Homo sapiens
MVPEEEPQDREKGLWWFQLKVWSMAVVSILLLSVCFTVSSVVPHNFMYSKTVKRLSKLREYQQYHPSLTCVMEGKDIEDWSCCPTPWTSFQSSCYFISTGMQSWTKSQKNCSVMGADLVVINTREEQDFIIQNLKRNSSYFLGLSDPGGRRHWQWVDQTPYNENVTFWHSGEPNNLDERCAIINFRSSEEWGWNDIHCHVPQKSICKMKKIYI

SEQ ID NO: 24439 - protein, 182 aa, Homo sapiens
MVPEEEPQDRVPHNFMYSKTVKRLSKLREYQQYHPSLTCVMEGKDIEDWSCCPTPWTSFQSSCYFISTGMQSWTKSQKNCSVMGADLVVINTREEQDFIIQNLKRNSSYFLGLSDPGGRRHWQWVDQTPYNENVTFWHSGEPNNLDERCAIINFRSSEEWGWNDIHCHVPQKSICKMKKIYI

SEQ ID NO: 24440 - protein, 958 aa, Homo sapiens [sequence omitted]

SEQ ID NO: 24441 - protein, 1251 aa, Homo sapiens
MLGWVQRVLPQPPGTPRKTKMQEEEEVEPEPEMEAEVEPEPNPEEAETESESMPPEESFKEEEVAVADPSPQETKEAALTSTISLRAQGAEISEMNSPSRRVLTWLMKGVEKVIPQPVHSITEDPAQILGHGSTGDTGCTDEPNEALEAQDTRPGLRLLLWLEQNLERVLPQPPKSSEVWRDEPAVATGAASDPAPPGRPQEMGPKLQARETPSLPTPIPLQPKEEPKEAPAPEPQPGSQAQTSSLPPTRDPARLVAWVLHRLEMALPQPVLHGKIGEQEPDSPGICDVQTISILPGGQVEPDLVLEEVEPPWEDAHQDVSTSPQGTEVVPAYEEENKAVEKMPRELSRIEEEKEDEEEEEEEEEEEEEEEVTEVLLDSCVVSQVGVGQSEEDGTRPQSTSDQKLWEEVGEEAKKEAEEKAKEEAEEVAEEEAEKEPQDWAETKEEPEAEAEAASSGVPATKQHPEVQVEDTDADSCPLMAEENPPSTVLPPPSPAKSDTLIVPSSASGTHRKKLPSEDDEAEELKALSPAESPVVAWSDPTTPKDTDGQDRAASTASTNSAIINDRLQELVKLFKERTEKVKEKLIDPDVTSDEESPKPSPAKKAPEPAPDTKPAEAEPVEEEHYCDMLCCKFKHRPWKKYQFPQSIDPLTNLMYVLWLFFVVMAWNWNCWLIPVRWAFPYQTPDNIHHWLLMDYLCDLIYFLDITVFQTRLQFVRGGDIITDKKDMRNNYLKSRRFKMDLLSLLPLDFLYLKVGVNPLLRLPRCLKYMAFFEFNSRLESILSKAYVYRVIRTTAYLLYSLHLNSCLYYWASAYQGLGSTHWVYDGVGNSYIRCYYFAVKTLITIGGLPDPKTLFEIVFQLLNYFTGVFAFSVMIGQMRDVVGAATAGQTYYRSCMDSTVKYMNFYKIPKSVQNRVKTWYEYTWHSQGMLDESELMVQLPDKMRLDLAIDVNYNIVSKVALFQGCDRQMIFDMLKRLRSVVYLPNDYVCKKGEIGREMYIIQAGQVQVLGGPDGKSVLVTLKAGSVFGEISLLAVGGGNRRTANVVAHGFTNLFILDKKDLNEILVHYPESQKLLRKKARRMLRSNNKPKEEKSVLILPPRAGTPKLFNAALAMTGKMGGKGAKGGKLAHLRARLKELAALEAAAKQQELVEQAKSSQDVKGEEGSAAPDQHTHPKEAATDPPAPRTPPEPPGSPPSSPPPASLGRPEGEEEGPAEPEEHSVRICMSPGPEPGEQILSVKMPEEREEKAE

SEQ ID NO: 24442 - protein, 623 aa, Homo sapiens
MLCCKFKHRPWKKYQFPQSIDPLTNLMYVLWLFFVVMAWNWNCWLIPVRWAFPYQTPDNIHHWLLMDYLCDLIYFLDITVFQTRLQFVRGGDIITDKKDMRNNYLKSRRFKMDLLSLLPLDFLYLKVGVNPLLRLPRCLKYMAFFEFNSRLESILSKAYVYRVIRTTAYLLYSLHLNSCLYYWASAYQGLGSTHWVYDGVGNSYIRCYYFAVKTLITIGGLPDPKTLFEIVFQLLNYFTGVFAFSVMIGQMRDVVGAATAGQTYYRSCMDSTVKYMNFYKIPKSVQNRVKTWYEYTWHSQGMLDESELMVQLPDKMRLDLAIDVNYNIVSKVALFQGCDRQMIFDMLKRLRSVVYLPNDYVCKKGEIGREMYIIQAGQVQVLGGPDGKSVLVTLKAGSVFGEISLLAVGGGNRRTANVVAHGFTNLFILDKKDLNEILVHYPESQKLLRKKARRMLRSNNKPKEEKSVLILPPRAGTPKLFNAALAMTGKMGGKGAKGGKLAHLRARLKELAALEAAAKQQELVEQAKSSQDVKGEEGSAAPDQHTHPKEAATDPPAPRTPPEPPGSPPSSPPPASLGRPEGEEEGPAEPEEHSVRICMSPGPEPGEQILSVKMPEEREEKAE

SEQ ID NO: 24443 - protein, 299 aa, Homo sapiens
MLGWVQRVLPQPPGTPRKTKMQEEEEVEPEPEMEAEVEPEPNPEEAETESESMPPEESFKEEEVAVADPSPQETKEAALTSTISLRAQGAEISEMNSPSRRVLTWLMKGVEKVIPQPVHSITEDPAQILGHGSTGDTGCTDEPNEALEAQDTRPGLRLLLWLEQNLERVLPQPPKSSEVWRDEPAVATGAASDPAPPGRPQEMGPKLQARETPSLPTPIPLQPKEEPKEAPAPEPQPGSQAQTSSLPPTRDPARLVAWVLHRLEMALPQPVLHGKIGEQEPDSPGICDVQTRVMGAGGL

SEQ ID NO: 24444 - protein, 1245 aa, Homo sapiens
MLGWVQRVLPQPPGTPRKTKMQEEEEVEPEPEMEAEVEPEPNPEEAETESESMPPEESFKEEEVAVADPSPQETKEAALTSTISLRAQGAEISEMNSPSRRVLTWLMKGVEKVIPQPVHSITEDPAQILGHGSTGDTGCTDEPNEALEAQDTRPGLRLLLWLEQNLERVLPQPPKSSEVWRDEPAVATAPPGRPQEMGPKLQARETPSLPTPIPLQPKEEPKEAPAPEPQPGSQAQTSSLPPTRDPARLVAWVLHRLEMALPQPVLHGKIGEQEPDSPGICDVQTISILPGGQVEPDLVLEEVEPPWEDAHQDVSTSPQGTEVVPAYEEENKAVEKMPRELSRIEEEKEDEEEEEEEEEEEEEEEVTEVLLDSCVVSQVGVGQSEEDGTRPQSTSDQKLWEEVGEEAKKEAEEKAKEEAEEVAEEEAEKEPQDWAETKEEPEAEAEAASSGVPATKQHPEVQVEDTDADSCPLMAEENPPSTVLPPPSPAKSDTLIVPSSASGTHRKKLPSEDDEAEELKALSPAESPVVAWSDPTTPKDTDGQDRAASTASTNSAIINDRLQELVKLFKERTEKVKEKLIDPDVTSDEESPKPSPAKKAPEPAPDTKPAEAEPVEEEHYCDMLCCKFKHRPWKKYQFPQSIDPLTNLMYVLWLFFVVMAWNWNCWLIPVRWAFPYQTPDNIHHWLLMDYLCDLIYFLDITVFQTRLQFVRGGDIITDKKDMRNNYLKSRRFKMDLLSLLPLDFLYLKVGVNPLLRLPRCLKYMAFFEFNSRLESILSKAYVYRVIRTTAYLLYSLHLNSCLYYWASAYQGLGSTHWVYDGVGNSYIRCYYFAVKTLITIGGLPDPKTLFEIVFQLLNYFTGVFAFSVMIGQMRDVVGAATAGQTYYRSCMDSTVKYMNFYKIPKSVQNRVKTWYEYTWHSQGMLDESELMVQLPDKMRLDLAIDVNYNIVSKVALFQGCDRQMIFDMLKRLRSVVYLPNDYVCKKGEIGREMYIIQAGQVQVLGGPDGKSVLVTLKAGSVFGEISLLAVGGGNRRTANVVAHGFTNLFILDKKDLNEILVHYPESQKLLRKKARRMLRSNNKPKEEKSVLILPPRAGTPKLFNAALAMTGKMGGKGAKGGKLAHLRARLKELAALEAAAKQQELVEQAKSSQDVKGEEGSAAPDQHTHPKEAATDPPAPRTPPEPPGSPPSSPPPASLGRPEGEEEGPAEPEEHSVRICMSPGPEPGEQILSVKMPEEREEKAE

SEQ ID NO: 24445 - protein, 482 aa, Homo sapiens
MPPSPLDDRVVVALSRPVRPQDLNLCLDSSYLGSANPGSNSHPPVIATTVVSLKAANLTYMPSSSGSARSLNCGCSSASCCTVATYDKDNQAQTQAIAAGTTTTAIGTSTTCPANQMVNNNENTGSLSPSSGVGSPVSGTPKQLASIKIIYPNDLAKKMTKCSKSHLPSQGPVIIDCRPFMEYNKSHIQGAVHINCADKISRRRLQQGKITVLDLISCREGKDSFKRIFSKEIIVYDENTNEPSRVMPSQPLHIVLESLKREGKEPLVLKGGLSSFKQNHENLCDNSLQLQECREVGGGASAASSLLPQPIPTTPDIENAELTPILPFLFLGNEQDAQDLDTMQRLNIGYVINVTTHLPLYHYEKGLFNYKRLPATDSNKQNLRQYFEEAFEFIEEAHQCGKGLLIHCQAGVSRSATIVIAYLMKHTRMTMTDAYKFVKGKRPIISPNLNFMGQLLEFEEDLNNGVTPRILTPKLMGVETVV

SEQ ID NO: 24446 - protein, 140 aa, Homo sapiens
MQRLNIGYVINVTTHLPLYHYEKGLFNYKRLPATDSNKQNLRQYFEEAFEFIEEAHQCGKGLLIHCQAGVSRSATIVIAYLMKHTRMTMTDAYKFVKGKRPIISPNLNFMGQLLEFEEDLNNGVTPRILTPKLMGVETVV

SEQ ID NO: 24447 - protein, 92 aa, Homo sapiens
MTKLAQWLWGLAILGSTWVALTTGALGLELPLSCQEVLWPLPAYLLVSAGCYALGTVGYRVATFHDCEDAARELQSQIQEARADLARRGLRF

SEQ ID NO: 24448 - protein, 122 aa, Homo sapiens
MLSVGGLRLSLVRFSFLLLRGALLPSLAVTMTKLAQWLWGLAILGSTWVALTTGALGLELPLSCQEVLWPLPAYLLVSAGCYALGTVGYRVATFHDCEDAARELQSQIQEARADLARRGLRF

SEQ ID NO: 24449 - protein, 377 aa, Homo sapiens
MRNSETLERGVGGCRVFSCLGSYPGIEGAGLALLADLALGGRLLGTHMSQWHHPRSGWGRRRDFSGRSSAKKKGGNHIPERWKDYLPVGQRMPGTRFIAFKVPLQKSFEKKLAPEECFSPLDLFNKIREQNEELGLIIDLTYTQRYYKPEDLPETVPYLKIFTVGHQVPDDETIFKFKHAVNGFLKENKDNDKLIGVHCTHGLNRTGYLICRYLIDVEGVRPDDAIELFNRCRGHCLERQNYIEDLQNGPIRKNWNSSVPRSSDFEDSAHLMQPVHNKPVKQGPRYNLHQIQGHSAPRHFHTQTQSLQQSVRKFSENPHVYQRHHLPPPGPPGEDYSHRRYSWNVKPNASRAAQDRRRWYPYNYSRLSYPACWEWTQ

SEQ ID NO: 24450 - protein, 273 aa, Homo sapiens
MRNSETLERGVGGCRVFSCLGSYPGIEGAGLALLADLALGGRLLGTHMSQWHHPRSGWGRRRDFSGRSSAKKKGGNHIPERWKDYLPVGQRMPGTRFIAFKVPLQKSFEKKLAPEECFSPLDLFNKIREQNEELGLIIDLTYTQRYYKPEDLPETVPYLKIFTVGHQVPDDETIFKFKHAVNGFLKENKDNDKLIGVHCTHGLNRTGYLICRRSLALSPRLECSGTISTHSKFCFPGSRRSPASASQVAGTTGARHHARLIFCIFSRDVVSPC

SEQ ID NO: 24451 - protein, 1049 aa, Homo sapiens
MDWSFFRVVAMLFIFLVVVEVNSEFRIQVRDYNTKNGTIKWHSIRRQKREWIKFAAACREGEDNSKRNPIAKIHSDCAANQQVTYRISGVGIDQPPYGIFVINQKTGEINITSIVDREVTPFFIIYCRALNSMGQDLERPLELRVRVLDINDNPPVFSMATFAGQIEENSNANTLVMILNATDADEPNNLNSKIAFKIIRQEPSDSPMFIINRNTGEIRTMNNFLDREQYGQYALAVRGSDRDGGADGMSAECECNIKILDVNDNIPYMEQSSYTIEIQENTLNSNLLEIRVIDLDEEFSANWMAVIFFISGNEGNWFEIEMNERTNVGILKVVKPLDYEAMQSLQLSIGVRNKAEFHHSIMSQYKLKASAISVTVLNVIEGPVFRPGSKTYVVTGNMGSNDKVGDFVATDLDTGRPSTTVRYVMGNNPADLLAVDSRTGKLTLKNKVTKEQYNMLGGKYQGTILSIDDNLQRTCTGTININIQSFGNDDRTNTEPNTKITTNTGRQESTSSTNYDTSTTSTDSSQVYSSEPGNGAKDLLSDNVHFGPAGIGLLIMGFLVLGLVPFLMICCDCGGAPRSAAGFEPVPECSDGAIHSWAVEGPQPEPRDITTVIPQIPPDNANIIECIDNSGVYTNEYGGREMQDLGGGERMTGFELTEGVKTSGMPEICQEYSGTLRRNSMRECREGGLNMNFMESYFCQKAYAYADEDEGRPSNDCLLIYDIEGVGSPAGSVGCCSFIGEDLDDSFLDTLGPKFKKLADISLGKESYPDLDPSWPPQSTEPVCLPQETEPVVSGHPPISPHFGTTTVISESTYPSGPGVLHPKPILDPLGYGNVTVTESYTTSDTLKPSVHVHDNRPASNVVVTERVVGPISGADLHGMLEMPDLRDGSNVIVTERVIAPSSSLPTSLTIHHPRESSNVVVTERVIQPTSGMIGSLSMHPELANAHNVIVTERVVSGAGVTGISGTTGISGGIGSSGLVGTSMGAGSGALSGAGISGGGIGLSSLGGTASIGHMRSSSDHHFNQTIGSASPSTARSRITKYSTVQYSK

SEQ ID NO: 24452 - protein, 408 aa, Homo sapiens
MQDLGGGERMTGFELTEGVKTSGMPEICQEYSGTLRRNSMRECREGGLNMNFMESYFCQKAYAYADEDEGRPSNDCLLIYDIEGVGSPAGSVGCCSFIGEDLDDSFLDTLGPKFKKLADISLGKESYPDLDPSWPPQSTEPVCLPQETEPVVSGHPPISPHFGTTTVISESTYPSGPGVLHPKPILDPLGYGNVTVTESYTTSDTLKPSVHVHDNRPASNVVVTERVVGPISGADLHGMLEMPDLRDGSNVIVTERVIAPSSSLPTSLTIHHPRESSNVVVTERVIQPTSGMIGSLSMHPELANAHNVIVTERVVSGAGVTGISGTTGISGGIGSSGLVGTSMGAGSGALSGAGISGGGIGLSSLGGTASIGHMRSSSDHHFNQTIGSASPSTARSRITKYSTVQYSK

SEQ ID NO: 24453 - protein, 340 aa, Homo sapiens
MLEAPGPSDGCELSNPSASRVSCAGQMLEVQPGLYFGGAAAVAEPDHLREAGITAVLTVDSEEPSFKAGPGVEDLWRLFVPALDKPETDLLSHLDRCVAFIGQARAEGRAVLVHCHAGVSRSVAIITAFLMKTDQLPFEKAYEKLQILKPEAKMNEGFEWQLKLYQAMGYEVDTSSAIYKQYRLQKVTEKYPELQNLPQELFAVDPTTVSQGLKDEVLYKCRKCRRSLFRSSSILDHREGSGPIAFAHKRMTPSSMLTTGRQAQCTSYFIEPVQWMESALLGVMDGQLLCPKCSAKLGSFNWYGEQCSCGRWITPAFQIHKNRVDEMKILPVLGSQTGKI

SEQ ID NO: 24454 - protein, 1118 aa, Homo sapiens
MARSPGRAYALLLLLICFNVGSGLHLQVLSTRNENKLLPKHPHLVRQKRAWITAPVALREGEDLSKKNPIAKIHSDLAEERGLKITYKYTGKGITEPPFGIFVFNKDTGELNVTSILDREETPFFLLTGYALDARGNNVEKPLELRIKVLDINDNEPVFTQDVFVGSVEELSAAHTLVMKINATDADEPNTLNSKISYRIVSLEPAYPPVFYLNKDTGEIYTTSVTLDREEHSSYTLTVEARDGNGEVTDKPVKQAQVQIRILDVNDNIPVVENKVLEGMVEENQVNVEVTRIKVFDADEIGSDNWLANFTFASGNEGGYFHIETDAQTNEGIVTLIKEVDYEEMKNLDFSVIVANKAAFHKSIRSKYKPTPIPIKVKVKNVKEGIHFKSSVISIYVSESMDRSSKGQIIGNFQAFDEDTGLPAHARYVKLEDRDNWISVDSVTSEIKLAKLPDFESRYVQNGTYTVKIVAISEDYPRKTITGTVLINVEDINDNCPTLIEPVQTICHDAEYVNVTAEDLDGHPNSGPFSFSVIDKPPGMAEKWKIARQESTSVLLQQSEKKLGRSEIQFLISDNQGFSCPEKQVLTLTVCECLHGSGCREAQHDSYVGLGPAAIALMILAFLLLLLVPLLLLMCHCGKGAKGFTPIPGTIEMLHPWNNEGAPPEDKVVPSFLPVDQGGSLVGRNGVGGMAKEATMKGSSSASIVKGQHEMSEMDGRWEEHRSLLSGRATQFTGATGAIMTTETTKTARATGASRDMAGAQAAAVALNEEFLRNYFTDKAASYTEEDENHTAKDCLLVYSQEETESLNASIGCCSFIEGELDDRFLDDLGLKFKTLAEVCLGQKIDINKEIEQRQKPATETSMNTASHSLCEQTMVNSENTYSSGSSFPVPKSLQEANAEKVTQEIVTERSVSSRQAQKVATPLPDPMASRNVIATETSYVTGSTMPPTTVILGPSQPQSLIVTERVYAPASTLVDQPYANEGTVVVTERVIQPHGGGSNPLEGTQHLQDVPYVMVRERESFLAPSSGVQPTLAMPNIAVGQNVTVTERVLAPASTLQSSYQIPTENSMTARNTTVSGAGVPGPLPDFGLEESGHSNSTITTSSTRVTKHSTVQHSYS

SEQ ID NO: 24455 - protein, 325 aa, Homo sapiens
MVSPATRKSLPKVKAMDFITSTAILPLLFGCLGVFGLFRLLQWVRGKAYLRNAVVVITGATSGLGKECAKVFYAAGAKLVLCGRNGGALEELIRELTASHATKVQTHKPYLVTFDLTDSGAIVAAAAEILQCFGYVDILVNNAGISYRGTIMDTTVDVDKRVMETNYFGPVALTKALLPSMIKRRQGHIVAISSIQGKMSIPFRSAYAASKHATQAFFDCLRAEMEQYEIEVTVISPGYIHTNLSVNAITADGSRYGVMDTTTAQGRSPVEVAQDVLAAVGKKKKDVILADLLPSLAVYLRTLAPGLFFSLMASRARKERKSKNS

SEQ ID NO: 24456 - protein, 198 aa, Homo sapiens
MSSRGHSTLPRTLMAPRMISEGDIGGIAQITSSLFLGRGSVASNRHLLQARGITCIVNATIEIPNFNWPQFEYVKVPLADMPHAPIGLYFDTVADKIHSVSRKHGATLVHCAAGVSRSATLCIAYLMKFHNVCLLEAYNWVKARRPVIRPNVGFWRQLIDYERQLFGKSTVKMVQTPYGIVPDVYEKESRHLMPYWGI

SEQ ID NO: 24457 - protein, 268 aa, Homo sapiens
MNGTANPLLDREEHCLRLGESFEKRPRASFHTIRYDFKPASIDTSCEGELQVGKGDEVTITLPHIPGSTPPMTVFKGNKRPYQKDCVLIINHDTGEYVLEKLSSSIQVKKTRAEGSSKIQARMEQQPTRPPQTSQPPPPPPPMPFRAPTKPPVGPKTSPLKDNPSPEPQLDDIKRELRAEVDIIEQMSSSSGSSSSDSESSSGSDDDSSSSGGEDNGPASPPQPSHQQPYNSRPAVANGTSRPQGSNQLMNTLRNDLQLSESGSDSDD

SEQ ID NO: 24458 - protein, 167 aa, Homo sapiens
MKSQLHCHISLAEGSSKIQARMEQQPTRPPQTSQPPPPPPPMPFRAPTKPPVGPKTSPLKDNPSPEPQLDDIKRELRAEVDIIEQMSSSSGSSSSDSESSSGSDDDSSSSGGEDNGPASPPQPSHQQPYNSRPAVANGTSRPQGSNQLMNTLRNDLQLSESGSDSDD

SEQ ID NO: 24459 - protein, 999 aa, Homo sapiens
MMGLFPRTTGALAIFVVVILVHGELRIETKGQYDEEEMTMQQAKRRQKREWVKFAKPCREGEDNSKRNPIAKITSDYQATQKITYRISGVGIDQPPFGIFVVDKNTGDINITAIVDREETPSFLITCRALNAQGLDVEKPLILTVKILDINDNPPVFSQQIFMGEIEENSASNSLVMILNATDADEPNHLNSKIAFKIVSQEPAGTPMFLLSRNTGEVRTLTNSLDREQASSYRLVVSGADKDGEGLSTQCECNIKVKDVNDNFPMFRDSQYSARIEENILSSELLRFQVTDLDEEYTDNWLAVYFFTSGNEGNWFEIQTDPRTNEGILKVVKALDYEQLQSVKLSIAVKNKAEFHQSVISRYRVQSTPVTIQVINVREGIAFRPASKTFTVQKGISSKKLVDYILGTYQAIDEDTNKAASNVKYVMGRNDGGYLMIDSKTAEIKFVKNMNRDSTFIVNKTITAEVLAIDEYTGKTSTGTVYVRVPDFNDNCPTAVLEKDAVCSSSPSVVVSARTLNNRYTGPYTFALEDQPVKLPAVWSITTLNATSALLRAQEQIPPGVYHISLVLTDSQNNRCEMPRSLTLEVCQCDNRGICGTSYPTTSPGTRYGRPHSGRLGPAAIGLLLLGLLLLLLAPLLLLTCDCGAGSTGGVTGGFIPVPDGSEGTIHQWGIEGAHPEDKEITNICVPPVTANGADFMESSEVCTNTYARGTAVEGTSGMEMTTKLGAATESGGAAGFATGTVSGAASGFGAATGVGICSSGQSGTMRTRHSTGGTNKDYADGAISMNFLDSYFSQKAFACAEEDDGQEANDCLLIYDNEGADATGSPVGSVGCCSFIADDLDDSFLDSLGPKFKKLAEISLGVDGEGKEVQPPSKDSGYGIESCGHPIEVQQTGFVKCQTLSGSQGASALSTSGSVQPAVSIPDPLQHGNYLVTETYSASGSLVQPSTAGFDPLLTQNVIVTERVICPISSVPGNLAGPTQLRGSHTMLCTEDPCSRLI

SEQ ID NO: 24460 - protein, 312 aa, Homo sapiens
MGVMAMLMLPLLLLGISGLLFIYQEVSRLWSKSAVQNKVVVITDAISGLGKECARVFHTGGARLVLCGKNWERLENLYDALISVADPSKQTFTPKLVLLDLSDISCVPDVAKEVLDCYGCVDILINNASVKVKGPAHKISLELDKKIMDANYFGPITLTKALLPNMISRRTGQIVLVNNIQGKFGIPFRTTYAASKHAALGFFDCLRAEVEEYDVVISTVSPTFIRSYHVYPEQGNWEASIWKFFFRKLTYGVHPVEVAEEVMRTVRRKKQEVFMANPIPKAAVYVRTFFPEFFFAVVACGVKEKLNVPEEG

SEQ ID NO: 24461 - protein, 311 aa, Homo sapiens
MGVMAMLMLPLLLLGISGLLFIYQEVSRLWSKSAVQNKVVVITDAISGLGKECARVFHTGGARLVLCGKNWERLENLYDALISVADPSKTFTPKLVLLDLSDISCVPDVAKEVLDCYGCVDILINNASVKVKGPAHKISLELDKKIMDANYFGPITLTKALLPNMISRRTGQIVLVNNIQGKFGIPFRTTYAASKHAALGFFDCLRAEVEEYDVVISTVSPTFIRSYHVYPEQGNWEASIWKFFFRKLTYGVHPVEVAEEVMRTVRRKKQEVFMANPIPKAAVYVRTFFPEFFFAVVACGVKEKLNVPEEG

SEQ ID NO: 24462 - protein, 206 aa, Homo sapiens
MLPCAAGARGRGAMVVLRAGKKTFLPPLCRAFACRGCQLAPERGAERRDTAPSGVSRFCPPRKSCHDWIGPPDKYSNLRPVHFYIPENESPLEQKLRKLRQETQEWNQQFWANQNLTFSKEKEEFIHSRLKTKGLGLRTESGQKATLNAEEMADFYKEFLSKNFQKHMYYNRDWYKRNFAITFFMGKVALERIWNKLKQKQKKRSN

SEQ ID NO: 24463 - protein, 125 aa, Homo sapiens
MLPCAAGARGRGAMVVLRAGKKTFLPPLCRAFACRGCQLAPERGAERRDTAPSGVSRFCPPRKSCHDWIGPPDKYSNLRPVHFYIPENESPLEQKLRKLRQETQEWNQQFWANQNLTFSKVRKQH

SEQ ID NO: 24464 - protein, 1128 aa, Homo sapiens
MDGRTPRPQDAPARRKPKAKAPLPPAETKYTDVSSAADSVESTAFIMEQKENMIDKDVELSVVLPGDIIKSTTVHGSKPMMDLLIFLCAQYHLNPSSYTIDLLSAEQNHIKFKPNTPIGMLEVEKVILKPKMLDKKKPTPIIPEKTVRVVINFKKTQKTIVRVSPHASLQELAPIICSKCEFDPLHTLLLKDYQSQEPLDLTKSLNDLGLRELYAMDVNRESCQISQNLDIMKEKENKGFFSFFQRSKKKRDQTASAPATPLVNKHRPTFTRSNTISKPYISNTLPSDAPKKRRAPLPPMPASQSVPQDLAHIQERPASCIVKSMSVDETDKSPCEAGRVRAGSLQLSSMSAGNSSLRRTKRKAPSPPSKIPPHQSDENSRVTALQPVDGVPPDSASEANSPEELSSPAGISSDYSLEEIDEKEELSEVPKVEAENISPKSQDIPFVSTDIINTLKNDPDSALGNGSGEFSQNSMEEKQETKSTDGQEPHSVVYDTSNGKKVVDSIRNLKSLGPNQENVVQNEIIVYPENTEDNMKNGVKKTEINVEGVAKNNNIDMEVERPSNSEAHETDTAISYKENHLAASSVPDQKLNQPSAEKTKDAAIQTTPSCNSFDGKHQDHNLSDSKVEECVQTSNNNISTQHSCLSSQDSVNTSREFRSQGTLIIHSEDPLTVKDPICAHGNDDLLPPVDRIDKNSTASYLKNYPLYRQDYNPKPKPSNEITREYIPKIGMTTYKIVPPKSLEISKDWQSETIEYKDDQDMHALGKKHTHENVKETAIQTEDSAISESPEEPLPNLKPKPNLRTEHQVPSSVSSPDDAMVSPLKPAPKMTRDTGTAPFAPNLEEINNILESKFKSRASNAQAKPSSFFLQMQKRVSGHYVTSAAAKSVHAAPNPAPKELTNKEAERDMLPSPEQTLSPLSKMPHSVPQPLVEKTDDDVIGQAPAEASPPPIAPKPVTIPASQVSTQNLKTLKTFGAPRPYSSSGPSPFALAVVKRSQSFSKERTESPSASALVQPPANTEEGKTHSVNKFVDIPQLGVSDKENNSAHNEQNSQIPTPTDGPSFTVMRQSSLTFQSSDPEQMRQSLLTAIRSGEAAAKLKRVTIPSNTISVNGRSRLSHSMSPDAQDGH

SEQ ID NO: 24465 - protein, 1166 aa, Homo sapiens
MCGRAAEAAASSRTPGREMGQAVTRRLGAGARAAPRRAMDGRTPRPQDAPARRKPKAKAPLPPAETKYTDVSSAADSVESTAFIMEQKENMIDKDVELSVVLPGDIIKSTTVHGSKPMMDLLIFLCAQYHLNPSSYTIDLLSAEQNHIKFKPNTPIGMLEVEKVILKPKMLDKKKPTPIIPEKTVRVVINFKKTQKTIVRVSPHASLQELAPIICSKCEFDPLHTLLLKDYQSQEPLDLTKSLNDLGLRELYAMDVNRESCQISQNLDIMKEKENKGFFSFFQRSKKKRDQTASAPATPLVNKHRPTFTRSNTISKPYISNTLPSDAPKKRRAPLPPMPASQSVPQDLAHIQERPASCIVKSMSVDETDKSPCEAGRVRAGSLQLSSMSAGNSSLRRTKRKAPSPPSKIPPHQSDENSRVTALQPVDGVPPDSASEANSPEELSSPAGISSDYSLEEIDEKEELSEVPKVEAENISPKSQDIPFVSTDIINTLKNDPDSALGNGSGEFSQNSMEEKQETKSTDGQEPHSVVYDTSNGKKVVDSIRNLKSLGPNQENVVQNEIIVYPENTEDNMKNGVKKTEINVEGVAKNNNIDMEVERPSNSEAHETDTAISYKENHLAASSVPDQKLNQPSAEKTKDAAIQTTPSCNSFDGKHQDHNLSDSKVEECVQTSNNNISTQHSCLSSQDSVNTSREFRSQGTLIIHSEDPLTVKDPICAHGNDDLLPPVDRIDKNSTASYLKNYPLYRQDYNPKPKPSNEITREYIPKIGMTTYKIVPPKSLEISKDWQSETIEYKDDQDMHALGKKHTHENVKETAIQTEDSAISESPEEPLPNLKPKPNLRTEHQVPSSVSSPDDAMVSPLKPAPKMTRDTGTAPFAPNLEEINNILESKFKSRASNAQAKPSSFFLQMQKRVSGHYVTSAAAKSVHAAPNPAPKELTNKEAERDMLPSPEQTLSPLSKMPHSVPQPLVEKTDDDVIGQAPAEASPPPIAPKPVTIPASQVSTQNLKTLKTFGAPRPYSSSGPSPFALAVVKRSQSFSKERTESPSASALVQPPANTEEGKTHSVNKFVDIPQLGVSDKENNSAHNEQNSQIPTPTDGPSFTVMRQSSLTFQSSDPEQMRQSLLTAIRSGEAAAKLKRVTIPSNTISVNGRSRLSHSMSPDAQDGH

SEQ ID NO: 24466 - protein, 1166 aa, Homo sapiens
MDGRTPRPQDAPARRKPKAKAPLPPAETKYTDVSSAADSVESTAFIMEQKENMIDKDVELSVVLPGDIIKSTTVHGSKPMMDLLIFLCAQYHLNPSSYTIDLLSAEQNHIKFKPNTPIGMLEVEKVILKPKMLDKKKPTPIIPEKTVRVVINFKKTQKTIVRVSPHASLQELAPIICSKCEFDPLHTLLLKDYQSQEPLDLTKSLNDLGLRELYAMDVNRESCQISQNLDIMKEKENKGFFSFFQRSKKKRDQTASAPATPLVNKHRPTFTRSNTISKPYISNTLPSDAPKKRRAPLPPMPASQSVPQDLAHIQERPASCIVKSMSVDETDKSPCEAGRVRAGSLQLSSMSAGNSSLRRTKRKAPSPPSKIPPHQSDENSRVTALQPVDGVPPDSASEANSPEELSSPETFHPGLSSQEQCTAPKLMEETSVFECPGTPEAAITSLTSGISSDYSLEEIDEKEELSEVPKVEAENISPKSQDIPFVSTDIINTLKNDPDSALGNGSGEFSQNSMEEKQETKSTDGQEPHSVVYDTSNGKKVVDSIRNLKSLGPNQENVQNEIIVYPENTEDNMKNGVKKTEINVEGVAKNNNIDMEVERPSNSEAHETDTAISYKENHLAASSVPDQKLNQPSAEKTKDAAIQTTPSCNSFDGKHQDHNLSDSKVEECVQTSNNNISTQHSCLSSQDSVNTSREFRSQGTLIIHSEDPLTVKDPICAHGNDDLLPPVDRIDKNSTASYLKNYPLYRQDYNPKPKPSNEITREYIPKIGMTTYKIVPPKSLEISKDWQSETIEYKDDQDMHALGKKHTHENVKETAIQTEDSAISESPEEPLPNLKPKPNLRTEHQVPSSVSSPDDAMVSPLKPAPKMTRDTGTAPFAPNLEEINNILESKFKSRASNAQAKPSSFFLQMQKRVSGHYVTSAAAKSVHAAPNPAPKELTNKEAERDMLPSPEQTLSPLSKMPHSVPQPLVEKTDDDVIGQAPAEASPPPIAPKPVTIPASQVSTQNLKTLKTFGAPRPYSSSGPSPFALAVVKRSQSFSKERTESPSASALVQPPANTEEGKTHSVNKFVDIPQLGVSDKENNSAHNEQNSQIPTPTDGPSFTVMRQSSLTFQSSDPEQMRQSLLTAIRSGEAAAKLKRVTIPSNTISVNGRSRLSHSMSPDAQDGH

SEQ ID NO: 24467 - protein, 311 aa, Homo sapiens
MEATRRRQHLGATGGPGAQLGASFLQARHGSVSADEAARTAPFHLDLWFYFTLQNWVLDFGRPIAMLVFPLEWFPLNKPSVGDYFHMAYNVITPFLLLKLIERSPRTLPRSITYVSIIIFIMGASIHLVGDSVNHRLLFSGYQHHLSVRENPIIKNLKPETLIDSFELLYYYDEYLGHCMWYIPFFLILFMYFSGCFTASKAESLIPGPALLLVAPSGLYYWYLVTEGQIFILFIFTFFAMLALVLHQKRKRLFLDSNGLFLFSSFALTLLLVALWVAWLWNDPVLRKKYPGVIYVPEPWAFYTLHVSSRH

SEQ ID NO: 24468 - protein, 343 aa, Homo sapiens
MAAVAGKERRARGRPRPETLGAIPRREGGEAGLSRAFKPLAQAPLSCETSLRKLKFKGKKHGSVSADEAARTAPFHLDLWFYFTLQNWVLDFGRPIAMLVFPLEWFPLNKPSVGDYFHMAYNVITPFLLLKLIERSPRTLPRSITYVSIIIFIMGASIHLVGDSVNHRLLFSGYQHHLSVRENPIIKNLKPETLIDSFELLYYYDEYLGHCMWYIPFFLILFMYFSGCFTASKAESLIPGPALLLVAPSGLYYWYLVTEGQIFILFIFTFFAMLALVLHQKRKRLFLDSNGLFLFSSFALTLLLVALWVAWLWNDPVLRKKYPGVIYVPEPWAFYTLHVSSRH

SEQ ID NO: 24469 - protein, 286 aa, Homo sapiens
MNPASDGGTSESIFDLDYASWGIRSTLMVAGFVFYLGVFVVCHQLSSSLNATYRSLVAREKVFWDLAATRAVFGVQSTAAGLWALLGDPVLHADKARGQQNWCWFHITTATGFFCFENVAVHLSNLIFRTFDLFLVIHHLFAFLGFLGCLVNLQAGHYLAMTTLLLEMSTPFTCVSWMLLKAGWSESLFWKLNQWLMIHMFHCRMVLTYHMWWVCFWHWDGLVSSLYLPHLTLFLVGLALLTLIINPYWTHKKTQQLLNPVDWNFAQPEAKSRPEGNGQLLRKKRP

SEQ ID NO: 24470 - protein, 943 aa, Homo sapiens
MTQRSIAGPICNLKFVTLLVALSSELPFLGAGVQLQDNGYNGLLIAINPQVPENQNLISNIKEMITEASFYLFNATKRRVFFRNIKILIPATWKANNNSKIKQESYEKANVIVTDWYGAHGDDPYTLQYRGCGKEGKYIHFTPNFLLNDNLTAGYGSRGRVFVHEWAHLRWGVFDEYNNDKPFYINGQNQIKVTRCSSDITGIFVCEKGPCPQENCIISKLFKEGCTFIYNSTQNATASIMFMQSLSSVVEFCNASTHNQEAPNLQNQMCSLRSAWDVITDSADFHHSFPMNGTELPPPPTFSLVQAGDKVVCLVLDVSSKMAEADRLLQLQQAAEFYLMQIVEIHTFVGIASFDSKGEIRAQLHQINSNDDRKLLVSYLPTTVSAKTDISICSGLKKGFEVVEKLNGKAYGSVMILVTSGDDKLLGNCLPTVLSSGSTIHSIALGSSAAPNLEELSRLTGGLKFFVPDISNSNSMIDAFSRISSGTGDIFQQHIQLESTGENVKPHHQLKNTVTVDNTVGNDTMFLVTWQASGPPEIILFDPDGRKYYTNNFITNLTFRTASLWIPGTAKPGHWTYTLNNTHHSLQALKVTVTSRASNSAVPPATVEAFVERDSLHFPHPVMIYANVKQGFYPILNATVTATVEPETGDPVTLRLLDDGAGADVIKNDGIYSRYFFSFAANGRYSLKVHVNHSPSISTPAHSIPGSHAMYVPGYTANGNIQMNAPRKSVGRNEEERKWGFSRVSSGGSFSVLGVPAGPHPDVFPPCKIIDLEAVKVEEELTLSWTAPGEDFDQGQATSYEIRMSKSLQNIQDDFNNAILVNTSKRNPQQAGIREIFTFSPQISTNGPEHQPNGETHESHRIYVAIRAMDRNSLQSAVSNIAQAPLFIPPNSDPVPARDYLILKGVLTAMGLIGIICLIIVVTHHTLSRKKRADKKENGTKLL

SEQ ID NO: 24471 - protein, 409 aa, Homo sapiens
MEEGGSTGSAGSDSSTSGSGGAQQRELERMAEVLVTGEQLRLRLHEEKVIKDRRHHLKTYPNCFVAKELIDWLIEHKEASDRETAIKLMQKLADRGIIHHVCDEHKEFKDVKLFYRFRKDDGTFPLDNEVKAFMRGQRLYEKLMSPENTLLQPREEEGVKYERTFMASEFLDWLVQEGEATTRKEAEQLCHRLMEHGIIQHVSNKHPFVDSNLLYQFRMNFRRRRRLMELLNEKSPSSQETHDSPFCLRKQSHDNRKSTSFMSVSPSKEIKIVSAVRRSSMSSCGSSGYFSSSPTLSSSPPVLCNPKSVLKRPVTSEELLTPGAPYARKTFTIVGDAVGWGFVVRGSKPCHIQAVDPSGPAAAAGMKVCQFVVSVNGLNVLHVDYRTVSNLILTGPRTIVMEVMEELEC

SEQ ID NO: 24472 - protein, 308 aa, Homo sapiens
MEEGGSTGSAGSDSSTSGSGGAQQRELERMAEVLVTGEQLRLMSPENTLLQPREEEGVKYERTFMASEFLDWLVQEGEATTRKEAEQLCHRLMEHGIIQHVSNKHPFVDSNLLYQFRMNFRRRRRLMELLNEKSPSSQETHDSPFCLRKQSHDNRKSTSFMSVSPSKEIKIVSAVRRSSMSSCGSSGYFSSSPTLSSSPPVLCNPKSVLKRPVTSEELLTPGAPYARKTFTIVGDAVGWGFVVRGSKPCHIQAVDPSGPAAAAGMKVCQFVVSVNGLNVLHVDYRTVSNLILTGPRTIVMEVMEELEC

SEQ ID NO: 24473 - protein, 650 aa, Homo sapiens
MAEGTAEAPLENGGGGDSGAGALERGVAPIKRQYLTTKEQFHQFLEAKGQEKTCRETEVGDPAGNELAEPEAKRIRLEDGQTADGQTEEAAEPGEQLQTQKRARGQNKGRPHVKPTNYDKNRLCPSLIQESAAKCFFGDRCRFLHDVGRYLETKPADLGPRCVLFETFGRCPYGVTCRFAGAHLRPEGQNLVQEELAARGTQPPSIRNGLDKALQQQLRKREVRFERAEQALRRFSQGPTPAAAVPEGTAAEGAPRQENCGAQQVPAGPGTSTPPSSPVRTCGPLTDEDVVRLRPCEKKRLDIRGKLYLAPLTTCGNLPFRRICKRFGADVTCGEMAVCTNLLQGQMSEWALLKRHQCEDIFGVQLEGAFPDTMTKCAELLSRTVEVDFVDINVGCPIDLVYKKGGGCALMNRSTKFQQIVRGMNQVLDVPLTVKIRTGVQERVNLAHRLLPELRDWGVALVTLHGRSREQRYTKLADWQYIEECVQAASPMPLFGNGDILSFEDANRAMQTGVTGIMIARGALLKPWLFTEIKEQRHWDISSSERLDILRDFTNYGLEHWGSDTQGVEKTRRFLLEWLSFLCRYVPVGLLERLPQRINERPPYYLGRDYLETLMASQKAADWIRISEMLLGPVPPSFAFLPKHKANAYK

SEQ ID NO: 24474 - protein, 482 aa, Homo sapiens
MAEGTAEAPLENGGGGDSGAGALERGVAPIKRQYLTTKEQFHQFLEAKGQEKTCRETEVGDPAGNELAEPEAKRIRLEDGQTADGQTEEAAEPGEQLQTQKRARGQNKGRPHVKPTNYDKNRLCPSLIQESAAKCFFGDRCRFLHDVGRYLETKPADLGPRCVLFETFGRCPYGVTCRFAGAHLRPEGQNLVQEELAARGTQPPSIRNGLDKALQQQLRKREVRFERAEQALRRFSQGPTPAAAVPEGTAAEGAPRQENCGAQQVPAGPGTSTPPSSPVRTCGPLTDEDVVRLRPCEKKRLDIRGKLYLAPLTTCGNLPFRRICKRFGADVTCGEMAVCTNLLQGQMSEWALLKRHQCEDIFGVQLEGAFPDTMTKCAELLSRTVEVDFVDINVGCPIDLVYKKGGGCALMNRSTKFQQIVRGMNQVLDVPLTVKIRTGVQERVNLAHRLLPELRDWGVALVTVGLGTPRALGPRGRPRVPS

SEQ ID NO: 24475 - protein, 408 aa, Homo sapiens
MAEGTAEAPLENGGGGDSGAGALERGVAPIKRQYLTTKEQFHQFLEAKGQEKTCRETELDIRGKLYLAPLTTCGNLPFRRICKRFGADVTCGEMAVCTNLLQGQMSEWALLKRHQCEDIFGVQLEGAFPDTMTKCAELLSRTVEVDFVDINVGCPIDLVYKKGGGCALMNRSTKFQQIVRGMNQVLDVPLTVKIRTGVQERVNLAHRLLPELRDWGVALVTLHGRSREQRYTKLADWQYIEECVQAASPMPLFGNGDILSFEDANRAMQTGVTGIMIARGALLKPWLFTEIKEQRHWDISSSERLDILRDFTNYGLEHWGSDTQGVEKTRRFLLEWLSFLCRYVPVGLLERLPQRINERPPYYLGRDYLETLMASQKAADWIRISEMLLGPVPPSFAFLPKHKANAYK

SEQ ID NO: 24476 - protein, 951 aa, Homo sapiens
MAAAAAAAAAVGVRLRDCCSRGAVLLLFFSLSPRPPAAAAWLLGLRPEDTAGGRVSLEGGTLRAAEGTSFLLRVYFQPGPPATAAPVPSPTLNSGENGTGDWAPRLVFIEEPPGGGGVAPSAVPTRPPGPQRCREQSDWASDVEVLGPLRPGGVAGSALVQVRVRELRKGEAERGGAGGGGKLFSLCAWDGRAWHHHGAAGGFLLRVRPRLYGPGGDLLPPAWLRALGALLLLALSALFSGLRLSLLSLDPVELRVLRNSGSAAEQEQARRVQAVRGRGTHLLCTLLLGQAGANAALAGWLYTSLPPGFGGTGEDYSEEGIHFPWLPALVCTGAVFLGAEICPYSVCSRHGLAIASHSVCLTRLLMAAAFPVCYPLGRLLDWALRQEISTFYTREKLLETLRAADPYSDLVKEELNIIQGALELRTKVVEEVLTPLGDCFMLRSDAVLDFATVSEILRSGYTRIPVYEGDQRHNIVDILFVKDLAFVDPDDCTPLLTVTRFYNRPLHCVFNDTRLDTVLEEFKKGKSHLAIVQRVNNEGEGDPFYEVMGIVTLEDIIEEIIKSEILDETDLYTDNRKKQRVPQRERKRHDFSLFKLSDTEMRVKISPQLLLATHRFMATEVEPFKSLYLSEKILLRLLKHPNVIQELKFDEKNKKAPEHYLYQRNRPVDYFVLLLQGKVEVEVGKEGLRFENGAFTYYGVPAIMTTACSDNDVRKVGSLAGSSVFLNRSPSRCSGLNRSESPNRERSDFGGSNTQLYSSSNNLYMPDYSVHILSDVQFVKITRQQYQNALTACHMDSSPQSPDMEAFTDGDSTKAPTTRGTPQTPKDDPAITLLNNRNSLPCSRSDGLRSPSEVVYLRMEELAFTQEEMTDFEEHSTQQLTLSPAAVPTRAASDSECCNINLDTETSPCSSDFEENVGKKLLRTLSGQKRKRSPEGERTSEDNSNLTPLIT

SEQ ID NO: 24477 - protein, 901 aa, Homo sapiens
MAAAAAAAAAVGVRLRDCCSRGAVLLLFFSLSPRPPAAAAWLLGLRPEDTAGGRVSLEGGTLRAAEGTSFLLRVYFQPGPPATAAPVPSPTLNSGENGTGDWAPRLVFIEEPPGGGGVAPSAVPTRPPGPQRCREQSDWASDVEVLGPLRPGGVAGSALVQVRVRELRKGEAERGGAGGGGKLFSLCAWDGRAWHHHGAAGGFLLRVRPRLYGPGGDLLPPAWLRALGALLLLALSALFSGLRLSLLSLDPVELRVLRNSGSAAEQEQARRVQAVRGRGTHLLCTLLLGQAGANAALAGWLYTSLPPGFGGTGEDYSEEGIHFPWLPALVCTGAVFLGAEICPYSVCSRHGLAIASHSVCLTRLLMAAAFPVCYPLGRLLDWALRQEISTFYTREKLLETLRAADPYSDLVKEELNIIQGALELRTKVVEEVLTPLGDCFMLRSDAVLDFATVSEILRSGYTRIPVYEGDQRHNIVDILFVKDLAFVDPDDCTPLLTVTRFYNRPLHCVFNDTRLDTVLEEFKKGKSHLAIVQRVNNEGEGDPFYEVMGIVTLEDIIEEIIKSEILDETDLYTDNRKKQRVPQRERKRHDFSLFKLSDTEMRVKISPQLLLATHRFMATEVEPFKSLYLSEKILLRLLKHPNVIQELKFDEKNKKAPEHYLYQRNRPVDYFVLLLQGKVEVEVGKEGLRFENGAFTYYGVPAIMTTACSDNDVRKVGSLAGSSVFLNRSPSRCSGLNRSESPNRERSDFGGSNTQLYSSSNNLYMPDYSVHILSDVQFVKITRQQYQNALTACHMDSSPQSPDMEAFTDGDSTKAPTTRGTPQTPKDDPAITLLNNRNSLPSSDSECCNINLDTETSPCSSDFEENVGKKLLRTLSGQKRKRSPEGERTSEDNSNLTPLIT

SEQ ID NO: 24478 - protein, 775 aa, Homo sapiens
MAPVGGGGRPVGGPARGRLLLAAPVLLVLLWALGARGQGSPQQGTIVGMRLASCNKSCGTNPDGIIFVSEGSTVNLRLYGYSLGNISSNLISFTEVDDAETLHKSTSCLELTKDLVVQQLVNVSRGNTSGVLVVLTKFLRRSESMKLYALCTRAQPDGPWLKWTDKDSLLFMVEEPGRFLPLWLHILLITVLLVLSGIFSGLNLGLMALDPMELRIVQNCGTEKERRYARKIEPIRRKGNYLLCSLLLGNVLVNTSLTILLDNLIGSGLMAVASSTIGIVIFGEILPQALCSRHGLAVGANTILLTKFFMLLTFPLSFPISKLLDFFLGQEIRTVYNREKLMEMLKVTEPYNDLVKEELNMIQGALELRTKTVEDIMTQLQDCFMIRSDAILDFNTMSEIMESGYTRIPVFEDEQSNIVDILYVKDLAFVDPDDCTPLKTITRFYNHPVHFVFHDTKLDAMLEEFKKGKSHLAIVQKVNNEGEGDPFYEVLGLVTLEDVIEEIIKSEILDESDMYTDNRSRKRVSEKNKRDFSAFKDADNELKVKISPQLLLAAHRFLATEVSQFSPSLISEKILLRLLKYPDVIQELKFDEHNKYYARHYLYTRNKPADYFILILQGKVEVEAGKENMKFETGAFSYYGTMALTSVPSDRSPAHPTPLSRSASLSYPDRTDVSTAATLAGSSNQFGSSVLGQYISDFSVRALVDLQYIKITRQQYQNGLLASRMENSPQFPIDGCTTHMENLAEKSELPVVDETTTLLNERNSLLHKASHENAI

SEQ ID NO: 24479 - protein, 263 aa, Homo sapiens
MYTDNRSRKRVSEKNKRDFSAFKDADNELKVKISPQLLLAAHRFLATEVSQFSPSLISEKILLRLLKYPDVIQELKFDEHNKYYARHYLYTRNKPADYFILILQGKVEVEAGKENMKFETGAFSYYGTMALTSVPSDRSPAHPTPLSRSASLSYPDRTDVSTAATLAGSSNQFGSSVLGQYISDFSVRALVDLQYIKPQSWPCFSRPGDRVCLPAPPSMNSSLPHADHSAAVPERAAGFSHGEQPSVSHRRVHHPHGELGREV

SEQ ID NO: 24480 - protein, 869 aa, Homo sapiens
MAGCRGSLCCCCRWCCCCGERETRTPEELTILGETQEEEDEILPRKDYESLDYDRCINDPYLEVLETMDNKKGRRYEAVKWMVVFAIGVCTGLVGLFVDFFVRLFTQLKFGVVQTSVEECSQKGCLALSLLELLGFNLTFVFLASLLVLIEPVAAGSGIPEVKCYLNGVKVPGIVRLRTLLCKVLGVLFSVAGGLFVEKEGPMIHSGSVVGAGLPQFQSISLRKIQFNFPYFRSDRDKRDFVSAGAAAGVAAAFGAPIGGTLFSLEEGSSFWNQGLTWKVLFCSMSATFTLNFFRSGIQFGSWGSFQLPGLLNFGEFKCSDSDKKCHLWTAMDLGFFVVMGVIGGLLGATFNCLNKRLAKYRMRNVHPKPKLVRVLESLLVSLVTTVVVFVASMVLGECRQMSSSSQIGNDSFQLQVTEDVNSSIKTFFCPNDTYNDMATLFFNPQESAILQLFHQDGTFSPVTLALFFVLYFLLACWTYGISVPSGLFVPSLLCGAAFGRLVANVLKSYIGLGHIYSGTFALIGAAAFLGGVVRMTISLTVILIESTNEITYGLPIMVTLMVAKWTGDFFNKGIYDIHVGLRGVPLLEWETEVEMDKLRASDIMEPNLTYVYPHTRIQSLVSILRTTVHHAFPVVTENRGNEKEFMKGNQLISNNIKFKKSSILTRAGEQRKRSQSMKSYPSSELRNMCDEHIASEEPAEKEDLLQQMLERRYTPYPNLYPDQSPSEDWTMEERFRPLTFHGLILRSQLVTLLVRGVCYSESQSSASQPRLSYAEMAEDYPRYPDIHDLDLTLLNPRMIVDVTPYMNPSPFTVSPNTHVSQVFNLFRTMGLRHLPVVNAVGEIVGIITRHNLTYEFLQARLRQHYQTI

SEQ ID NO: 24481 - protein, 320 aa, Homo sapiens
MAGCRGSLCCCCRWCCCCGERETRTPEELTILGETQEEEDEILPRKDYESLDYDRCINDPYLEVLETMDNKKGRRYEAVKWMVVFAIGVCTGLVGLFVDFFVRLFTQLKFGVVQTSVEECSQKGCLALSLLELLGFNLTFVFLASLLVLIEPVAAGSGIPEVKCYLNGVKVPGIVRLRTLLCKVLGVLFSVAGGLFVEKEGPMIHSGSVVGAGLPQFQSISLRKIQFNFPYFRSDRYGKRQERLCISRSGCWSCCSFRGANRGYLVQSRGGFVLLEPRAHVESALLFHVCHLHPQLLPFWDSVWKLGFLPAPWIAELWRV

SEQ ID NO: 24482 - protein, 353 aa, Homo sapiens
MAGCRGSLCCCCRWCCCCGERETRTPEELTILGETQEEEDEILPRKDYESLDYDRCINDPYLEVLETMDNKKGRRYEAVKWMVVFAIGVCTGLVGLFVDFFVRLFTQLKFGVVQTSVEECSQKGCLALSLLELLGFNLTFVFLASLLVLIEPVAAGSGIPEVKCYLNGVKVPGIVRLRTLLCKVLGVLFSVAGGLFVEKEGPMIHSGSVVGAGLPQFQSISLRKIQFNFPYFRSDRDKRDFVSAGAAAGVAAAFGAPIGGTLFSLEEGSSFWNQGLTWKVLFCSMSATFTLNFFRSGIQFGSWGSFQLPGLLNFGEFKSLREPPCVSGNHRGGVCGLDGVRRMPTDVLFESNR

SEQ ID NO: 24483 - protein, 308 aa, Homo sapiens
MAGCRGSLCCCCRWCCCCGERETRTPEELTILGETQEEEDEILPRKDYESLDYDRCINDPYLEVLETMDNKKGRRYEAVKWMVVFAIGVCTGLVGLFVDFFVRLFTQLKFGVVQTSVEECSQKGCLALSLLELLGFNLTFVFLASLLVLIEPVAAGSGIPEVKCYLNGVKVPGIVRLRTLLCKVLGVLFSVAGGLFVEKEGPMIHSGSVVGAGLPQFQSISLRKIQFNFPYFRSDRSGCWSCCSFRGANRGYLVQSRGGFVLLEPRAHVESALLFHVCHLHPQLLPFWDSVWKLGFLPAPWIAELWRV

SEQ ID NO: 24484 - protein, 953 aa, Homo sapiens
MAGCRGSLCCCCRWCCCCGERETRTPEELTILGETQEEEDEILPRKDYESLDYDRCINDPYLEVLETMDNKKGRRYEAVKWMVVFAIGVCTGLVGLFVDFFVRLFTQLKFGVVQTSVEECSQKGCLALSLLELLGFNLTFVFLASLLVLIEPVAAGSGIPEVKCYLNGVKVPGIVRLRTLLCKVLGVLFSVAGGLFVEKEGPMIHSGSVVGAGLPQFQSISLRKIQFNFPYFRSDRDKRDFVSAGAAAGVAAAFGAPIGGTLFSLEEGSSFWNQGLTWKVLFCSMSATFTLNFFRSGIQFGSWGSFQLPGLLNFGEFKCSDSDKKCHLWTAMDLGFFVVMGVIGGLLGATFNCLNKRLAKYRMRNVHPKPKLVRVLESLLVSLVTTVVVFVASMVLGECRQMSSSSQIGNDSFQLQVTEDVNSSIKTFFCPNDTYNDMATLFFNPQESAILQLFHQDGTFSPVTLALFFVLYFLLACWTYGISVPSGLFVPSLLCGAAFGRLVANVLKSYIGLGHIYSGTFALIGAAAFLGGVVRMTISLTVILIESTNEITYGLPIMVTLMVAKWTGDFFNKGIYDIHVGLRGVPLLEWETEVEMDKLRASDIMEPNLTYVYPHTRIQSLVSILRTTVHHAFPVVTENRGNEKEFMKGNQLISNNIKFKKSSILTRAGEQRKRSQSMKSYPSSELRNMCDEHIASEEPAEKEDLLQQMLERRYTPYPNLYPDQSPSEDWTMEERFRPLTFHGLILRSQLVTLLVRGVCYSESQSSASQPRLSYAEMAEDYPRYPDIHDLDLTLLNPRMIVDVTPYMNPSPFTVSPNTHVSQVFNLFRTMGLRHLPVVNAVGEVSEAPALPPPLREDPLARCCLCTQASHQKRRHPTRRGECGPTLALNPARLPCTRDPFPCLPADGTSVPLAVLSSQSRASTRLCLPPEMLLFTPYHWCSLVLHLRRDLRIR

SEQ ID NO: 24485 - protein, 847 aa, Homo sapiens
MAGCRGSLCCCCRWCCCCGERETRTPEELTILGETQEEEDEILPRKDYEKGRRYEAVKWMVVFAIGVCTGLVGLFVDFFVRLFTQLKFGVVQTSVEECSQKGCLALSLLELLGFNLTFVFLASLLVLIEPVAAGSGIPEVKCYLNGVKVPGIVRLRTLLCKVLGVLFSVAGGLFVEKEGPMIHSGSVVGAGLPQFQSISLRKIQFNFPYFRSDRDKRDFVSAGAAAGVAAAFGAPIGGTLFSLEEGSSFWNQGLTWKVLFCSMSATFTLNFFRSGIQFGSWGSFQLPGLLNFGEFKCSDSDKKCHLWTAMDLGFFVVMGVIGGLLGATFNCLNKRLAKYRMRNVHPKPKLVRVLESLLVSLVTTVVVFVASMVLGECRQMSSSSQIGNDSFQLQVTEDVNSSIKTFFCPNDTYNDMATLFFNPQESAILQLFHQDGTFSPVTLALFFVLYFLLACWTYGISVPSGLFVPSLLCGAAFGRLVANVLKSYIGLGHIYSGTFALIGAAAFLGGVVRMTISLTVILIESTNEITYGLPIMVTLMVAKWTGDFFNKGIYDIHVGLRGVPLLEWETEVEMDKLRASDIMEPNLTYVYPHTRIQSLVSILRTTVHHAFPVVTENRGNEKEFMKGNQLISNNIKFKKSSILTRAGEQRKRSQSMKSYPSSELRNMCDEHIASEEPAEKEDLLQQMLERRYTPYPNLYPDQSPSEDWTMEERFRPLTFHGLILRSQLVTLLVRGVCYSESQSSASQPRLSYAEMAEDYPRYPDIHDLDLTLLNPRMIVDVTPYMNPSPFTVSPNTHVSQVFNLFRTMGLRHLPVVNAVGEIVGIITRHNLTYEFLQARLRQHYQTI

SEQ ID NO: 24486 - protein, 572 aa, Homo sapiens
MSYQGKKNIPRITSDRLLIKGGKIVNDDQSFYADIYMEDGLIKQIGENLIVPGGVKTIEAHSRMVIPGGIDVHTRFQMPDQGMTSADDFFQGTKAALAGGTTMIIDHVVPEPGTSLLAAFDQWREWADSKSCCDYSLHVDISEWHKGIQEEMEALVKDHGVNSFLVYMAFKDRFQLTDCQIYEVLSVIRDIGAIAQVHAENGDIIAEEQQRILDLGITGPEGHVLSRPEEVEAEAVNRAITIANQTNCPLYITKVMSKSSAEVIAQARKKGTVVYGEPITASLGTDGSHYWSKNWAKAAAFVTSPPLSPDPTTPDFLNSLLSCGDLQVTGSAHCTFNTAQKAVGKDNFTLIPEGTNGTEERMSVIWDKAVVTGKMDENQFVAVTSTNAAKVFNLYPRKGRIAVGSDADLVIWDPDSVKTISAKTHNSSLEYNIFEGMECRGSPLVVISQGKIVLEDGTLHVTEGSGRYIPRKPFPDFVYKRIKARSRLAELRGVPRGLYDGPVCEVSVTPKTVTPASSAKTSPAKQQAPPVRNLHQSGFSLSGAQIDDNIPRRTTQRIVAPPGGRANITSLG

SEQ ID NO: 24487 - protein, 536 aa, Homo sapiens
MEDGLIKQIGENLIVPGGVKTIEAHSRMVIPGGIDVHTRFQMPDQGMTSADDFFQGTKAALAGGTTMIIDHVVPEPGTSLLAAFDQWREWADSKSCCDYSLHVDISEWHKGIQEEMEALVKDHGVNSFLVYMAFKDRFQLTDCQIYEVLSVIRDIGAIAQVHAENGDIIAEEQQRILDLGITGPEGHVLSRPEEVEAEAVNRAITIANQTNCPLYITKVMSKSSAEVIAQARKKGTVVYGEPITASLGTDGSHYWSKNWAKAAAFVTSPPLSPDPTTPDFLNSLLSCGDLQVTGSAHCTFNTAQKAVGKDNFTLIPEGTNGTEERMSVIWDKAVVTGKMDENQFVAVTSTNAAKVFNLYPRKGRIAVGSDADLVIWDPDSVKTISAKTHNSSLEYNIFEGMECRGSPLVVISQGKIVLEDGTLHVTEGSGRYIPRKPFPDFVYKRIKARSRLAELRGVPRGLYDGPVCEVSVTPKTVTPASSAKTSPAKQQAPPVRNLHQSGFSLSGAQIDDNIPRRTTQRIVAPPGGRANITSLG

SEQ ID NO: 24488 - protein, 239 aa, Homo sapiens
MASTAVQLLGFLLSFLGMVGTLITTILPHWRRTAHVGTNILTAVSYLKGLWMECVWHSTGIYQCQIYRSLLALPQDLQAARALMVISCLLSGIACACAVIGMKCTRCAKGTPAKTTFAILGGTLFILAGLLCMVAVSWTTNDVVQNFYNPLLPSGMKFEIGQALYLGFISSSLSLIGGTLLCLSCQDEAPYRPYQAPPRATTTTANTAPAYQPPAAYKDNRAPSVTSATHSGYRLNDYV

SEQ ID NO: 24489 - protein, 905 aa, Homo sapiens [sequence omitted]

SEQ ID NO: 24490 - protein, 746 aa, Homo sapiens
MPCLGLLANLCRHNLSVQTHIKTLSNVKSFYRTLITLLAHSSLTVVVFALSILSSLTLNEEVGEKLFHARNIHQTFQLIFNILINGDGTLTRKYSVDLLMDLLKNPKIADYLTRYEHFSSCLHQVLGLLNGKDPDSSSKVLELLLAFCSVTQLRHMLTQMMFEQSPPGSATLGSHTKCLEPTVALLRWLSQPLDGSENCSVLALELFKEIFEDVIDAANCSSADRFVTLLLPTILDQLQFTEQNLDEALTRKKCERIAKAIEVLLTLCGDDTLKMHIAKILTTVKCTTLIEQQFTYGKIDLGFGTKVADSELCKLAADVILKTLDLINKLKPLVPGMEVSFYKILQDPRLITPLAFALTSDNREQVQSGLRILLEAAPLPDFPALVLGESIAANNAYRQQETEHIPRKMPWQSSNHSFPTSIKCLTPHLKDGVPGLNIEELIEKLQSGMVVKDQICDVRISDIMDVYEMKLSTLASKESRLQDLLETKALALAQADRLIAQHRCQRTQAETEARTLASMLREVERKNEELSVLLKAQQVESERAQSDIEHLFQHNRKLESVAEEHEILTKSYMELLQRNESTEKKNKDLQITCDSLNKQIETVKKLNESLKEQNEKSIAQLIEKEEQRKEVQNQLVDREHKLANLHQKTKVQEEKIKTLQKEREDKEETIDILRKELSRTEQIRKELSIKASSLEVQKAQLEGRLEEKESLVKLQQEELNKHSHMIAMIHSLSGGKINPETVNLSI

SEQ ID NO: 24491 - protein, 753 aa, Homo sapiens
MADKRKLQGEIDRCLKKVSEGVEQFEDIWQKLHNAANANQKEKYEADLKKEIKKLQRLRDQIKTWVASNEIKDKRQLIDNRKLIETQMERFKVVERETKTKAYSKEGLGLAQKVDPAQKEKEEVGQWLTNTIDTLNMQVDQFESEVESLSVQTRKKKGDKDKQDRIEGLKRHIEKHRYHVRMLETILRMLDNDSILVDAIRKIKDDVEYYVDSSQDPDFEENEFLYDDLDLEDIPQALVATSPPSHSHMEDEIFNQSSSTPTSTTSSSPIPPSPANCTTENSEDDKKRGRSTDSEVSQSPAKNGSKPVHSNQHPQSPAVPPTYPSGPPPAASALSTTPGNNGVPAPAAPPSALGPKASPAPSHNSGTPAPYAQAVAPPAPSGPSTTQPRPPSVQPSGGGGGGSGGGGSSSSSNSSAGGGAGKQNGATSYSSVVADSPAEVALSSSGGNNASSQALGPPSGPHNPPPSTSKEPSAAAPTGAGGVAPGSGNNSGGPSLLVPLPVNPPSSPTPSFSDAKAAGALLNGPPQFSTAPEIKAPEPLSSLKSMAERAAISSGIEDPVPTLHLTERDIILSSTSAPPASAQPPLQLSEVNIPLSLGVCPLGPVPLTKEQLYQQAMEEAAWHHMPHPSDSERIRQYLPRNPCPTPPYHHQMPPPHSDTVEFYQRLSTETLFFIFYYLEGTKAQYLAAKALKKQSWRFHTKYMMWFQRHEEPKTITDEFEQGTYIYFDYEKWGQRKKEGFTFEYRYLEDRDLQ

SEQ ID NO: 24492 - protein, 304 aa, Homo sapiens
MSLNPPIFLKRSEENSSKFVETKQSQTTSIASEDPLQNLCLASQEVLQKAQQSGRSKCLKCGGSRMFYCYTCYVPVENVPIEQIPLVKLPLKIDIIKHPNETDGKSTAIHAKLLAPEFVNIYTYPCIPEYEEKDHEVALIFPGPQSISIKDISFHLQKRIQNNVRGKNDDPDKPSFKRKRTEEQEFCDLNDSKCKGTTLKKIIFIDSTWNQTNKIFTDERLQGLLQVELKTRKTCFWRHQKGKPDTFLSTIEAIYYFLVDYHTDILKEKYRGQYDNLLFFYSFMYQLIKNAKCSGDKETGKLTH

SEQ ID NO: 24493 - protein, 217 aa, Homo sapiens
MLPLKIDIIKHPNETDGKSTAIHAKLLAPEFVNIYTYPCIPEYEEKDHEVALIFPGPQSISIKDISFHLQKRIQNNVRGKNDDPDKPSFKRKRTEEQEFCDLNDSKCKGTTLKKIIFIDSTWNQTNKIFTDERLQGLLQVELKTRKTCFWRHQKGKPDTFLSTIEAIYYFLVDYHTDILKEKYRGQYDNLLFFYSFMYQLIKNAKCSGDKETGKLTH

SEQ ID NO: 24494 - protein, 109 aa, Homo sapiens
MSLNPPIFLKRSEENSSKFVETKQSQTTSIASEDPLQNLCLASQEVLQKAQQSGRSKCLKCGGSRMFYCYTCYVPVENVPIEQIPLVKFSLYHLGQSMVSSASKITCIG

SEQ ID NO: 24495 - protein, 166 aa, Homo sapiens
MLPFFSNTTSKSVSVSSFQGSPATPLSFLFFFFLCRAGSSMTGCFTFFLDFIFFFAGVLGPSPMGMYSGASTLTGFFLLRFLGQLSMDLEGLEWLGRASPSWWIFFSSSPSHRVPWGSCASASAPRLPVPHPPSPLSKCPQHPRPRRTKGPGLRKLWGPGPPFFPS

SEQ ID NO: 24496 - protein, 132 aa, Homo sapiens
MKQKQEVMFQSRGRLSLYIQMSSVYSAKLGPVGGICGQKQKPSFFFFKAQSQDARPLAPAACISKIAKAGRELPGRHLPGQKTPTLAGRHVPLKIEKEAIVYYVAVMSDWDTSCLQRTIKPLSCPHLGLTPS

SEQ ID NO: 24497 - protein, 524 aa, Homo sapiens
MPQLSLSWLGLGPVAASPWLLLLLVGGSWLLARVLAWTYTFYDNCRRLQCFPQPPKQNWFWGHQGLVTPTEEGMKTLTQLVTTYPQGFKLWLGPTFPLLILCHPDIIRPITSASAAVAPKDMIFYGFLKPWLGDGLLLSGGDKWSRHRRMLTPAFHFNILKPYMKIFNKSVNIMHDKWQRLASEGSARLDMFEHISLMTLDSLQKCVFSFESNCQEKPSEYIAAILELSAFVEKRNQQILLHTDFLYYLTPDGQRFRRACHLVHDFTDAVIQERRCTLPTQGIDDFLKNKAKSKTLDFIDVLLLSKDEDGKELSDEDIRAEADTFMFEGHDTTASGLSWVLYHLAKHPEYQEQCRQEVQELLKDREPIEIEWDDLAQLPFLTMCIKESLRLHPPVPVISRCCTQDFVLPDGRVIPKGIVCLINIIGIHYNPTVWPDPEVYDPFRFDQENIKERSPLAFIPFSAGPRNCIGQAFAMAEMKVVLALTLLHFRILPTHTEPRRKPELILRAEGGLWLRVEPLGANSQ

SEQ ID NO: 24498 - protein, 520 aa, Homo sapiens
MPQLSLSSLGLWPMAASPWLLLLLVGASWLLARILAWTYTFYDNCCRLRCFPQPPKRNWFLGHLGLIHSSEEGLLYTQSLACTFGDMCCWWVGPWHAIVRIFHPTYIKPVLFAPAAIVPKDKVFYSFLKPWLGDGLLLSAGEKWSRHRRMLTPAFHFNILKPYMKIFNESVNIMHAKWQLLASEGSARLDMFEHISLMTLDSLQKCVFSFDSHCQEKPSEYIAAILELSALVTKRHQQILLYIDFLYYLTPDGQRFRRACRLVHDFTDAVIQERRRTLPSQGVDDFLQAKAKSKTLDFIDVLLLSKDEDGKKLSDEDIRAEADTFMFEGHDTTASGLSWVLYHLAKHPEYQERCRQEVQELLKDREPKEIEWDDLAQLPFLTMCIKESLRLHPPVPAVSRCCTQDIVLPDGRVIPKGIICLISVFGTHHNPAVWPDPEVYDPFRFDPKNIKERSPLAFIPFSAGPRNCIGQAFAMAEMKVVLGLTLLRFRVLPDHTEPRRKPELVLRAEGGLWLRVEPLS

SEQ ID NO: 24499 - protein, 520 aa, Homo sapiens
MPQLSLSSLGLWPMAASPWLLLLLVGASWLLARILAWTYTFYDNCCRLRCFPQPPKRNWFLGHLGLVTPTEQGMRVLTQLVATYPQGFKVWMGPIFPVIRFCHPNIIRSVINASAAIVPKDKVFYSFLKPWLGDGLLLSAGEKWSRHRRMLTPAFHFNILKPYMKIFNESVNIMHAKWQLLASEGSARLDMFEHISLMTLDSLQKCVFSFDSHCQEKPSEYIAAILELSALVTKRHQQILLYIDFLYYLTPDGQRFRRACRLVHDFTDAVIQERRRTLPSQGVDDFLQAKAKSKTLDFIDVLLLSKDEDGKKLSDEDIRAEADTFMFEGHDTTASGLSWVLYHLAKHPEYQERCRQEVQELLKDREPKEIEWDDLAQLPFLTMCIKESLRLHPPVPAVSRCCTQDIVLPDGRVIPKGIICLISVFGTHHNPAVWPDPEVYDPFRFDPKNIKERSPLAFIPFSAGPRNCIGQAFAMAEMKVVLGLTLLRFRVLPDHTEPRRKPELVLRAEGGLWLRVEPLS

SEQ ID NO: 24500 - protein, 738 aa, Homo sapiens
MEKSRMNLPKGPDTLCFDKDEFMKEDFDVDHFVSDCRKRVQLEELRDDLELYYKLLKTAMVELINKDYADFVNLSTNLVGMDKALNQLSVPLGQLREEVLSLRSSVSEGIRAVDERMSKQEDIRKKKMCVLRLIQVIRSVEKIEKILNSQSSKETSALEASSPLLTGQILERIATEFNQLQFHAVQSKGMPLLDKVRPRIAGITAMLQQSLEGLLLEGLQTSDVDIIRHCLRTYATIDKTRDAEALVGQVLVKPYIDEVIIEQFVESHPNGLQVMYNKLLEFVPHHCRLLREVTGGAISSEKGNTVPGYDFLVNSVWPQIVQGLEEKLPSLFNPGNPDAFHEKYTISMDFVRRLERQCGSQASVKRLRAHPAYHSFNKKWNLPVYFQIRFREIAGSLEAALTDVLEDAPAESPYCLLASHRTWSSLRRCWSDEMFLPLLVHRLWRLTLQILARYSVFVNELSLRPISNESPKEIKKPLVTGSKEPSITQGNTEDQGSGPSETKPVVSISRTQLVYVVADLDKLQEQLPELLEIIKPKLEMIGFKNFSSISAALEDSQSSFSACVPSLSSKIIQDLSDSCFGFLKSALEVPRLYRRTNKEVPTTASSYVDSALKPLFQLQSGHKDKLKQAIIQQWLEGTLSESTHKYYETVSDVLNSVKKMEESLKRLKQARKTTPANPVGPSGGMSDDDKIRLQLALDVEYLGEQIQKLGLQASDIKSFSALAELVAAAKDQATAEQP

SEQ ID NO: 24501 - protein, 737 aa, Homo sapiens
MEKSRMNLPKGPDTLCFDKDEFMKEDFDVDHFVSDCRKRVQLEELRDDLELYYKLLKTAMVELINKDYADFVNLSTNLVGMDKALNQLSVPLGQLREEVLSLRSSVSEGIRAVDERMSKQEDIRKKKMCVLRLIQVIRSVEKIEKILNSQSSKETSALEASSPLLTGQILERIATEFNQLQFHAVQSKGMPLLDKVRPRIAGITAMLQQSLEGLLLEGLQTSDVDIIRHCLRTYATIDKTRDAEALVGQVLVKPYIDEVIIEQFVESHPNGLQVMYNKLLEFVPHHCRLLREVTGGAISSEKGNTVPGYDFLVNSVWPQIVQGLEEKLPSLFNPGNPDAFHEKYTISMDFVRRLERQCGSQASVKRLRAHPAYHSFNKKWNLPVYFQIRFREIAGSLEAALTDVLEDAPAESPYCLLASHRTWSSLRRCWSDEMFLPLLVHRLWRLTLQILARYSVFVNELSLRPISNESPKEIKKPLVTGSKEPSITQGNTEDQGSGPSETKPVVSISRTQLVYVVADLDKLQEQLPELLEIIKPKLEMIGFKNFSSISALEDSQSSFSACVPSLSSKIIQDLSDSCFGFLKSALEVPRLYRRTNKEVPTTASSYVDSALKPLFQLQSGHKDKLKQAIIQQWLEGTLSESTHKYYETVSDVLNSVKKMEESLKRLKQARKTTPANPVGPSGGMSDDDKIRLQLALDVEYLGEQIQKLGLQASDIKSFSALAELVAAAKDQATAEQP

SEQ ID NO: 24502 - protein, 471 aa, Homo sapiens
MSEGVDLIDIYADEEFNQDPEFNNTDQIDLYDDVLTATSQPSDDRSSSTEPPPPVRQEPSPKPNNKTPAILYTYSGLRNRRAAVYVGSFSWWTTDQQLIQVIRSIGVYDVVELKFAENRANGQSKGYAEVVVASENSVHKLLELLPGKVLNGEKVDVRPATRQNLSQFEAQARKRECVRVPRGGIPPRAHSRDSSDSADGRATPSENLVPSSARVDKPPSVLPYFNRPPSALPLMGLPPPPIPPPPPLSSSFGVPPPPPGIHYQHLMPPPPRLPPHLAVPPPGAIPPALHLNPAFFPPPNATVGPPPDTYMKASAPYNHHGSRDSGPPPSTVSEAEFEDIMKRNRAISSSAISKAVSGASAGDYSDAIETLLTAIAVIKQSRVANDERCRVLISSLKDCLHGIEAKSYSVGASGSSSRKRHRSRERSPSRSRESSRRHRDLLHNEDRHDDYFQERNREHERHRDRERDRHH

SEQ ID NO: 24503 - protein, 462 aa, Homo sapiens
MSEGVDLIDIYADEEFNQDPEFNNTDQIDLYDDVLTATSQPSDDRSSSTEPPPPVRQEPSPKPNNKTPAILYTYSGLRNRRAAVYVGSFSWWTTDQQLIQVIRSIGVYDVVELKFAENRANGQSKGYAEVVVASENSVHKLLELLPGKVLNGEKVDVRPATRQNLSQFEAQARKRIPPRAHSRDSSDSADGRATPSENLVPSSARVDKPPSVLPYFNRPPSALPLMGLPPPPIPPPPPLSSSFGVPPPPPGIHYQHLMPPPPRLPPHLAVPPPGAIPPALHLNPAFFPPPNATVGPPPDTYMKASAPYNHHGSRDSGPPPSTVSEAEFEDIMKRNRAISSSAISKAVSGASAGDYSDAIETLLTAIAVIKQSRVANDERCRVLISSLKDCLHGIEAKSYSVGASGSSSRKRHRSRERSPSRSRESSRRHRDLLHNEDRHDDYFQERNREHERHRDRERDRHH

SEQ ID NO: 24504 - protein, 514 aa, Homo sapiens
MGRPESAGGGSRGPFEGGGRARRAGGIFLTLSILRTRDLPSGAMSEGVDLIDIYADEEFNQDPEFNNTDQIDLYDDVLTATSQPSDDRSSSTEPPPPVRQEPSPKPNNKTPAILYTYSGLRNRRAAVYVGSFSWWTTDQQLIQVIRSIGVYDVVELKFAENRANGQSKGYAEVVVASENSVHKLLELLPGKVLNGEKVDVRPATRQNLSQFEAQARKRECVRVPRGGIPPRAHSRDSSDSADGRATPSENLVPSSARVDKPPSVLPYFNRPPSALPLMGLPPPPIPPPPPLSSSFGVPPPPPGIHYQHLMPPPPRLPPHLAVPPPGAIPPALHLNPAFFPPPNATVGPPPDTYMKASAPYNHHGSRDSGPPPSTVSEAEFEDIMKRNRAISSSAISKAVSGASAGDYSDAIETLLTAIAVIKQSRVANDERCRVLISSLKDCLHGIEAKSYSVGASGSSSRKRHRSRERSPSRSRESSRRHRDLLHNEDRHDDYFQERNREHERHRDRERDRHH

SEQ ID NO: 24505 - protein, 593 aa, Homo sapiens
MEQPEDMASLSEFDSLAGSIPATKVEITVSCRNLLDKDMFSKSDPLCVMYTQGMENKQWREFGRTEVIDNTLNPDFVRKFIVDYFFEEKQNLRFDLYDVDSKSPDLSKHDFLGQAFCTLGEIVGSPGSRLEKPLTIGAFSLNSRTGKPMPAVSNGGVPGKKCGTIILSAEELSNCRDVATMQFCANKLDKKDFFGKSDPFLVFYRSNEDGTFTICHKTEVMKNTLNPVWQTFSIPVRALCNGDYDRTIKVEVYDWDRDGSHDFIGEFTTSYRELARGQSQFNIYEVVNPKKKMKKKKYVNSGTVTLLSFAVESECTFLDYIKGGTQINFTVAIDFTASNGNPSQSTSLHYMSPYQLNAYALALTAVGEIIQHYDSDKMFPALGFGAKLPPDGRVSHEFPLNGNQENPSCCGIDGILEAYHRSLRTVQLYGPTNFAPVVTHVARNAAAVQDGSQYSVLLIITDGVISDMAQTKEAIVNAAKLPMSIIIVGVGQAEFDAMVELDGDDVRISSRGKLAERDIVQFVPFRDYVDRTGNHVLSMARLARDVLAEIPDQLVSYMKAQGIRPRPPPAAPTHSPSQSPARTPPASPLHTHI

SEQ ID NO: 24506 - protein, 301 aa, Homo sapiens
MKKKKYVNSGTVTLLSFAVESECTFLDYIKGGTQINFTVAIDFTASNGNPSQSTSLHYMSPYQLNAYALALTAVGEIIQHYDSDKMFPALGFGAKLPPDGRVSHEFPLNGNQENPSCCGIDGILEAYHRSLRTVQLYGPTNFAPVVTHVARNAAAVQDGSQYSVLLIITDGVISDMAQTKEAIVNAAKLPMSIIIVGVGQAEFDAMVELDGDDVRISSRGKLAERDIVQFVPFRDYVDRTGNHVLSMARLARDVLAEIPDQLVSYMKAQGIRPRPPPAAPTHSPSQSPARTPPASPLHTHI

SEQ ID NO: 24507 - protein, 537 aa, Homo sapiens
MAHCVTLVQLSISCDHLIDKDIGSKSDPLCVLLQDVGGGSWAELGRTERVRNCSSPEFSKTLQLEYRFETVQKLRFGIYDIDNKTPELRDDDFLGGAECSLGQIVSSQVLTLPLMLKPGKPAGRGTITVSAQELKDNRVVTMEVEARNLDKKDFLGKSDPFLEFFRQGDGKWHLVYRSEVIKNNLNPTWKRFSVPVQHFCGGNPSTPIQVQCSDYDSDGSHDLIGTFHTSLAQLQAVPAEFECIHPEKQQKKKSYKNSGTIRVKICRVETEYSFLDYVMGGCQINFTVGVDFTGSNGDPSSPDSLHYLSPTGVNEYLMALWSVGSVVQDYDSDKLFPAFGFGAQVPPDWQVSHEFALNFNPSNPYCAGIQGIVDAYRQALPQVRLYGPTNFAPIINHVARFAAQAAHQGTASQYFMLLLLTDGAVTDVEATREAVVRASNLPMSVIIVGVGGADFEAMEQLDADGGPLHTRSGQAAARDIVQFVPYRRFQNAPREALAQTVLAEVPTQLVSYFRAQGWAPLKPLPPSAKDPAQAPQA

SEQ ID NO: 24508 - protein, 118 aa, Homo sapiens
MGSKAKKRVLLPTRPAPPTVEQILEDVRGAPAEDPVFTILAPEDPPVPFRMMEDAEAPGEQLYQQSRAYVAANQRLQQAGNVLRQRCELLQRAGEDLEREVAQMKQAALPAAEAASSG

SEQ ID NO: 24509 - protein, 161 aa, Homo sapiens
MGSKAKKRVLLPTRPAPPTVEQILEDVRGAPAEDPVFTILAPEDPPVPFRMMEDAEAPGEQLYQQSRAYVAANQRLQQAGNVPRLPPQADLSGPAGLGSAQGGLHPGFPWGSVGPRLAFTGSQPTWVLTQAPLLMLGLRFIRRLIHAELVGPTQLAPSCVT

SEQ ID NO: 24510 - protein, 253 aa, Homo sapiens
MPLLPSTVGLAGLLFWAGQAVNALIMPNATPAPAQPESTAMRLLSGLEVPRYRRKRHISVRDMNALLDYHNHIRASVYPPAANMEYMVWDKRLARAAEAWATQCIWAHGPSQLMRYVGQNLSIHSGQYRSVVDLMKSWSEEKWHYLFPAPRDCNPHCPWRCDGPTCSHYTQMVWASSNRLGCAIHTCSSISVWGNTWHRAAYLVCNYAIKGNWIGESPYKMGKPCSSCPPSYQGSCNSNMCFKGLKSNKFTWF

SEQ ID NO: 24511 - protein, 177 aa, Homo sapiens
MEALILEPSLYTVKAILILDNDGDRLFAKYYDDTYPSVKEQKAFEKNIFNKTHRTDSEIALLEGLTVVYKSSIDLYFYVIGSSYENELMLMAVLNCLFDSLSQMLRKNVEKRALLENMEGLFLAVDEIVDGGVILESDPQQVVHRVALRGEDVPLTEQTVSQVLQSAKEQIKWSLLR

SEQ ID NO: 24512 - protein, 126 aa, Homo sapiens
MMEIDFLPSTMTTPTPVSRSKRPLRRTFSTRPIGLTLMLMAVLNCLFDSLSQMLRKNVEKRALLENMEGLFLAVDEIVDGGVILESDPQQVVHRVALRGEDVPLTEQTVSQVLQSAKEQIKWSLLR

SEQ ID NO: 24513 - protein, 154 aa, Homo sapiens
MEALILYYDDTYPSVKEQKAFEKNIFNKTHRTDSEIALLEGLTVVYKSSIDLYFYVIGSSYENELMLMAVLNCLFDSLSQMLRKNVEKRALLENMEGLFLAVDEIVDGGVILESDPQQVVHRVALRGEDVPLTEQTVSQVLQSAKEQIKWSLLR

SEQ ID NO: 24514 - protein, 185 aa, Homo sapiens
MGGFRTEGMFVSLQEPSLYTVKAILILDNDGDRLFAKYYDDTYPSVKEQKAFEKNIFNKTHRTDSEIALLEGLTVVYKSSIDLYFYVIGSSYENELMLMAVLNCLFDSLSQMLRKNVEKRALLENMEGLFLAVDEIVDGGVILESDPQQVVHRVALRGEDVPLTEQTVSQVLQSAKEQIKWSLLR

SEQ ID NO: 24515 - protein, 160 aa, Homo sapiens
MEALILEPSLYTVKAILILDNDGDRLFAKYYDDTYPSVKEQKAFEKNIFNKTHRTDSEIALLEGLTVVYKSSIDLYFYVIGSSYENELMLMAVLNCLFDSLSQMLRKNVEKRALLENMEGLFLAVDEIVDGGVILESDPQQVVHRVLQSAKEQIKWSLLR

SEQ ID NO: 24516 - protein, 491 aa, Homo sapiens
MPLPVQVFNLQGAVEPMQIDVDPQEDPQNAPDVNYVVENPSLDLEQYAASYSGLMRIERLQFIADHCPTLRVEALKMALSFVQRTFNVDMYEEIHRKLSEATRSSLRELQNAPDAIPESGVEPPALDTAWVEATRKKALLKLEKLDTDLKNYKGNSIKESIRRGHDDLGDHYLDCGDLSNALKCYSRARDYCTSAKHVINMCLNVIKVSVYLQNWSHVLSYVSKAESTPEIAEQRGERDSQTQAILTKLKCAAGLAELAARKYKQAAKCLLLASFDHCDFPELLSPSNVAIYGGLCALATFDRQELQRNVISSSSFKLFLELEPQVRDIIFKFYESKYASCLKMLDEMKDNLLLDMYLAPHVRTLYTQIRNRALIQYFSPYVSADMHRMAAAFNTTVAALEDELTQLILEGLISARVDSHSKILYARDVDQRSTTFEKSLLMGKEFQRRAKAMMLRAAVLRNQIHVKSPPREGSQGELTPANSQSRMSTNM

SEQ ID NO: 24517 - protein, 487 aa, Homo sapiens
MPLPVQVFNLQGAVEPMQIDVDPQEDPQNAPDVNYVVENPSLDLEQYAASYSGLMRIERLQFIADHCPTLRVEALKMALSFVQRTFNVDMYEEIHRKLSEATRELQNAPDAIPESGVEPPALDTAWVEATRKKALLKLEKLDTDLKNYKGNSIKESIRRGHDDLGDHYLDCGDLSNALKCYSRARDYCTSAKHVINMCLNVIKVSVYLQNWSHVLSYVSKAESTPEIAEQRGERDSQTQAILTKLKCAAGLAELAARKYKQAAKCLLLASFDHCDFPELLSPSNVAIYGGLCALATFDRQELQRNVISSSSFKLFLELEPQVRDIIFKFYESKYASCLKMLDEMKDNLLLDMYLAPHVRTLYTQIRNRALIQYFSPYVSADMHRMAAAFNTTVAALEDELTQLILEGLISARVDSHSKILYARDVDQRSTTFEKSLLMGKEFQRRAKAMMLRAAVLRNQIHVKSPPREGSQGELTPANSQSRMSTNM

SEQ ID NO: 24518 - protein, 549 aa, Homo sapiens
MPLPVQVFNLQPASSVSGSGGAESQDRMRDSSAPSSASSSVTDLYCTPHSSRSDLVLPGMAGDFSLSASLSACTLLYEGAVEPMQIDVDPQEDPQNAPDAIPESGVEPPALDTAWVEATRKKALLKLEKLDTDLKNYKGNSIKESIRRGHDDLGDHYLDCGDLSNALKCYSRARDYCTSAKHVINMCLNVIKVSVYLQNWSHVLSYVSKAESTPEIAEQRGERDSQTQAILTKLKCAAGLAELAARKYKQAAKCLLLASFDHCDFPELLSPSNVAIYGGLCALATFDRQELQRNVISSSSFKLFLELEPQVRDIIFKFYESKYASCLKMLDEMKDNLLLDMYLAPHVRTLYTQIRNRALIQYFSPYVSADMHRMAAAFNTTVAALEDELTQLILEGLISARVDSHSKILYARDVDQRSTTFEKSLLMGKEFQRRAKAMMLRAAVLRNQIHVKSPPTSTDLGPPGGSVLPAAQLRGLATGCHPACVPSLGLRRQAAASCGPSWKERPAGLDPVGFCPQGADCAAPRPSGTISQTPPVPASVRCRQVGGVH

SEQ ID NO: 24519 - protein, 527 aa, Homo sapiens
MRDSSAPSSASSSVTDLYCTPHSSRSDLVLPGTAGDFSLSASLSACTLLYEGAVEPMQIDVDPQEDPQNAPDVNYVVENPSLDLEQYAASYSGLMRIERLQFIADHCPTLRVEALKMALSFVQRTFNVDMYEEIHRKLSEATRELQNAPDAIPESGVEPPALDTAWVEATRKKALLKLEKLDTDLKNYKGNSIKESIRRGHDDLGDHYLDCGDLSNALKCYSRARDYCTSAKHVINMCLNVIKVSVYLQNWSHVLSYVSKAESTPEIAEQRGERDSQTQAILTKLKCAAGLAELAARKYKQAAKCLLLASFDHCDFPELLSPSNVAIYGGLCALATFDRQELQRNVISSSSFKLFLELEPQVRDIIFKFYESKYASCLKMLDEMKDNLLLDMYLAPHVRTLYTQIRNRALIQYFSPYVSADMHRMAAAFNTTVAALEDELTQLILEGLISARVDSHSKILYARDVDQRSTTFEKSLLMGKEFQRRAKAMMLRAAVLRNQIHVKSPPREGSQGELTPANSQSRMSTNM

SEQ ID NO: 24520 - protein, 1125 aa, Homo sapiens
MWNRYFVFYLLLLSAFTSQTVSGQRKKGPKSNLLARKSDVQGSICFIDIVFIVDSSESSKIALFDKQKDFVDSLSDKIFQLTPGRSLEYDIKLAALQFSSSVQIDPPFSSWKDLQTFKQKVKSMNLIGQGTFSYYAISNATRLLKREGRKDGVKVVLLMTDGIDHPKNPDVQSISEDARISGISFITIALSTVVNEAKLRLISGDSSSEPTLLLSDPTLVDKIQDRLDILFEKKCERKICECEKGDPGDPGPPGTHGNPGIKGERGPKGNPGNAQKGEAGERGPGGIPGYKGDKGERGECGKPGIKGDKGSPGPYGPKGPRGIQGITGPPGDPGPKGFQGNKGEPGPPGPYGSPGAPGIGQQGIKGERGQEGRPGAPGPIGVGEPGQPGPRGPEGVPGERGLPGEGFPGPKGEKGSEGPTGPQGLQGLSIKGEKGDIGPVGPQGPMGIPGIGSQGEQGIQGPIGPPGPQGPAGQGLPGSKGEVGQMGPTGPRGPVGIGVQGPKGEPGSIGLPGQPGVPGEDGAAGKKGEAGLPGARGPEGPPGKGQPGPKGDEGKKGSKGNQGQRGLPGPEGPKGEPGIMGPFGMPGTSIPGPPGPKGDRGGPGIPGFKGEPGLSIRGPKGVQGPRGPVGAPGLKGDGYPGVPGPRGLPGPPGPMGLRGVGDTGAKGEPGVRGPPGPSGPRGVGTQGPKGDTGQKGLPGPPGPPGYGSQGIKGEQGPQGFPGPKGTMGHGLPGQKGEHGERGDVGKKGDKGEIGEPGSPGKQGLQGPKGDLGLTKEEIIKLITEICGCGPKCKETPLELVFVIDSSESVGPENFQIIKNFVKTMADRVALDLATARIGIINYSHKVEKVANLKQFSSKDDFKLAVDNMQYLGEGTYTATALQAANDMFEDARPGVKKVALVITDGQTDSRDKEKLTEVVKNASDTNVEIFVIGVVKKNDPNFEIFHKEMNLIATDPEHVYQFDDFFTLQDTLKQKLFQKICEDFDSYLVQIFGSSSPQPGFGMSGEELSESTPEPQKEISESLSVTRDQDEDDKAPEPTWADDLPATTSSEATTTPRPLLSTPVDGAEDPRCLEALKPGNCGEYVVRWYYDKQVNSCARFWFSGCNGSGNRFNSEKECQETCIQG

SEQ ID NO: 24521 - protein, 713 aa, Homo sapiens
MWNRYFVFYLLLLSAFTSQTVSGQRKKGPKSNLLARKSDVQGSICFIDIVFIVDSSESSKIALFDKQKDFVDSLSDKIFQLTPGRSLEYDIKLAALQFSSSVQIDPPFSSWKDLQTFKQKVKSMNLIGQGTFSYYAISNATRLLKREGRKDGVKVVLLMTDGIDHPKNPDVQSISEDARISGISFITIALSTVVNEAKLRLISGDSSSEPTLLLSDPTLVDKIQDRLDILFEKKCERKICECEKGDPGDPGPPGTHGNPGIKGERGPKGNPGNAQKGEAGERGPGGIPGYKGDKGERGECGKPGIKGDKGSPGPYGPKGPRGIQGITGPPGDPGPKGFQGNKGEPGPPGPYGSPGAPGIGQQGIKGERGQEGRPGAPGPIGVGEPGQPGPRGPEGVPGERGLPGEGFPGPKGEKGSEGPTGPQGLQGLSIKGEKGDIGPVGPQGPMGIPGIGSQGEQGIQGPIGPPGPQGPAGQGLPGSKGEVGQMGPTGPRGPVGIGVQGPKGEPGSIGLPGQPGVPGEDGAAGKKGEAGLPGARGPEGPPGKGQPGPKGDEGKKGSKGNQGQRGLPGPEGPKGEPGIMGPFGMPGTSIPGPPGPKGDRGGPGIPGFKGEPGLSIRGPKGVQGPRGPVGAPGLKGDGYPGVPGPRGLPGPPGPMGLRGVGDTGAKTLNTSHGLEDPSCPDCSFCHFSLAADIQPKWPALLQLIPASGTRQDG

SEQ ID NO: 24522 - protein, 334 aa, Homo sapiens
MWNRYFVFYLLLLSAFTSQTVSGQRKKGPKSNLLARKSDVQGSICFIDIVFIVDSSESSKIALFDKQKDFVDSLSDKIFQLTPGRSLEYDIKLAALQFSSSVQIDPPFSSWKDLQTFKQKVKSMNLIGQGTFSYYAISNATRLLKREGRKDGVKVVLLMTDGIDHPKNPDVQSISEDARISGISFITIALSTVVNEAKLRLISGDSSSEPTLLLSDPTLVDKIQDRLDILFEKKCERKICECEKGDPGDPGPPGTHGNPGIKGERGPKGNPGNAQKGEAGERGPGGIPGYKGDKQYSREDREVEHNNEKYVACLLPSPALLQQSSLTHHGTCSH

SEQ ID NO: 24523 - protein, 2442 aa, Homo sapiens
METRSPGLNNMKPQSLQLVLEEQVLALQQQMAENQAASWRKLKNSQEAQQRQATLVRKLQAKVLQYRSWCQELEKRLEATGGPIPQRWENVEEPNLDELLVRLEEEQQRCESLAEVNTQLRLHMEKADVVNKALREDVEKLTVDWSRARDELMRKESQWQMEQEFFKGYLKGEHGRLLSLWREVVTFRRHFLEMKSATDRDLMELKAEHVRLSGSLLTCCLRLTVGAQSREPNGSGRMDGREPAQLLLLLAKTQELEKEAHERSQELIQLKSQGDLEKAELQDRVTELSALLTQSQKQNEDYEKMIKALRETVEILETNHTELMEHEASLSRNAQEEKLSLQQVIKDITQVMVEEGDNIAQGSGHENSLELDSSIFSQFDYQDADKALTLVRSVLTRRRQAVQDLRQQLAGCQEAVNLLQQQHDQWEEEGKALRQRLQKLTGERDTLAGQTVDLQGEVDSLSKERELLQKAREELRQQLEVLEQEAWRLRRVNVELQLQGDSAQGQKEEQQEELHLAVRERERLQEMLMGLEAKQSESLSELITLREALESSHLEGELLRQEQTEVTAALARAEQSIAELSSSENTLKTEVADLRAAAVKLSALNEALALDKVGLNQQLLQLEEENQSVCSRMEAAEQARNALQVDLAEAEKRREALWEKNTHLEAQLQKAEEAGAELQADLRDIQEEKEEIQKKLSESRHQQEAATTQLEQLHQEAKRQEEVLARAVQEKEALVREKAALEVRLQAVERDRQDLAEQLQGLSSAKELLESSLFEAQQQNSVIEVTKGQLEVQIQTVTQAKEVIQGEVRCLKLELDTERSQAEQERDAAARQLAQAEQEGKTALEQQKAAHEKEVNQLREKWEKERSWHQQELAKALESLEREKMELEMRLKEQQTEMEAIQAQREEERTQAESALCQMQLETEKERVSLLETLLQTQKELADASQQLERLRQDMKVQKLKEQETTGILQTQLQEAQRELKEAARQHRDDLAALQEESSSLLQDKMDLQKQVEDLKSQLVAQDDSQRLVEQEVQEKLRETQEYNRIQKELEREKASLTLSLMEKEQRLLVLQEADSIRQQELSALRQDMQEAQGEQKELSAQMELLRQEVKEKEADFLAQEAQLLEELEASHITEQQLRASLWAQEAKAAQLQLRLRSTESQLEALAAEQQPGNQAQAQAQLASLYSALQQALGSVCESRPELSGGGDSAPSVWGLEPDQNGARSLFKRGPLLTALSAEAVASALHKLHQDLWKTQQTRDVLRDQVQKLEERLTDTEAEKSQVHTELQDLQRQLSQNQEEKSKWEGKQNSLESELMELHETMASLQSRLRRAELQRMEAQGERELLQAAKENLTAQVEHLQAAVVEARAQASAAGILEEDLRTARSALKLKNEEVESERERAQALQEQGELKVAQGKALQENLALLTQTLAEREEEVETLRGQIQELEKQREMQKAALELLSLDLKKRNQEVDLQQEQIQELEKCRSVLEHLPMAVQEREQKLTVQREQIRELEKDRETQRNVLEHQLLELEKKDQMIESQRGQVQDLKKQLVTLECLALELEENHHKMECQQKLIKELEGQRETQRVALTHLTLDLEERSQELQAQSSQIHDLESHSTVLARELQERDQEVKSQREQIEELQRQKEHLTQDLERRDQELMLQKERIQVLEDQRTRQTKILEEDLEQIKLSLRERGRELTTQRQLMQERAEEGKGPSKAQRGSLEHMKLILRDKEKEVECQQEHIHELQELKDQLEQQLQGLHRKVGETSLLLSQREQEIVVLQQQLQEAREQGELKEQSLQSQLDEAQRALAQRDQELEALQQEQQQAQGQEERVKEKADALQGALEQAHMTLKERHGELQDHKEQARRLEEELAVEGRRVQALEEVLGDLRAESREQEKALLALQQQCAEQAQEHEVETRALQDSWLQAQAVLKERDQELEALRAESQSSRHQEEAARARAEALQEALGKAHAALQGKEQHLLEQAELSRSLEASTATLQASLDACQAHSRQLEEALRIQEGEIQDQDLRYQEDVQQLQQALAQRDEELRHQQEREQLLEKSLAQRVQENMIQEKQNLGQEREEEEIRGLHQSVRELQLTLAQKEQEILELRETQQRNNLEALPHSHKTSPMEEQSLKLDSLEPRLQRELERLQAALRQTEAREIEWREKAQDLALSLAQTKASVSSLQEVAMFLQASVLERDSEQQRLQDELELTRRALEKERLHSPGATSTAELGSRGEQGVQLGEVSGVEAEPSPDGMEKQSWRQRLEHLQQAVARLEIDRSRLQRHNVQLRSTLEQVERERRKLKREAMRAAQAGSLEISKATASSPTQQDGRGQKNSDAKCVAELQKEVVLLQAQLTLERKQKQDYITRSAQTSRELAGLHHSLSHSLLAVAQAPEATVLEAETRRLDESLTQSLTSPGPVLLHPSPSTTQAASR

SEQ ID NO: 24524 - protein, 2386 aa, Homo sapiens
METRSPGLNNMKPQSLQLVLEEQVLALQQQMAENQAASWRKLKNSQEAQQRQATLVRKLQAKVLQYRSWCQELEKRLEATGGPIPQRWENVEEPNLDELLVRLEEEQQRCESLAEVNTQLRLHMEKADVVNKALREDVEKLTVDWSRARDELMRKESQWQMEQEFFKGYLKGEHGRLLSLWREVVTFRRHFLEMKSATDRDLMELKAEHVRLSGSLLTCCLRLTVGAQSREPNGSGRMDGREPAQLLLLLAKTQELEKEAHERSQELIQLKSQGDLEKAELQDRVTELSALLTQSQKQNEDYEKMIKALRETVEILETNHTELMEHEASLSRNAQEEKLSLQQVIKDITQVMVEEGDNIAQGSGHENSLELDSSIFSQFDYQDADKALTLVRSVLTRRRQAVQDLRQQLAGCQEAVNLLQQQHDQWEEEGKALRQRLQKLTGERDTLAGQTVDLQGEVDSLSKERELLQKAREELRQQLEVLEQEAWRLRRVNVELQLQGDSAQGQKEEQQEELHLAVRERERLQEMLMGLEAKQSESLSELITLREALESSHLEGELLRQEQTEVTAALARAEQSIAELSSSENTLKTEVADLRAAAVKLSALNEALALDKVGLNQQLLQLEEENQSVCSRMEAAEQARNALQVDLAEAEKRREALWEKNTHLEAQLQKAEEAGAELQADLRDIQEEKEEIQKKLSESRHQQEAATTQLEQLHQEAKRQEEVLARAVQEKEALVREKAALEVRLQAVERDRQDLAEQLQGLSSAKELLESSLFEAQQQNSVIEVTKGQLEVQIQTVTQAKEVIQGEVRCLKLELDTERSQAEQERDAAARQLAQAEQEGKTALEQQKAAHEKEVNQLREKWMQLETEKERVSLLETLLQTQKELADASQQLERLRQDMKVQKLKEQETTGILQTQLQEAQRELKEAARQHRDDLAALQEESSSLLQDKMDLQKQVEDLKSQLVAQDDSQRLVEQEVQEKLRETQEYNRIQKELEREKASLTLSLMEKEQRLLVLQEADSIRQQELSALRQDMQEAQGEQKELSAQMELLRQEVKEKEADFLAQEAQLLEELEASHITEQQLRASLWAQEAKAAQLQLRLRSTESQLEALAAEQQPGNQAQAQAQLASLYSALQQALGSVCESRPELSGGGDSAPSVWGLEPDQNGARSLFKRGPLLTALSAEAVASALHKLHQDLWKTQQTRDVLRDQVQKLEERLTDTEAEKSQVHTELQDLQRQLSQNQEEKSKWEGKQNSLESELMELHETMASLQSRLRRAELQRMEAQGERELLQAAKENLTAQVEHLQAAVVEARAQASAAGILEEDLRTARSALKLKNEEVESERERAQALQEQGELKVAQGKALQENLALLTQTLAEREEEVETLRGQIQELEKQREMQKAALELLSLDLKKRNQEVDLQQEQIQELEKCRSVLEHLPMAVQEREQKLTVQREQIRELEKDRETQRNVLEHQLLELEKKDQMIESQRGQVQDLKKQLVTLECLALELEENHHKMECQQKLIKELEGQRETQRVALTHLTLDLEERSQELQAQSSQIHDLESHSTVLARELQERDQEVKSQREQIEELQRQKEHLTQDLERRDQELMLQKERIQVLEDQRTRQTKILEEDLEQIKLSLRERGRELTTQRQLMQERAEEGKGPSKAQRGSLEHMKLILRDKEKEVECQQEHIHELQELKDQLEQQLQGLHRKVGETSLLLSQREQEIVVLQQQLQEAREQGELKEQSLQSQLDEAQRALAQRDQELEALQQEQQQAQGQEERVKEKADALQGALEQAHMTLKERHGELQDHKEQARRLEEELAVEGRRVQALEEVLGDLRAESREQEKALLALQQQCAEQAQEHEVETRALQDSWLQAQAVLKERDQELEALRAESQSSRHQEEAARARAEALQEALGKAHAALQGKEQHLLEQAELSRSLEASTATLQASLDACQAHSRQLEEALRIQEGEIQDQDLRYQEDVQQLQQALAQRDEELRHQQEREQLLEKSLAQRVQENMIQEKQNLGQEREEEEIRGLHQSVRELQLTLAQKEQEILELRETQQRNNLEALPHSHKTSPMEEQSLKLDSLEPRLQRELERLQAALRQTEAREIEWREKAQDLALSLAQTKASVSSLQEVAMFLQASVLERDSEQQRLQDELELTRRALEKERLHSPGATSTAELGSRGEQGVQLGEVSGVEAEPSPDGMEKQSWRQRLEHLQQAVARLEIDRSRLQRHNVQLRSTLEQVERERRKLKREAMRAAQAGSLEISKATASSPTQQDGRGQKNSDAKCVAELQKEVVLLQAQLTLERKQKQDYITRSAQTSRELAGLHHSLSHSLLAVAQAPEATVLEAETRRLDESLTQSLTSPGPVLLHPSPSTTQAASR

SEQ ID NO: 24525 - protein, 198 aa, Homo sapiens
MAALTAEHFAALQSLLKASSKDVVRQLCQESFSSSALGLKKLLDVTCSSLSVTQEEAEELLQALHRLTRLVAFRDLSSAEAILALFPENFHQNLKNLLTKIILEHVSTWRTEAQANQISLPRLVDLDWRVDIKTSSDSISRMAVPTCLLQMKIQEDPSLCGDKPSISAVTVELSKETLDTMLDGLGRIRDQLSAVASK

SEQ ID NO: 24526 - protein, 156 aa, Homo sapiens
MAALTAEHFAALQSLLKLLQALHRLTRLVAFRDLSSAEAILALFPENFHQNLKNLLTKIILEHVSTWRTEAQANQISLPRLVDLDWRVDIKTSSDSISRMAVPTCLLQMKIQEDPSLCGDKPSISAVTVELSKETLDTMLDGLGRIRDQLSAVASK

SEQ ID NO: 24527 - protein, 371 aa, Homo sapiens
MLGSRAAGFARGLRALALAWLPGWRGRSFALARAAGAPHGGDLQPPACPEPRGRQLSLSAAAVVDSAPRPLQPYLRLMRLDKPIGTWLLYLPCTWSIGLAAEPGCFPDWYMLSLFGTGAILMRGAGCTINDMWDQDYDKKVTRTANRPIAAGDISTFQSFVFLGGQLTLALGVLLCLNYYSIALGAGSLLLVITYPLMKRISYWPQLALGLTFNWGALLGWSAIKGSCDPSVCLPLYFSGVMWTLIYDTIYAHQDKRDDVLIGLKSTALRFGENTKPWLSGFSVAMLGALSLVGVNSGQTAPYYAALGAVGAHLTHQIYTLDIHRPEDCWNKFISNRTLGLIVFLGIVLGNLWKEKKTDKTKKGIENKIEN

SEQ ID NO: 24528 - protein, 328 aa, Homo sapiens [sequence omitted]

SEQ ID NO: 24529 - protein, 262 aa, Homo sapiens
MAAASAGATRLLLLLLMAVAAPSRARGSGCRAGTGARGAGAEGREGEACGTVGLLLEHSFEIDDSANFRKRGSLLWNQQDGTLSLSQRQLSEEERGRLRDVAALNGLYRVRIPRRPGALDGLEAGGYVSSFVPACSLVESHLSDQLTLHVDVAGNVVGVSVVTHPGGCRGHEVEDVDLELFNTSVQLQPPTTAPGPETAAFIERLEMEQAQKAKNPQEQKSFFAKYWMYIIPVVLFLMMSGAPDTGGQGGGGGGGGGGGSGR

SEQ ID NO: 24530 - protein, 254 aa, Homo sapiens
MAAASAGATRLLLLLLMAVAAPSRARGSGCRAGTGARGAGAEGREGEACGTVGLLLEHSFEIDDSANFRKRGSLLWNQQDGTLSLSQRQLSEEERGRLRDVAALNGLYRVRIPRRPGALDGLEAGGYVSSFVPACSLVESHLSDQLTLHVDVAGNVVGVSVVTHPGGCRGHEVEDVDLELFNTSVQLQPPTTAPGPETAAFIERLEMEQAQKAKNPQEQKSFFAKYWHIILGGAVLLTALRPAAPGPAPPPQEA

SEQ ID NO: 24531 - protein, 1120 aa, Homo sapiens
MVLNSLDKMIQLQKNTANIRNICVLAHVDHGKTTLADCLISSNGIISSRLAGKLRYMDSREDEQIRGITMKSSAISLHYATGNEEYLINLIDSPGHVDFSSEVSTAVRICDGCIIVVDAVEGVCPQTQAVLRQAWLENIRPVLVINKIDRLIVELKFTPQEAYSHLKNILEQINALTGTLFTSKVLEERAERETESQVNPNSEQGEQVYDWSTGLEDTDDSHLYFSPEQGNVVFTSAIDGWGFGIEHFARIYSQKIGIKKEVLMKTLWGDYYINMKAKKIMKGDQAKGKKPLFVQLILENIWSLYDAVLKKDKDKIDKIVTSLGLKIGAREARHSDPKVQINAICSQWLPISHAVLAMVCQKLPSPLDITAERVERLMCTGSQTFDSFPPETQALKAAFMKCGSEDTAPVIIFVSKMFAVDAKALPQNKPRPLTQEEIAQRRERARQRHAEKLAAAQGQAPLEPTQDGSAIETCPKGEEPRGDEQQVESMTPKPVLQEENNQESFIAFARVFSGVARRGKKIFVLGPKYSPLEFLRRVPLGFSAPPDGLPQVPHMAYCALENLYLLMGRELEYLEEVPPGNVLGIGGLQDFVLKSATLCSLPSCPPFIPLNFEATPIVRVAVEPKHPSEMPQLVKGMKLLNQADPCVQILIQETGEHVLVTAGEVHLQRCLDDLKERFAKIHISVSEPIIPFRETITKPPKVDMVNEEIGKQQKVAVIHQMKEDQSKIPEGIQVDSDGLITITTPNKLATLSVRAMPLPEEVTQILEENSDLIRSMEQLTSSLNEGENTHMIHQKTQEKIWEFKGKLEQHLTGRRWRNIVDQIWSFGPRKCGPNILVNKSEDFQNSVWTGPADKASKEASRYRDLGNSIVSGFQLATLSGPMCEEPLMGVCFVLEKWDLSKFEEQGASDLAKEGQEENETCSGGNENQELQDGCSEAFEKRTSQKGESPLTDCYGPFSGQLIATMKEACRYALQVKPQRLMAAMYTCDIMATGDVLGRVYAVLSKREGRVLQEEMKEGTDMFIIKAVLPVAESFGFADEIRKRTSGLASPQLVFSHWEIIPSDPFWVPTTEEEYLHFGEKADSENQARKYMNAVRKRKGLYVEEKIVEHAEKQRTLSKNK

SEQ ID NO: 24532 - protein, 1069 aa, Homo sapiens
MVLNSLDKMIQLQKNTANIRNICVLAHVDHGNEEYLINLIDSPGHVDFSSEVSTAVRICDGCIIVVDAVEGVCPQTQAVLRQAWLENIRPVLVINKIDRLIVELKFTPQEAYSHLKNILEQINALTGTLFTSKVLEERAERETESQVNPNSEQGEQVYDWSTGLEDTDDSHLYFSPEQGNVVFTSAIDGWGFGIEHFARIYSQKIGIKKEVLMKTLWGDYYINMKAKKIMKGDQAKGKKPLFVQLILENIWSLYDAVLKKDKDKIDKIVTSLGLKIGAREARHSDPKVQINAICSQWLPISHAVLAMVCQKLPSPLDITAERVERLMCTGSQTFDSFPPETQALKAAFMKCGSEDTAPVIIFVSKMFAVDAKALPQNKPRPLTQEEIAQRRERARQRHAEKLAAAQGQAPLEPTQDGSAIETCPKGEEPRGDEQQVESMTPKPVLQEENNQESFIAFARVFSGVARRGKKIFVLGPKYSPLEFLRRVPLGFSAPPDGLPQVPHMAYCALENLYLLMGRELEYLEEVPPGNVLGIGGLQDFVLKSATLCSLPSCPPFIPLNFEATPIVRVAVEPKHPSEMPQLVKGMKLLNQADPCVQILIQETGEHVLVTAGEVHLQRCLDDLKERFAKIHISVSEPIIPFRETITKPPKVDMVNEEIGKQQKVAVIHQMKEDQSKIPEGIQVDSDGLITITTPNKLATLSVRAMPLPEEVTQILEENSDLIRSMEQLTSSLNEGENTHMIHQKTQEKIWEFKGKLEQHLTGRRWRNIVDQIWSFGPRKCGPNILVNKSEDFQNSVWTGPADKASKEASRYRDLGNSIVSGFQLATLSGPMCEEPLMGVCFVLEKWDLSKFEEQGASDLAKEGQEENETCSGGNENQELQDGCSEAFEKRTSQKGESPLTDCYGPFSGQLIATMKEACRYALQVKPQRLMAAMYTCDIMATGDVLGRVYAVLSKREGRVLQEEMKEGTDMFIIKAVLPVAESFGFADEIRKRTSGLASPQLVFSHWEIIPSDPFWVPTTEEEYLHFGEKADSENQARKYMNAVRKRKGLYVEEKIVEHAEKQRTLSKNK

SEQ ID NO: 24533 - protein, 508 aa, Homo sapiens
MTQTLKYASRVFHRVRWAPELGASLGYREYHSARRSLADIPGPSTPSFLAELFCKGGLSRLHELQVQGAAHFGPVWLASFGTVRTVYVAAPALVEELLRQEGPRPERCSFSPWTEHRRCRQRACGLLTAEGEEWQRLRSLLAPLLLRPQAAARYAGTLNNVVCDLVRRLRRQRGRGTGPPALVRDVAGEFYKFGLEGIAAVLLGSRLGCLEAQVPPDTETFIRAVGSVFVSTLLTMAMPHWLRHLVPGPWGRLCRDWDQMFAFAQRHVERREAEAAMRNGGQPEKDLESGAHLTHFLFREELPAQSILGNVTELLLAGVDTVSNTLSWALYELSRHPEVQTALHSEITAALSPGSSAYPSATVLSQLPLLKAVVKEVLRLYPVVPGNSRVPDKDIHVGDYIIPKNTLVTLCHYATSRDPAQFPEPNSFRPARWLGEGPTPHPFASLPFGFGKRSCMGRRLAELELQMALAQILTHFEVQPEPGAAPVRPKTRTVLVPERSINLQFLDR

SEQ ID NO: 24534 - protein, 228 aa, Homo sapiens
MLHVEMLTLVFLVLWMCVFSQDPGSKAVADRYAVYWNSSNPRFQRGDYHIDVCINDYLDVFCPHYEDSVPEDKTERYVLYMVNFDGYSACDHTSKGFKRWECNRPHSPNGPLKFSEKFQLFTPFSLGFEFRPGREYFYISSAIPDNGRRSCLKLKVFVRPTNSCMKTIGVHDRVFDVNDKVENSLEPADDTVHESAEPSRGENAAQTPRIPSRLLAILLFLLAMLLTL

SEQ ID NO: 24535 - protein, 1505 aa, Homo sapiens
MLCVAGARLKRELDATATVLANRQDESEQSRKRLIEQSREFKKNTPEDLRKQVAPLLKSFQGEIDALSKRSKEAEAAFLNVYKRLIDVPDPVPALDLGQQLQLKVQRLHDIETENQKLRETLEEYNKEFAEVKNQEVTIKALKEKIREYEQTLKNQAETIALEKEQKLQNDFAEKERKLQETQMSTTSKLEEAEHKVQSLQTALEKTRTELFDLKTKYDEETTAKADEIEMIMTDLERANQRAEVAQREAETLREQLSSANHSLQLASQIQKAPDVEQAIEVLTRSSLEVELAAKEREIAQLVEDVQRLQASLTKLRENSASQISQLEQQLSAKNSTLKQLEEKLKGQADYEEVKKELNILKSMEFAPSEGAGTQDAAKPLEVLLLEKNRSLQSENAALRISNSDLSGSARRKGKDQPESRRPGSLPAPPPSQLPRNPGEQASNTNGTHQFSPAGLSQDFFSSSLASPSLPLASTGKFALNSLLQRQLMQSFYSKAMQEAGSTSMIFSTGPYSTNSISSQSPLQQSPDVNGMAPSPSQSESAGSVSEGEEMDTAEIARQVKEQLIKHNIGQRIFGHYVLGLSQGSVSEILARPKPWNKLTVRGKEPFHKMKQFLSDEQNILALRSIQGRQRENPGQSLNRLFQEVPKRRNGSEGNITTRIRASETGSDEAIKSILEQAKRELQVQKTAEPAQPSSASGSGNSDDAIRSILQQARREMEAQQAALDPALKQAPLSQSDITILTPKLLSTSPMPTVSSYPPLAISLKKPSAAPEAGASALPNPPALKKEAQDAPGLDPQGAADCAQGVLRQVKNEVGRSGAWKDHWWSAVQPERRNAASSEEAKAEETGGGKEKGSGGSGGGSQPRAERSQLQGPSSSEYWKEWPSAESPYSQSSELSLTGASRSETPQNSPLPSSPIVPMSKPTKPSVPPLTPEQYEVYMYQEVDTIELTRQVKEKLAKNGICQRIFGEKVLGLSQGSVSDMLSRPKPWSKLTQKGREPFIRMQLWLNGELGQGVLPVQGQQQGPVLHSVTSLQDPLQQGCVSSESTPKTSASCSPAPESPMSSSESVKSLTELVQQPCPPIEASKDSKPPEPSDPPASDSQPTTPLPLSGHSALSIQELVAMSPELDTYGITKRVKEVLTDNNLGQRLFGETILGLTQGSVSDLLARPKPWHKLSLKGREPFVRMQLWLNDPNNVEKLMDMKRMEKKAYMKRRHSSVSDSQPCEPPSVGTEYSQGASPQPQHQLKKPRVVLAPEEKEALKRAYQQKPYPSPKTIEDLATQLNLKTSTVINWFHNYRSRIRRELFIEEIQAGSQGQAGASDSPSARSGRAAPSSEGDSCDGVEATEGPGSADTEEPKSQGEAEREEVPRPAEQTEPPPSGTPGPDDARDDDHEGGPVEGPGPLPSPASATATAAPAAPEDAATSAAAAPGEGPAAPSSAPPPSNSSSSSAPRRPSSLQSLFGLPEAAGARDSRDNPLRKKKAANLNSIIHRLEKAASREEPIEWEF

SEQ ID NO: 24536 - protein, 1483 aa, Homo sapiens
MLCVAGARLKRELDATATVLANRQDESEQSRKRLIEQSREFKKNTPEDLRKQVAPLLKSFQGEIDALSKRSKEAEAAFLNVYKRLIDVPDPVPALDLGQQLQLKVQRLHDIETENQKLRETLEEYNKEFAEVKNQEVTIKALKEKIREYEQTLKNQAETIALEKEQKLQNDFAEKERKLQETQMSTTSKLEEAEHKVQSLQTALEKTRTELFDLKTKYDEETTAKADEIEMIMTDLERANQRAEVAQREAETLREQLSSANHSLQLASQIQKAPDVEQAIEVLTRSSLEVELAAKEREIAQLVEDVQRLQASLTKLRENSASQISQLEQQLSAKNSTLKQLEEKLKGQADYEEVKKELNILKSMEFAPSEGAGTQDAAKPLEVLLLEKNRSLQSENAALRISNSDLSGSARRKGKDQPESRRPGSLPAPPPSQLPRNPGEQASNTNGTHQFSPAGLSQDFFSSSLASPSLPLASTGKFALNSLLQRQLMQSFYSKAMQEAGSTSMIFSTGPYSTNSISSQSPLQQSPDVNGMAPSPSQSESAGSVSEGEEMDTAEIARQVKEQLIKHNIGQRIFGHYVLGLSQGSVSEILARPKPWNKLTVRGKEPFHKMKQFLSDEQNILALRSIQGRQRGNITTRIRASETGSDEAIKSILEQAKRELQVQKTAEPAQPSSASGSGNSDDAIRSILQQARREMEAQQAALDPALKQAPLSQSDITILTPKLLSTSPMPTVSSYPPLAISLKKPSAAPEAGASALPNPPALKKEAQDAPGLDPQGAADCAQGVLRQVKNEVGRSGAWKDHWWSAVQPERRNAASSEEAKAEETGGGKEKGSGGSGGGSQPRAERSQLQGPSSSEYWKEWPSAESPYSQSSELSLTGASRSETPQNSPLPSSPIVPMSKPTKPSVPPLTPEQYEVYMYQEVDTIELTRQVKEKLAKNGICQRIFGEKVLGLSQGSVSDMLSRPKPWSKLTQKGREPFIRMQLWLNGELGQGVLPVQGQQQGPVLHSVTSLQDPLQQGCVSSESTPKTSASCSPAPESPMSSSESVKSLTELVQQPCPPIEASKDSKPPEPSDPPASDSQPTTPLPLSGHSALSIQELVAMSPELDTYGITKRVKEVLTDNNLGQRLFGETILGLTQGSVSDLLARPKPWHKLSLKGREPFVRMQLWLNDPNNVEKLMDMKRMEKKAYMKRRHSSVSDSQPCEPPSVGTEYSQGASPQPQHQLKKPRVVLAPEEKEALKRAYQQKPYPSPKTIEDLATQLNLKTSTVINWFHNYRSRIRRELFIEEIQAGSQGQAGASDSPSARSGRAAPSSEGDSCDGVEATEGPGSADTEEPKSQGEAEREEVPRPAEQTEPPPSGTPGPDDARDDDHEGGPVEGPGPLPSPASATATAAPAAPEDAATSAAAAPGEGPAAPSSAPPPSNSSSSSAPRRPSSLQSLFGLPEAAGARDSRDNPLRKKKAANLNSIIHRLEKAASREEPIEWEF

SEQ ID NO: 24537 - protein, 1516 aa, Homo sapiens
MAANVGSMFQYWKRFDLQQLQRELDATATVLANRQDESEQSRKRLIEQSREFKKNTPEDLRKQVAPLLKSFQGEIDALSKRSKEAEAAFLNVYKRLIDVPDPVPALDLGQQLQLKVQRLHDIETENQKLRETLEEYNKEFAEVKNQEVTIKALKEKIREYEQTLKNQAETIALEKEQKLQNDFAEKERKLQETQMSTTSKLEEAEHKVQSLQTALEKTRTELFDLKTKYDEETTAKADEIEMIMTDLERANQRAEVAQREAETLREQLSSANHSLQLASQIQKAPDVEQAIEVLTRSSLEVELAAKEREIAQLVEDVQRLQASLTKLRENSASQISQLEQQLSAKNSTLKQLEEKLKGQADYEEVKKELNILKSMEFAPSEGAGTQDAAKPLEVLLLEKNRSLQSENAALRISNSDLSGSARRKGKDQPESRRPGSLPAPPPSQLPRNPGEQASNTNGTHQFSPAGLSQDFFSSSLASPSLPLASTGKFALNSLLQRQLMQSFYSKAMQEAGSTSMIFSTGPYSTNSISSQSPLQQSPDVNGMAPSPSQSESAGSVSEGEEMDTAEIARQVKEQLIKHNIGQRIFGHYVLGLSQGSVSEILARPKPWNKLTVRGKEPFHKMKQFLSDEQNILALRSIQGRQRENPGQSLNRLFQEVPKRRNGSEGNITTRIRASETGSDEAIKSILEQAKRELQVQKTAEPAQPSSASGSGNSDDAIRSILQQARREMEAQQAALDPALKQAPLSQSDITILTPKLLSTSPMPTVSSYPPLAISLKKPSAAPEAGASALPNPPALKKEAQDAPGLDPQGAADCAQGVLRQVKNEVGRSGAWKDHWWSAVQPERRNAASSEEAKAEETGGGKEKGSGGSGGGSQPRAERSQLQGPSSSEYWKEWPSAESPYSQSSELSLTGASRSETPQNSPLPSSPIVPMSKPTKPSVPPLTPEQYEVYMYQEVDTIELTRQVKEKLAKNGICQRIFGEKVLGLSQGSVSDMLSRPKPWSKLTQKGREPFIRMQLWLNGELGQGVLPVQGQQQGPVLHSVTSLQDPLQQGCVSSESTPKTSASCSPAPESPMSSSESVKSLTELVQQPCPPIEASKDSKPPEPSDPPASDSQPTTPLPLSGHSALSIQELVAMSPELDTYGITKRVKEVLTDNNLGQRLFGETILGLTQGSVSDLLARPKPWHKLSLKGREPFVRMQLWLNDPNNVEKLMDMKRMEKKAYMKRRHSSVSDSQPCEPPSVGTEYSQGASPQPQHQLKKPRVVLAPEEKEALKRAYQQKPYPSPKTIEDLATQLNLKTSTVINWFHNYRSRIRRELFIEEIQAGSQGQAGASDSPSARSGRAAPSSEGDSCDGVEATEGPGSADTEEPKSQGEAEREEVPRPAEQTEPPPSGTPGPDDARDDDHEGGPVEGPGPLPSPASATATAAPAAPEDAATSAAAAPGEGPAAPSSAPPPSNSSSSSAPRRPSSLQSLFGLPEAAGARDSRDNPLRKKKAANLNSIIHRLEKAASREEPIEWEF

SEQ ID NO: 24538 - protein, 1403 aa, Homo sapiens
MLCVAGARLKRELDATATVLANRQDESEQSRKRLIEQSREFKKNTPEDLRKQVAPLLKSFQGEIDALSKRSKEAEAAFLNVYKRLIDVPDPVPALDLGQQLQLKVQRLHDIETENQKLRETLEEYNKEFAEVKNQEVTIKALKEKIREYEQTLKNQAETIALEKEQKLQNDFAEKERKLQETQMSTTSKLEEAEHKVQSLQTALEKTRTELFDLKTKYDEETTAKADEIEMIMTDLERANQRAEVAQREAETLREQLSSANHSLQLASQIQKAPDVEQAIEVLTRSSLEVELAAKEREIAQLVEDVQRLQASLTKLRENSASQISQLEQQLSAKNSTLKQLEEKLKGQADYEEVKKELNILKSMEFAPSEGAGTQDAAKPLEVLLLEKNRSLQSENAALRISNSDLSGPYSTNSISSQSPLQQSPDVNGMAPSPSQSESAGSVSEGEEMDTAEIARQVKEQLIKHNIGQRIFGHYVLGLSQGSVSEILARPKPWNKLTVRGKEPFHKMKQFLSDEQNILALRSIQGRQRENPGQSLNRLFQEVPKRRNGSEGNITTRIRASETGSDEAIKSILEQAKRELQVQKTAEPAQPSSASGSGNSDDAIRSILQQARREMEAQQAALDPALKQAPLSQSDITILTPKLLSTSPMPTVSSYPPLAISLKKPSAAPEAGASALPNPPALKKEAQDAPGLDPQGAADCAQGVLRQVKNEVGRSGAWKDHWWSAVQPERRNAASSEEAKAEETGGGKEKGSGGSGGGSQPRAERSQLQGPSSSEYWKEWPSAESPYSQSSELSLTGASRSETPQNSPLPSSPIVPMSKPTKPSVPPLTPEQYEVYMYQEVDTIELTRQVKEKLAKNGICQRIFGEKVLGLSQGSVSDMLSRPKPWSKLTQKGREPFIRMQLWLNGELGQGVLPVQGQQQGPVLHSVTSLQDPLQQGCVSSESTPKTSASCSPAPESPMSSSESVKSLTELVQQPCPPIEASKDSKPPEPSDPPASDSQPTTPLPLSGHSALSIQELVAMSPELDTYGITKRVKEVLTDNNLGQRLFGETILGLTQGSVSDLLARPKPWHKLSLKGREPFVRMQLWLNDPNNVEKLMDMKRMEKKAYMKRRHSSVSDSQPCEPPSVGTEYSQGASPQPQHQLKKPRVVLAPEEKEALKRAYQQKPYPSPKTIEDLATQLNLKTSTVINWFHNYRSRIRRELFIEEIQAGSQGQAGASDSPSARSGRAAPSSEGDSCDGVEATEGPGSADTEEPKSQGEAEREEVPRPAEQTEPPPSGTPGPDDARDDDHEGGPVEGPGPLPSPASATATAAPAAPEDAATSAAAAPGEGPAAPSSAPPPSNSSSSSAPRRPSSLQSLFGLPEAAGARDSRDNPLRKKKAANLNSIIHRLEKAASREEPIEWEF

SEQ ID NO: 24539 - protein, 1449 aa, Homo sapiens
MLCVAGARLKRELDATATVLANRQDESEQSRKRLIEQSREFKKNTPEDLRKQVAPLLKSFQGEIDALSKRSKEAEAAFLNVYKRLIDVPDPVPALDLGQQLQLKVQRLHDIETENQKLRETLEEYNKEFAEVKNQEVTIKALKEKIREYEQTLKNQAETIALEKEQKLQNDFAEKERKLQETQMSTTSKLEEAEHKVQSLQTALEKTRTELFDLKTKYDEETTAKADEIEMIMTDLERANQRAEVAQREAETLREQLSSANHSLQLASQIQKAPDVEQAIEVLTRSSLEVELAAKEREIAQLVEDVQRLQASLTKLRENSASQISQLEQQLSAKNSTLKQLEEKLKGQADYEEVKKELNILKSMEFAPSEGAGTQDAAKPLEVLLLEKNRSLQSENAALRISNSDLSGSARRKGKDQPESRRPGSLPAPPPSQLPRNPGEQASNTNGTHQFSPAGLSQDFFSSSLASPSLPLASTGKFALNSLLQRQLMQSFYSKAMQEAGSTSMIFSTGPYSTNSISSQSPLQQSPDVNGMAPSPSQSESAGSVSEGEEMDTAEIARQVKEQLIKHNIGQRIFGHYVLGLSQGSVSEILARPKPWNKLTVRGKEPFHKMKQFLSDEQNILALRSIQGRQRAEPAQPSSASGSGNSDDAIRSILQQARREMEAQQAALDPALKQAPLSQSDITILTPKLLSTSPMPTVSSYPPLAISLKKPSAAPEAGASALPNPPALKKEAQDAPGLDPQGAADCAQGVLRQVKNEVGRSGAWKDHWWSAVQPERRNAASSEEAKAEETGGGKEKGSGGSGGGSQPRAERSQLQGPSSSEYWKEWPSAESPYSQSSELSLTGASRSETPQNSPLPSSPIVPMSKPTKPSVPPLTPEQYEVYMYQEVDTIELTRQVKEKLAKNGICQRIFGEKVLGLSQGSVSDMLSRPKPWSKLTQKGREPFIRMQLWLNGELGQGVLPVQGQQQGPVLHSVTSLQDPLQQGCVSSESTPKTSASCSPAPESPMSSSESVKSLTELVQQPCPPIEASKDSKPPEPSDPPASDSQPTTPLPLSGHSALSIQELVAMSPELDTYGITKRVKEVLTDNNLGQRLFGETILGLTQGSVSDLLARPKPWHKLSLKGREPFVRMQLWLNDPNNVEKLMDMKRMEKKAYMKRRHSSVSDSQPCEPPSVGTEYSQGASPQPQHQLKKPRVVLAPEEKEALKRAYQQKPYPSPKTIEDLATQLNLKTSTVINWFHNYRSRIRRELFIEEIQAGSQGQAGASDSPSARSGRAAPSSEGDSCDGVEATEGPGSADTEEPKSQGEAEREEVPRPAEQTEPPPSGTPGPDDARDDDHEGGPVEGPGPLPSPASATATAAPAAPEDAATSAAAAPGEGPAAPSSAPPPSNSSSSSAPRRPSSLQSLFGLPEAAGARDSRDNPLRKKKAANLNSIIHRLEKAASREEPIEWEF

SEQ ID NO: 24540 - protein, 1347 aa, Homo sapiens
MLCVAGARLKRELDATATVLANRQDESEQSRKRLIEQSREFKKNTPEDLRKQVAPLLKSFQGEIDALSKRSKEAEAAFLNVYKRLIDVPDPVPALDLGQQLQLKVQRLHDIETENQKLRETLEEYNKEFAEVKNQEVTIKALKEKIREYEQTLKNQAETIALEKEQKLQNDFAEKERKLQETQMSTTSKLEEAEHKVQSLQTALEKTRTELFDLKTKYDEETTAKADEIEMIMTDLERANQRAEVAQREAETLREQLSSANHSLQLASQIQKAPDVEQAIEVLTRSSLEVELAAKEREIAQLVEDVQRLQASLTKLRENSASQISQLEQQLSAKNSTLKQLEEKLKGQADYEEVKKELNILKSMEFAPSEGAGTQDAAKPLEVLLLEKNRSLQSENAALRISNSDLSGPYSTNSISSQSPLQQSPDVNGMAPSPSQSESAGSVSEGEEMDTAEIARQVKEQLIKHNIGQRIFGHYVLGLSQGSVSEILARPKPWNKLTVRGKEPFHKMKQFLSDEQNILALRSIQGRQRAEPAQPSSASGSGNSDDAIRSILQQARREMEAQQAALDPALKQAPLSQSDITILTPKLLSTSPMPTVSSYPPLAISLKKPSAAPEAGASALPNPPALKKEAQDAPGLDPQGAADCAQGVLRQVKNEVGRSGAWKDHWWSAVQPERRNAASSEEAKAEETGGGKEKGSGGSGGGSQPRAERSQLQGPSSSEYWKEWPSAESPYSQSSELSLTGASRSETPQNSPLPSSPIVPMSKPTKPSVPPLTPEQYEVYMYQEVDTIELTRQVKEKLAKNGICQRIFGEKVLGLSQGSVSDMLSRPKPWSKLTQKGREPFIRMQLWLNGELGQGVLPVQGQQQGPVLHSVTSLQDPLQQGCVSSESTPKTSASCSPAPESPMSSSESVKSLTELVQQPCPPIEASKDSKPPEPSDPPASDSQPTTPLPLSGHSALSIQELVAMSPELDTYGITKRVKEVLTDNNLGQRLFGETILGLTQGSVSDLLARPKPWHKLSLKGREPFVRMQLWLNDPNNVEKLMDMKRMEKKAYMKRRHSSVSDSQPCEPPSVGTEYSQGASPQPQHQLKKPRVVLAPEEKEALKRAYQQKPYPSPKTIEDLATQLNLKTSTVINWFHNYRSRIRRELFIEEIQAGSQGQAGASDSPSARSGRAAPSSEGDSCDGVEATEGPGSADTEEPKSQGEAEREEVPRPAEQTEPPPSGTPGPDDARDDDHEGGPVEGPGPLPSPASATATAAPAAPEDAATSAAAAPGEGPAAPSSAPPPSNSSSSSAPRRPSSLQSLFGLPEAAGARDSRDNPLRKKKAANLNSIIHRLEKAASREEPIEWEF

SEQ ID NO: 24541 - protein, 632 aa, Homo sapiens
MAANVGSMFQYWKRFDLQQLQRELDATATVLANRQDESEQSRKRLIEQSREFKKNTPEDLRKQVAPLLKSFQGEIDALSKRSKEAEAAFLNVYKRLIDVPEVTIKALKEKIREYEQTLKNQAETIALEKEQKLQNDFAEKERKLQETQMSTTSKLEEAEHKVQSLQTALEKTRTELFDLKTKYDEETTAKADEIEMIMTDLERANQRAEVAQREAETLREQLSSANHSLQLASQIQKAPDVEQAIEVLTRSSLEVELAAKEREIAQLVEDVQRLQASLTKLRENSASQISQLEQQLSAKNSTLKQLEEKLKGQADYEEVKKELNILKSMEFAPSEGAGTQDAAKPLEVLLLEKNRSLQSENAALRISNSDLSGRCAELQVRITEAVATATEQRELIARLEQDLSIIQSIQRPDAEGAAEHRLEKIPEPIKEATALFYGPAAPASGALPEGQVDSLLSIISSQRERFRARNQELEAENRLAQHTLQALQSELDSLRADNIKLFEKIKFLQSYPGRGSGSDDTELRYSSQYEERLDPFSSFSKRERQRKYLSLSPWDKATLSMGRLVLSNKMARTIGFFYTLFLHCLVFLVLYKLAWSESMERDCATFCAKKFADHLHKFHENDNGAAAGDLWQ

SEQ ID NO: 24542 - protein, 500 aa, Homo sapiens
MKCTAREWLRVTTVLFMARAIPAMVVPNATLLEKLLEKYMDEDGEWWIAKQRGKRAITDNDMQSILDLHNKLRSQVYPTASNMEYMTWDVELERSAESWAESCLWEHGPASLLPSIGQNLGAHWGRYRPPTFHVQSWYDEVKDFSYPYEHECNPYCPFRCSGPVCTHYTQVVWATSNRIGCAINLCHNMNIWGQIWPKAVYLVCNYSPKGNWWGHAPYKHGRPCSACPPSFGGGCRENLCYKEGSDRYYPPREEETNEIERQQSQVHDTHVRTRSDDSSRNEVISAQQMSQIVSCEVRLRDQCKGTTCNRYECPAGCLDSKAKVIGSVHYEMQSSICRAAIHYGIIDNDGGWVDITRQGRKHYFIKSNRNGIQTIGKYQSANSFTVSKVTVQAVTCETTVEQLCPFHKPASHCPRVYCPRNCMQANPHYARVIGTRVYSDLSSICRAAVHAGVVRNHGGYVDVMPVDKRKTYIASFQNGIFSESLQNPPGGKAFRVFAVV

SEQ ID NO: 24543 - protein, 314 aa, Homo sapiens
MNMNATHIVHSGVLALYVHIIHRGNWWGHAPYKHGRPCSACPPSFGGGCRENLCYKEGSDRYYPPREEETNEIERQQSQVHDTHVRTRSDDSSRNEVISAQQMSQIVSCEVRLRDQCKGTTCNRYECPAGCLDSKAKVIGSVHYEMQSSICRAAIHYGIIDNDGGWVDITRQGRKHYFIKSNRNGIQTIGKYQSANSFTVSKVTVQAVTCETTVEQLCPFHKPASHCPRVYCPRNCMQANPHYARVIGTRVYSDLSSICRAAVHAGVVRNHGGYVDVMPVDKRKTYIASFQNGIFSESLQNPPGGKAFRVFAVV

SEQ ID NO: 24544 - protein, 777 aa, Homo sapiens
MEEPGATPQPYLGLVLEELRRVVAALPESMRPDENPYGFPSELVVCAAVIGFFVVLLFLWRSFRSVRSRLYVGREQKLGATLSGLIEEKCKLLEKFSLIQKEYEGYEVESSLEDASFEKAAAEEARSLEATCEKLNRSNSELEDEILCLEKDLKEEKSKHSQQDELMADISKSIQSLEDESKSLKSQIAEAKIICKTFKMSEERRAIAIKDALNENSQLQTSHKQLFQQEAEVWKGQVSELNKQKITFEDSKVHAEQVLNDKENHIKTLTGHLPMMKDQAAVLEEDTTDDDNLELEVNSQWENGANLDDPLKGALKKLIHAAKLNVSLKSLEGERNHIIIQLSEVDKTKEELTEHIKNLQTQQASLQSENIYFESENQKLQQKLKIMTEFYQENEMKLYRKLTVEENYRIEEEEKLSRVEEKLSRATEQLETYRKLAKDLEEELERTVHFYQKQVISYEKRGHDNWLAARTAERNLSDLRKENAHNKQKLTETELKFELLEKDPNALDVSNTAFGREHAPNGPAPLGQRSSETRAFLSPQTLLEDPLGLSPVLPEGGGRGPRGPGNPLDHQITNERGEPSCDRLTDPHRAPSDTGSLSSPVEQDCKMMFPPPGQSYPDSALPPQREDRFYSNSERLSGSAEPRSFKMTSLDKMDGSMPSEMESSRNDAKDDLGNLNVPDSSLPAENEATGPGFIPPPLAPVRGPLFPVDTRGPFMRRGPPFPPPPPGTMFGASRGYFPPRDFPGPPHAPFAMRNIYPPRGLPPYFHPRPGFYPNPAF

SEQ ID NO: 24545 - protein, 777 aa, Homo sapiens
MEEPGATPQPYLGLVLEELRRVVAALPESMRPDENPYGFPSELVVCAAVIGFFVVLLFLWRSFRSVRSRLYVGREQKLGATLSGLIEEKCKLLEKFSLIQKEYEGYEVESSLEDASFEKAAAEEARSLEATCEKLNRSNSELEDEILCLEKDLKEEKSKHSQQDELMADISKSIQSLEDESKSLKSQIAEAKIICKTFKMSEERRAIAIKDALNENSQLQTSHKQLFQQEAEVWKGEVSELNKQKITFEDSKVHAEQVLNDKENHIKTLTGHLPMMKDQAAVLEEDTTDDDNLELEVNSQWENGANLDDPLKGALKKLIHAAKLNVSLKSLEGERNHIIIQLSEVDKTKEELTEHIKNLQTQQESLQSENIYFESENQKLQQKLKIMTEFYQEDEMKLYRKLTVEENYRIEEEEKLSKVEEKLSRATEQLETYRKLAKDLEEELERTVHFYQKQVISYEKRGHDNWLAARTAERNLSDLRKENAHNKQKLTETELKFELLEKDPNALDVSNTAFGREHAPNGPAPLGQRSSETRAFLSPQTLLEDPLGLSPVLPEGGGRGPRGPGNPLDHQITNERGEPSCDRLTDPHRAPSDTGSLSSPVEQDCKMMFPPPGQSYPDSALPPQREDRFYSNSERLSGSAEPRSFKMTSLDKMDGSMPSEMESSRNDAKDDLGNLNVPDSSLPAENEATGPGFIPPPLAPVRGPLFPVDTRGPFMRRGPPFPPPPPGTMFGASRGYFPPRDFPGPPHAPFAMRNIYPPRGLPPYFHPRPGFYPNPAF

SEQ ID NO: 24546 - protein, 719 aa, Homo sapiens
MNDTEKPADTPSEEEDFGDPRTYDPDFKGPVANRSCTDVLCCMIFLLCIIGYIVLGLVAWVHGDPRRAAYPTDSQGHFCGQKGTPNENKTILFYFNLLRCTSPSVLLNLQCPTTQICVSKCPEKFLTYVEMQLLYTKDKSYWEDYRQFCKTTAKPVKSLTQLLLDDDCPTAIFPSKPFLQRCFPDFSTKNGTLTIGSKMMFQDGNGGTRSVVELGIAANGINKLLDAKSLGLKVFEDYARTWYWILIGLTIAMVLSWIFLILLRFIAGCLFWVFMIGVIGIIGYGIWHCYQQYTNLQERPSSVLTIYDIGIQTNISMYFELQQTWFTFMIILCIIEVIVILMLIFLRNRIRVAIILLKEGSKAIGYVPSTLVYPALTFILLSICICYWVVTAVFLATSGVPVYKVIAPGGHCIHENQTCDPEIFNTTEIAKACPGALCNFAFYGGKSLYHQYIPTFHVYNLFVFLWLINFVIALGQCALAGAFATYYWAMKKPDDIPRYPLFTAFGRAIRYHTGSLAFGSLIIALIQMFKIVLEYLDHRLKRTQNTLSKFLQCCLRCCFWCLENAIKFLNRNAYIMIAIYGRNFCRSAKDAFNLLMRNVLKVAVTDEVTYFVLFLGKLLVAGSIGVLAFLFFTQRLPVIAQGPASLNYYWVPLLTVIFGSYLIAHGFFSVYAMCVETIFICFCEDLERNDGSTEKPYFVTPNLHGILIKKQLVPQKQKE

SEQ ID NO: 24547 - protein, 717 aa, Homo sapiens
MNDTEKPADTPSEEEDFGDPRTYDPDFKGPVANRSCTDVLCCMIFLLCIIGYIVLGLVAWVHGDPRRAAYPTDSQGHFCGQKGTPNENKTILFYFNLLRCTSPSVLLNLQCPTTQICVSKCPEKFLTYVEMQLLYTKDKSYWEDYRQFCKTTAKPVKSLTQLLLDDDCPTAIFPSKPFLQRCFPDFSTKNGTLTIGSKMMFQDGNGGTRSVVELGIAANGINKLLDAKSLGLKVFEDYARTWYWILIGLTIAMVLSWIFLILLRFIAGCLFWVFMIGVIGIIGYGIWHCYQQYTNLQERPSSVLTIYDIGIQTNISMYFELQQTWFTFMIILCIIEVIVILMLIFLRNRIRVAIILLKEGSKAIGYVPSTLVYPALTFILLSICICYWVVTAVFLATSGVPVYKVIAPGGHCIHENQTCDPEIFNTTEIAKACPGALCNFAFYGGKSLYHQYIPTFHVYNLFVFLWLINFVIALGQCALAGAFATYYWAMKKPDDIPRYPLFTAFGRAIRYHTGSLAFGSLIIALIQMFKIVLEYLDHRLKRTQNTLSKFLQCCLRCCFWCLENAIKFLNRNAYIMIAIYGRNFCRSAKDAFNLLMRNVLKVAVTDEVTYFVLFLGKLLVAGSIGVLAFLFFTQRLPVIAQGPASLNYYWVPLLTVIFGSYLIAHGFFSVYAMCVETIFICFLEDLERNDGSTARPYYVSQPLLKIFQEENPQTRKQ

SEQ ID NO: 24548 - protein, 675 aa, Homo sapiens
MIFLLCIIGYIVLGLVAWVHGDPRRAAYPTDSQGHFCGQKGTPNENKTILFYFNLLRCTSPSVLLNLQCPTTQICVSKCPEKFLTYVEMQLLYTKDKSYWEDYRQFCKTTAKPVKSLTQLLLDDDCPTAIFPSKPFLQRCFPDFSTKNGTLTIGSKMMFQDGNGGTRSVVELGIAANGINKLLDAKSLGLKVFEDYARTWYWILIGLTIAMVLSWIFLILLRFIAGCLFWVFMIGVIGIIGYGIWHCYQQYTNLQERPSSVLTIYDIGIQTNISMYFELQQTWFTFMIILCIIEVIVILMLIFLRNRIRVAIILLKEGSKAIGYVPSTLVYPALTFILLSICICYWVVTAVFLATSGVPVYKVIAPGGHCIHENQTCDPEIFNTTEIAKACPGALCNFAFYGGKSLYHQYIPTFHVYNLFVFLWLINFVIALGQCALAGAFATYYWAMKKPDDIPRYPLFTAFGRAIRYHTGSLAFGSLIIALIQMFKIVLEYLDHRLKRTQNTLSKFLQCCLRCCFWCLENAIKFLNRNAYIMIAIYGRNFCRSAKDAFNLLMRNVLKVAVTDEVTYFVLFLGKLLVAGSIGVLAFLFFTQRLPVIAQGPASLNYYWVPLLTVIFGSYLIAHGFFSVYAMCVETIFICFLEDLERNDGSTARPYYVSQPLLKIFQEENPQTRKQ

SEQ ID NO: 24549 - protein, 223 aa, Homo sapiens
MACLGFQRHKAQLNLATRTWPCTLLFFLLFIPVFCKAMHVAQPAVVLASSRGIASFVCEYASPGKATEVRVTVLRQADSQVTEVCAATYMMGNELTFLDDSICTGTSSGNQVNLTIQGLRAMDTGLYICKVELMYPPPYYLGIGNGTQIYVIDPEPCPDSDFLLWILAAVSSGLFFYSFLLTAVSLSKMLKKRSPLTTGVYVKMPPTEPECEKQFQPYFIPIN

SEQ ID NO: 24550 - protein, 56 aa, Homo sapiens
MACLGFQRHKAQLNLATRTWPCTLLFFLLFIPVFCKAPPTEPECEKQFQPYFIPIN

SEQ ID NO: 24551 - protein, 58 aa, Homo sapiens
MACLGFQRHKAQLNLATRTWPCTLLFFLLFIPVFCKAKEKKPSYNRGLCENAPNRARM

SEQ ID NO: 24552 - protein, 79 aa, Homo sapiens
MACLGFQRHKAQLNLATRTWPCTLLFFLLFIPVFCKAMHVAQPAVVLASSRGIASFVSKEKKPSYNRGLCENAPNRARM

SEQ ID NO: 24553 - protein, 174 aa, Homo sapiens
MACLGFQRHKAQLNLATRTWPCTLLFFLLFIPVFCKAMHVAQPAVVLASSRGIASFVCEYASPGKATEVRVTVLRQADSQVTEVCAATYMMGNELTFLDDSICTGTSSGNQVNLTIQGLRAMDTGLYICKVELMYPPPYYLGIGNGTQIYVIAKEKKPSYNRGLCENAPNRARM

SEQ ID NO: 24554 - protein, 354 aa, Homo sapiens
MPLEERRSSGERNDAAPTNHRRPGEKRASTAKQVSSVPFLGAAGHQQSLPSSWKASCSGPLVMASDSDVKMLLNFVNLASSDIKAALDKSAPCRRSVDHRKYLQKQLKRFSQKYSRLPRGLPGRAAEPYLKRGSEDRPRRLLLDLGPDSSPGGGGGCKEKVLRNPYREECLAKEQLPQRQHPEAAQPGQVPMRKRQLPASFWEEPRPTHSYHVGLEGGLGPREGPPYEGKKNCKGLEPLGPETTLVSMSPRALAEKEPLKMPGVSLVGRVNAWSCCPFQYHGQPIYPGPLGALPQSPVPSLGLWRKSPAFPGELAHLCKDVDGLGQKVCRPVVLKPIPTKPAVPPPIFNVFGYL

SEQ ID NO: 24555 - protein, 292 aa, Homo sapiens
MASDSDVKMLLNFVNLASSDIKAALDKSAPCRRSVDHRKYLQKQLKRFSQKYSRLPRGLPGRAAEPYLKRGSEDRPRRLLLDLGPDSSPGGGGGCKEKVLRNPYREECLAKEQLPQRQHPEAAQPGQVPMRKRQLPASFWEEPRPTHSYHVGLEGGLGPREGPPYEGKKNCKGLEPLGPETTLVSMSPRALAEKEPLKMPGVSLVGRVNAWSCCPFQYHGQPIYPGPLGALPQSPVPSLGLWRKSPAFPGELAHLCKDVDGLGQKVCRPVVLKPIPTKPAVPPPIFNVFGYL

SEQ ID NO: 24556 - protein, 355 aa, Homo sapiens
MDQFPESVTENFEYDDLAEACYIGDIVVFGTVFLSIFYSVIFAIGLVGNLLVVFALTNSKKPKSVTDIYLLNLALSDLLFVATLPFWTHYLINEKGLHNAMCKFTTAFFFIGFFGSIFFITVISIDRYLAIVLAANSMNNRTVQHGVTISLGVWAAAILVAAPQFMFTKQKENECLGDYPEVLQEIWPVLRNVETNFLGFLLPLLIMSYCYFRIIQTLFSCKNHKKAKAIKLILLVVIVFFLFWTPYNVMIFLETLKLYDFFPSCDMRKDLRLALSVTETVAFSHCCLNPLIYAFAGEKFRRYLYHLYGKCLAVLCGRSVHVDFSSSESQRSRHGSVLSSNFTYHTSDGDALLLL

SEQ ID NO: 24557 - protein, 387 aa, Homo sapiens
MREPLEALKLADLDFRKSSLASGWRMASGAFTMDQFPESVTENFEYDDLAEACYIGDIVVFGTVFLSIFYSVIFAIGLVGNLLVVFALTNSKKPKSVTDIYLLNLALSDLLFVATLPFWTHYLINEKGLHNAMCKFTTAFFFIGFFGSIFFITVISIDRYLAIVLAANSMNNRTVQHGVTISLGVWAAAILVAAPQFMFTKQKENECLGDYPEVLQEIWPVLRNVETNFLGFLLPLLIMSYCYFRIIQTLFSCKNHKKAKAIKLILLVVIVFFLFWTPYNVMIFLETLKLYDFFPSCDMRKDLRLALSVTETVAFSHCCLNPLIYAFAGEKFRRYLYHLYGKCLAVLCGRSVHVDFSSSESQRSRHGSVLSSNFTYHTSDGDALLLL

SEQ ID NO: 24558 - protein, 362 aa, Homo sapiens
MASGAFTMDQFPESVTENFEYDDLAEACYIGDIVVFGTVFLSIFYSVIFAIGLVGNLLVVFALTNSKKPKSVTDIYLLNLALSDLLFVATLPFWTHYLINEKGLHNAMCKFTTAFFFIGFFGSIFFITVISIDRYLAIVLAANSMNNRTVQHGVTISLGVWAAAILVAAPQFMFTKQKENECLGDYPEVLQEIWPVLRNVETNFLGFLLPLLIMSYCYFRIIQTLFSCKNHKKAKAIKLILLVVIVFFLFWTPYNVMIFLETLKLYDFFPSCDMRKDLRLALSVTETVAFSHCCLNPLIYAFAGEKFRRYLYHLYGKCLAVLCGRSVHVDFSSSESQRSRHGSVLSSNFTYHTSDGDALLLL

SEQ ID NO: 24559 - protein, 387 aa, Homo sapiens
MREPLEAFKLADLDFRKSSLASGWRMASGAFTMDQFPESVTENFEYDDLAEACYIGDIVVFGTVFLSIFYSVIFAIGLVGNLLVVFALTNSKKPKSVTDIYLLNLALSDLLFVATLPFWTHYLINEKGLHNAMCKFTTAFFFIGFFGSIFFITVISIDRYLAIVLAANSMNNRTVQHGVTISLGVWAAAILVAAPQFMFTKQKENECLGDYPEVLQEIWPVLRNVETNFLGFLLPLLIMSYCYFRIIQTLFSCKNHKKAKAIKLILLVVIVFFLFWTPYNVMIFLETLKLYDFFPSCDMRKDLRLALSVTETVAFSHCCLNPLIYAFAGEKFRRYLYHLYGKCLAVLCGRSVHVDFSSSESQRSRHGSVLSSNFTYHTSDGDALLLL

SEQ ID NO: 24560 - protein, 187 aa, Homo sapiens
MYLQVETRTSSRLHLKRAPGIRSWSLLVGILSIGLAAAYYSGDSLGWKLFYVTGCLFVAVQNLEDWEEAIFDKSTGKVVLKTFSLYKKLLTLFRAGHDQVVVLLHDVRDVSVEEEKVRYFGKGYMVVLRLATGFSHPLTQSAVMGHRSDVEAIAKLITSFLELHCLESPTELSQSSDSEAGDPASQS

SEQ ID NO: 24561 - protein, 173 aa, Homo sapiens
MYLQVETRTSSRLHLKRAPGIRSWSLLVDSLGWKLFYVTGCLFVAVQNLEDWEEAIFDKSTGKVVLKTFSLYKKLLTLFRAGHDQVVVLLHDVRDVSVEEEKVRYFGKGYMVVLRLATGFSHPLTQSAVMGHRSDVEAIAKLITSFLELHCLESPTELSQSSDSEAGDPASQS

SEQ ID NO: 24562 - protein, 242 aa, Homo sapiens
MVSGRFYLSCLLLGSLGSMCILFTIYWMQYWRGGFAWNGSIYMFNWHPVLMVAGMVVFYGGASLVYRLPQSWVGPKLPWKLLHAALHLMAFVLTVVGLVAVFTFHNHGRTANLYSLHSWLGITTVFLFACQWFLGFAVFLLPWASMWLRSLLKPIHVFFGAAILSLSIASVISGINEKLFFSLKNTTRPYHSLPSEAVFANSTGMLVVAFGLLVLYILLASSWKRPEPGILTDRQPLLHDGE

SEQ ID NO: 24563 - protein, 259 aa, Homo sapiens
MGKNFSDSFLSRECVIRMVSGRFYLSCLLLGSLGSMCILFTIYWMQYWRGGFAWNGSIYMFNWHPVLMVAGMVVFYGGASLVYRLPQSWVGPKLPWKLLHAALHLMAFVLTVVGLVAVFTFHNHGRTANLYSLHSWLGITTVFLFACQWFLGFAVFLLPWASMWLRSLLKPIHVFFGAAILSLSIASVISGINEKLFFSLKNTTRPYHSLPSEAVFANSTGMLVVAFGLLVLYILLASSWKRPEPGILTDRQPLLHDGE

SEQ ID NO: 24564 - protein, 611 aa, Homo sapiens
MSCKKQRSRKHSVNEKCNMKIEHYFSPVSKEQQNNCSTSLMRMESRGDPRATTNTQAQRFHSPKKNPEDQTMPQNRTIYVTLKVNHRRNQDMKLKLTHSENSSLYMALNTLQAVRKEIETHQGQEMLVRGTEGIKEYINLGMPLSCFPEGGQVVITFSQSKSKQKEDNHIFGRQDKASTECVKFYIHAIGIGKCKRRIVKCGKLHKKGRKLCVYAFKGETIKDALCKDGRFLSFLENDDWKLIENNDTILESTQPVDELEGRYFQVEVEKRMVPSAAASQNPESEKRNTCVLREQIVAQYPSLKRESEKIIENFKKKMKVKNGETLFELHRTTFGKVTKNSSSIKVVKLLVRLSDSVGYLFWDSATTGYATCFVFKGLFILTCRHVIDSIVGDGIEPSKWATIIGQCVRVTFGYEELKDKETNYFFVEPWFEIHNEELDYAVLKLKENGQQVPMELYNGITPVPLSGLIHIIGHPYGEKKQIDACAVIPQGQRAKKCQERVQSKKAESPEYVHMYTQRSFQKIVHNPDVITYDTEFFFGASGSPVFDSKGSLVAMHAAGFAYTYQNETRSIIEFGSTMESILLDIKQRHKPWYEEVFVNQQDVEMMSDEDL

SEQ ID NO: 24565 - protein, 228 aa, Homo sapiens
MASEELQKDLEEVKVLLEKATRKRVRDALTAEKSKIETEIKNKMQQKSQKKAELLDNEKPAAVVAPITTGYTVKISNYGWDQSDKFVKIYITLTGVHQVPTENVQVHFTERSFDLLVKNLNGKSYSMIVNNLLKPISVEGSSKKVKTDTVLILCRKKVENTRWDYLTQVEKECKEKEKPSYDTETDPSEGLMNVLKKIYEDGDDDMKRTINKAWVESREKQAKGDTEF

SEQ ID NO: 24566 - protein, 80 aa, Homo sapiens
MASEELQKDLEEVKVLLEKATRKRVRDALTAEKSKIETEIKNKMQQKSQKKAELLDNEKPAAVVAPITTGYTDGISQISL

SEQ ID NO: 24567 - protein, 185 aa, Homo sapiens
MQQKSQKKAELLDNEKPAAVVAPITTGYTVKISNYGWDQSDKFVKIYITLTGVHQVPTENVQVHFTERSFDLLVKNLNGKSYSMIVNNLLKPISVEGSSKKVKTDTVLILCRKKVENTRWDYLTQVEKECKEKEKPSYDTETDPSEGLMNVLKKIYEDGDDDMKRTINKAWVESREKQAKGDTEF

SEQ ID NO: 24568 - protein, 505 aa, Homo sapiens
MSDKDDIETPLLTEAAPILEDGNCEPAKNSESVDQGAKPESKSEPVVSTRKRPETKPSSDLETSKVLPIQDNVSKDVPQTRWGYWGSWGKSILSSASATVATVGQGISNVIEKAETSLGIPGPSEISTEVKYVAGETNAKENENSSPVAGAFGVFSTISTAVQSTGKSVISGGLDALEFIGKKTMDVIAEGDPGFKRTKGLMNRNATLSQVLREAKEKEEIRTSNEVTVETDKKTHYGLLFDEFQGLSHLEALEMLSQESEIKVKSILNSLSGEELETLKVELEQLKETFSLAEFCEEEEEEKKGDEDFTKDITELFSQLHVSSKPEKLARARNTAHEWIRKSLTKPLAENEEGEKQSEAENTEQVNKNSIEDIHAFAIRSLAELTACSIELFHKTAALVLHGRKQEVTAIERSQTLSQMTIVLCKELSSLSKEFTTCLTTAGVKEMADVLNPLITAVFLEASNSASYIQDAFQLLLPVLEISLIENKIESHRHELQGQKPLLEH

SEQ ID NO: 24569 - protein, 322 aa, Homo sapiens
MKTLAGLVLGLVIFDAAVTAPTLESINYDSETYDATLEDLDNLYNYENIPVDKVEIEIATVMPSGNRELLTPPPQPEKAQEEEEEEESTPRLIDGSSPQEPEFTGVLGPHTNEDFPTCLLCTCISTTVYCDDHELDAIPPLPKNTAYFYSRFNRIKKINKNDFASLSDLKRIDLTSNLISEIDEDAFRKLPQLRELVLRDNKIRQLPELPTTLTFIDISNNRLGRKGIKQEAFKDMYDLHHLYLTDNNLDHIPLPLPENLRALHLQNNNILEMHEDTFCNVKNLTYIRKALEDIRLDGNPINLSKTPQAYMCLPRLPVGSLV

SEQ ID NO: 24570 - protein, 358 aa, Homo sapiens
MGDWSFLGNFLEEVHKHSTVVGKVWLTVLFIFRMLVLGTAAESSWGDEQADFRCDTIQPGCQNVCYDQAFPISHIRYWVLQIIFVSTPSLVYMGHAMHTVRMQEKRKLREAERAKEVRGSGSYEYPVAEKAELSCWEEGNGRIALQGTLLNTYVCSILIRTTMEVGFIVGQYFIYGIFLTTLHVCRRSPCPHPVNCYVSRPTEKNVFIVFMLAVAALSLLLSLAELYHLGWKKIRQRFVKPRQHMAKCQLSGPSVGIVQSCTPPPDFNQCLENGPGGKFFNPFSNNMASQQNTDNLVTEQVRGQEQTPGEGFIQVRYGQKPEVPNGVSPGHRLPHGYHSDKRRLSKASSKARSDDLSV

SEQ ID NO: 24571 - protein, 152 aa, Homo sapiens
MRLPLSHSPEHVEMALLSNILAAYSFVSENPERAALYFVSGVCIGLVLTLAALVIRISCHTDCRRRPGKKFLQDRESSSDSSDSEDGSEDTVSDLSVRRHRRFERTLNKNVFTSAEELERAQRLEERERIIREIWMNGQPEVPGTRSLNRYY

SEQ ID NO: 24572 - protein, 108 aa, Homo sapiens
MLAKGAEEGRSGGPRPAITLPGSLHFTCDLKTSPYCLTRAELMEHLPLRVAVHSMSPCHRSCFCGELKRGHPWNTPQVSSFPSSTTSLSHSCTTSHLDCSQQVESGSK

SEQ ID NO: 24573 - protein, 266 aa, Homo sapiens
MNWAFLQGLLSGVNKYSTVLSRIWLSVVFIFRVLVYVVAAEEVWDDEQKDFVCNTKQPGCPNVCYDEFFPVSHVRLWALQLILVTCPSLLVVMHVAYREERERKHHLKHGPNAPSLYDNLSKKRGGLWWTYLLSLIFKAAVDAGFLYIFHRLYKDYDMPRVVACSVEPCPHTVDCYISRPTEKKVFTYFMVTTAAICILLNLSEVFYLVGKRCMEIFGPRHRRPRCRECLPDTCPPYVLSQGGHPEDGNSVLMKAGSAPVDAGGYP

SEQ ID NO: 24574 - protein, 322 aa, Homo sapiens
MARSRLPATSLRKPWKLDRQKLPSPDSGHSLLCGWSPGGKARPAGNTGAWAPAEQFFPASNRTREGGGLWPPLPLQSSPAAPTMLDSSAAEQVTRLTLKLLGQKLEQERQNVEGGPEGLHLEPGNEDRPDDALQTALKRRRDLLQRLREQHLLDELSRAQAWSGPSRGALGSALPPELPPTGILPTASPSPLAPDPPRIILPTVPQPPATIIQQLPQQPLIAQIPPPQAFPTQRSGSIKEDMVELLLLQNAQVHQLVLQNWMLKALPPALQDPPHVPPRVPRAARPRLPAVHHHHHHHHAVWPPGAATVLQPAPSLWTPGPP

SEQ ID NO: 24575 - protein, 277 aa, Homo sapiens
MARSRLPATSLRKPWKLDRQKLPSPDSGHSLLCGWSPGGKARPAGNTGAWAPAEQFFPASNRTREGGGLWPPLPLQSSPAAPTMLDSSAAEQVTRLTLKLLGQKLEQERQNVEGGPEGLHLEPGNEDRPDDALQTALKRRRDLLQRLREQHLLDELSRAQAWSGPSRGALGSALPPELPPTGILPTASPSPLAPDPPRIILPTVPQPPATIIQQLPQQPLIAQIPPPQAFPTQRSGSIKEDMVELLLLQNAQVHQLVLQNWMLKALPPALQDRFFHS

SEQ ID NO: 24576 - protein, 216 aa, Homo sapiens
MAILPGEAPVPGPGWPEPDAGGASVALGLPVPVCSSSASALQEQHLLDELSRAQAWSGPSRGALGSALPPELPPTGILPTASPSPLAPDPPRIILPTVPQPPATIIQQLPQQPLIAQIPPPQAFPTQRSGSIKEDMVELLLLQNAQVHQLVLQNWMLKALPPALQDPPHVPPRVPRAARPRLPAVHHHHHHHHAVWPPGAATVLQPAPSLWTPGPP

SEQ ID NO: 24577 - protein, 226 aa, Homo sapiens
MDWGTLQTILGGVNKHSTSIGKIWLTVLFIFRIMILVVAAKEVWGDEQADFVCNTLQPGCKNVCYDHYFPISHIRLWALQLIFVSTPALLVAMHVAYRRHEKKRKFIKGEIKSEFKDIEEIKTQKVRIEGSLWWTYTSSIFFRVIFEAAFMYVFYVMYDGFSMQRLVKCNAWPCPNTVDCFVSRPTEKTVFTVFMIAVSGICILLNVTELCYLLIRYCSGKSKKPV

SEQ ID NO: 24578 - protein, 370 aa, Homo sapiens
MEGVDLLGFLIITLNCNVTMVGKLWFVLTMLLRMLVIVLAGRPVYQDEQERFVCNTLQPGCANVCYDVFSPVSHLRFWLIQGVCVLLPSAVFSVYVLHRGATLAALGPRRCPDPREPASGQRRCPRPFGERGGLQVPDFSAGYIIHLLLRTLLEAAFGALHYFLFGFLAPKKFPCTRPPCTGVVDCYVSRPTEKSLLMLFLWAVSALSFLLGLADLVCSLRRRMRRRPGPPTSPSIRKQSGASGHAEGRRTDEEGGREEEGAPAPPGARAGGEGAGSPRRTSRVSGHTKIPDEDESEVTSSASEKLGRQPRGRPHREAAQDPRGSGSEEQPSAAPSRLAAPPSCSSLQPPDPPASSSGAPHLRARKSEWV

SEQ ID NO: 24579 - protein, 200 aa, Homo sapiens
MEEKPSKVSLKSSDRQGSDEESVHSDTRDLWTTTTLSQAQLNMPLSEVCEGFDEEGRNISKTRGWHSPGRGSLDEGYKASHKPEELDEHALVELELHRGSSMEINLGEKDTASQIEAEKSSSMSSLNIAKHMPHRAYWAEQQSRLPLPLMELMENEALEILTKALRSYQLGIGRDHFLTKELQRYIEGLKKRRSKRLYVN

SEQ ID NO: 24580 - protein, 194 aa, Homo sapiens
MPNWGGGAKCGACEKTVYHAEEIQCNGRSFHKTCFHCMACRKALDSTTVAAHESEIYCKVCYGRRYGPKGIGYGQGAGCLSTDTGEHLGLQFQQSPKPARSVTTSNPSKFTAKFGESEKCPRCGKSVYAAEKVMGGGKPWHKTCFRCAICGKSLESTNVTDKDGELYCKVCYAKNFGPTGIGFGGLTQQVEKKE

SEQ ID NO: 24581 - protein, 58 aa, Homo sapiens
MPNWGGGAKCGACEKTVYHAEEIQCNGRSFHKTCFHCTLAQDLFPLCHLWEESGVHKC

SEQ ID NO: 24582 - protein, 147 aa, Homo sapiens
MWSLPPSRALSCAPLLLLFSFQFLVTYAWRFQEEEEWNDQKQIAVYLPPTLEFAVYTFNKQSKDWYAYKLVPVLASWKEQGYDKMTFSMNLQLGRTMCGKFEDDIDNCPFQESPELNNTCTCFFTIGIEPWRTRFDLWNKTCSGGHS

SEQ ID NO: 24583 - protein, 439 aa, Homo sapiens
MTNMSWSFLTRLLEEIHNHSTFVGKVWLTVLVVFRIVLTAVGGEAIYSDEQAKFTCNTRQPGCDNVCYDAFAPLSHVRFWVFQIVVISTPSVMYLGYAVHRLARASEQERRRALRRRPGPRRAPRAHLPPPHAGWPEPADLGEEEPMLGLGEEEEEEETGAAEGAGEEAEEAGAEEACTKAVGADGKAAGTPGPTGQHDGRRRIQREGLMRVYVAQLVARAAFEVAFLVGQYLLYGFEVRPFFPCSRQPCPHVVDCFVSRPTEKTVFLLVMYVVSCLCLLLNLCEMAHLGLGSAQDAVRGRRGPPASAPAPAPRPPPCAFPAAAAGLACPPDYSLVVRAAERARAHDQNLANLALQALRDGAAAGDRDRDSSPCVGLPAASRGPPRAGAPASRTGSATSAGTVGEQGRPGTHERPGAKPRAGSEKGSASSRDGKTTVWI

SEQ ID NO: 24584 - protein, 1116 aa, Homo sapiens
MESPLIYVSVLLLNIFEFSSGIVYNKDDTEKRFACSNKGFPQENEIIKLYLFLENLKIQCFFQTENEIASKAMLSVFTSGGLAPSLGIMNSTYNGIFHFNLTLFSDRILWLVDIPRENITQSTDIAAVEEWLVRITLHHGLNIYATEGTLLDVIREPILQWTPGDVIPESEISKLYPHVVDLKVTKCPCANDVALLGFIVDTIVDGVYIGITFGGFWHDYDTTWFNMTQTIYSQLQEEYEDLSLVDMVLTNHFLVILTSLGLFVSEDLRYPSRHSLSFSRADFCGFERVDYVKGKLWYNERCFANREHFEVDYVTVTFERNRTLSESSSCFYSQEPFLEWVPCLPHIFKGIKIFPTVLTFLVDQERGTGVYLFYNKVRKTAIASVSTLRNNEPNSQSKFPIFRFPSSFSSPVGMVFHPRSHFLYAYGNQIWLSVDGGNTFQLIANFHDDIIKKTFHSFYTSAITFVSQRGKVYSTKAGMGRYSAVGSVTERIFTLYYDHLGFLHKLTLGRFEASGPPTAFGNSRNLFGQPPDMGFETALAPQHTSLDEIIFFAYVPENEPQETIYSKKFGNIHYGKVIHSGKTGRAYIRKVLQHTTPKGFLSSVIAEMKEPFGLEEVNESSCLSSSLLINKAGNVYKLTLDSQVVQALFEDTDIEKTVVLPGYSSFLITSILDNKNALAIATMPESAPNNMTFLKSTWFLYNFGQRNGRTWKIYSKPCNYWFQHDDSPSLNIVKYIDLGNSYVLKAKVIRNAKGFRMLEIPLLTVFVGNPNLLEVTAEVTFDDTDSYVITISAASKVLHQGSTSLAFIMWSASTECFVTTMVPTLKSSCSYLRSMHHIPSKFIPFEDWISGVHKDSQGFNLIKTLPINYRPPSNMGIAIPLTDNFYHADPSKPIPRNMFHMSKKTGKFKQCANVSTREECNCTKDQKFSHAVAFSDCREKVPRFKFPITQYPVSLEIINEDGRVPLQSPYLVTVTEVNMRHNWKLKHTVPENIKRMKQLVEPILGAAVYNPSGLNLSIKGSELFHFRVTVISGVTFCNLIEEFQIYVDEAPLPFPGHTLIAVATAVVLGGLIFIAFMFQLQGIHPWRTFQRWIRRNQEKFSSISLSELIHRSKSEE

SEQ ID NO: 24585 - protein, 638 aa, Homo sapiens
MGRYSAVGSVTERIFTLYYDHLGFLHKLTLGRFEASGPPTAFGNSRNLFGQPPDMGFETALAPQHTSLDEIIFFAYVPENEPQETIYSKKFGNIHYGKVIHSGKTGRAYIRKVLQHTTPKGFLSSVIAEMKEPFGLEEVNESSCLSSSLLINKAGNVYKLTLDSQVVQALFEDTDIEKTVVLPGYSSFLITSILDNKNALAIATMPESAPNNMTFLKSTWFLYNFGQRNGRTWKIYSKPCNYWFQHDDSPSLNIVKYIDLGNSYVLKAKVIRNAKGFRMLEIPLLTVFVGNPNLLEVTAEVTFDDTDSYVITISAASKVLHQGSTSLAFIMWSASTECFVTTMVPTLKSSCSYLRSMHHIPSKFIPFEDWISGVHKDSQGFNLIKTLPINYRPPSNMGIAIPLTDNFYHADPSKPIPRNMFHMSKKTGKFKQCANVSTREECNCTKDQKFSHAVAFSDCREKVPRFKFPITQYPVSLEIINEDGRVPLQSPYLVTVTEVNMRHNWKLKHTVPENIKRMKQLVEPILGAAVYNPSGLNLSIKGSELFHFRVTVISGVTFCNLIEEFQIYVDEAPLPFPGHTLIAVATAVVLGGLIFIAFMFQLQGIHPWRTFQRWIRRNQEKFSSISLSELIHRSKSEE

SEQ ID NO: 24586 - protein, 145 aa, Homo sapiens
MGIGCWRNPLLLLIALVLSAKLGHFQRWEGFQQKLMSKKNMNSTLNFFIQSYNNASNDTYLYRVQRLIRSQMQLTTGVEYIVTVKIGWTKCKRNDTSNSSCPLQSKKLRKSLICESLIYTMPWINYFQLWNNSCLEAEHVGRNLR

SEQ ID NO: 24587 - protein, 111 aa, Homo sapiens
MSLLPRRAPPVSMRLLAAALLLLLLALYTARVDGSKCKCSRKGPKIRYSDVKKLEMKPKYPHCEEKMVIITTKSVSRYRGQEHCLHPKLQSTKRFIKWYNAWNEKRRVYEE

SEQ ID NO: 24588 - protein, 153 aa, Homo sapiens
MGNYSSHKRTKAPKQARKERPADMDKAWWKSFLNHLTRKKPATRIVLILPLDKRQPLANAGQRIDYASGAGLGSPAAPRLRGAGEGSEREPRMPVLLLLRRQEARRPEEGGARAALSWPRLLSRFRSPGKAPREAGPAEEQPRKRCRCPRPQL

SEQ ID NO: 24589 - protein, 622 aa, Homo sapiens
MATVLSRALKLPGKKSPDLGEYDPLTQADSDESEDDLVLNLQKNGGVKNGKSPLGEAPEPDSDAEVAEAAKPHLSEVTTEGYPSEPLGGLEQKAASSLVSYVRTSVFLLTLGISMILVLLCAFLIPCPPRDLHSTWSRHLGSQGGGDLSPLELADVNGDGLRDVLLSFVMSRNGSAVGVSRPAANLVCLSGMNGSTLWSSLLPEEARDITCLELMPGSLAETICLVTGTHKMLSAFNATSGKAIWTLNPNYLSNGTLAAPVVVLPDLDEDGVRDLVVLAIGELQPDLCFLLVSGRTGNPVGRPVKYNIVGVGNLIGPQVYITTNGAVYILFGFGNIQAVALRDIFVQAQNRDSSPPSLQIEEPEWEKRRSINLSELIDVYSDGVELLQMVKAPDSNCSNLLITTRQSLVLLRGQNLTPYWALRLQGLRSQPTPGYFTDDQTLDFLLQIQDGVGMKKMMVVDGDSGSIVWSYRAPCHMKETPATSAVTSDQKSVFLFWAEGLSAASPNSDIILGTEPPSLHHLYLLHPAFPSILLDLANTTGTVTASEVGINDLWKDAFYVTRTTGPSSEGHPAALVVSKLSLRWALMEGQMAQLQESTPKIGRGELRRFLSRIKFVEAPYEI

SEQ ID NO: 24590 - protein, 33 aa, Homo sapiens
MSPPSSMCSPVPLLAAASGQNRMTQGQHFLQKV

SEQ ID NO: 24591 - protein, 2028 aa, Homo sapiens
MDVTVSELLELFLQSPLVTWVKTFGPFGSGSQDNLTMYMDLVDGIFLNQIMLQIDPRPTNQRINKHVNNDVNLRIQNLTILVRNIKTYYQEVLQQLIVMNLPNVLMIGRDPLSGKSMEEIKKVLLLVLGCAVQCERKEEFIERIKQLDIETQAGIVAHIQEVTHNQENVFDLQWLELPDVAPEELEALSRSMVLHLRRLIDQRDECTELIVDLTQERDYLQAQHPPSPIKSSSADSTPSPTSSLSSEDKQHLAVELADTKARLRRVRQELEDKTEQLVDTRHEVDQLVLELQKVKQENIQLAADARSARAYRDELDSLREKANRVERLELELTRCKEKLHDVDFYKARMEELREDNIILIETKAMLEEQLTAARARGDKVHELEKENLQLKSKLHDLELDRDTDKKRIEELLEENMVLEIAQKQSMNESAHLGWELEQLSKNADLSDASRKSFVFELNECASSRILKLEKENQSLQSTIQGLRDASLVLEESGLKCGELEKENHQLSKKIEKLQTQLEREKQSNQDLETLSEELIREKEQLQSDMETLKADKARQIKDLEQEKDHLNRAMWSLRERSQVSSEARMKDVEKENKALHQTVTEANGKLSQLEFEKRQLHRDLEQAKEKGERAEKLERELQRLQEENGRLARKVTSLETATEKVEALEHESQGLQLENRTLRKSLDTLQNVSLQLEGLERDNKQLDAENLELRRLVETMRFTSTKLAQMERENQQLEREKEELRKNVDLLKALGKKSERLELSYQSVSAENLRLQQSLESSSHKTQTLESELGELEAERQALRRDLEALRLANAQLEGAEKDRKALEQEVAQLEKDKKLLEKEAKRLWQQVELKDAVLDDSTAKLSAVEKESRALDKELARCRDAAGKLKELEKDNRDLTKQVTVHARTLTTLREDLVLEKLKSQQLSSELDKLSQELEKVGLNRELLLQEDDSGSDTKYKILEGRNESALKTTLAMKEEKIVLLEAQMEEKASLNRQLESELQMLKKECETLRQNQGEGQHLQNSFKHPAGKTAASHQGKEAWGPGHKEATMELLRVKDRAIELERNNAALQAEKQLLKEQLQHLETQNVTFSSQILTLQKQSAFLQEHNTTLQTQTAKLQVENSTLSSQSAALTAQYTLLQNHHTAKETENESLQRQQEQLTAAYEALLQDHEHLGTLHERQSAEYEALIRQHSCLKTLHRNLELEHKELGERHGDMLKRKAELEEREKVLTTEREALQQEQRTNALAMGENQRLRGELDRVNFLHHQLKGEYEELHAHTKELKTSLNNAQLELNRWQARFDELKEQHQTMDISLTKLDNHCELLSRLKGNLEEENHHLLSQIQLLSQQNQMLLEQNMENKEQYHEEQKQYIDKLNALRRHKEKLEEKIMDQYKFYDPPPKKKNHWIGAKALVKLIKPKKEGSRERLKSTVDSPPWQLESSDPASPAASQPLRSQAENPDTPALGSNCAEERDAHNGSVGKGPGDLKPKRGSPHRGSLDRTDASTDLAMRSWPSELGSRTCSTSATTTAPSNSTPIARHPGRTKGYNSDDNLCEPSLEFEVPNHRQYVSRPSSLESSRNTSSNSSPLNLKGSSEQLHGRSESFSSEDLIPSRDLATLPREASTPGRNALGRHEYPLPRNGPLPQEGAQKRGTAPPYVGVRPCSASPSSEMVTLEEFLEESNRSSPTHDTPSCRDDLLSDYFRKASDPPAIGGQPGPPAKKEGAKMPTNFVAPTVKMAAPTSEGRPLKPGQYVKPNFRLTEAEAPPSVAPRQAQPPQSLSLGRPRQAPVPPASHAPASRSASLSRAFSLASADLLRASGPEACKQESPQKLGAPEALGGRETGSHTLQSPAPPSSHSLARERTPLVGKAGSSCQGPGPRSRPLDTRRFSLAPPKEERLAPLHQSATAPAIATAGAGAAAAGSGSNSQLLHFSPAAAPAARTKPKAPPRSGEVATITPVRAGLSLSEGDGVPGQGCSEGLPAKSPGRSPDLAPHLGRALEDCSRGSVSKSSPASPEPGGDPQTVWYEYGCV

SEQ ID NO: 24592 - protein, 552 aa, Homo sapiens
MSVLSPGDLKPKRGSPHRGSLDRTDASTDLAMRSWPSELGSRTCSTSATTTAPSNSTPIARHPGRTKGYNSDDNLCEPSLEFEVPNHRQYVSRPSSLESSRNTSSNSSPLNLKGSSEQLHGRSESFSSEDLIPSRDLATLPREASTPGRNALGRHEYPLPRNGPLPQEGAQKRGTAPPYVGVRPCSASPSSEMVTLEEFLEESNRSSPTHDTPSCRDDLLSDYFRKASDPPAIGGQPGPPAKKEGAKMPTNFVAPTVKMAAPTSEGRPLKPGQYVKPNFRLTEAEAPPSVAPRQAQPPQSLSLGRPRQAPVPPASHAPASRSASLSRAFSLASADLLRASGPEACKQESPQKLGAPEALGGRETGSHTLQSPAPPSSHSLARERTPLVGKAGSSCQGPGPRSRPLDTRRFSLAPPKEERLAPLHQSATAPAIATAGAGAAAAGSGSNSQLLHFSPAAAPAARTKPKAPPRSGEVATITPVRAGLSLSEGDGVPGQGCSEGLPAKSPGRSPDLAPHLGRALEDCSRGSVSKSSPASPEPGGDPQTVWYEYGCV

SEQ ID NO: 24593 - protein, 478 aa, Homo sapiens
MPSSTLPGWPGSSGGPVSRPSSLESSRNTSSNSSPLNLKGSSEQLHGRSESFSSEDLIPSRDLATLPREASTPGRNALGRHEYPLPRNGPLPQEGAQKRGTAPPYVGVRPCSASPSSEMVTLEEFLEESNRSSPTHDTPSCRDDLLSDYFRKASDPPAIGGQPGPPAKKEGAKMPTNFVAPTVKMAAPTSEGRPLKPGQYVKPNFRLTEAEAPPSVAPRQAQPPQSLSLGRPRQAPVPPASHAPASRSASLSRAFSLASADLLRASGPEACKQESPQKLGAPEALGGRETGSHTLQSPAPPSSHSLARERTPLVGKAGSSCQGPGPRSRPLDTRRFSLAPPKEERLAPLHQSATAPAIATAGAGAAAAGSGSNSQLLHFSPAAAPAARTKPKAPPRSGEVATITPVRAGLSLSEGDGVPGQGCSEGLPAKSPGRSPDLAPHLGRALEDCSRGSVSKSSPASPEPGGDPQTVWYEYGCV

SEQ ID NO: 24594 - protein, 1278 aa, Homo sapiens
MAQSKRHVYSRTPSGSRMSAEASARPLRVGSRVEVIGKGHRGTVAYVGATLFATGKWVGVILDEAKGKNDGTVQGRKYFTCDEGHGIFVRQSQIQVFEDGADTTSPETPDSSASKVLKREGTDTTAKTSKLRGLKPKKAPTARKTTTRRPKPTRPASTGVAGASSSLGPSGSASAGELSSSEPSTPAQTPLAAPIIPTPVLTSPGAVPPLPSPSKEEEGLRAQVRDLEEKLETLRLKRAEDKAKLKELEKHKIQLEQVQEWKSKMQEQQADLQRRLKEARKEAKEALEAKERYMEEMADTADAIEMATLDKEMAEERAESLQQEVEALKERVDELTTDLEILKAEIEEKGSDGAASSYQLKQLEEQNARLKDALVRMRDLSSSEKQEHVKLQKLMEKKNQELEVVRQQRERLQEELSQAESTIDELKEQVDAALGAEEMVEMLTDRNLNLEEKVRELRETVGDLEAMNEMNDELQENARETELELREQLDMAGARVREAQKRVEAAQETVADYQQTIKKYRQLTAHLQDVNRELTNQQEASVERQQQPPPETFDFKIKFAETKAHAKAIEMELRQMEVAQANRHMSLLTAFMPDSFLRPGGDHDCVLVLLLMPRLICKAELIRKQAQEKFELSENCSERPGLRGAAGEQLSFAAGLVYSLSLLQATLHRYEHALSQCSVDVYKKVGSLYPEMSAHERSLDFLIELLHKDQLDETVNVEPLTKAIKYYQHLYSIHLAEQPEDCTMQLADHIKFTQSALDCMSVEVGRLRAFLQGGQEATDIALLLRDLETSCSDIRQFCKKIRRRMPGTDAPGIPAALAFGPQVSDTLLDCRKHLTWVVAVLQEVAAAAAQLIAPLAENEGLLVAALEELAFKASEQIYGTPSSSPYECLRQSCNILISTMNKLATAMQEGEYDAERPPSKPPPVELRAAALRAEITDAEGLGLKLEDRETVIKELKKSLKIKGEELSEANVRLSLLEKKLDSAAKDADERIEKVQTRLEETQALLRKKEKEFEETMDALQADIDQLEAEKAELKQRLNSQSKRTIEGLRGPPPSGIATLVSGIAGEEQQRGAIPGQAPGSVPGPGLVKDSPLLLQQISAMRLHISQLQHENSILKGAQMKASLASLPPLHVAKLSHEGPGSELPAGALYRKTSQLLETLNQLSTHTHVVDITRTSPAAKSPSAQLMEQVAQLKSLSDTVEKLKDEVLKETVSQRPGATVPTDFATFPSSAFLRAKEEQQDDTVYMGKVTFSCAAGFGQRHRLVLTQEQLHQLHSRLIS

SEQ ID NO: 24595 - protein, 1144 aa, Homo sapiens
MMRQAPTARKTTTRRPKPTRPASTGVAGASSSLGPSGSASAGELSSSEPSTPAQTPLAAPIIPTPVLTSPGAVPPLPSPSKEEEGLRAQVRDLEEKLETLRLKRAEDKAKLKELEKHKIQLEQVQEWKSKMQEQQADLQRRLKEARKEAKEALEAKERYMEEMADTADAIEMATLDKEMAEERAESLQQEVEALKERVDELTTDLEILKAEIEEKGSDGAASSYQLKQLEEQNARLKDALVRMRDLSSSEKQEHVKLQKLMEKKNQELEVVRQQRERLQEELSQAESTIDELKEQVDAALGAEEMVEMLTDRNLNLEEKVRELRETVGDLEAMNEMNDELQENARETELELREQLDMAGARVREAQKRVEAAQETVADYQQTIKKYRQLTAHLQDVNRELTNQQEASVERQQQPPPETFDFKIKFAETKAHAKAIEMELRQMEVAQANRHMSLLTAFMPDSFLRPGGDHDCVLVLLLMPRLICKAELIRKQAQEKFELSENCSERPGLRGAAGEQLSFAAGLVYSLSLLQATLHRYEHALSQCSVDVYKKVGSLYPEMSAHERSLDFLIELLHKDQLDETVNVEPLTKAIKYYQHLYSIHLAEQPEDCTMQLADHIKFTQSALDCMSVEVGRLRAFLQGGQEATDIALLLRDLETSCSDIRQFCKKIRRRMPGTDAPGIPAALAFGPQVSDTLLDCRKHLTWVVAVLQEVAAAAAQLIAPLAENEGLLVAALEELAFKASEQIYGTPSSSPYECLRQSCNILISTMNKLATAMQEGEYDAERPPSKPPPVELRAAALRAEITDAEGLGLKLEDRETVIKELKKSLKIKGEELSEANVRLSLLEKKLDSAAKDADERIEKVQTRLEETQALLRKKEKEFEETMDALQADIDQLEAEKAELKQRLNSQSKRTIEGLRGPPPSGIATLVSGIAGEEQQRGAIPGQAPGSVPGPGLVKDSPLLLQQISAMRLHISQLQHENSILKGAQMKASLASLPPLHVAKLSHEGPGSELPAGALYRKTSQLLETLNQLSTHTHVVDITRTSPAAKSPSAQLMEQVAQLKSLSDTVEKLKDEVLKETVSQRPGATVPTDFATFPSSAFLRAKEEQQDDTVYMGKVTFSCAAGFGQRHRLVLTQEQLHQLHSRLIS

SEQ ID NO: 24596 - protein, 1236 aa, Homo sapiens
MSAEASARPLRVGSRVEVIGKGHRGTVAYVGATLFATGKWVGVILDEAKGKNDGTVQGRKYFTCDEGHGIFVRQSQIQVFEDGADTTSPETPDSSASKVLKREGTDTTAKTSKLPTRPASTGVAGASSSLGPSGSASAGELSSSEPSTPAQTPLAAPIIPTPVLTSPGAVPPLPSPSKEEEGLRAQVRDLEEKLETLRLKRAEDKAKLKELEKHKIQLEQVQEWKSKMQEQQADLQRRLKEARKEAKEALEAKERYMEEMADTADAIEMATLDKEMAEERAESLQQEVEALKERVDELTTDLEILKAEIEEKGSDGAASSYQLKQLEEQNARLKDALVRMRDLSSSEKQEHVKLQKLMEKKNQELEVVRQQRERLQEELSQAESTIDELKEQVDAALGAEEMVEMLTDRNLNLEEKVRELRETVGDLEAMNEMNDELQENARETELELREQLDMAGARVREAQKRVEAAQETVADYQQTIKKYRQLTAHLQDVNRELTNQQEASVERQQQPPPETFDFKIKFAETKAHAKAIEMELRQMEVAQANRHMSLLTAFMPDSFLRPGGDHDCVLVLLLMPRLICKAELIRKQAQEKFELSENCSERPGLRGAAGEQLSFAAGLVYSLSLLQATLHRYEHALSQCSVDVYKKVGSLYPEMSAHERSLDFLIELLHKDQLDETVNVEPLTKAIKYYQHLYSIHLAEQPEDCTMQLADHIKFTQSALDCMSVEVGRLRAFLQGGQEATDIALLLRDLETSCSDIRQFCKKIRRRMPGTDAPGIPAALAFGPQVSDTLLDCRKHLTWVVAVLQEVAAAAAQLIAPLAENEGLLVAALEELAFKASEQIYGTPSSSPYECLRQSCNILISTMNKLATAMQEGEYDAERPPSKPPPVELRAAALRAEITDAEGLGLKLEDRETVIKELKKSLKIKGEELSEANVRLSLLEKKLDSAAKDADERIEKVQTRLEETQALLRKKEKEFEETMDALQADIDQLEAEKAELKQRLNSQSKRTIEGLRGPPPSGIATLVSGIAGGAIPGQAPGSVPGPGLVKDSPLLLQQISAMRLHISQLQHENSILKGAQMKASLASLPPLHVAKLSHEGPGSELPAGALYRKTSQLLETLNQLSTHTHVVDITRTSPAAKSPSAQLMEQVAQLKSLSDTVEKLKDEVLKETVSQRPGATVPTDFATFPSSAFLRAKEEQQDDTVYMGKVTFSCAAGFGQRHRLVLTQEQLHQLHSRLIS

SEQ ID NO: 24597 - protein, 1253 aa, Homo sapiens
MAQSKRHVYSRTPSGSRMSAEASARPLRVGSRVEVIGKGHRGTVAYVGATLFATGKWVGVILDEAKGKNDGTVQGRKYFTCDEGHGIFVRQSQIQVFEDGADTTSPETPDSSASKVLKREGTDTTAKTSKLPTRPASTGVAGASSSLGPSGSASAGELSSSEPSTPAQTPLAAPIIPTPVLTSPGAVPPLPSPSKEEEGLRAQVRDLEEKLETLRLKRAEDKAKLKELEKHKIQLEQVQEWKSKMQEQQADLQRRLKEARKEAKEALEAKERYMEEMADTADAIEMATLDKEMAEERAESLQQEVEALKERVDELTTDLEILKAEIEEKGSDGAASSYQLKQLEEQNARLKDALVRMRDLSSSEKQEHVKLQKLMEKKNQELEVVRQQRERLQEELSQAESTIDELKEQVDAALGAEEMVEMLTDRNLNLEEKVRELRETVGDLEAMNEMNDELQENARETELELREQLDMAGARVREAQKRVEAAQETVADYQQTIKKYRQLTAHLQDVNRELTNQQEASVERQQQPPPETFDFKIKFAETKAHAKAIEMELRQMEVAQANRHMSLLTAFMPDSFLRPGGDHDCVLVLLLMPRLICKAELIRKQAQEKFELSENCSERPGLRGAAGEQLSFAAGLVYSLSLLQATLHRYEHALSQCSVDVYKKVGSLYPEMSAHERSLDFLIELLHKDQLDETVNVEPLTKAIKYYQHLYSIHLAEQPEDCTMQLADHIKFTQSALDCMSVEVGRLRAFLQGGQEATDIALLLRDLETSCSDIRQFCKKIRRRMPGTDAPGIPAALAFGPQVSDTLLDCRKHLTWVVAVLQEVAAAAAQLIAPLAENEGLLVAALEELAFKASEQIYGTPSSSPYECLRQSCNILISTMNKLATAMQEGEYDAERPPSKPPPVELRAAALRAEITDAEGLGLKLEDRETVIKELKKSLKIKGEELSEANVRLSLLEKKLDSAAKDADERIEKVQTRLEETQALLRKKEKEFEETMDALQADIDQLEAEKAELKQRLNSQSKRTIEGLRGPPPSGIATLVSGIAGGAIPGQAPGSVPGPGLVKDSPLLLQQISAMRLHISQLQHENSILKGAQMKASLASLPPLHVAKLSHEGPGSELPAGALYRKTSQLLETLNQLSTHTHVVDITRTSPAAKSPSAQLMEQVAQLKSLSDTVEKLKDEVLKETVSQRPGATVPTDFATFPSSAFLRAKEEQQDDTVYMGKVTFSCAAGFGQRHRLVLTQEQLHQLHSRLIS

SEQ ID NO: 24598 - protein, 1139 aa, Homo sapiens
MMRQAPTARKTTTRRPKPTRPASTGVAGASSSLGPSGSASAGELSSSEPSTPAQTPLAAPIIPTPVLTSPGAVPPLPSPSKEEEGLRAQVRDLEEKLETLRLKRAEDKAKLKELEKHKIQLEQVQEWKSKMQEQQADLQRRLKEARKEAKEALEAKERYMEEMADTADAIEMATLDKEMAEERAESLQQEVEALKERVDELTTDLEILKAEIEEKGSDGAASSYQLKQLEEQNARLKDALVRMRDLSSSEKQEHVKLQKLMEKKNQELEVVRQQRERLQEELSQAESTIDELKEQVDAALGAEEMVEMLTDRNLNLEEKVRELRETVGDLEAMNEMNDELQENARETELELREQLDMAGARVREAQKRVEAAQETVADYQQTIKKYRQLTAHLQDVNRELTNQQEASVERQQQPPPETFDFKIKFAETKAHAKAIEMELRQMEVAQANRHMSLLTAFMPDSFLRPGGDHDCVLVLLLMPRLICKAELIRKQAQEKFELSENCSERPGLRGAAGEQLSFAAGLVYSLSLLQATLHRYEHALSQCSVDVYKKVGSLYPEMSAHERSLDFLIELLHKDQLDETVNVEPLTKAIKYYQHLYSIHLAEQPEDCTMQLADHIKFTQSALDCMSVEVGRLRAFLQGGQEATDIALLLRDLETSCSDIRQFCKKIRRRMPGTDAPGIPAALAFGPQVSDTLLDCRKHLTWVVAVLQEVAAAAAQLIAPLAENEGLLVAALEELAFKASEQIYGTPSSSPYECLRQSCNILISTMNKLATAMQEGEYDAERPPSKPPPVELRAAALRAEITDAEGLGLKLEDRETVIKELKKSLKIKGEELSEANVRLSLLEKKLDSAAKDADERIEKVQTRLEETQALLRKKEKEFEETMDALQADIDQLEAEKAELKQRLNSQSKRTIEGLRGPPPSGIATLVSGIAGGAIPGQAPGSVPGPGLVKDSPLLLQQISAMRLHISQLQHENSILKGAQMKASLASLPPLHVAKLSHEGPGSELPAGALYRKTSQLLETLNQLSTHTHVVDITRTSPAAKSPSAQLMEQVAQLKSLSDTVEKLKDEVLKETVSQRPGATVPTDFATFPSSAFLRAKEEQQDDTVYMGKVTFSCAAGFGQRHRLVLTQEQLHQLHSRLIS

SEQ ID NO: 24599 - protein, 1271 aa, Homo sapiens
MAQSKRHVYSRTPSGSRMSAEASARPLRVGSRVEVIGKGHRGTVAYVGATLFATGKWVGVILDEAKGKNDGTVQGRKYFTCDEGHGIFVRQSQIQVFEDGADTTSPETPDSSASKVLKREGTDTTAKTSKLAPTARKTTTRRPKPTRPASTGVAGASSSLGPSGSASAGELSSSEPSTPAQTPLAAPIIPTPVLTSPGAVPPLPSPSKEEEGLRAQVRDLEEKLETLRLKRAEDKAKLKELEKHKIQLEQVQEWKSKMQEQQADLQRRLKEARKEAKEALEAKERYMEEMADTADAIEMATLDKEMAEERAESLQQEVEALKERVDELTTDLEILKAEIEEKGSDGAASSYQLKQLEEQNARLKDALVRMRDLSSSEKQEHVKLQKLMEKKNQELEVVRQQRERLQEELSQAESTIDELKEQVDAALGAEEMVEMLTDRNLNLEEKVRELRETVGDLEAMNEMNDELQENARETELELREQLDMAGARVREAQKRVEAAQETVADYQQTIKKYRQLTAHLQDVNRELTNQQEASVERQQQPPPETFDFKIKFAETKAHAKAIEMELRQMEVAQANRHMSLLTAFMPDSFLRPGGDHDCVLVLLLMPRLICKAELIRKQAQEKFELSENCSERPGLRGAAGEQLSFAAGLVYSLSLLQATLHRYEHALSQCSVDVYKKVGSLYPEMSAHERSLDFLIELLHKDQLDETVNVEPLTKAIKYYQHLYSIHLAEQPEDCTMQLADHIKFTQSALDCMSVEVGRLRAFLQGGQEATDIALLLRDLETSCSDIRQFCKKIRRRMPGTDAPGIPAALAFGPQVSDTLLDCRKHLTWVVAVLQEVAAAAAQLIAPLAENEGLLVAALEELAFKASEQIYGTPSSSPYECLRQSCNILISTMNKLATAMQEGEYDAERPPSKPPPVELRAAALRAEITDAEGLGLKLEDRETVIKELKKSLKIKGEELSEANVRLSLLEKKLDSAAKDADERIEKVQTRLEETQALLRKKEKEFEETMDALQADIDQLEAEKAELKQRLNSQSKRTIEGLRGPPPSGIATLVSGIAGEEQQRGAIPGQAPGSVPGPGLVKDSPLLLQQISAMRLHISQLQHENSILKGAQMKASLASLPPLHVAKLSHEGPGSELPAGALYRKTSQLLETLNQLSTHTHVVDITRTSPAAKSPSAQLMEQVAQLKSLSDTVEKLKDEVLKETVSQRPGATVPTDFATFPSSAFLRAKEEQQDDTVYMGKVTFSCAAGFGQRHRLVLTQEQLHQLHSRLIS

SEQ ID NO: 24600 - protein, 579 aa, Homo sapiens
MNAIVALCHFCELHGPRTLFCTEVLHAPLPQGDGNEDSPGQGEQAEEEEGGIQMNSRMRAHSPAEGASVESSSPGPKKSDMCEGCRSLAAGHPGYISHDKETSIKYVSHQHPSHPQLFSIVRQACVRSLSCEVCPGREGPIFFGDEQHGFVFSHTFFIKDSLARGFQRWYSIITIMMDRIYLINSWPFLLGKVRGIIDELQGKALKVFEAEQFGCPQRAQRMNTAFTPFLHQRNGNAARSLTSLTSDDNLWACLHTSFAWLLKACGSRLTEKLLEGAPTEDTLVQMEKLADLEEESESWDNSEAEEEEKAPVLPESTEGRELTQGPAESSSLSGCGSWQPRKLPVFKSLRHMRQVLGAPSFRMLAWHVLMGNQVIWKSRDVDLVQSAFEVLRTMLPVGCVRIIPYSSQYEEAYRCNFLGLSPHVQIPPHVLSSEFAVIVEVHAAARSTLHPVGCEDDQSLSKYEFVVTSGSPVAADRVGPTILNKIEAALTNQNLSVDVVDQCLVCLKEEWMNKVKVLFKFTKVDSRPKEDTQKLLSILGASEEDNVKLLKFWMTGLSKTYKSHLMSTVRSPTASESRN

SEQ ID NO: 24601 - protein, 342 aa, Homo sapiens
MNAIVALCHFCELHGPRTLFCTEVLHAPLPQGDGNEDSPGQGEQAEEEEGGIQMNSRMRAHSPAEGASVESSSPGPKKSDMCEGCRSLAAGHPGYISHDKETSIKYVSHQHPSHPQLFSIVRQACVRSLSCEVCPGREGPIFFGDEQHGFVFSHTFFIKDSLARGFQRWYSIITIMMDRIYLINSWPFLLGKVRGIIDELQGKALKVFEAEQFGCPQRAQRMNTAFTPFLHQRNGNAARSLTSLTSDDNLWACLHTSFAWLLKACGSRLTEKLLEGAPTEDTLVQMEKLAGEAGVLLPGPWPGWPWGGTSCLLSWQESLREGNAALNQPRTSLREAHPPISV

SEQ ID NO: 24602 - protein, 197 aa, Homo sapiens
MNAIVALCHFCELHGPRTLFCTEVLHAPLPQGDGNEDSPGQGEQAEEEEGGIQMNSRMRAHSPAEGASVESSSPGPKKSDMCEGCRSLAAGHPGYISHDKETSIKYVSHQHPSHPQLFSIVRQACVRSLSCEVSLVATEPVSVGAHMLPGALGGLGASIAQGGRHWSSLRADPQISTAQGTGRLPCPELREESCWTC

SEQ ID NO: 24603 - protein, 382 aa, Homo sapiens
MGLLLPLALCILVLCCGAMSPPQLALNPSALLSRGCNDSDVLAVAGFALRDINKDRKDGYVLRLNRVNDAQEYRRGGLGSLFYLTLDVLETDCHVLRKKAWQDCGMRIFFESVYGQCKAIFYMNNPSRVLYLAAYNCTLRPVSKKKIYMTCPDCPSSIPTDSSNHQVLEAATESLAKYNNENTSKQYSLFKVTRASSQWVVGPSYFVEYLIKESPCTKSQASSCSLQSSDSVPVGLCKGSLTRTHWEKFVSVTCDFFESQAPATGSENSAVNQKPTNLPKVEESQQKNTPPTDSPSKAGPRGSVQYLPDLDDKNSQEKGPQEAFPVHLDLTTNPQGETLDISFLFLEPMEEKLVVLPFPKEKARTAECPGPAQNASPLVLPP

SEQ ID NO: 24604 - protein, 345 aa, Homo sapiens
MGLLLPLALCILVLCCGAMSPPQLALNPSALLSRGCNDSDVLAVAGFALRDINKDRKDGYVLRLNRVNDAQEYRRVYGQCKAIFYMNNPSRVLYLAAYNCTLRPVSKKKIYMTCPDCPSSIPTDSSNHQVLEAATESLAKYNNENTSKQYSLFKVTRASSQWVVGPSYFVEYLIKESPCTKSQASSCSLQSSDSVPVGLCKGSLTRTHWEKFVSVTCDFFESQAPATGSENSAVNQKPTNLPKVEESQQKNTPPTDSPSKAGPRGSVQYLPDLDDKNSQEKGPQEAFPVHLDLTTNPQGETLDISFLFLEPMEEKLVVLPFPKEKARTAECPGPAQNASPLVLPP

SEQ ID NO: 24605 - protein, 259 aa, Homo sapiens
MHKLKSSQKDKVRQFMACTQAGERTAIYCLTQNEWRLDEATDSFFQNPDSLHRESMRNAVDKKKLERLYGRYKDPQDENKIGVDGIQQFCDDLSLDPASISVLVIAWKFRAATQCEFSRKEFLDGMTELGCDSMEKLKALLPRLEQELKDTAKFKDFYQFTFTFAKNPGQKGLDLEMAVAYWKLVLSGRFKFLDLWNTFLMEHHKRSIPRDTWNLLLDFGNMIADDMSNYDEEGAWPVLIDDFVEYARPVVTGGKRSLF

SEQ ID NO: 24606 - protein, 186 aa, Homo sapiens
MHKLKSSQKDKVRQFMACTQAGERTAIYCLTQNEWRLDEATDSFFQNPDSLHRESMRNAVDKKKLERLYGRYKDPQDENKIGVDGIQQFCDDLSLDPASISVLVIAWKFRAATQCEFSRKEFLDGMTELGCDSMEKLKALLPRLEQELKDTAKFKDFYQFTFTFAKNPGQKGLGSPPFLNVKALHH

SEQ ID NO: 24607 - protein, 156 aa, Homo sapiens
MNILMLTFIICGLLTRVTKGSFEPQKCWKNNVGHCRRRCLDTERYILLCRNKLSCCISIISHEYTRRPAFPVIHLEDITLDYSDVDSFTGSPVSMLNDLITFDTTKFGETMTPETNTPETTMPPSEATTPETTMPPSETATSETMPPPSQTALTHN

SEQ ID NO: 24608 - protein, 304 aa, Homo sapiens
MGQCVTKCKNPSSTLGSKNGDREPSNKSHSRRGAGHREEQVPPCGKPGGDILVNGTKKAEAATEACQLPTSSGDAGRESKSNAEESSLQRLEELFRRYKDEREDAILEEGMERFCNDLCVDPTEFRVLLLAWKFQAATMCKFTRKEFFDGCKAISADSIDGICARFPSLLTEAKQEDKFKDLYRFTFQFGLDSEEGQRSLHREIAIALWKLVFTQNNPPVLDQWLNFLTENPSGIKGISRDTWNMFLNFTQVIGPDLSNYSEDEAWPSLFDTFVEWEMERRKREGEGRGALSSGPEGLCPEEQT

SEQ ID NO: 24609 - protein, 102 aa, Homo sapiens
MSSPPEGKLETKAGHPPAVKAGGMRIVQKHPHTGDTKEEKDKDDQEWESPSPPKPTVFISGVIARGDKDFPPAAAQVAHQKPHASMDKHPSPRTQHIQQPRK

SEQ ID NO: 24610 - protein, 237 aa, Homo sapiens
MPVKKKRKSPGVAAAVAEDGGLKKCKISSYCRSQPPARLISGEEHFSSKKCLAWFYEYAGPDEVVGPEGMEKFCEDIGVEPENIIMLVLAWKLEAESMGFFTKEEWLKGMTSLQCDCTEKLQNKFDFLRSQLNDISSFKNIYRYAFDFARDKDQRSLDIDTAKSMLALLLGRTWPLFSVFYQYLEQSKYRVMNKDQWYNVLEFSRTVHADLSNYDEDGAWPVLLDEFVEWQKVRQTS

SEQ ID NO: 24611 - protein, 326 aa, Homo sapiens
MALSGSTPAPCWEEDECLDYYGMLSLHRMFEVVGGQLTECELELLAFLLDEAPGAAGGLARARSGLELLLELERRGQCDESNLRLLGQLLRVLARHDLLPHLARKRRRPVSPERYSYGTSSSSKRTEGSCRRRRQSSSSANSQQGQWETGSPPTKRQRRSRGRPSGGARRRRRGAPAAPQQQSEPARPSSEGKVTCDIRLRVRAEYCEHGPALEQGVASRRPQALARQLDVFGQATAVLRSRDLGSVVCDIKFSELSYLDAFWGDYLSGALLQALRGVFLTEALREAVGREAVRLLVSVDEADYEAGRRRLLLMEEEGGRRPTEAS

SEQ ID NO: 24612 - protein, 321 aa, Homo sapiens
MALSGSTPAPCWEEDECLDYYGMLSLHRMFEVVGGQLTECELELLAFLLDEAPGAAGGLARARSGLELLLELERRGQCDESNLRLLGQLLRVLARHDLLPHLARKRRRPVSPERYSYGTSSSSKRTEGSCRRRRQSSSSANSQQGSPPTKRQRRSRGRPSGGARRRRRGAPAAPQQQSEPARPSSEGKVTCDIRLRVRAEYCEHGPALEQGVASRRPQALARQLDVFGQATAVLRSRDLGSVVCDIKFSELSYLDAFWGDYLSGALLQALRGVFLTEALREAVGREAVRLLVSVDEADYEAGRRRLLLMEEEGGRRPTEAS

SEQ ID NO: 24613 - protein, 729 aa, Homo sapiens
MPTGFVAPILCVLLPSPTREAATVASATGDSASERESAAPAAAPTAEAPPPSVVTRPEPQALPSPAIRAPLPDLYPFGTMRGGGFGDRDRDRDRGGFGARGGGGLPPKKFGNPGERLRKKKWDLSELPKFEKNFYVEHPEVARLTPYEVDELRRKKEITVRGGDVCPKPVFAFHHANFPQYVMDVLMDQHFTEPTPIQCQGFPLALSGRDMVGIAQTGSGKTLAYLLPAIVHINHQPYLERGDGPICLVLAPTRELAQQVQQVADDYGKCSRLKSTCIYGGAPKGPQIRDLERGVEICIATPGRLIDFLESGKTNLRRCTYLVLDEADRMLDMGFEPQIRKIVDQIRPDRQTLMWSATWPKEVRQLAEDFLRDYTQINVGNLELSANHNILQIVDVCMESEKDHKLIQLMEEIMAEKENKTIIFVETKRRCDDLTRRMRRDGWPAMCIHGDKSQPERDWVLNEFRSGKAPILIATDVASRGLDVEDVKFVINYDYPNSSEDYVHRIGRTARSTNKGTAYTFFTPGNLKQARELIKVLEEANQAINPKLMQLVDHRGGGGGGGGRSRYRTTSSANNPNLMYQDECDRRLRGVKDGGRRDSASYRDRSETDRAGYANGSGYGSPNSAFGAQAGQYTYGQGTYGAAAYGTSSYTAQEYGAGTYGASSTTSTGRSSQSSSQQFSGIGRSGQQPQPLMSQQFAQPPGATNMIGYMGQTAYQYPPPPPPPPPSRK

SEQ ID NO: 24614 - protein, 650 aa, Homo sapiens
MRGGGFGDRDRDRDRGGFGARGGGGLPPKKFGNPGERLRKKKWDLSELPKFEKNFYVEHPEVARLTPYEVDELRRKKEITVRGGDVCPKPVFAFHHANFPQYVMDVLMDQHFTEPTPIQCQGFPLALSGRDMVGIAQTGSGKTLAYLLPAIVHINHQPYLERGDGPICLVLAPTRELAQQVQQVADDYGKCSRLKSTCIYGGAPKGPQIRDLERGVEICIATPGRLIDFLESGKTNLRRCTYLVLDEADRMLDMGFEPQIRKIVDQIRPDRQTLMWSATWPKEVRQLAEDFLRDYTQINVGNLELSANHNILQIVDVCMESEKDHKLIQLMEEIMAEKENKTIIFVETKRRCDDLTRRMRRDGWPAMCIHGDKSQPERDWVLNEFRSGKAPILIATDVASRGLDVEDVKFVINYDYPNSSEDYVHRIGRTARSTNKGTAYTFFTPGNLKQARELIKVLEEANQAINPKLMQLVDHRGGGGGGGGRSRYRTTSSANNPNLMYQDECDRRLRGVKDGGRRDSASYRDRSETDRAGYANGSGYGSPNSAFGAQAGQYTYGQGTYGAAAYGTSSYTAQEYGAGTYGASSTTSTGRSSQSSSQQFSGIGRSGQQPQPLMSQQFAQPPGATNMIGYMGQTAYQYPPPPPPPPPSRK

SEQ ID NO: 24615 - protein, 652 aa, Homo sapiens
MRGGGFGDRDRDRDRGGFGARGGGGLPPKKFGNPGERLRKKKWDLSELPKFEKNFYVEHPEVARLTPYEVDELRRKKEITVRGGDVCPKPVFAFHHANFPQYVMDVLMDQHFTEPTPIQCQGFPLALSGRDMVGIAQTGSGKTLAYLLPAIVHINHQPYLERGDGPICLVLAPTRELAQQVQQVADDYGKCSRLKSTCIYGGAPKGPQIRDLERGVEICIATPGRLIDFLESGKTNLRRCTYLVLDEADRMLDMGFEPQIRKIVDQIRPDRQTLMWSATWPKEVRQLAEDFLRDYTQINVGNLELSANHNILQIVDVCMESEKDHKLIQLMEEIMAEKENKTIIFVETKRRCDDLTRRMRRDGWPAMCIHGDKSQPERDWVLNEFRSGKAPILIATDVASRGLGLDVEDVKFVINYDYPNSSEDYVHRIGRTARSTNKGTAYTFFTPGNLKQARELIKVLEEANQAINPKLMQLVDHRGGGGGGGGRSRYRTTSSANNPNLMYQDECDRRLRGVKDGGRRDSASYRDRSETDRAGYANGSGYGSPNSAFGAQAGQYTYGQGTYGAAAYGTSSYTAQEYGAGTYGASSTTSTGRSSQSSSQQFSGIGRSGQQPQPLMSQQFAQPPGATNMIGYMGQTAYQYPPPPPPPPPSRK

SEQ ID NO: 24616 - protein, 652 aa, Homo sapiens
MRGGGFGDRDRDRDRGGFGARGGGGLPPKKFGNPGERLRKKKWDLSELPKFEKNFYVEHPEVARLTPYEVDELRRKKEITVRGGDVCPKPVFAFHHANFPQYVMDVLMDQHFTEPTPIQCQGFPLALSGRDMVGIAQTGSGKTLAYLLPAIVHINHQPYLERGDGPICLVLAPTRELAQQVQQVADDYGKCSRLKSTCIYGGAPKGPQIRDLERGVEICIATPGRLIDFLESGKTNLRRCTYLVLDEADRMLDMGFEPQIRKIVDQIRPDRQTLMWSATWPKEVRQLAEDFLRDYTQINVGNLELSANHNILQIVDVCMESEKDHKLIQLMEEIMAEKENKTIIFVETKRRCDDLTRRMRRDGWPAMCIHGDKSQPERDWVLNEFRSGKAPILIATDVASRGLDVEDVKFVINYDYPNSSEDYVHRIGRTARSTNKGTAYTFFTPGNLKQARELIKVLEEANQAINPKLMQLVDHRGGGGGGGKGGRSRYRTTSSANNPNLMYQDECDRRLRGVKDGGRRDSASYRDRSETDRAGYANGSGYGSPNSAFGAQAGQYTYGQGTYGAAAYGTSSYTAQEYGAGTYGASSTTSTGRSSQSSSQQFSGIGRSGQQPQPLMSQQFAQPPGATNMIGYMGQTAYQYPPPPPPPPPSRK

SEQ ID NO: 24617 - protein, 459 aa, Homo sapiens
MASSASLETMVPPACPRAGASPATSKTLAFSIERIMAKTSEPRAPFEPRPGALEADGSQGKKLLNLCSPLPCMIPLQPLGYEVPSKTLLSYSELWKSSLRAGGGGGGGGGGGGGGGGAPVCGASGLCKTNCGVCCKAELGLAPSALPAGRVIKPQVINQAVGLPASGSLYYFNYLDSTAYPPSELLSGHLFPSGLLNAQAPAALAAHPKLFLLENAKLAGLAADKFPHPAPYPHKERLPAPLEQVLKENSALTAERGGVKGHSKLPGGSADGKPKNFTCEVCGKVFNAHYNLTRHMPVHTGARPFVCKVCGKGFRQASTLCRHKIIHTQEKPHKCNQCGKAFNRSSTLNTHIRIHAGYKPFVCEFCGKGFHQKGNYKNHKLTHSGEKQYKCTICNKAFHQVYNLTFHMHTHNDKKPFTCATCGKGFCRNFDLKKHVRKLHDSVGPAAPSAKDLTRTVQS

SEQ ID NO: 24618 - protein, 304 aa, Homo sapiens
MASSASLETMVPPACPRAGASPATSKTLAFSIERIMAKTSEPRAPFEPRPGALEADGSQGKKLLNLCSPLPCMIPLQPLGYEVPSKTLLSYSELWKSSLRAGGGGGGGGGGGGGGGGAPVCGASGLCKTNCGVCCKAELGLAPSALPAGRVIKPQVINQAVGLPASGSLYYFNYLDSTAYPPSELLSGHLFPSGLLNAQAPAALAAHPKLFLLENAKLAGLAADKFPHPAPYPHKERLPAPLEQVLKENSALTAERGGVKGHSKLPGGSADGKPKNFTCEVCGKVFNAHYNLTRHLRQRVLQKL

SEQ ID NO: 24619 - protein, 617 aa, Homo sapiens
MAAVAAGGLVGKGRDISLAALQRHDPYINRIVDVASQVALYTFGHRANEWEKTDVEGTLFVYTRSASPKHGFTIMNRLSMENRTEPITKDLDFQLQDPFLLYRNARLSIYGIWFYDKEECQRIAELMKNLTQYEQLKAHQGTGAGISPVILNSGEGKEVDILRMLIKAKDEYTKCKTCSEPKKITSSSAIYDNPNLIKPIPVKPSENQQQRIPQPNQTLDPEPQHLSLTALFGKQDKATCQETVEPPQTLHQQQQQQQQQQEKLPIRQGVVRSLSYEEPRRHSPPIEKQLCPAIQKLMVRSADLHPLSELPENRPCENGSTHSAGEFFTGPVQPGSPHNIGTSRGVQNASRTQNLFEKLQSTPGAANKCDPSTPAPASSAALNRSRAPTSVTPVAPGKGLAQPPQAYFNGSLPPQTVGHQAHGREQSTLPRQTLPISGSQTGSSGVISPQELLKKLQIVQQEQQLHASNRPALAAKFPVLAQSSGTGKPLESWINKTPNTEQQTPLFQVISPQRIPATAAPSLLMSPMVFAQPTSVPPKERESGLLPVGGQEPPAAATSLLLPIQSPEPSVITSSPLTKLQLQEALLYLIQNDDNFLNIIYEAYLFSMTQAAMKKTM

SEQ ID NO: 24620 - protein, 515 aa, Homo sapiens
MQIKVSIYGIWFYDKEECQRIAELMKNLTQYEQLKAHQGTGAGISPVILNSGEGKEVDILRMLIKAKDEYTKCKTCSEPKKITSSSAIYDNPNLIKPIPVKPSENQQQRIPQPNQTLDPEPQHLSLTALFGKQDKATCQETVEPPQTLHQQQQQQQQQQEKLPIRQGVVRSLSYEEPRRHSPPIEKQLCPAIQKLMVRSADLHPLSELPENRPCENGSTHSAGEFFTGPVQPGSPHNIGTSRGVQNASRTQNLFEKLQSTPGAANKCDPSTPAPASSAALNRSRAPTSVTPVAPGKGLAQPPQAYFNGSLPPQTVGHQAHGREQSTLPRQTLPISGSQTGSSGVISPQELLKKLQIVQQEQQLHASNRPALAAKFPVLAQSSGTGKPLESWINKTPNTEQQTPLFQVISPQRIPATAAPSLLMSPMVFAQPTSVPPKERESGLLPVGGQEPPAAATSLLLPIQSPEPSVITSSPLTKLQLQEALLYLIQNDDNFLNIIYEAYLFSMTQAAMKKTM

SEQ ID NO: 24621 - protein, 824 aa, Homo sapiens
MAAAFEASGALAAVATAMPAEHVAVQVPAPEPTPGPVRILRTAQDLSSPRTRTGDVLLAEPADFESLLLSRPVLEGLRAAGFERPSPVQLKAIPLGRCGLDLIVQAKSGTGKTCVFSTIALDSLVLENLSTQILILAPTREIAVQIHSVITAIGIKMEGLECHVFIGGTPLSQDKTRLKKCHIAVGSPGRIKQLIELDYLNPGSIRLFILDEADKLLEEGSFQEQINWIYSSLPASKQMLAVSATYPEFLANALTKYMRDPTFVRLNSSDPSLIGLKQYYKVVNSYPLAHKVFEEKTQHLQELFSRIPFNQALVFSNLHSRAQHLADILSSKGFPAECISGNMNQNQRLDAMAKLKHFHCRVLISTDLTSRGIDAEKVNLVVNLDVPLDWETYMHRIGRAGRFGTLGLTVTYCCRGEEENMMMRIAQKCNINLLPLPDPIPSGLMEECVDWDVEVKAAVHTYGIASVPNQPLKKQIQKIERTLQIQKAHGDHMASSRNNSVSGLSVKSKNNTKQKLPVKSHSECGIIEKATSPKELGCDRQSEEQMKNSVQTPVENSTNSQHQVKEALPVSLPQIPCLSSFKIHQPYTLTFAELVEDYEHYIKEGLEKPVEIIRHYTGPGDQTVNPQNGFVRNKVIEQRVPVLASSSQSGDSESDSDSYSSRTSSQSKGNKSYLEGSSDNQLKDSESTPVDDRISLEQPPNGSDTPNPEKYQESPGIQMKTRLKEGASQRAKQSRRNLPRRSSFRLQTEAQEDDWYDCHREIRLSFSDTYQDYEEYWRAYYRAWQEYYAAASHSYYWNAQRHPSWMAAYHMNTIYLQEMMHSNQ

SEQ ID NO: 24622 - protein, 138 aa, Homo sapiens
MAAAFEASGALAAVATAMPAEHVAVQVPAPEPTPGPVRILRTAQDLSSPRTRTGDVLLAEPADFESLLLSRPVLEGLRAAGFERPSPVQLKAIPLGRCGLDLIVQAKSGTGKTCVFSTIALDSLVLENLSTQAELSNS

SEQ ID NO: 24623 - protein, 1017 aa, Homo sapiens
MGKKSRAVPGRRPILQLSPPGPRGSTPGRDPEPEPDTEPDSTAAVPSQPAPSAATTTTTAVTAAAASDDSPSEDEQEAVQEVPRVVQNPPKPVMTTRPTAVKATGGLCLLGAYADSDDDDNDVSEKLAQSKETNGNQSTDIDSTLANFLAEIDAITAPQPAAPVGASAPPPTPPRPEPKEAATSTLSSSTSNGTDSTQTSGWQYDTQCSLAGVGIEMGDWQEVWDENTGCYYYWNTQTNEVTWELPQYLATQVQGLQHYQPSSVPGAETSFVVNTDIYSKEKTISVSSSKSGPVIAKREVKKEVNEGIQALSNSEEEKKGVAASLLAPLLPEGIKEEEERWRRKVICKEEPVSEVKETSTTVEEATTIVKPQEIMLDNIEDPSQEDLCSVVQSGESEEEEEQDTLELELVLERKKAELRALEEGDGSVSGSSPRSDISQPASQDGMRRLMSKRGKWKMFVRATSPESTSRSSSKTGRDTPENGETAIGAENSEKIDENSDKEMEVEESPEKIKVQTTPKVEEEQDLKFQIGELANTLTSKFEFLGINRQSISNFHVLLLQTETRIADWREGALNGNYLKRKLQDAAEQLKQYEINATPKGWSCHWDRDHRRYFYVNEQSGESQWEFPDGEEEEEESQAQENRDETLAKQTLKDKTGTDSNSTESSETSTGSLCKESFSGQVSSSSLMPLTPFWTLLQSNVPVLQPPLPLEMPPPPPPPPESPPPPPPPPPPAEDGEIQEVEMEDEGSEEPPAPGTEEDTPLKPSAQTTVVTSQSSVDSTISSSSSTKGIKRKATEISTAVVQRSATIGSSPVLYSQSAIATGHQAAGIGNQATGIGHQTIPVSLPAAGMGHQARGMSLQSNYLGLAAAPAIMSYAECSVPIGVTAPSLQPVQARGAVPTATIIEPPPPPPPPPPPPPPAPKMPPPEKTKKGRKDKAKKSKTKMPSLVKKWQSIQRELDEEDNSSSSEEDRESTAQKRIEEWKQQQLVSGMAERNANFEALPEDWRARLKRRKMAPNT

SEQ ID NO: 24624 - protein, 1019 aa, Homo sapiens
MGKKSRAVPGRRPILQLSPPGPRGSTPGRDPEPEPDTEPDSTAAVPSQPAPSAATTTTTAVTAAAASDDSPSEGKDEQEAVQEVPRVVQNPPKPVMTTRPTAVKATGGLCLLGAYADSDDDDNDVSEKLAQSKETNGNQSTDIDSTLANFLAEIDAITAPQPAAPVGASAPPPTPPRPEPKEAATSTLSSSTSNGTDSTQTSGWQYDTQCSLAGVGIEMGDWQEVWDENTGCYYYWNTQTNEVTWELPQYLATQVQGLQHYQPSSVPGAETSFVVNTDIYSKEKTISVSSSKSGPVIAKREVKKEVNEGIQALSNSEEEKKGVAASLLAPLLPEGIKEEEERWRRKVICKEEPVSEVKETSTTVEEATTIVKPQEIMLDNIEDPSQEDLCSVVQSGESEEEEEQDTLELELVLERKKAELRALEEGDGSVSGSSPRSDISQPASQDGMRRLMSKRGKWKMFVRATSPESTSRSSSKTGRDTPENGETAIGAENSEKIDENSDKEMEVEESPEKIKVQTTPKVEEEQDLKFQIGELANTLTSKFEFLGINRQSISNFHVLLLQTETRIADWREGALNGNYLKRKLQDAAEQLKQYEINATPKGWSCHWDRDHRRYFYVNEQSGESQWEFPDGEEEEEESQAQENRDETLAKQTLKDKTGTDSNSTESSETSTGSLCKESFSGQVSSSSLMPLTPFWTLLQSNVPVLQPPLPLEMPPPPPPPPESPPPPPPPPPPAEDGEIQEVEMEDEGSEEPPAPGTEEDTPLKPSAQTTVVTSQSSVDSTISSSSSTKGIKRKATEISTAVVQRSATIGSSPVLYSQSAIATGHQAAGIGNQATGIGHQTIPVSLPAAGMGHQARGMSLQSNYLGLAAAPAIMSYAECSVPIGVTAPSLQPVQARGAVPTATIIEPPPPPPPPPPPPPPAPKMPPPEKTKKGRKDKAKKSKTKMPSLVKKWQSIQRELDEEDNSSSSEEDRESTAQKRIEEWKQQQLVSGMAERNANFEALPEDWRARLKRRKMAPNT

SEQ ID NO: 24625 - protein, 547 aa, Homo sapiens
MEDSEALGFEHMGLDPRLLQAVTDLGWSRPTLIQEKAIPLALEGKDLLARARTGSGKTAAYAIPMLQLLLHRKATGPVVEQAVRGLVLVPTKELARQAQSMIQQLATYCARDVRVANVSAAEDSVSQRAVLMEKPDVVVGTPSRILSHLQQDSLKLRDSLELLVVDEADLLFSFGFEEELKSLLCHLPRIYQAFLMSATFNEDVQALKELILHNPVTLKLQESQLPGPDQLQQFQVVCETEEDKFLLLYALLKLSLIRGKSLLFVNTLERSYRLRLFLEQFSIPTCVLNGELPLRSRCHIISQFNQGFYDCVIATDAEVLGAPVKGKRRGRGPKGDKASDPEAGVARGIDFHHVSAVLNFDLPPTPEAYIHRAGRTARANNPGIVLTFVLPTEQFHLGKIEELLSGENRGPILLPYQFRMEEIEGFRYRCRDAMRSVTKQAIREARLKEIKEELLHSEKLKTYFEDNPRDLQLLRHDLPLHPAVVKPHLGHVPDYLVPPALRGLVRPHKKRKKLSSSCRKAKRAKSQNPLRSFKHKGKKFRPTAKPS

SEQ ID NO: 24626 - protein, 507 aa, Homo sapiens
MEDSEALGFEHMGLDPRLLQAVTDLGWSRPTLIQEKAIPLALEGKDLLARARTGSGKTAAYAIPMLQLLLHRKATGPVVEQAVRGLVLVPTKELARQAQSMIQQLATYCARDVRVANVSAAEDSVSQRAVLMEKPDVVVGTPSRILSHLQQDSLKLRDSLELLVVDEADLLFSFGFEEELKSLLCHLPRIYQAFLMSATFNEDVQALKELILHNPVTLKLQESQLPGPDQLQQFQVVCETEEDKFLLLYALLKLSLIRGKSLLFVNTLERSYRLRLFLEQFSIPTCVLNGELPLRSRASDPEAGVARGIDFHHVSAVLNFDLPPTPEAYIHRAGRTARANNPGIVLTFVLPTEQFHLGKIEELLSGENRGPILLPYQFRMEEIEGFRYRCRDAMRSVTKQAIREARLKEIKEELLHSEKLKTYFEDNPRDLQLLRHDLPLHPAVVKPHLGHVPDYLVPPALRGLVRPHKKRKKLSSSCRKAKRAKSQNPLRSFKHKGKKFRPTAKPS

SEQ ID NO: 24627 - protein, 822 aa, Homo sapiens
MGFGSDLKNSHEAVLKLQDWELRLLETVKKFMALRIKSDKEYASTLQNLCNQVDKESTVQMNYVSNVSKSWLLMIQQTEQLSRIMKTHAEDLNSGPLHRLTMMIKDKQQVKKSYIGVHQQIEAEMIKVTKTELEKLKCSYRQLIKEMNSAKEKYKEALAKGKETEKAKERYDKATMKLHMLHNQYVLALKGAQLHQNQYYDITLPLLLDSLQKMQEEMIKALKGIFDEYSQITSLVTEEIVNVHKEIQMSVEQIDPSTEYNNFIDVHRTTAAKEQEIEFDTSLLEENENLQANEIMWNNLTAESLQVMLKTLAEELMQTQQMLLNKEEAVLELEKRIEESSETCEKKSDIVLLLSQKQALEELKQSVQQLRCTEAKFSAQKELLEQKVQENDGKEPPPVVNYEEDARSVTSMERKERLSKFESIRHSIAGIIRSPKSALGSSALSDMISISEKPLAEQDWYHGAIPRIEAQELLKKQGDFLVRESHGKPGEYVLSVYSDGQRRHFIIQYVDNMYRFEGTGFSNIPQLIDHHYTTKQVITKKSGVVLLNPIPKDKKWILSHEDVILGELLGKGNFGEVYKGTLKDKTSVAVKTCKEDLPQELKIKFLQEAKILKQYDHPNIVKLIGVCTQRQPVYIIMELVSGGDFLTFLRRKKDELKLKQLVKFSLDAAAGMLYLESKNCIHRDLAARNCLVGENNVLKISDFGMSRQEDGGVYSSSGLKQIPIKWTAPEALNYGRYSSESDVWSFGILLWETFSLGVCPYPGMTNQQAREQVERGYRMSAPQHCPEDISKIMMKCWDYKPENRPKFSELQKELTIIKRKLT

SEQ ID NO: 24628 - protein, 647 aa, Homo sapiens
MKLHMLHNQYVLALKGAQLHQNQYYDITLPLLLDSLQKMQEEMIKALKGIFDEYSQITSLVTEEIVNVHKEIQMSVEQIDPSTEYNNFIDVHRTTAAKEQEIEFDTSLLEENENLQANEIMWNNLTAESLQVMLKTLAEELMQTQQMLLNKEEAVLELEKRIEESSETCEKKSDIVLLLSQKQALEELKQSVQQLRCTEAKFSAQKELLEQKVQENDGKEPPPVVNYEEDARSVTSMERKERLSKFESIRHSIAGIIRSPKSALGSSALSDMISISEKPLAEQDWYHGAIPRIEAQELLKKQGDFLVRESHGKPGEYVLSVYSDGQRRHFIIQYVDNMYRFEGTGFSNIPQLIDHHYTTKQVITKKSGVVLLNPIPKDKKWILSHEDVILGELLGKGNFGEVYKGTLKDKTSVAVKTCKEDLPQELKIKFLQEAKILKQYDHPNIVKLIGVCTQRQPVYIIMELVSGGDFLTFLRRKKDELKLKQLVKFSLDAAAGMLYLESKNCIHRDLAARNCLVGENNVLKISDFGMSRQEDGGVYSSSGLKQIPIKWTAPEALNYGRYSSESDVWSFGILLWETFSLGVCPYPGMTNQQAREQVERGYRMSAPQHCPEDISKIMMKCWDYKPENRPKFSELQKELTIIKRKLT

SEQ ID NO: 24629 - protein, 453 aa, Homo sapiens
MEQKMKCPHCKDQLESGFGSQSCKTCALMFSSEPSTSEVHRDQERKERLSKFESIRHSIAGIIRSPKSALGSSALSDMISISEKPLAEQDWYHGAIPRIEAQELLKKQGDFLVRESHGKPGEYVLSVYSDGQRRHFIIQYVDNMYRFEGTGFSNIPQLIDHHYTTKQVITKKSGVVLLNPIPKDKKWILSHEDVILGELLGKGNFGEVYKGTLKDKTSVAVKTCKEDLPQELKIKFLQEAKILKQYDHPNIVKLIGVCTQRQPVYIIMELVSGGDFLTFLRRKKDELKLKQLVKFSLDAAAGMLYLESKNCIHRDLAARNCLVGENNVLKISDFGMSRQEDGGVYSSSGLKQIPIKWTAPEALNYGRYSSESDVWSFGILLWETFSLGVCPYPGMTNQQAREQVERGYRMSAPQHCPEDISKIMMKCWDYKPENRPKFSELQKELTIIKRKLT

SEQ ID NO: 24630 - protein, 855 aa, Homo sapiens
MAALGVAEAVAAPHPAEGAETAEAVELSRALSRLLPGLEADSKPGRRRALEALRRALEEPGPAADPTAFQGPWARLLLPRLLRCLSDPAEGCRALAVHLLDLGLRRAARPRDALPRLLPALAARLAGPVPARRPPEACEELRLALVQLLGLAVDLCGAALAPHLDDALRALRCSLLDPFAAVRRESCSCAAALAQATPDHFHMQSESLIGPLMQTISHQHWKVRVAAIEATGAVIHFGNGKSVDDVLSHFAQRLFDDVPQVRRAVASVVGGWLLCLRDRYSFFHKLIPLLLSSLNDEVPEVRQLAASLWEDVGLQWQKENEEDLKDKLDFAPPTPPHYPPHERRPVLGCRELVFRNLSKILPALCHDITDWVVGTRVKSAQLLPVLLLHAEDHATQHLEVVLRTLFQACTDEEAAVVQSCTRSAELVGTFVSPEVFLKLILSTLKKTPSASGLLVLASAMRGCPREALQPHLAAIATELAQAHICQASENDLYLERLLLCVQALVSVCHEDCGVASLQLLDVLLTIVALAGATGLRDKAQETMDSLAMVEGVSSCQDLYRKHIGPLLERVTASHLDWTAHSPELLQFSVIVAQSGPALGEALPHVVPTLRACLQPSQDPQMRLKLFSILSTVLLRATDTINSQGQFPSYLETVTKDILAPNLQWHAGRTAAAIRTAAVSCLWALTSSEVLSAEQIRDVQETLMPQVLTTLEEDSKMTRLISCRIINTFLKTSGGMTDPEKLIRIYPELLKRLDDVSNDVRMAAASTLVTWLQCVKGANAKSYYQSSVQYLYRELLVHLDDPERAIQDAILEVLKEGSGLFPDLLVRETEAVIHKHRSATYCEQLLQHVQAVPATQ

SEQ ID NO: 24631 - protein, 843 aa, Homo sapiens
MAALGVAEAVAAPHPAEGAETAEAVELSRALSRLLPGLEADSKPGRRRALEALRRALEEPGPAADPTAFQGPWARLLLPRLLRCLSDPAEGCRALAVHLLDLGLRRAARPRDALPRLLPALAARLAGPVPARRPPEACEELRLALVQLLGLAVDLCGAALAPHLDDALRALRCSLLDPFAAVRRESCSCAAALAQATPDHFHMQSESLIGPLMQTISHQHWKVRVAAIEATGAVIHFGNGKSVDDVLSHFAQRLFDDVPQVRRAVASVVGGWLLCLRDRYSFFHKLIPLLLSSLNDEVPEVRQLAASLWEDVGLQWQKENEEDLKDKLDFAPPTPPHYPPHERRPVLGCRELVFRNLSKILPALCHDITDWVVGTRVKSAQLLPVLLLHAEDHATQHLEVVLRTLFQACTDEEAAVVQSCTRSAELVGTFVSPEVFLKLILSTLKKTPSASGLLVLASAMRGCPREALQPHLAAIATELAQAHICQASENDLYLERLLLCVQALVSVCHEDCGVASLQLLDVLLTIVALAGATGLRDKAQETMDSLAMVEGVSSCQDLYRKHIGPLLERVTASHLDWTAHSPELLQFSVIVAQSGPALGEALPHVVPTLRACLQPSQDPQMRLKLFSILSTVLLRATDTINSQGQFPSYLETVTKDILAPNLQWHAGRTAAAIRTAAVSCLWALTSSEVLSAEQIRDVQETLMPQVLTTLEEDSKMTRLISCRIINTFLKTSGGMTDPEKLIRIYPELLKRLDDVSNDVRMAAASTLVTWLQCVKGANAKSYYQSSVQYLYRELLVHLDDPERAIQDAILDVPGSPSPSAMIGSFLRPPHPWRTVSQLNLFSS

SEQ ID NO: 24632 - protein, 235 aa, Homo sapiens
MRLKLFSILSTVLLRATDTINSQGQFPSYLETVTKDILAPNLQWHAGRTAAAIRTAAVSCLWALTSSEVLSAEQIRDVQETLMPQVLTTLEEDSKMTRLISCRIINTFLKTSGGMTDPEKLIRIYPELLKRLDDVSNDVRMAAASTLVTWLQCVKGANAKSYYQSSVQYLYRELLVHLDDPERAIQDAILEVLKEGSGLFPDLLVRETEAVIHKHRSATYCEQLLQHVQAVPATQ

SEQ ID NO: 24633 - protein, 169 aa, Homo sapiens; identical to SEQ ID NO: 255

SEQ ID NO: 24634 - protein, 192 aa, Homo sapiens; identical to SEQ ID NO: 256

SEQ ID NO: 24635 - protein, 232 aa, Homo sapiens
MPSLWDRFSSSSTSSSPSSLPRTPTPDRPPRSAWGSATREEGFDRSTSLESSDCESLDSSNSGFGPEEDTAYLDGVSLPDFELLSDPEDEHLCANLMQLLQESLAQARLGSRRPARLLMPSQLVSQVGKELLRLAYSEPCGLRGALLDVCVEQGKSCHSVGQLALDPSLVPTFQLTLVLRLDSRLWPKIQGLFSSANSPFLPGFSQSLTLSTGFRVIKKKLYSSEQLLIEEC

SEQ ID NO: 24636 - protein, 544 aa, Homo sapiens
MRVAVAGCCHGELDKIYETLALAERRGPGPVDLLLCCGDFQAVRNEADLRCMAVPPKYRHMQTFYRYYSGEKKAPVLTLFIGGNHEASNHLQELPYGGWVAPNIYYLGLAGVVKYRGVRIGGISGIFKSHDYRKGHFECPPYNSSTIRSIYHVRNIEVYKLKQLKQPIDIFLSHDWPRSIYHYGNKKQLLKTKSFFRQEVENNTLGSPAASELLEHLKPTYWFSAHLHVKFAALMQHQAKDKGQTARATKFLALDKCLPHRDFLQILEIEHDPSAPDYLEYDIEWLTILRATDDLINVTGRLWNMPENNGLHARWDYSATEEGMKEVLEKLNHDLKVPCNFSVTAACYDPSKPQTQMQLIHRINPQTTEFCAQLGIIDINVRLQKSKEEHHVCGEYEEQDDVESNDSGEDQSEYNTDTSALSSINPDEIMLDEEEDEDSIVSAHSGMNTPSVEPSDQASEFSASFSDVRILPGSMIVSSDDTVDSTIDREGKPGGTVESGNGEDLTKVPLKRLSDEHEPEQRKKIKRRNQAIYAAVDDDDDDAA

SEQ ID NO: 24637 - protein, 312 aa, Homo sapiens
MIHIVQAKDKGQTARATKFLALDKCLPHRDFLQILEIEHDPSAPDYLEYDIEWLTILRATDDLINVTGRLWNMPENNGLHARWDYSATEEGMKEVLEKLNHDLKVPCNFSVTAACYDPSKPQTQMQLIHRINPQTTEFCAQLGIIDINVRLQKSKEEHHVCGEYEEQDDVESNDSGEDQSEYNTDTSALSSINPDEIMLDEEEDEDSIVSAHSGMNTPSVEPSDQASEFSASFSDVRILPGSMIVSSDDTVDSTIDREGKPGGTVESGNGEDLTKVPLKRLSDEHEPEQRKKIKRRNQAIYAAVDDDDDDAA

SEQ ID NO: 24638 - protein, 396 aa, Homo sapiens
MEAERLRLLEEEAKLKKVARMGFNASSMLRKSQLGFLNVTSYSRLANELRVSCMERKKVQIRSLDPSSLASDRFNFILASTNSDQLFVVNQVEVEGSKYGIISLRTLKIPSFHVYVLRNLYVPNRKVKSLCWASLNQLDSHVLLCFEGITDAPSCAVLLPASRFLSVHTRVNQPGMLCSFQIPEAWSCAWSLNTRAYHCFSAGLSQQVLLTSVATGHQQSFDTSSDVLAQQFASTAPLLFNGCRSGEIFAIDLRCRNRGKGWRATRLFHDSAVTSVQILQEEQCLMASDMTGKIKLWDLRATKCVRQYEGHVNESAYLPLHVHEEEGIVVAVGQDCYTRIWSLHDAHLLRTIPSPYSASEDDIPSVAFASRLGGIRGAAPGLLMAVRQDLYCFPFS

SEQ ID NO: 24639 - protein, 631 aa, Homo sapiens
MSHQEGSTDGLPDLGTESLFSSPEEQSGAVAATEASSDIDIATSELSVTVTGDGSDSRDGGFPNDASTENRSSDQESASEDIELESLEDFEHFLMSGESLFHYPLVGEEETEREEEDEEIQEEGGEEEEEEEEEEEEEEEEEEEEEEQPRAGPQGSGGNHEQYSLEEDQALEEWVSSETSALPRPRWQVVTALHQRQLGSRPRFVYEACGARAFVQRFRLQYRLADHVGCVNTVHFNQRGTRLASSGDDLKVIVWDWVRQRPVLNFESGHTNNVFQAKFLPNCGDSTLAMCARDGQVRVAELINASYFNNTKCVAQHRGPAHKLALEPDSPYKFLTSGEDAVVFTIDLRQDRPASKVVVTRENDKKVGLYTITVNPANTYQFAVGGQDQFVRIYDQRKIDKKENNGVLKKFTPHHLVNCDFPTNITCVVYSHDGTELLASYNDDDIYLFNSSHSDGAQYSKRFKGHRNNTTVKGVNFYGPRSEFVVSGSDCGHIFFWEKSSCQIIQFLKGSREGTINCLEPHPYLPVLACSGLDHDVKIWTPTAKAATELTGLKKVIKKNKWERDEDSLHHGSLFDQYMLWFLLRHVTQRGRHQDWRSGEAEFPDEESDESSSTSETSEEEVQDRVQCMPS

SEQ ID NO: 24640 - protein, 287 aa, Homo sapiens
MSGSFDRKLSSILTDISSSLSCHAGSKDSPTLPESSVTDLGYYSAPQHDYYSGQPYGQTVNPYTYHHQFNLNGLAGTGAYSPKSEYTYGASYRQYGAYREQPLPAQDPVSVKEEPEAEVRMVNGKPKKVRKPRTIYSSYQLAALQRRFQKAQYLALPERAELAAQLGLTQTQVKIWFQNRRSKFKKLYKNGEVPLEHSPNNSDSMACNSPPSPALWDTSSHSTPAPARSQLPPPLPYSASPSYLDDPTNSWYHAQNLSGPHLQQQPPQPATLHHASPGPPPNPGAVY

SEQ ID NO: 24641 - protein, 340 aa, Homo sapiens
MKEDQVVAEEPGFQDEEESLFQDIDLLQKHGINVADIKKLKSVGICTIKGIQMTTRRALCNVKGLSEAKVDKIKEAANKLIEPGFLTAFEYSEKRKMVFHITTGSQEFDKLLGGGIESMAITEAFGEFRTGKTQLSHTLCVTAQLPGAGGYPGGKIIFIDTENTFRPDRLRDIADRFNVDHDAVLDNVLYARAYTSEHQMELLDYVAAKFHEEAGIFKLLIIDSIMALFRVDFSGRGELAERQQKLAQMLSRLQKISEEYNVAVFVTNQMTADPGATMTFQADPKKPIGGHILAHASTTRISLRKGRGELRIAKIYDSPEMPENEATFAITAGGIGDAKE

SEQ ID NO: 24642 - protein, 285 aa, Homo sapiens
MKEDQVVAEEPGFQDEEESLFQDIDLLQKHGINVADIKKLKSVGICTIKGIQMTTRRALCNVKGLSEAKVDKIKEAANKLIEPGFLTAFEYSEKRKMVFHITTGSQEFDKLLGGGIESMAITEAFGEFRTGKTQLSHTLCGEHQMELLDYVAAKFHEEAGIFKLLIIDSIMALFRVDFSGRGELAERQQKLAQMLSRLQKISEEYNVAVFVTNQMTADPGATMTFQADPKKPIGGHILAHASTTRISLRKGRGELRIAKIYDSPEMPENEATFAITAGGIGDAKE

SEQ ID NO: 24643 - protein, 104 aa, Homo sapiens
MPEAHMQPAKLQTSLPTTDHGSKKPVSCYLPPLSNAHPMCIEVQNAQNCSSAAATLEPSIISDTCFYKPITKDQLSSRSELNTVRLKCLNSLRGWKILNQLSLT

SEQ ID NO: 24644 - protein, 198 aa, Homo sapiens
MPEQSNDYRVVVFGAGGVGKSSLVLRFVKGTFRDTYIPTIEDTYRQVISCDKSVCTLQITDTTGSHQFPAMQRLSISKGHAFILVFSVTSKQSLEELGPIYKLIVQIKGSVEDIPVMLVGNKCDETQREVDTREAQAVAQEWKCAFMETSAKMNYNVKELFQELLTLETRRNMSLNIDGKRSGKQKRTDRVKGKCTLM

SEQ ID NO: 24645 - protein, 373 aa, Homo sapiens
MPNDEAFSKPSTPSEAPHAPGVPPQGRAGGFGKASGALVGAASGSSAGGSSRGGGSGSGASDLGAGSKKSPRLPKCARCRNHGYASPLKGHKRFCMWRDCQCKKCNLIAERQRVMAAQVALRRQQAQEEELGISHPIPLPSAAELLVKRENNGSNPCLMTECSGTSQPPPASVPTTAASEGRMVIQDIPAVTSRGHVENTPDLVSDSTYYSSFYQPSLFPYYNNLYNCPQYSMALAADSASGEVGNPLGGSPVKNSLRGLPGPYVPGQTGNQWQMKNMENRHAMSSQYRMHSYYPPPSYLGQSVPQFFTFEDAPSYPEARASVFSPPSSQDSGLVSLSSSSPISNKSTKAVLECEPASEPSSFTVTPVIEEDE

SEQ ID NO: 24646 - protein, 275 aa, Homo sapiens
MPNDEAFSKPSTPSEAPHAPGVPPQGRAGGFGKASGALVGAASGSSAGGSSRGGGSGSGASDLGAGSKKSPRLPKCARCRNHGYASPLKGHKRFCMWRDCQCKKCNLIAERQRVMAAQVALRRQQAQEEELGISHPIPLPSAAELLVKRENNGSNPCLMTECSGTSQPPPASVPTTAASEGRMVIQDIPAVTSRGHVENTPDLVSDSTYYSSFYQPSLFPYYNNLYNCPQYSMALAADSASGEVGNPLGGSPVKNSLRGLPGPYVPGQTGNQWQV

SEQ ID NO: 24647 - protein, 175 aa, Homo sapiens
MPNDEAFSKPSTPSEAPHAPGVPPQGRAGGFGKASGALVGAASGSSAGGSSRGGGSGSGASDLGAGSKKSPRLPKCARCRNHGYASPLKGHKRFCMWRDCQCKKCNLIAERQRVMAAQVGAGVREPGFSLSFFFFFFFFRWSLARLPRLQCSGAILAHCNSASRVQAILLPQPPK

SEQ ID NO: 24648 - protein, 540 aa, Homo sapiens
MGTTARAALVLTYLAVASAASEGGFTATGQRQLRPEHFQEVGYAAPPSPPLSRSLPMDHPDSSQHGPPFEGQSQVQPPPSQEATPLQQEKLLPAQLPAEKEVGPPLPQEAVPLQKELPSLQHPNEQKEGTPAPFGDQSHPEPESWNAAQHCQQDRSQGGWGHRLDGFPPGRPSPDNLNQICLPNRQHVVYGPWNLPQSSYSHLTRQGETLNFLEIGYSRCCHCRSHTNRLECAKLVWEEAMSRFCEAEFSVKTRPHWCCTRQGEARFSCFQEEAPQPHYQLRACPSHQPDISSGLELPFPPGVPTLDNIKNICHLRRFRSVPRNLPATDPLQRELLALIQLEREFQRCCRQGNNHTCTWKAWEDTLDKYCDREYAVKTHHHLCCRHPPSPTRDECFARRAPYPNYDRDILTIDIGRVTPNLMGHLCGNQRVLTKHKHIPGLIHNMTARCCDLPFPEQACCAEEEKLTFINDLCGPRRNIWRDPALCCYLSPGDEQVNCFNINYLRNVALVSGDTENAKGQGEQGSTGGTNISSTSEPKEE

SEQ ID NO: 24649 - protein, 415 aa, Homo sapiens
MGTTARAALVLTYLAVASAASEGGFTATGQRQLRPEHFQEVGYAAPPSPPLSRSLPMDHPDSSQHGPPFEGQSQVQPPPSQEATPLQQEKLLPAQLPAEKEVGPPLPQEAVPLQKELPSLQHPNEQKEGTPAPFGDQSHPEPESWNAAQHCQQDRSQGGWGHRLDGFPPGRPSPDNLNQICLPNRQHVVYGPWNLPQSSYSHLTRQGETLNFLEIGYSRCCHCRSHTNRLECAKLVWEDTLDKYCDREYAVKTHHHLCCRHPPSPTRDECFARRAPYPNYDRDILTIDIGRVTPNLMGHLCGNQRVLTKHKHIPGLIHNMTARCCDLPFPEQACCAEEEKLTFINDLCGPRRNIWRDPALCCYLSPGDEQVNCFNINYLRNVALVSGDTENAKGQGEQGSTGGTNISSTSEPKEE

SEQ ID NO: 24650 - protein, 170 aa, Homo sapiens
MALPLRDRVKEATPLQQEKLLPAQLPAEKEVGPPLPQEAVPLQKELPSLQHPNEQKEGTPAPFGDQSHPEPESWNAAQHCQQDRSQGGWGHRLDGFPPGRPSPDNLNQICLPNRQHVVYGPWNLPQSSYSHLTRQGETLNFLEIGYSRCCHCRSHTNRLECAKLVVRLGS

SEQ ID NO: 24651 - protein, 567 aa, Homo sapiens
MGTTARAALVLTYLAVASAASEGGFTATGQRQLRPEHFQEVGYAAPPSPPLSRSLPMDHPDSSQHGPPFEGQSGKEGRGPRPHSQPWLGERVGCSHIPPSIVQPPPSQEATPLQQEKLLPAQLPAEKEVGPPLPQEAVPLQKELPSLQHPNEQKEGTPAPFGDQSHPEPESWNAAQHCQQDRSQGGWGHRLDGFPPGRPSPDNLNQICLPNRQHVVYGPWNLPQSSYSHLTRQGETLNFLEIGYSRCCHCRSHTNRLECAKLVWEEAMSRFCEAEFSVKTRPHWCCTRQGEARFSCFQEEAPQPHYQLRACPSHQPDISSGLELPFPPGVPTLDNIKNICHLRRFRSVPRNLPATDPLQRELLALIQLEREFQRCCRQGNNHTCTWKAWEDTLDKYCDREYAVKTHHHLCCRHPPSPTRDECFARRAPYPNYDRDILTIDIGRVTPNLMGHLCGNQRVLTKHKHIPGLIHNMTARCCDLPFPEQACCAEEEKLTFINDLCGPRRNIWRDPALCCYLSPGDEQVNCFNINYLRNVALVSGDTENAKGQGEQGSTGGTNISSTSEPKEE

SEQ ID NO: 24652 - protein, 217 aa, Homo sapiens
MYSLNQEIKAFSRNNLRKQCTRVTTLTGKKIIETWKDARIHVVEEVEPSSGGGCGYVQDLSSDLQVGVIKPWLLLGSQDAAHDLDTLKKNKVTHILNVAYGVENAFLSDFTYKSISILDLPETNILSYFPECFEFIEEAKRKDGVVLVHCNAGVSRAAAIVIGFLMNSEQTSFTSAFSLVKNARPSICPNSGFMEQLRTYQEGKESNKCDRIQENSS

SEQ ID NO: 24653 - protein, 166 aa, Homo sapiens
MYSLNQEIKAFSRNNLRKQCTRVTTLTGKKIIETWKDARIHVVEEVEPSSGGGCGYVQDLSSDLQVGVIKPWLLLGSQDAAHDLDTLKKNKDGVVLVHCNAGVSRAAAIVIGFLMNSEQTSFTSAFSLVKNARPSICPNSGFMEQLRTYQEGKESNKCDRIQENSS

SEQ ID NO: 24654 - protein, 190 aa, Homo sapiens
MEPEAAAGARKARGRGCHCPGDAPWRPPPPRGPESPAPWRPWIQTPGDAELTRTGRPLEPRADQHTFGSKGAFGFQHPVRVYLPMSKRQEYLRSSGEQVLASFPVQATIDFYDDESTESASEAEEPEEGPPPLHLLPQEVGGRQENGPGGKGRDQGINQGQRSSGGGDHWGEGPLPQGVSSRGGKCSSSK

SEQ ID NO: 24655 - protein, 106 aa, Homo sapiens
MSKRQEYLRSSGEQVLASFPVQATIDFYDDESTESASEAEEPEEGPPPLHLLPQEVGGRQENGPGGKGRDQGINQGQRSSGGGDHWGEGPLPQGVSSRGGKCSSSK

SEQ ID NO: 24656 - protein, 2053 aa, Homo sapiens
MWLVTFLLLLDSLHKARPEDVGTSLYFVNDSLQQVTFSSSVGVVVPCPAAGSPSAALRWYLATGDDIYDVPHIRHVHANGTLQLYPFSPSAFNSFIHDNDYFCTAENAAGKIRSPNIRVKAVFREPYTVRVEDQRSMRGNVAVFKCLIPSSVQEYVSVVSWEKDTVSIIPEHRFFITYHGGLYISDVQKEDALSTYRCITKHKYSGETRQSNGARLSVTDPAESIPTILDGFHSQEVWAGHTVELPCTASGYPIPAIRWLKDGRPLPADSRWTKRITGLTISDLRTEDSGTYICEVTNTFGSAEATGILMVIDPLHVTLTPKKLKTGIGSTVILSCALTGSPEFTIRWYRNTELVLPDEAISIRGLSNETLLITSAQKSHSGAYQCFATRKAQTAQDFAIIALEDGTPRIVSSFSEKVVNPGEQFSLMCAAKGAPPPTVTWALDDEPIVRDGSHRTNQYTMSDGTTISHMNVTGPQIRDGGVYRCTARNLVGSAEYQARINVRGPPSIRAMRNITAVAGRDTLINCRVIGYPYYSIKWYKDALLLPDNHRQVVFENGTLKLTDVQKGMDEGEYLCSVLIQPQLSISQSVHVAVKVPPLIQPFEFPPASIGQLLYIPCVVSSGDMPIRITWRKDGQVIISGSGVTIESKEFMSSLQISSVSLKHNGNYTCIASNAAATVSRERQLIVRVPPRFVVQPNNQDGIYGKAGVLNCSVDGYPPPKVMWKHAKGSGNPQQYHPVPLTGRIQILPNSSLLIRHVLEEDIGYYLCQASNGVGTDISKSMFLTVKIPAMITSHPNTTIAIKGHAKELNCTARGERPIIIRWEKGDTVIDPDRVMRYAIATKDNGDEVVSTLKLKPADRGDSVFFSCHAINSYGEDRGLIQLTVQEPPDPPELEIREVKARSMNLRWTQRFDGNSIITGFDIEYKNKSDSWDFKQSTRNISPTINQANIVDLHPASVYSIRMYSFNKIGRSEPSKELTISTEEAAPDGPPMDVTLQPVTSQSIQVTWKAPKKELQNGVIRGYQIGYRENSPGSNGQYSIVEMKATGDSEVYTLDNLKKFAQYGVVVQAFNRAGTGPSSSEINATTLEDVPSQPPENVRALSITSDVAVISWSEPPRSTLNGVLKGYRVIFWSLYVDGEWGEMQNITTTRERVELRGMEKFTNYSVQVLAYTQAGDGVRSSVLYIQTKEDVPGPPAGIKAVPSSASSVVVSWLPPTKPNGVIRKYTIFCSSPGSGQPAPSEYETSPEQLFYRIAHLNRGQQYLLWVAAVTSAGRGNSSEKVTIEPAGKAPAKIISFGGTVTTPWMKDVRLPCNSVGDPAPAVKWTKDSEDSAIPVSMDGHRLIHTNGTLLLRAVKAEDSGYYTCTATNTGGFDTIIVNLLVQVPPDQPRLTVSKTSASSITLTWIPGDNGGSSIRGFVLQYSVDNSEEWKDVFISSSERSFKLDSLKCGTWYKVKLAAKNSVGSGRISEIIEAKTHGREPSFSKDQHLFTHINSTHARLNLQGWNNGGCPITAIVLEYRPKGTWAWQGLRANSSGEVFLTELREATWYELRMRACNSAGCGNETAQFATLDYDGSTIPPIKSAQGEGDDVKKLFTIGCPVILATLGVALLFIVRKKRKEKRLKRLRDAKSLAEMLISKNNRSFDTPVKGPPQGPRLHIDIPRVQLLIEDKEGIKQLGDDKATIPVTDAEFSQAVNPQSFCTGVSLHHPTLIQSTGPLIDMSDIRPGTNPVSRKNVKSAHSTRNRYSSQWTLTKCQASTPARTLTSDWRTVGSQHGVTVTESDSYSASLSQDTDKGRNSMVSTESASSTYEELARAYEHAKLEEQLQHAKFEITECFISDSSSDQMTTGTNENADSMTSMSTPSEPGICRFTASPPKPQDADRGKNVAVPIPHRANKSDYCNLPLYAKSEAFFRKADGREPCPVVPPREASIRNLARTYHTQARHLTLDPASKSLGLPHPGAPAAASTATLPQRTLAMPAPPAGTAPPAPGPTPAEPPTAPSAAPPAPSTEPPRAGGPHTKMGGSRDSLLEMSTSGVGRSQKQGAGAYSKSYTLV

SEQ ID NO: 24657 - protein, 1843 aa, Homo sapiens
MWLVTFLLLLDSLHKARPEDVGTSLYFVNDSLQQLPCTASGYPIPAIRWLKDGRPLPADSRWTKRITGLTISDLRTEDSGTYICEVTNTFGSAEATGILMVIDPLHVTLTPKKLKTGIGSTVILSCALTGSPEFTIRWYRNTELVLPDEAISIRGLSNETLLITSAQKSHSGAYQCFATRKAQTAQDFAIIALEDGTPRIVSSFSEKVVNPGEQFSLMCAAKGAPPPTVTWALDDEPIVRDGSHRTNQYTMSDGTTISHMNVTGPQIRDGGVYRCTARNLVGSAEYQARINVRGPPSIRAMRNITAVAGRDTLINCRVIGYPYYSIKWYKDALLLPDNHRQVVFENGTLKLTDVQKGMDEGEYLCSVLIQPQLSISQSVHVAVKVPPLIQPFEFPPASIGQLLYIPCVVSSGDMPIRITWRKDGQVIISGSGVTIESKEFMSSLQISSVSLKHNGNYTCIASNAAATVSRERQLIVRVPPRFVVQPNNQDGIYGKAGVLNCSVDGYPPPKVMWKHAKGSGNPQQYHPVPLTGRIQILPNSSLLIRHVLEEDIGYYLCQASNGVGTDISKSMFLTVKIPAMITSHPNTTIAIKGHAKELNCTARGERPIIIRWEKGDTVIDPDRVMRYAIATKDNGDEVVSTLKLKPADRGDSVFFSCHAINSYGEDRGLIQLTVQEPPDPPELEIREVKARSMNLRWTQRFDGNSIITGFDIEYKNKSDSWDFKQSTRNISPTINQANIVDLHPASVYSIRMYSFNKIGRSEPSKELTISTEEAAPDGPPMDVTLQPVTSQSIQVTWKAPKKELQNGVIRGYQIGYRENSPGSNGQYSIVEMKATGDSEVYTLDNLKKFAQYGVVVQAFNRAGTGPSSSEINATTLEDVPSQPPENVRALSITSDVAVISWSEPPRSTLNGVLKGYRVIFWSLYVDGEWGEMQNITTTRERVELRGMEKFTNYSVQVLAYTQAGDGVRSSVLYIQTKEDVPGPPAGIKAVPSSASSVVVSWLPPTKPNGVIRKYTIFCSSPGSGQPAPSEYETSPEQLFYRIAHLNRGQQYLLWVAAVTSAGRGNSSEKVTIEPAGKAPAKIISFGGTVTTPWMKDVRLPCNSVGDPAPAVKWTKDSEDSAIPVSMDGHRLIHTNGTLLLRAVKAEDSGYYTCTATNTGGFDTIIVNLLVQVPPDQPRLTVSKTSASSITLTWIPGDNGGSSIRGFVLQYSVDNSEEWKDVFISSSERSFKLDSLKCGTWYKVKLAAKNSVGSGRISEIIEAKTHGREPSFSKDQHLFTHINSTHARLNLQGWNNGGCPITAIVLEYRPKGTWAWQGLRANSSGEVFLTELREATWYELRMRACNSAGCGNETAQFATLDYDGSTIPPIKSAQGEGDDVKKLFTIGCPVILATLGVALLFIVRKKRKEKRLKRLRDAKSLAEMLISKNNRSFDTPVKGPPQGPRLHIDIPRVQLLIEDKEGIKQLGDDKATIPVTDAEFSQAVNPQSFCTGVSLHHPTLIQSTGPLIDMSDIRPGTNPVSRKNVKSAHSTRNRYSSQWTLTKCQASTPARTLTSDWRTVGSQHGVTVTESDSYSASLSQDTDKGRNSMVSTESASSTYEELARAYEHAKLEEQLQHAKFEITECFISDSSSDQMTTGTNENADSMTSMSTPSEPGICRFTASPPKPQDADRGKNVAVPIPHRANKSDYCNLPLYAKSEAFFRKADGREPCPVVPPREASIRNLARTYHTQARHLTLDPASKSLGLPHPGAPAAASTATLPQRTLAMPAPPAGTAPPAPGPTPAEPPTAPSAAPPAPSTEPPRAGGPHTKMGGSRDSLLEMSTSGVGRSQKQGAGAYSKSYTLV

SEQ ID NO: 24658 - protein, 356 aa, Homo sapiens
MTSVTRSEIIDEKGPVMSKTHDHQLESSLSPVEVFAKTSASLEMNQGVSEERIHLGSSPKKGGNCDLSHQERLQSKSLHLSPQEQSASYQDRRQSWRRASMKETNRRKSLHPIHQGITELSRSISVDLAESKRLGCLLLSSFQFSIQKLEPFLRDTKGFSLESFRAKASSLSEELKHFADGLETDGTLQKCFEDSNGKASDFSLEASVAEMKEYITKFSLERQTWDQLLLHYQQEAKEILSRGSTEAKITEVKVEPMTYLGSSQNEVLNTKPDYQKILQNQSKVFDCMELVMDELQGSVKQLQAFMDESTQCFQKVSVQLGKRSMQQLDPSPARKLLKLQLQNPPAIHGSGSGSCQ

SEQ ID NO: 24659 - protein, 289 aa, Homo sapiens
MIINWNQVSVLWKCLLKQSASYQDRRQSWRRASMKETNRRKSLHPIHQGITELSRSISVDLAESKRLGCLLLSSFQFSIQKLEPFLRDTKGFSLESFRAKASSLSEELKHFADGLETDGTLQKCFEDSNGKASDFSLEASVAEMKEYITKFSLERQTWDQLLLHYQQEAKEILSRGSTEAKITEVKVEPMTYLGSSQNEVLNTKPDYQKILQNQSKVFDCMELVMDELQGSVKQLQAFMDESTQCFQKVSVQLGKRSMQQLDPSPARKLLKLQLQNPPAIHGSGSGSCQ

SEQ ID NO: 24660 - protein, 340 aa, Homo sapiens
MSKTHDHQLESSLSPVEVFAKTSASLEMNQGVSEERIHLGSSPKKGGNCDLSHQERLQSKSLHLSPQEQSASYQDRRQSWRRASMKETNRRKSLHPIHQGITELSRSISVDLAESKRLGCLLLSSFQFSIQKLEPFLRDTKGFSLESFRAKASSLSEELKHFADGLETDGTLQKCFEDSNGKASDFSLEASVAEMKEYITKFSLERQTWDQLLLHYQQEAKEILSRGSTEAKITEVKVEPMTYLGSSQNEVLNTKPDYQKILQNQSKVFDCMELVMDELQGSVKQLQAFMDESTQCFQKVSVQLGKRSMQQLDPSPARKLLKLQLQNPPAIHGSGSGSCQ

SEQ ID NO: 24661 - protein, 249 aa, Homo sapiens
MTSVTRSEIIDELSRSISVDLAESKRLGCLLLSSFQFSIQKLEPFLRDTKGFSLESFRAKASSLSEELKHFADGLETDGTLQKCFEDSNGKASDFSLEASVAEMKEYITKFSLERQTWDQLLLHYQQEAKEILSRGSTEAKITEVKVEPMTYLGSSQNEVLNTKPDYQKILQNQSKVFDCMELVMDELQGSVKQLQAFMDESTQCFQKVSVQLGKRSMQQLDPSPARKLLKLQLQNPPAIHGSGSGSCQ

SEQ ID NO: 24662 - protein, 147 aa, Homo sapiens
MAERPEDLNLPNAVITRIIKEALPDGVNISKEARSAISRAASVFVLYATSCANNFAMKGKRKTLNASDVLSAMEEMEFQRFVTPLKEALEAYRREQKGKKEASEQKKKDKDKKTDSEEQDKSRDEDNDEDEERLEEEEQNEEEEVDN

SEQ ID NO: 24663 - protein, 314 aa, Homo sapiens
MGLEAARELECAALGTLLRDPREAERTLLLDCRPFLAFCRRHVRAARPVPWNALLRRRARGPPAAVLACLLPDRALRTRLVRGELARAVVLDEGSASVAELRPDSPAHVLLAALLHETRAGPTAVYFLRGGFDGFQGCCPDLCSEAPAPALPPTGDKTSRSDSRAPVYDQGGPVEILPYLFLGSCSHSSDLQGLQACGITAVLNVSASCPNHFEGLFRYKSIPVEDNQMVEISAWFQEAIGFIDWVKNSGGRVLVHCQAGISRSATICLAYLMQSRRVRLDEAFDFVKQRRGVISPNFSFMGQLLQFETQVLCH

SEQ ID NO: 24664 - protein, 493 aa, Homo sapiens
MILNSLSLCYHNKLILAPMVRVGTLPMRLLALDYGADIVYCEELIDLKMIQCKRVVNEVLSTVDFVAPDDRVVFRTCEREQNRVVFQMGTSDAERALAVARLVENDVAGIDVNMGCPKQYSTKGGMGAALLSDPDKIEKILSTLVKGTRRPVTCKIRILPSLEDTLSLVKRIERTGIAAIAVHGRKREERPQHPVSCEVIKAIADTLSIPVIANGGSHDHIQQYSDIEDFRQATAASSVMVARAAMWNPSIFLKEGLRPLEEVMQKYIRYAVQYDNHYTNTKYCLCQMLREQLESPQGRLLHAAQSSREICEAFGLGAFYEETTQELDAQQARLSAKTSEQTGEPAEDTSGVIKMAVKFDRRAYPAQITPKMCLLEWCRREKLAQPVYETVQRPLDRLFSSIVTVAEQKYQSTLWDKSKKLAEQAAAIVCLRSQGLPEGRLGEESPSLHKRKREAPDQDPGGPRAQELAQPGDLCKKPFVALGSGEESPLEGW

SEQ ID NO: 24665 - protein, 220 aa, Homo sapiens
MTSGEVKTSLKNAYSSAKRLSPKMEEEGEEEDYCTPGAFELERLFWKGSPQYTHVNEVWPKLYIGDEATALDRYRLQKAGFTHVLNAAHGRWNVDTGPDYYRDMDIQYHGVEADDLPTFDLSVFFYPAAAFIDRALSDDHSKILVHCVMGRSRSATLVLAYLMIHKDMTLVDAIQQVAKNRCVLPNRGFLKQLRELDKQLVQQRRRSQRQDGEEEDGREL

SEQ ID NO: 24666 - protein, 519 aa, Homo sapiens
MAAPSRLLIRGGRVVNDDFSEVADVLVEDGVVRALGHDLLPPGGAPAGLRVLDAAGKLVLPGGIDTHTHMQFPFMGSRSIDDFHQGTKAALSGGTTMIIDFAIPQKGGSLIEAFETWRSWADPKVCCDYSLHVAVTWWSDQVKEEMKILVQDKGVNSFKMFMAYKDLYMVTDLELYEAFSRCKEIGAIAQVHAENGDLIAEGAKKMLALGITGPEGHELCRPEAVEAEATLRAITIASAVNCPLYIVHVMSKSAAKVIADARRDGKVVYGEPIAASLGTDGTHYWNKEWHHAAHHVMGPPLRPDPSTPDFLMNLLANDDLTTTGTDNCTFNTCQKALGKDDFTKIPNGVNGVEDRMSVIWEKGVHSGKMDENRFVAVTSTNAAKIFNLYPRKGRIAVGSDADIVIWDPKGTRTISAKTHHQAVNFNIFEGMVCHGVPLVTISRGKVVYEAGVFSVTAGDGKFIPRKPFAEYIYKRIKQRDRTCTPTPVERAPYKGEVATLKSRVTKEDATAGTRKQAHP

SEQ ID NO: 24667 - protein, 466 aa, Homo sapiens
MTTSPILQLLLRLSLCGLLLQRAETGSKGQTAGELYQRWERYRRECQETLAAAEPPSGLACNGSFDMYVCWDYAAPNATARASCPWYLPWHHHVAAGFVLRQCGSDGQWGLWRDHTQCENPEKNEAFLDQRLILERLQVMYTVGYSLSLATLLLALLILSLFRRLHCTRNYIHINLFTSFMLRAAAILSRDRLLPRPGPYLGDQALALWNQALAACRTAQIVTQYCVGANYTWLLVEGVYLHSLLVLVGGSEEGHFRYYLLLGWGAPALFVIPWVIVRYLYENTQCWERNEVKAIWWIIRTPILMTILINFLIFIRILGILLSKLRTRQMRCRDYRLRLARSTLTLVPLLGVHEVVFAPVTEEQARGALRFAKLGFEIFLSSFQGFLVSVLYCFINKEVQSEIRRGWHHCRLRRSLGEEQRQLPERAFRALPSGSGPGEVPTSRGLSSGTLPGPGNEASRELESYC

SEQ ID NO: 24668 - protein, 419 aa, Homo sapiens
MTTSPILQLLLRLSLCGLLLQRAETGSKGQTAGELYQRWERYRRECQETLAAAEPPSGLACNGSFDMYVCWDYAAPNATARASCPWYLPWHHHVAAGFVLRQCGSDGQWGLWRDHTQCENPEKNEAFLDQRLILERLQVMYTVGYSLSLATLLLALLILSLFRRLHCTRNYIHINLFTSFMLRAAAILSRDRLLPRPGPYLGDQALALWNQALAACRTAQIVTQYCVGANYTWLLVEGVYLHSLLVLVGGSEEGHFRYYLLLGWGAPALFVIPWVIVRYLYENTQCWERNEVKAIWWIIRTPILMTILINFLIFIRILGILLSKLRTRQMRCRDYRLRLARSTLTLVPLLGVHEVVFAPVTEEQARGALRFAKLGFEIFLSSFQGFLVSVLYCFINKEVGRDPAAAPALWRQRGVRRRL

SEQ ID NO: 24669 - protein, 430 aa, Homo sapiens
MTTSPILQLLLRLSLCGLLLQRAETGSKGQTAGELYQRWERYRRECQETLAAAEPPSVAAGFVLRQCGSDGQWGLWRDHTQCENPEKNEAFLDQRLILERLQVMYTVGYSLSLATLLLALLILSLFRRLHCTRNYIHINLFTSFMLRAAAILSRDRLLPRPGPYLGDQALALWNQALAACRTAQIVTQYCVGANYTWLLVEGVYLHSLLVLVGGSEEGHFRYYLLLGWGAPALFVIPWVIVRYLYENTQCWERNEVKAIWWIIRTPILMTILINFLIFIRILGILLSKLRTRQMRCRDYRLRLARSTLTLVPLLGVHEVVFAPVTEEQARGALRFAKLGFEIFLSSFQGFLVSVLYCFINKEVQSEIRRGWHHCRLRRSLGEEQRQLPERAFRALPSGSGPGEVPTSRGLSSGTLPGPGNEASRELESYC

SEQ ID NO: 24670 - protein, 261 aa, Homo sapiens
MSWKKALRIPGGLRAATVTLMLAMLSTPVAEGRDSPEDFVYQFKAMCYFTNGTERVRYVTRYIYNREEYARFDSDVEVYRAVTPLGPPDAEYWNSQKEVLERTRAELDTVCRHNYQLELRTTLQRRVEPTVTISPSRTEALNHHNLLVCSVTDFYPAQIKVRWFRNDQEETTGVVSTPLIRNGDWTFQILVMLEMTPQHGDVYTCHVEHPSLQNPITVEWRAQSESAQSKMLSGIGGFVLGLIFLGLGLIIHHRSQKGLLH

SEQ ID NO: 24671 - protein, 232 aa, Homo sapiens
MQMARLLGLCAWARKSVRMASSRMTRRDPLTNKVALVTASTDGIGFAIARRLAQDRAHVVVSSRKQQNVDQAVATLQGEGLSVTGTVCHVGKAEDRERLVAMAVKLHGGIDILVSNAAVNPFFGSLMDVTEEVWDKTLDINVKAPALMTKAVVPEMEKRGGGSVVIVSSIAAFSPSPGFSPYNVSKTALLGLNNTLAIELAPRNIRVNCLHLDLSRLASAGCSGWTRKKRKA

SEQ ID NO: 24672 - protein, 242 aa, Homo sapiens
MQMARLLGLCAWARKSVRMASSRMTRRDPLTNKVALVTASTDGIGFAIARRLAQDRAHVVVSSRKQQNVDQAVATLQGEGLSVTGTVCHVGKAEDRERLVAMAVKLHGGIDILVSNAAVNPFFGSLMDVTEEVWDKTLDINVKAPALMTKAVVPEMEKRGGGSVVIVSSIAAFSPSPGFSPYNVSKTALLGLNNTLAIELAPRNIRVNCLHLDLSRLASAGWLGEPEDCAGIVSFLCSEDAS

SEQ ID NO: 24673 - protein, 381 aa, Homo sapiens
MIDTLRPVPFASEMAISKTVAWLNEQLELGNERLLLMDCRPQELYESSHIESAINVAIPGIMLRRLQKGNLPVRALFTRGEDRDRFTRRCGTDTVVLYDESSSDWNENTGGESVLGLLLKKLKDEGCRAFYLEGGFSKFQAEFSLHCETNLDGSCSSSSPPLPVLGLGGLRISSDSSSDIESDLDRDPNSATDSDGSPLSNSQPSFPVEILPFLYLGCAKDSTNLDVLEEFGIKYILNVTPNLPNLFENAGEFKYKQIPISDHWSQNLSQFFPEAISFIDEARGKNCGVLVHCLAGISRSVTVTVAYLMQKLNLSMNDAYDIVKMKKSNISPNFNFMGQLLDFERTLGLSSPCDNRVPAQQLYFTTPSNQNVYQVDSLQST

SEQ ID NO: 24674 - protein, 235 aa, Homo sapiens
MIDTLRPVPFASEMAISKTVAWLNEQLELGNERLLLMDCRPQELYESSHIESAINVAIPGIMLRRLQKGNLPVRALFTRGEDRDRFTRRCGTDTVVLYDESSSDWNENTGGESVLGLLLKKLKDEGCRAFYLEDEARGKNCGVLVHCLAGISRSVTVTVAYLMQKLNLSMNDAYDIVKMKKSNISPNFNFMGQLLDFERTLGLSSPCDNRVPAQQLYFTTPSNQNVYQVDSLQST

SEQ ID NO: 24675 - protein, 313 aa, Homo sapiens
MAALTDLSFMYRWFKNCNLVGNLSEKYVFITGCDSGFGNLLAKQLVDRGMQVLAACFTEEGSQKLQRDTSYRLQTTLLDVTKSESIKAAAQWVRDKVGEQGLWALVNNAGVGLPSGPNEWLTKDDFVKVINVNLVGLIEVTLHMLPMVKRARGRVVNMSSSGGRVAVIGGGYCVSKFGVEAFSDSIRRELYYFGVKVCIIEPGNYRTAILGKENLESRMRKLWERLPQETRDSYGEDYFRIYTDKLKNIMQVAEPRVRDVINSMEHAIVSRSPRIRYNPGLDAKLLYIPLAKLPTPVTDFILSRYLPRPADSV

SEQ ID NO: 24676 - protein, 752 aa, Homo sapiens
MTAGSVCVPQIIPLRVPQPGKANHEIDNNTLLEMKSDTPDVNIYYTLDGSKPEFLKRIGYGENNTFKYIKPITLPDGKIQVKAIAVSKDCRQSGIVTKVFHVDYEPPNIVSPEDNVENVLKDSSRQEFKNGFVGSKLKKKYKNSENQRSWNVNLRKFPESPLEIPAYGGGSGSRPPTRQSQSPGFAHVSGQKCLTSTEIMRIQRETDFLKCAHCLAPRPSDPFARFCQECGSPVPPIFGCRLPPPEGAQMGLCAECRSLVPMNTPICVVCEAPLALQLQPQASLHLKEKVICRACGTGNPAHLRYCVTCEGALPSSQESMCSGDKAPPPPTQKGGTISCYRCGRWNLWEASFCGWCGAMLGIPAGCSVCPKCGASNHLSARFCGSCGICVKSLVKLSLDRSLALAAEEPRPFSESLNIPLPRSDVGTKRDIGTQTVGLFYPSGKLLAKKEQELASQKQRQEKMSDHKPLLTAISPGRGYWRRQLDHISAHLRCYAQNNPEFRALIAEPRMGKLISATVHEDGCEVSIRLNYSQVSNKNLYLNKAVNFSDHLLSSAAEGDGGLCGSRSSWVSDYSQSTSDTIEKIKRIKNFKTKTFQEKKEQLIPENRLLLKEVGPTGEGRVSVIEQLLDEGADPNCCDEDNRPVITVAVMNKHHEAIPVLVQRGADIDQQWGPLRNTALHEATLLGLAGRESTATLLGCNASIQKKNAGGQTAYDLALNTGDDLVTSLFAAKFGQGLEDQLAQTRSLSLDDC

SEQ ID NO: 24677 - protein, 585 aa, Homo sapiens
MLTLESFQSPGFAHVSGQKCLTSTEIMRIQRETDFLKCAHCLAPRPSDPFARFCQECGSPVPPIFGCRLPPPEGAQMGLCAECRSLVPMNTPICVVCEAPLALQLQPQASLHLKEKVICRACGTGNPAHLRYCVTCEGALPSSQESMCSGDKAPPPPTQKGGTISCYRCGRWNLWEASFCGWCGAMLGIPAGCSVCPKCGASNHLSARFCGSCGICVKSLVKLSLDRSLALAAEEPRPFSEPRCAWQSLNIPLPRSDVGTKRDIGTQTVGLFYPSGKLLAKKEQELASQKQRQEKMSDHKPLLTAISPGRGYWRRQLDHISAHLRCYAQNNPEFRALIAEPRMGKLISATVHEDGCEVSIRLNYSQVSNKNLYLNKAVNFSDHLLSSAAEGDGGLCGSRSSWVSDYSQSTSDTIEKIKRIKNFKTKTFQEKKEQLIPENRLLLKEVGPTGEGRVSVIEQLLDEGADPNCCDEDNRPVITVAVMNKHHEAIPVLVQRGADIDQQWGPLRNTALHEATLLGLAGRESTATLLGCNASIQKKNAGGQTAYDLALNTGDDLVTSLFAAKFGQGLEDQLAQTRSLSLDDC

SEQ ID NO: 24678 - protein, 574 aa, Homo sapiens
MTAGSVCVPQIIPLRVPQPGKANHEIDNNTLLEMKSDTPDVNIYYTLDGSKPEFLKRIGYGENNTFKYIKPITLPDGKIQVKAIAVSKDCRQSGIVTKVFHVDYEPPNIVSPEDNVENVLKDSSRQEFKNGFVGSKLKKKYKNSENQRSWNVNLRKFPESPLEIPAYGGGSGSRPPTRQSQSPGFAHVSGQKCLTSTEIMRIQRETDFLKCAHCLAPRPSDPFARFCQECGSPVPPIFGCRLPPPEGAQMGLCAECRSLVPMNTPICVVCEAPLALQLQPQASLHLKEKVICRACGTGNPAHLRYCVTCEGALPSSQESMCSGDKAPPPPTQKGGTISCYRCGRWNLWEASFCGWCGAMLGIPAGCSVCPKCGASNHLSARFCGSCGICVKSLVKLSLDRSLALAAEEPRPFSESLNIPLPRSDVGTKRDIGTQTVGLFYPSGKLLAKKEQELASQKQRQEKMSDHKPLLTAISPGRGYWRRQLDHISAHLRCYAQNNPEFRALIAEPRMGKLISATVHEDGCEVSIRLNYSQVSNKVRKLRLREVKQPASSKGTKLVSGRPRIHTWQPETFPS

SEQ ID NO: 24679 - protein, 638 aa, Homo sapiens
MLTLESFQRVHWKSQLMVEDQVLDHPPASPRQDTVPFTFKSFLFGHSMEIRPWKRKGRTLFRRLLFQSPGFAHVSGQKCLTSTEIMRIQRETDFLKCAHCLAPRPSDPFARFCQECGSPVPPIFGCRLPPPEGAQMGLCAECRSLVPMNTPICVVCEAPLALQLQPQASLHLKEKVICRACGTGNPAHLRYCVTCEGALPSSQESMCSGDKAPPPPTQKGGTISCYRCGRWNLWEASFCGWCGAMLGIPAGCSVCPKCGASNHLSARFCGSCGICVKSLVKLSLDRSLALAAEEPRPFSESLNIPLPRSDVGTKRDIGTQTVGLFYPSGKLLAKKEQELASQKQRQEKMSDHKPLLTAISPGRGYWRRQLDHISAHLRCYAQNNPEFRALIAEPRMGKLISATVHEDGCEVSIRLNYSQVSNKNLYLNKAVNFSDHLLSSAAEGDGGLCGSRSSWVSDYSQSTSDTIEKIKRIKNFKTKTFQEKKEQLIPENRLLLKEVGPTGEGRVSVIEQLLDEGADPNCCDEDNRPVITVAVMNKHHEAIPVLVQRGADIDQQWGPLRNTALHEATLLGLAGRESTATLLGCNASIQKKNAGGQTAYDLALNTGDDLVTSLFAAKFGQGLEDQLAQTRSLSLDDC

SEQ ID NO: 24680 - protein, 711 aa, Homo sapiens
MTAGSVCVPQIIPLRVPQPGKANHEIDNNTLLEMKSDTPDVNIYYTLDGSKPEFLKRIGYGENNTFKYIKPITLPDGKIQVKAIAVSKDCRQSGIVTKVFHVDYEPPNIVSPEDNVENVLKDSSRQEFKNGFVGSKLKKKYKNSENQRSWNVNLRKFPESPLEIPAYGGGSGSRPPTRQSQSPGFAHVSGQKCLTSTEIMRIQRETDFLKCAHCLAPRPSDPFARFCQECGSPVPPIFGCRLPPPEGAQMGLCAECRSLVPMNTPICVVCEAPLALQLQPQASLHLKEKVICRACGTGNPAHLRYCVTCEGALPSSQELGIPAGCSVCPKCGASNHLSARFCGSCGICVKSLVKLSLDRSLALAAEEPRPFSESLNIPLPRSDVGTKRDIGTQTVGLFYPSGKLLAKKEQELASQKQRQEKMSDHKPLLTAISPGRGYWRRQLDHISAHLRCYAQNNPEFRALIAEPRMGKLISATVHEDGCEVSIRLNYSQVSNKNLYLNKAVNFSDHLLSSAAEGDGGLCGSRSSWVSDYSQSTSDTIEKIKRIKNFKTKTFQEKKEQLIPENRLLLKEVGPTGEGRVSVIEQLLDEGADPNCCDEDNRPVITVAVMNKHHEAIPVLVQRGADIDQQWGPLRNTALHEATLLGLAGRESTATLLGCNASIQKKNAGGQTAYDLALNTGDDLVTSLFAAKFGQGLEDQLAQTRSLSLDDC

SEQ ID NO: 24681 - protein, 153 aa, Homo sapiens
MVATKTFALLLLSLFLAVGLGEKKEGHFSALPSLPVGSHAKVSSPQPRGPRYAEGTFISDYSIAMDKIHQQDFVNWLLAQKGKKNDWKHNITQREARALELASQANRKEEEAVEPQSSPAKNPSDEDLLRDLLIQELLACLLDQTNLCRLRSR

SEQ ID NO: 24682 - protein, 518 aa, Homo sapiens
MKSFSRILFLVFLLAGLRSKAAPSAPLPLGCGFPDMAHPSETSPLKGASENSKRDRLNPEFPGTPYPEPSKLPHTVSLETFPLDFTEPLNPDLRETPHPESPETPKADSLTTSISESLDMPKTNLSKMAHPESSETPTPGPTEMPHPGSPETPKPNFSKTSRPEFPETPNTDLMQTTPQESPEILQLNATEVSQAELPETSNTNPTKTPDPKSPEKHDLNSTETPNSEFLQALHPDPSKTPHPESHVTHNPSPTEISQTEFPTTYYQNATDVPRTSDPQISTSLYPETPVPFKDDATALNELSLNPKPGTPAAIQPDSPKLPTSDSPGMVELKAPQNSGPKESNVPPPSARIAGPPALPGRPSQLAPATLRAPQRHSRGEGVNTIIVVERVKETGVTLVGRPRGAAGGALCLFFAGTALLIGIFVLLWCLYRRAARQRPFAHHRLPDDGDEPVLHLDAPKDPYDLYFYAPDTWVPSHIATKQPPPTPPLPPKLPPPPRGGRPQRLEALSPATLPNNFV

SEQ ID NO: 24683 - protein, 796 aa, Homo sapiens
MNQTASVSHHIKCQPSKTIKELGSNSPPQRNWKGIAIALLVILVVCSLITMSVILLTPDELTNSSETRLSLEDLFRKDFVLHDPEARWINDTDVVYKSENGHVIKLNIETNATTLLLENTTFVTFKASRHSVSPDLKYVLLAYDVKQIFHYSYTASYVIYNIHTREVWELNPPEVEDSVLQYAAWGVQGQQLIYIFENNIYYQPDIKSSSLRLTSSGKEEIIFNGIADWLYEEELLHSHIAHWWSPDGERLAFLMINDSLVPTMVIPRFTGALYPKGKQYPYPKAGQVNPTIKLYVVNLYGPTHTLELMPPDSFKSREYYITMVKWVSNTKTVVRWLNRAQNISILTVCETTTGACSKKYEMTSDTWLSQQNEEPVFSRDGSKFFMTVPVKQGGRGEFHHVAMFLIQSKSEQITVRHLTSGNWEVIKILAYDETTQKIYFLSTESSPRGRQLYSASTEGLLNRQCISCNFMKEQCTYFDASFSPMNQHFLLFCEGPRVPVVSLHSTDNPAKYFILESNSMLKEAILKKKIGKPEIKILHIDDYELPLQLSLPKDFMDRNQYALLLIMDEEPGGQLVTDKFHIDWDSVLIDMDNVIVARFDGRGSGFQGLKILQEIHRRLGSVEVKDQITAVKFLLKLPYIDSKRLSIFGKGYGGYIASMILKSDEKLFKCGSVVAPITDLKLYASAFSERYLGMPSKEESTYQAASVLHNVHGLKEENILIIHGTADTKVHFQHSAELIKHLIKAGVNYTMQVYPDEGHNVSEKSKYHLYSTILKFFSDCLKEEISVLPQEPEEDE

SEQ ID NO: 24684 - protein, 789 aa, Homo sapiens
MRKVESRGEGGREELGSNSPPQRNWKGIAIALLVILVVCSLITMSVILLTPDELTNSSETRLSLEDLFRKDFVLHDPEARWINDTDVVYKSENGHVIKLNIETNATTLLLENTTFVTFKASRHSVSPDLKYVLLAYDVKQIFHYSYTASYVIYNIHTREVWELNPPEVEDSVLQYAAWGVQGQQLIYIFENNIYYQPDIKSSSLRLTSSGKEEIIFNGIADWLYEEELLHSHIAHWWSPDGERLAFLMINDSLVPTMVIPRFTGALYPKGKQYPYPKAGQVNPTIKLYVVNLYGPTHTLELMPPDSFKSREYYITMVKWVSNTKTVVRWLNRAQNISILTVCETTTGACSKKYEMTSDTWLSQQNEEPVFSRDGSKFFMTVPVKQGGRGEFHHVAMFLIQSKSEQITVRHLTSGNWEVIKILAYDETTQKIYFLSTESSPRGRQLYSASTEGLLNRQCISCNFMKEQCTYFDASFSPMNQHFLLFCEGPRVPVVSLHSTDNPAKYFILESNSMLKEAILKKKIGKPEIKILHIDDYELPLQLSLPKDFMDRNQYALLLIMDEEPGGQLVTDKFHIDWDSVLIDMDNVIVARFDGRGSGFQGLKILQEIHRRLGSVEVKDQITAVKFLLKLPYIDSKRLSIFGKGYGGYIASMILKSDEKLFKCGSVVAPITDLKLYASAFSERYLGMPSKEESTYQAASVLHNVHGLKEENILIIHGTADTKVHFQHSAELIKHLIKAGVNYTMQVYPDEGHNVSEKSKYHLYSTILKFFSDCLKEEISVLPQEPEEDE

SEQ ID NO: 24685 - protein, 800 aa, Homo sapiens
MTAAKQEPQPTPGARASQAQPADQELGSNSPPQRNWKGIAIALLVILVVCSLITMSVILLTPDELTNSSETRLSLEDLFRKDFVLHDPEARWINDTDVVYKSENGHVIKLNIETNATTLLLENTTFVTFKASRHSVSPDLKYVLLAYDVKQIFHYSYTASYVIYNIHTREVWELNPPEVEDSVLQYAAWGVQGQQLIYIFENNIYYQPDIKSSSLRLTSSGKEEIIFNGIADWLYEEELLHSHIAHWWSPDGERLAFLMINDSLVPTMVIPRFTGALYPKGKQYPYPKAGQVNPTIKLYVVNLYGPTHTLELMPPDSFKSREYYITMVKWVSNTKTVVRWLNRAQNISILTVCETTTGACSKKYEMTSDTWLSQQNEEPVFSRDGSKFFMTVPVKQGGRGEFHHVAMFLIQSKSEQITVRHLTSGNWEVIKILAYDETTQKIYFLSTESSPRGRQLYSASTEGLLNRQCISCNFMKEQCTYFDASFSPMNQHFLLFCEGPRVPVVSLHSTDNPAKYFILESNSMLKEAILKKKIGKPEIKILHIDDYELPLQLSLPKDFMDRNQYALLLIMDEEPGGQLVTDKFHIDWDSVLIDMDNVIVARFDGRGSGFQGLKILQEIHRRLGSVEVKDQITAVKFLLKLPYIDSKRLSIFGKGYGGYIASMILKSDEKLFKCGSVVAPITDLKLYASAFSERYLGMPSKEESTYQAASVLHNVHGLKEENILIIHGTADTKVHFQHSAELIKHLIKAGVNYTMQVYPDEGHNVSEKSKYHLYSTILKFFSDCLKEEISVLPQEPEEDE

SEQ ID NO: 24686 - protein, 746 aa, Homo sapiens
MSVILLTPDELTNSSETRLSLEDLFRKDFVLHDPEARWINDTDVVYKSENGHVIKLNIETNATTLLLENTTFVTFKASRHSVSPDLKYVLLAYDVKQIFHYSYTASYVIYNIHTREVWELNPPEVEDSVLQYAAWGVQGQQLIYIFENNIYYQPDIKSSSLRLTSSGKEEIIFNGIADWLYEEELLHSHIAHWWSPDGERLAFLMINDSLVPTMVIPRFTGALYPKGKQYPYPKAGQVNPTIKLYVVNLYGPTHTLELMPPDSFKSREYYITMVKWVSNTKTVVRWLNRAQNISILTVCETTTGACSKKYEMTSDTWLSQQNEEPVFSRDGSKFFMTVPVKQGGRGEFHHVAMFLIQSKSEQITVRHLTSGNWEVIKILAYDETTQKIYFLSTESSPRGRQLYSASTEGLLNRQCISCNFMKEQCTYFDASFSPMNQHFLLFCEGPRVPVVSLHSTDNPAKYFILESNSMLKEAILKKKIGKPEIKILHIDDYELPLQLSLPKDFMDRNQYALLLIMDEEPGGQLVTDKFHIDWDSVLIDMDNVIVARFDGRGSGFQGLKILQEIHRRLGSVEVKDQITAVKFLLKLPYIDSKRLSIFGKGYGGYIASMILKSDEKLFKCGSVVAPITDLKLYASAFSERYLGMPSKEESTYQAASVLHNVHGLKEENILIIHGTADTKVHFQHSAELIKHLIKAGVNYTMQVYPDEGHNVSEKSKYHLYSTILKFFSDCLKEEISVLPQEPEEDE

SEQ ID NO: 24687 - protein, 478 aa, Homo sapiens
MAPKKKGKKGKAKGTPIVDGLAPEDMSKEQVEEHVSRIREELDREREERNYFQLERDKIHTFWEITRRQLEEKKAELRNKDREMEEAEERHQVEIKVYKQKVKHLLYEHQNNLTEMKAEGTVVMKLAQKEHRIQESVLRKDMRALKVELKEQELASEVVVKNLRLKHTEEITRMRNDFERQVREIEAKYDKKMKMLRDELDLRRKTELHEVEERKNGQIHTLMQRHEEAFTDIKNYYNDITLNNLALINSLKEQMEDMRKKEDHLEREMAEVSGQNKRLADPLQKAREEMSEMQKQLANYERDKQILLCTKARLKVREKELKDLQWEHEVLEQRFTKVQQERDELYRKFTAAIQEVQQKTGFKNLVLERKLQALSAAVEKKEVQFNEVLAASNLDPAALTLVSRKLEDVLESKNSTIKDLQYELAQVCKAHNDLLRTYEAKLLAFGIPLDNVGFKPLETAVIGQTLGQGPAGLVGTPT

SEQ ID NO: 24688 - protein, 453 aa, Homo sapiens
MSKEQVEEHVSRIREELDREREERNYFQLERDKIHTFWEITRRQLEEKKAELRNKDREMEEAEERHQVEIKVYKQKVKHLLYEHQNNLTEMKAEGTVVMKLAQKEHRIQESVLRKDMRALKVELKEQELASEVVVKNLRLKHTEEITRMRNDFERQVREIEAKYDKKMKMLRDELDLRRKTELHEVEERKNGQIHTLMQRHEEAFTDIKNYYNDITLNNLALINSLKEQMEDMRKKEDHLEREMAEVSGQNKRLADPLQKAREEMSEMQKQLANYERDKQILLCTKARLKVREKELKDLQWEHEVLEQRFTKVQQERDELYRKFTAAIQEVQQKTGFKNLVLERKLQALSAAVEKKEVQFNEVLAASNLDPAALTLVSRKLEDVLESKNSTIKDLQYELAQVCKAHNDLLRTYEAKLLAFGIPLDNVGFKPLETAVIGQTLGQGPAGLVGTPT

SEQ ID NO: 24689 - protein, 443 aa, Homo sapiens
MDPLNLSWYDDDLERQNWSRPFNGSDGKADRPHYNYYATLLTLLIAVIVFGNVLVCMAVSREKALQTTTNYLIVSLAVADLLVATLVMPWVVYLEVVGEWKFSRIHCDIFVTLDVMMCTASILNLCAISIDRYTAVAMPMLYNTRYSSKRRVTVMISIVWVLSFTISCPLLFGLNNADQNECIIANPAFVVYSSIVSFYVPFIVTLLVYIKIYIVLRRRRKRVNTKRSSRAFRAHLRAPLKGNCTHPEDMKLCTVIMKSNGSFPVNRRRVEAARRAQELEMEMLSSTSPPERTRYSPIPPSHHQLTLPDPSHHGLHSTPDSPAKPEKNGHAKDHPKIAKIFEIQTMPNGKTRTSLKTMSRRKLSQQKEKKATQMLAIVLGVFIICWLPFFITHILNIHCDCNIPPVLYSAFTWLGYVNSAVNPIIYTTFNIEFRKAFLKILHC

SEQ ID NO: 24690 - protein, 414 aa, Homo sapiens
MDPLNLSWYDDDLERQNWSRPFNGSDGKADRPHYNYYATLLTLLIAVIVFGNVLVCMAVSREKALQTTTNYLIVSLAVADLLVATLVMPWVVYLEVVGEWKFSRIHCDIFVTLDVMMCTASILNLCAISIDRYTAVAMPMLYNTRYSSKRRVTVMISIVWVLSFTISCPLLFGLNNADQNECIIANPAFVVYSSIVSFYVPFIVTLLVYIKIYIVLRRRRKRVNTKRSSRAFRAHLRAPLKEAARRAQELEMEMLSSTSPPERTRYSPIPPSHHQLTLPDPSHHGLHSTPDSPAKPEKNGHAKDHPKIAKIFEIQTMPNGKTRTSLKTMSRRKLSQQKEKKATQMLAIVLGVFIICWLPFFITHILNIHCDCNIPPVLYSAFTWLGYVNSAVNPIIYTTFNIEFRKAFLKILHC

SEQ ID NO: 24691 - protein, 445 aa, Homo sapiens
MDPLNLSWYDDDLERQNWSRPFNGSDGKADRPHYNYYATLLTLLIAVIVFGNVLVCMAVSREKALQTTTNYLIVSLAVADLLVATLVMPWVVYLEVVGEWKFSRIHCDIFVTLDVMMCTASILNLCAISIDRYTAVAMPMLYNTRYSSKRRVTVMISIVWVLSFTISCPLLFGLNNADQNECIIANPAFVVYSSIVSFYVPFIVTLLVYIKIYIVLRRRRKRVNTKRSSRAFRAHLRAPLKGNCTHPEDMKLCTVIMKSNGSFPVNRRRVVQEAARRAQELEMEMLSSTSPPERTRYSPIPPSHHQLTLPDPSHHGLHSTPDSPAKPEKNGHAKDHPKIAKIFEIQTMPNGKTRTSLKTMSRRKLSQQKEKKATQMLAIVLGVFIICWLPFFITHILNIHCDCNIPPVLYSAFTWLGYVNSAVNPIIYTTFNIEFRKAFLKILHC

SEQ ID NO: 24692 - protein, 865 aa, Homo sapiens
MASLYQRFTGKINTSRSFPAPPEASHLLGGQGPEEDGGAGAKPLGPRAQAAAPRERGGGGGGAGGRPRFQYQARSDGDEEDELVGSNPPQRNWKGIAIALLVILVICSLIVTSVILLTPAEDNSLSQKKKVTVEDLFSEDFKIHDPEAKWISDTEFIYREQKGTVRLWNVETNTSTVLIEGKKIESLRAIRYEISPDREYALFSYNVEPIYQHSYTGYYVLSKIPHGDPQSLDPPEVSNAKLQYAGWGPKGQQLIFIFENNIYYCAHVGKQAIRVVSTGKEGVIYNGLSDWLYEEEILKTHIAHWWSPDGTRLAYAAINDSRVPIMELPTYTGSIYPTVKPYHYPKAGSENPSISLHVIGLNGPTHDLEMMPPDDPRMREYYITMVKWATSTKVAVTWLNRAQNVSILTLCDATTGVCTKKHEDESEAWLHRQNEEPVFSKDGRKFFFIRAIPQGGRGKFYHITVSSSQPNSSNDNIQSITSGDWDVTKILAYDEKGNKIYFLSTEDLPRRRQLYSANTVGNFNRQCLSCDLVENCTYFSASFSHSMDFFLLKCEGPGVPMVTVHNTTDKKKMFDLETNEHVKKAINDRQMPKVEYRDIEIDDYNLPMQILKPATFTDTTHYPLLLVVDGTPGSQSVAEKFEVSWETVMVSSHGAVVVKCDGRGSGFQGTKLLHEVRRRLGLLEEKDQMEAVRTMLKEQYIDRTRVAVFGKDYGGYLSTYILPAKGENQGQTFTCGSALSPITDFKLYASAFSERYLGLHGLDNRAYEMTKVAHRVSALEEQQFLIIHPTADEKIHFQHTAELITQLIRGKANYSLQIYPDESHYFTSSSLKQHLYRSIINFFVECFRIQDKLLTVTAKEDEEED

SEQ ID NO: 24693 - protein, 803 aa, Homo sapiens
MTTAKEPSASGKSVQQQEQELVGSNPPQRNWKGIAIALLVILVICSLIVTSVILLTPAEDNSLSQKKKVTVEDLFSEDFKIHDPEAKWISDTEFIYREQKGTVRLWNVETNTSTVLIEGKKIESLRAIRYEISPDREYALFSYNVEPIYQHSYTGYYVLSKIPHGDPQSLDPPEVSNAKLQYAGWGPKGQQLIFIFENNIYYCAHVGKQAIRVVSTGKEGVIYNGLSDWLYEEEILKTHIAHWWSPDGTRLAYAAINDSRVPIMELPTYTGSIYPTVKPYHYPKAGSENPSISLHVIGLNGPTHDLEMMPPDDPRMREYYITMVKWATSTKVAVTWLNRAQNVSILTLCDATTGVCTKKHEDESEAWLHRQNEEPVFSKDGRKFFFIRAIPQGGRGKFYHITVSSSQPNSSNDNIQSITSGDWDVTKILAYDEKGNKIYFLSTEDLPRRRQLYSANTVGNFNRQCLSCDLVENCTYFSASFSHSMDFFLLKCEGPGVPMVTVHNTTDKKKMFDLETNEHVKKAINDRQMPKVEYRDIEIDDYNLPMQILKPATFTDTTHYPLLLVVDGTPGSQSVAEKFEVSWETVMVSSHGAVVVKCDGRGSGFQGTKLLHEVRRRLGLLEEKDQMEAVRTMLKEQYIDRTRVAVFGKDYGGYLSTYILPAKGENQGQTFTCGSALSPITDFKLYASAFSERYLGLHGLDNRAYEMTKVAHRVSALEEQQFLIIHPTADEKIHFQHTAELITQLIRGKANYSLQIYPDESHYFTSSSLKQHLYRSIINFFVECFRIQDKLLTVTAKEDEEED

SEQ ID NO: 24694 - protein, 302 aa, Homo sapiens
MVTEQEVDAIGQTLVDPKQPLQARFRALFTLRGLGGPGAIAWISQAFDDDSALLKHELAYCLGQMQDARAIPMLVDVLQDTRQEPMVRHEAGEALGAIGDPEVLEILKQYSSDPVIEVAETCQLAVRRLEWLQQHGGEPAAGPYLSVDPAPPAEERDVGRLREALLDESRPLFERYRAMFALRNAGGEEAALALAEGLHCGSALFRHEVGYVLGQLQHEAAVPQLAAALARCTENPMVRHECAEALGAIARPACLAALQAHADDPERVVRESCEVALDMYEHETGRAFQYADGLEQLRGAPS

SEQ ID NO: 24695 - protein, 538 aa, Homo sapiens
MTRECPSPAPGPGAPLSGSVLAEAAVVFAVVLSIHATVWDRYSWCAVALAVQAFYVQYKWDRLLQQGSAVFQFRMSANSGLLPASMVMPLLGLVMKERCQTAGNPFFERFGIVVAATGMAVALFSSVLALGITRPVPTNTCVILGLAGGVIIYIMKHSLSVGEVIEVLEVLLIFVYLNMILLYLLPRCFTPGEALLVLGGISFVLNQLIKRSLTLVESQGDPVDFFLLVVVVGMVLMGIFFSTLFVFMDSGTWASSIFFHLMTCVLSLGVVLPWLHRLIRRNPLLWLLQFLFQTDTRIYLLAYWSLLATLACLVVLYQNAKRSSSESKKHQAPTIARKYFHLIVVATYIPGIIFDRPLLYVAATVCLAVFIFLEYVRYFRIKPLGHTLRSFLSLFLDERDSGPLILTHIYLLLGMSLPIWLIPRPCTQKGSLGGARALVPYAGVLAVGVGDTVASIFGSTMGEIRWPGTKKTFEGTMTSIFAQIISVALILIFDSGVDLNYSYAWILGSISTVSLLEAYTTQIDNLLLPLYLLILLMA

SEQ ID NO: 24696 - protein, 2298 aa, Homo sapiens
MDPEEQELLNDYRYRSYSSVIEKALRNFESSSEWADLISSLGKLNKALQSNLRYSLLPRRLLISKRLAQCLHPALPSGVHLKALETYEIIFKIVGTKWLAKDLFLYSCGLFPLLAHAAVSVRPVLLTLYEKYFLPLQKLLLPSLQAFIVGLLPGLEEGSEISDRTDALLLRLSLVVGKEVFYTALWGSVLASPSIRLPASVFVVGHINRDAPGREQKYMLGTNHQLTVKSLRASLLDSNVLVQRNNLEIVLFFFPFYTCLDSNERAIPLLRSDIVRILSAATQTLLRRDMSLNRRLYAWLLGSDIKGNTVVPESEISNSYEDQSSYFFEKYSKDLLVEGLAEILHQKFIDADVEERHHAYLKPFRVLISLLDKPEIGPQVVGNLFLEVIRAFYSYCRDALGSDLKLSYTQSGNSLISAIKENRNASEIVKTVNLLITSLSTDFLWDYMTRCFEECFRPVKQRYSVRNSVSPPPTVSELCALLVFLLDVIPLELYSEVQTQYLPQVLGCLVQPLAEDMEALSLPELTHALKTCFKVLSKVQMPPSYLDTESTSGTSSPVKGENGKIILETKAVIPGDEDASFPPLKSEDSGIGLSASSPELSEHLRVPRVSLERDDVWKKGGSMQRTFLCIQELIANFASKNIFGVQLTASGEESKSEEPAGKRDRDGTQSLAANDSSRKNSWEPKPITVPQFKQMLSDLFTARGSPFKTKSSESPSSSPSSPARKNGGEWDVEKVVIDLGGSREERREAFAAACHLLLDCATFPVYLSEEETEQLCATLFQLPGAGDSSFPSWLKSLMTICCCVTDCYLQNVAISTLLEVINHSQSLALVIEDKMKRYKSSGHNPFFGKLQMVTVPPIAPGILKVIAEKTDFYQRVARVLWNQLNKETREHHVTCVELFYRLHCLAPTANICEDIICHALLDPDKGTRLEALFRFSVIWHLTREIQGSRVTSHNRSFDRSLFVVLDSLACTDGAIGAAAQGWLVRALSLGDVARILEPVLLLLLQPKTQRTSIHCLKQENSADDLHRWFNRKKTSFREACAVPEPQESGSEEHLPLSQFTTVDREAIWAEVEKEPEKYPLRGELSEEELPYYVELPDRTAHGAPDSSEHTESADTSSCHTDSENTSSFSSPSHDLQELSNEENCCAPIPMGGRAYPKRSALLAAFQSESFKAGAKLSLVRVDSDKTQASESFSSDEEADLELQALTTSRLLKQQRERQEAVEALFKHILLYLQPYDSRRVLYAFSVLEAVLKTNPKEFIEAVSRTSMDTSSTAHLNLISNLLARHQEALIGQSFYGKLQTQVPNVCPHSLLLELLTYLCLSFLRSYYPCYLKVSHRDILGNRDVQVKSVEVLIRIMMQLVSVAKSSEGKNVEFIHSLLQRCKVQEFVLLSLSASMYTSQKRYGLATAHHGRALPEDSLFEESLINLGQDQIWSEHPLQIELLKLLQVLIVLEHHLGRAHEEAENQPDLSREWQRALNFQQAISALQYVQPHPLTSQGLLVSAVVRGLQPAYGYGMHPAWVSLVTHSLPYFGKSLGWTVTPFVVQICKNLDDLVKQYESESVKLSVSTTSKRENISPDYPLTLLEGLTTISHFCLLEQANQNKKTMAAGDPANLRNARNAILEELPRTVNTMALLWNVLRKEETQKRPVDLLGATKGSSSVYFKTTKTIRQKILDFLNPLTAHLGVQLTAAVAAVWSRKKAQRHSKMKIIPTASASQLTLVDLVCALSTLQTDTLLHLVKEVVKRPPQVKGGDEKSPLVDIPVLQFCYAFLQRLPVPALQENFSSLLGVLKESVQLNLAPPGYFLLLSMLNDFVTRTPNLENKKDQKDLQEITQKILEAVGNIAGSSLEQTSWLSRNLEVKAQPQASLEESDAEEDLYDAAAASAMVSSSAPSVYSVQALSLLAEVLASLLDMVYRSDEKEKAVPLISRLLYYVFPYLRNHSAYNAPSFRAGAQLLSSLSGYAYTKRAWRKEVLELFLDPAFFQMDTSCVHWKSIIDHLLTHEKTMFKDLMNMQSSSLKLFSSFEQKAMLLKRQAFAVFSGELDQYHLYLPLIQERLTDNLRVGQTSIVAAQMFLFFRVLLLRISPQHLTSLWPIMVSELIQTFTQLEEDLKDEDESLRSTNKVNRTKVSVPDANGPSVGEIPQSELILYLSACKFLDTALSFPPDKMPLFQIYRWAFIPEVDTEGPAFLSDVEENHQECKPHTVRILELLKLKFGEISSSDEITMKSEFPLLRQHSVSSIRQLMPFFMTLNGAFKTQRQLPADSPGTPFLDFPVTDSPRILKQLEECIEYDFLEHPEC

SEQ ID NO: 24697 - protein, 2291 aa, Homo sapiens
MDPEEQELLNDYRYRSYSSVIEKALRNFESSSEWADLISSLGKLNKALQSNLRYSLLPRRLLISKRLAQCLHPALPSGVHLKALETYEIIFKIVGTKWLAKDLFLYSCGLFPLLAHAAVSVRPVLLTLYEKYFLPLQKLLLPSLQAFIVGLLPGLEEGSEISDRTDALLLRLSLVVGKEVFYTALWGSVLASPSIRLPASVFVVGHINRDAPGREQKYMLGTNHQLTVKSLRASLLDSNVLVQRNNLEIVLFFFPFYTCLDSNERAIPLLRSDIVRILSAATQTLLRRDMSLNRRLYAWLLGSDIKGNTVVPESEISNSYEDQSSYFFEKYSKDLLVEGLAEILHQKFIDADVEERHHAYLKPFRVLISLLDKPEIGPQVVGNLFLEVIRAFYSYCRDALGSDLKLSYTQSGNSLISAIKENRNASEIVKTVNLLITSLSTDFLWDYMTRCFEECFRPVKQRYSVRNSVSPPPTVSELCALLVFLLDVIPLELYSEVQTQYLPQVLGCLVQPLAEDMEALSLPELTHALKTCFKVLSKVQMPPSYLDTESTSGTSSPVKGENGKIILETKAVIPGDEDASFPPLKSEDSGIGLSASSPELSEHLRVPRVSLERDDVWKKGGSMQRTFLCIQELIANFASKNIFGVQLTASGEESKSEEPAGKRDRDGTQSLAANDSSRKNSWEPKPITVPQFKQMLSDLFTARGSPFKTKSSESPSSSPSSPARKNGGEWDVEKVVIDLGGSREERREAFAAACHLLLDCATFPVYLSEEETEQLCATLFQLPGAGDSSFPSWLKSLMTICCCVTDCYLQNVAISTLLEVINHSQSLALVIEDKMKRYKSSGHNPFFGKLQMVTVPPIAPGILKVIAEKTDFYQRVARVLWNQLNKETREHHVTCVELFYRLHCLAPTANICEDIICHALLDPDKGTRLEALFRFSVIWHLTREIQGSRVTSHNRSFDRSLFVVLDSLACTDGAIGAAAQGWLVRALSLGDVARILEPVLLLLLQPKTQRTSIHCLKQENSADDLHRWFNRKKTSFREACAVPEPQESGSEEHLPLSQFTTVDREAIWAEVEKEPEKYPLRGELSEEELPYYVELPDRTAHGAPDSSEHTESADTSSCHTDSENTSSFSSPSHDLQELSNEENCCAPIPMGGRAYPKRSALLAAFQSESFKAGAKLSLVRVDSDKTQASESFSSDEEADLELQALTTSRLLKQQRERQEAVEALFKHILLYLQPYDSRRVLYAFSVLEAVLKTNPKEFIEAVSRTSMDTSSTAHLNLISNLLARHQEALIGQSFYGKLQTQVPNVCPHSLLLELLTYLCLSFLRSYYPCYLKVSHRDILGNRDVQVKSVEVLIRIMMQLVSVAKSSEGKNVEFIHSLLQRCKVQEFVLLSLSASMYTSQKRYGLATAHHGRALPEDSLFEESLINLGQDQIWSEHPLQIELLKLLQVLIVLEHHLGRAHEEAENQPDLSREWQRALNFQQAISALQYVQPHPLTSQGLLVSAVVRGLQPAYGYGMHPAWVSLVTHSLPYFGKSLGWTVTPFVVQICKNLDDLVKQYESESVKLSVSTTSKRENISPDYPLTLLEGLTTISHFCLLEQANQNKKTMAAGDPANLRNARNAILEELPRTVNTMALLWNVLRKEETQKRPVDLLGATKGSSSVYFKTTKTIRQKILDFLNPLTAHLGVQLTAAVAAVWSRKKAQRHSKMKIIPTASASQLTLVDLVCALSTLQTDTLLHLVKEVVKRPPQVKGGDEKSPLVDIPVLQFCYAFLQRLPVPALQENFSSLLGVLKESVQLNLAPPGYFLLLSMLNDFVTRTPNLENKKDQKDLQEITQKILEAVGNIAGSSLEQTSWLSRNLEVKAQPQASLEESDAAAASAMVSSSAPSVYSVQALSLLAEVLASLLDMVYRSDEKEKAVPLISRLLYYVFPYLRNHSAYNAPSFRAGAQLLSSLSGYAYTKRAWRKEVLELFLDPAFFQMDTSCVHWKSIIDHLLTHEKTMFKDLMNMQSSSLKLFSSFEQKAMLLKRQAFAVFSGELDQYHLYLPLIQERLTDNLRVGQTSIVAAQMFLFFRVLLLRISPQHLTSLWPIMVSELIQTFTQLEEDLKDEDESLRSTNKVNRTKVSVPDANGPSVGEIPQSELILYLSACKFLDTALSFPPDKMPLFQIYRWAFIPEVDTEGPAFLSDVEENHQECKPHTVRILELLKLKFGEISSSDEITMKSEFPLLRQHSVSSIRQLMPFFMTLNGAFKTQRQLPADSPGTPFLDFPVTDSPRILKQLEECIEYDFLEHPEC

SEQ ID NO: 24698 - protein, 118 aa, Homo sapiens
MPFLELDTNLPANRVPAGLEKRLCAAAASILGKPADRVNVTVRPGLAMALSGSTEPCAQLSISSIGVVGTAEDNRSHSAHFFEFLTKELALGQDRILIRFFPLESWQIGKIGTVMTFL

SEQ ID NO: 24699 - protein, 107 aa, Homo sapiens
MPFLELDTNLPANRVPAGLEKRLCAAAASILGKPADRVNVTVRPGLAMALSGSTEPCAQLSISSIGVVGTAEDNRSHSAHFFEFLTKELALGQDRQVPGEVHGRLTE

SEQ ID NO: 24700 - protein, 736 aa, Homo sapiens
MEALIPVINKLQDVFNTVGADIIQLPQIVVVGTQSSGKSSVLESLVGRDLLPRGTGIVTRRPLILQLVHVSQEDKRKTTGEENGVEAEEWGKFLHTKNKLYTDFDEIRQEIENETERISGNNKGVSPEPIHLKIFSPNVVNLTLVDLPGMTKVPVGDQPKDIELQIRELILRFISNPNSIILAVTAANTDMATSEALKISREVDPDGRRTLAVITKLDLMDAGTDAMDVLMGRVIPVKLGIIGVVNRSQLDINNKKSVTDSIRDEYAFLQKKYPSLANRNGTKYLARTLNRLLMHHIRDCLPELKTRINVLAAQYQSLLNSYGEPVDDKSATLLQLITKFATEYCNTIEGTAKYIETSELCGGARICYIFHETFGRTLESVDPLGGLNTIDILTAIRNATGPRPALFVPEVSFELLVKRQIKRLEEPSLRCVELVHEEMQRIIQHCSNYSTQELLRFPKLHDAIVEVVTCLLRKRLPVTNEMVHNLVAIELAYINTKHPDFADACGLMNNNIEEQRRNRLARELPSAVSRDKSSKVPSALAPASQEPSPAASAEADGKLIQDSRRETKNVASGGGGVGDGVQEPTTGNWRGMLKTSKAEELLAEEKSKPIPIMPASPQKGHAVNLLDVPVPVARKLSAREQRDCEVIERLIKSYFLIVRKNIQDSVPKAVMHFLVNHVKDTLQSELVGQLYKSSLLDDLLTESEDMAQRRKEAADMLKALQGASQIIAEIRETHLW

SEQ ID NO: 24701 - protein, 725 aa, Homo sapiens
MEALIPVINKLQDVFNTVGADIIQLPQIVVVGTQSSGKSSVLESLVGRDLLPRGTGIVTRRPLILQLVHVSQEDKRKTTGEENGVEAEEWGKFLHTKNKLYTDFDEIRQEIENETERISGNNKGVSPEPIHLKIFSPNVVNLTLVDLPGMTKVPVGDQPKDIELQIRELILRFISNPNSIILAVTAANTDMATSEALKISREVDPDGRRTLAVITKLDLMDAGTDAMDVLMGRVIPVKLGIIGVVNRSQLDINNKKSVTDSIRDEYAFLQKKYPSLANRNGTKYLARTLNRLLMHHIRDCLPELKTRINVLAAQYQSLLNSYGEPVDDKSATLLQLITKFATEYCNTIEGTAKYIETSELCGGARICYIFHETFGRTLESVDPLGGLNTIDILTAIRNATGPRPALFVPEVSFELLVKRQIKRLEEPSLRCVELVHEEMQRIIQHCSNYSTQELLRFPKLHDAIVEVVTCLLRKRLPVTNEMVHNLVAIELAYINTKHPDFADACGLMNNNIEEQRRNRLARELPSAVSRDKSSKVPSALAPASQEPSPAASAEADGKVASGGGGVGDGVQEPTTGNWRGMLKTSKAEELLAEEKSKPIPIMPASPQKGHAVNLLDVPVPVARKLSAREQRDCEVIERLIKSYFLIVRKNIQDSVPKAVMHFLVNHVKDTLQSELVGQLYKSSLLDDLLTESEDMAQRRKEAADMLKALQGASQIIAEIRETHLW

SEQ ID NO: 24702 - protein, 710 aa, Homo sapiens
MEALIPVINKLQDVFNTVGADIIQLPQIVVVGTQSSGKSSVLESLVGRDLLPRGTGIVTRRPLILQLVHVSQEDKRKTTGEENGVEAEEWGKFLHTKNKLYTDFDEIRQEIENETERISGNNKGVSPEPIHLKIFSPNVVNLTLVDLPGMTKVPVGDQPKDIELQIRELILRFISNPNSIILAVTAANTDMATSEALKISREVDPDGRRTLAVITKLDLMDAGTDAMDVLMGRVIPVKLGIIGVVNRSQLDINNKKSVTDSIRDEYAFLQKKYPSLANRNGTKYLARTLNRLLMHHIRDCLPELKTRINVLAAQYQSLLNSYGEPVDDKSATLLQLITKFATEYCNTIEGTAKYIETSELCGGARICYIFHETFGRTLESVDPLGGLNTIDILTAIRNATGPRPALFVPEVSFELLVKRQIKRLEEPSLRCVELVHEEMQRIIQHCSNYSTQELLRFPKLHDAIVEVVTCLLRKRLPVTNEMVHNLVAIELAYINTKHPDFADACGLMNNNIEEQRRNRLARELPSAVSRDKLIQDSRRETKNVASGGGGVGDGVQEPTTGNWRGMLKTSKAEELLAEEKSKPIPIMPASPQKGHAVNLLDVPVPVARKLSAREQRDCEVIERLIKSYFLIVRKNIQDSVPKAVMHFLVNHVKDTLQSELVGQLYKSSLLDDLLTESEDMAQRRKEAADMLKALQGASQIIAEIRETHLW

SEQ ID NO: 24703 - protein, 699 aa, Homo sapiens
MEALIPVINKLQDVFNTVGADIIQLPQIVVVGTQSSGKSSVLESLVGRDLLPRGTGIVTRRPLILQLVHVSQEDKRKTTGEENGVEAEEWGKFLHTKNKLYTDFDEIRQEIENETERISGNNKGVSPEPIHLKIFSPNVVNLTLVDLPGMTKVPVGDQPKDIELQIRELILRFISNPNSIILAVTAANTDMATSEALKISREVDPDGRRTLAVITKLDLMDAGTDAMDVLMGRVIPVKLGIIGVVNRSQLDINNKKSVTDSIRDEYAFLQKKYPSLANRNGTKYLARTLNRLLMHHIRDCLPELKTRINVLAAQYQSLLNSYGEPVDDKSATLLQLITKFATEYCNTIEGTAKYIETSELCGGARICYIFHETFGRTLESVDPLGGLNTIDILTAIRNATGPRPALFVPEVSFELLVKRQIKRLEEPSLRCVELVHEEMQRIIQHCSNYSTQELLRFPKLHDAIVEVVTCLLRKRLPVTNEMVHNLVAIELAYINTKHPDFADACGLMNNNIEEQRRNRLARELPSAVSRDKVASGGGGVGDGVQEPTTGNWRGMLKTSKAEELLAEEKSKPIPIMPASPQKGHAVNLLDVPVPVARKLSAREQRDCEVIERLIKSYFLIVRKNIQDSVPKAVMHFLVNHVKDTLQSELVGQLYKSSLLDDLLTESEDMAQRRKEAADMLKALQGASQIIAEIRETHLW

SEQ ID NO: 24704 - protein, 710 aa, Homo sapiens
MEALIPVINKLQDVFNTVGADIIQLPQIVVVGTQSSGKSSVLESLVGRDLLPRGTGIVTRRPLILQLVHVSQEDKRKTTGEENGVEAEEWGKFLHTKNKLYTDFDEIRQEIENETERISGNNKGVSPEPIHLKIFSPNVVNLTLVDLPGMTKVPVGDQPKDIELQIRELILRFISNPNSIILAVTAANTDMATSEALKISREVDPDGRRTLAVITKLDLMDAGTDAMDVLMGRVIPVKLGIIGVVNRSQLDINNKKSVTDSIRDEYAFLQKKYPSLANRNGTKYLARTLNRLLMHHIRDCLPELKTRINVLAAQYQSLLNSYGEPVDDKSATLLQLITKFATEYCNTIEGTAKYIETSELCGGARICYIFHETFGRTLESVDPLGGLNTIDILTAIRNATGPRPALFVPEVSFELLVKRQIKRLEEPSLRCVELVHEEMQRIIQHCSNYSTQELLRFPKLHDAIVEVVTCLLRKRLPVTNEMVHNLVAIELAYINTKHPDFADACGLMNNNIEEQRRNRLARELPSAVSRDKSSKVPSALAPAVASGGGGVGDGVQEPTTGNWRGMLKTSKAEELLAEEKSKPIPIMPASPQKGHAVNLLDVPVPVARKLSAREQRDCEVIERLIKSYFLIVRKNIQDSVPKAVMHFLVNHVKDTLQSELVGQLYKSSLLDDLLTESEDMAQRRKEAADMLKALQGASQIIAEIRETHLW

SEQ ID NO: 24705 - protein, 749 aa, Homo sapiens
MEALIPVINKLQDVFNTVGADIIQLPQIVVVGTQSSGKSSVLESLVGRDLLPRGTGIVTRRPLILQLVHVSQEDKRKTTGEENDPATWKNSRHLSKGVEAEEWGKFLHTKNKLYTDFDEIRQEIENETERISGNNKGVSPEPIHLKIFSPNVVNLTLVDLPGMTKVPVGDQPKDIELQIRELILRFISNPNSIILAVTAANTDMATSEALKISREVDPDGRRTLAVITKLDLMDAGTDAMDVLMGRVIPVKLGIIGVVNRSQLDINNKKSVTDSIRDEYAFLQKKYPSLANRNGTKYLARTLNRLLMHHIRDCLPELKTRINVLAAQYQSLLNSYGEPVDDKSATLLQLITKFATEYCNTIEGTAKYIETSELCGGARICYIFHETFGRTLESVDPLGGLNTIDILTAIRNATGPRPALFVPEVSFELLVKRQIKRLEEPSLRCVELVHEEMQRIIQHCSNYSTQELLRFPKLHDAIVEVVTCLLRKRLPVTNEMVHNLVAIELAYINTKHPDFADACGLMNNNIEEQRRNRLARELPSAVSRDKSSKVPSALAPASQEPSPAASAEADGKLIQDSRRETKNVASGGGGVGDGVQEPTTGNWRGMLKTSKAEELLAEEKSKPIPIMPASPQKGHAVNLLDVPVPVARKLSAREQRDCEVIERLIKSYFLIVRKNIQDSVPKAVMHFLVNHVKDTLQSELVGQLYKSSLLDDLLTESEDMAQRRKEAADMLKALQGASQIIAEIRETHLW

SEQ ID NO: 24706 - protein, 533 aa, Homo sapiens
MFHKKINGKQQEKKMTLLHGKTQDTFLKGWKQKNGVNFFTPKIRSQLDINNKKSVTDSIRDEYAFLQKKYPSLANRNGTKYLARTLNRLLMHHIRDCLPELKTRINVLAAQYQSLLNSYGEPVDDKSATLLQLITKFATEYCNTIEGTAKYIETSELCGGARICYIFHETFGRTLESVDPLGGLNTIDILTAIRNATGPRPALFVPEVSFELLVKRQIKRLEEPSLRCVELVHEEMQRIIQHCSNYSTQELLRFPKLHDAIVEVVTCLLRKRLPVTNEMVHNLVAIELAYINTKHPDFADACGLMNNNIEEQRRNRLARELPSAVSRDKSSKVPSALAPASQEPSPAASAEADGKLIQDSRRETKNVASGGGGVGDGVQEPTTGNWRGMLKTSKAEELLAEEKSKPIPIMPASPQKGHAVNLLDVPVPVARKLSAREQRDCEVIERLIKSYFLIVRKNIQDSVPKAVMHFLVNHVKDTLQSELVGQLYKSSLLDDLLTESEDMAQRRKEAADMLKALQGASQIIAEIRETHLW

SEQ ID NO: 24707 - protein, 738 aa, Homo sapiens
MEALIPVINKLQDVFNTVGADIIQLPQIVVVGTQSSGKSSVLESLVGRDLLPRGTGIVTRRPLILQLVHVSQEDKRKTTGEENDPATWKNSRHLSKGVEAEEWGKFLHTKNKLYTDFDEIRQEIENETERISGNNKGVSPEPIHLKIFSPNVVNLTLVDLPGMTKVPVGDQPKDIELQIRELILRFISNPNSIILAVTAANTDMATSEALKISREVDPDGRRTLAVITKLDLMDAGTDAMDVLMGRVIPVKLGIIGVVNRSQLDINNKKSVTDSIRDEYAFLQKKYPSLANRNGTKYLARTLNRLLMHHIRDCLPELKTRINVLAAQYQSLLNSYGEPVDDKSATLLQLITKFATEYCNTIEGTAKYIETSELCGGARICYIFHETFGRTLESVDPLGGLNTIDILTAIRNATGPRPALFVPEVSFELLVKRQIKRLEEPSLRCVELVHEEMQRIIQHCSNYSTQELLRFPKLHDAIVEVVTCLLRKRLPVTNEMVHNLVAIELAYINTKHPDFADACGLMNNNIEEQRRNRLARELPSAVSRDKSSKVPSALAPASQEPSPAASAEADGKVASGGGGVGDGVQEPTTGNWRGMLKTSKAEELLAEEKSKPIPIMPASPQKGHAVNLLDVPVPVARKLSAREQRDCEVIERLIKSYFLIVRKNIQDSVPKAVMHFLVNHVKDTLQSELVGQLYKSSLLDDLLTESEDMAQRRKEAADMLKALQGASQIIAEIRETHLW

SEQ ID NO: 24708 - protein, 712 aa, Homo sapiens
MEALIPVINKLQDVFNTVGADIIQLPQIVVVGTQSSGKSSVLESLVGRDLLPRGTGIVTRRPLILQLVHVSQEDKRKTTGEENDPATWKNSRHLSKGVEAEEWGKFLHTKNKLYTDFDEIRQEIENETERISGNNKGVSPEPIHLKIFSPNVVNLTLVDLPGMTKVPVGDQPKDIELQIRELILRFISNPNSIILAVTAANTDMATSEALKISREVDPDGRRTLAVITKLDLMDAGTDAMDVLMGRVIPVKLGIIGVVNRSQLDINNKKSVTDSIRDEYAFLQKKYPSLANRNGTKYLARTLNRLLMHHIRDCLPELKTRINVLAAQYQSLLNSYGEPVDDKSATLLQLITKFATEYCNTIEGTAKYIETSELCGGARICYIFHETFGRTLESVDPLGGLNTIDILTAIRNATGPRPALFVPEVSFELLVKRQIKRLEEPSLRCVELVHEEMQRIIQHCSNYSTQELLRFPKLHDAIVEVVTCLLRKRLPVTNEMVHNLVAIELAYINTKHPDFADACGLMNNNIEEQRRNRLARELPSAVSRDKVASGGGGVGDGVQEPTTGNWRGMLKTSKAEELLAEEKSKPIPIMPASPQKGHAVNLLDVPVPVARKLSAREQRDCEVIERLIKSYFLIVRKNIQDSVPKAVMHFLVNHVKDTLQSELVGQLYKSSLLDDLLTESEDMAQRRKEAADMLKALQGASQIIAEIRETHLW

SEQ ID NO: 24709 - protein, 422 aa, Homo sapiens
MALPTPSDSTLPAEARGRGRRRRLVWTPSQSEALRACFERNPYPGIATRERLAQAIGIPEPRVQIWFQNERSRQLRQHRRESRPWPGRRGPPEGRRKRTAVTGSQTALLLRAFEKDRFPGIAAREELARETGLPESRIQIWFQNRRARHPGQGGRAPAQAGGLCSAAPGGGHPAPSWVAFAHTGAWGTGLPAPHVPCAPGALPQGAFVSQAARAAPALQPSQAAPAEGVSQPAPARGDFAYAAPAPPDGALSHPQAPRWPPHPGKSREDRDPQRDGLPGPCAVAQPGPAQAGPQGQGVLAPPTSQGSPWWGWGRGPQVAGAAWEPQAGEAPPPQPAPPDASARQGQMQGIPAPSQALQEPAPWSALPCGLLLDELLASPEFLQQAQPLLETEAPGELEASEEAASLEAPLSEEEYRALLEEL

SEQ ID NO: 24710 - protein, 424 aa, Homo sapiens; identical to SEQ ID NO: 19153

SEQ ID NO: 24711 - protein, 258 aa, Homo sapiens
MMVLQVSAAPRTVALTALLMVLLTSVVQGRATPENYLFQGRQECYAFNGTQRFLERYIYNREEFARFDSDVGEFRAVTELGRPAAEYWNSQKDILEEKRAVPDRMCRHNYELGGPMTLQRRVQPRVNVSPSKKGPLQHHNLLVCHVTDFYPGSIQVRWFLNGQEETAGVVSTNLIRNGDWTFQILVMLEMTPQQGDVYTCQVEHTSLDSPVTVEWKAQSDSARSKTLTGAGGFVLGLIICGVGIFMHRRSKKVQRGSA

SEQ ID NO: 24712 - protein, 617 aa, Homo sapiens
MPALSRWASLPGPSMREAAFMYSTAVAIFLVILVAALQGSAPRESPLPYHIPLDPEGSLELSWNVSYTQEAIHFQLLVRRLKAGVLFGMSDRGELENADLVVLWTDGDTAYFADAWSDQKGQIHLDPQQDYQLLQVQRTPEGLTLLFKRPFGTCDPKDYLIEDGTVHLVYGILEEPFRSLEAINGSGLQMGLQRVQLLKPNIPEPELPSDACTMEVQAPNIQIPSQETTYWCYIKELPKGFSRHHIIKYEPIVTKGNEALVHHMEVFQCAPEMDSVPHFSGPCDSKMKPDRLNYCRHVLAAWALGAKAFYYPEEAGLAFGGPGSSRYLRLEVHYHNPLVIEGRNDSSGIRLYYTAKLRRFNAGIMELGLVYTPVMAIPPRETAFILTGYCTDKCTQLALPPSGIHIFASQLHTHLTGRKVVTVLVRDGREWEIVNQDNHYSPHFQEIRMLKKVVSVHPGDVLITSCTYNTEDRELATVGGFGILEEMCVNYVHYYPQTQLELCKSAVDAGFLQKYFHLINRFNNEDVCTCPQASVSQQFTSVPWNSFNRDVLKALYSFAPISMHCNKSSAVRFQGEWNLQPLPKVISTLEEPTPQCPTSQGRSPAGPTVVSIGGGKG

SEQ ID NO: 24713 - protein, 629 aa, Homo sapiens
MAVPPGHGPFSGFPGPQEHTQVLPDVRLLPRRLPLAFRDATSAPLRKLSVDLIKTYKHINEVYYAKKKRRAQQAPPQDSSNKKEKKVLNHGYDDDNHDYIVRSGERWLERYEIDSLIGKGSFGQVVKAYDHQTQELVAIKIIKNKKAFLNQAQIELRLLELMNQHDTEMKYYIVHLKRHFMFRNHLCLVFELLSYNLYDLLRNTHFRGVSLNLTRKLAQQLCTALLFLATPELSIIHCDLKPENILLCNPKRSAIKIVDFGSSCQLGQRIYQYIQSRFYRSPEVLLGTPYDLAIDMWSLGCILVEMHTGEPLFSGSNEVDQMNRIVEVLGIPPAAMLDQAPKARKYFERLPGGGWTLRRTKELRKDYQGPGTRRLQEVLGVQTGGPGGRRAGEPGHSPADYLRFQDLVLRMLEYEPAARISPLGALQHGFFRRTADEATNTGPAGSSASTSPAPLDTCPSSSTASSISSSGGSSGSSSDNRTYRYSNRYCGGPGPPITDCEMNSPQVPPSQPLRPWAGGDVPHKTHQAPASASSLPGTGAQLPPQPRYLGRPPSPTSPPPPELMDVSLVGGPADCSPPHPAPAPQHPAASALRTRMTGGRPPLPPPDDPATLGPHLGLRGVPQSTAASS

SEQ ID NO: 24714 - protein, 589 aa, Homo sapiens
MAVPPGHGPFSGFPGPQEHTQVLPDVRLLPRRLPLAFRDATSAPLRKLSVDLIKTYKHINEVYYAKKKRRAQQAPPQDSSNKKEKKVLNHGYDDDNHDYIVRSGERWLERYEIDSLIGKGSFGQVVKAYDHQTQELVAIKIIKNKKAFLNQAQIELRLLELMNQHDTEMKYYIVHLKRHFMFRNHLCLVFELLSYNLYDLLRNTHFRGVSLNLTRKLAQQLCTALLFLATPELSIIHCDLKPENILLCNPKRSAIKIVDFGSSCQLGQRIYQYIQSRFYRSPEVLLGTPYDLAIDMWSLGCILVEMHTGEPLFSGSNEVDQMNRIVEVLGIPPAAMLDQAPKARKYFERLPGGGWTLRRTKELRKDLVLRMLEYEPAARISPLGALQHGFFRRTADEATNTGPAGSSASTSPAPLDTCPSSSTASSISSSGGSSGSSSDNRTYRYSNRYCGGPGPPITDCEMNSPQVPPSQPLRPWAGGDVPHKTHQAPASASSLPGTGAQLPPQPRYLGRPPSPTSPPPPELMDVSLVGGPADCSPPHPAPAPQHPAASALRTRMTGGRPPLPPPDDPATLGPHLGLRGVPQSTAASS

SEQ ID NO: 24715 - protein, 601 aa, Homo sapiens
MAVPPGHGPFSGFPGPQEHTQVLPDVRLLPRRLPLAFRDATSAPLRKLSVDLIKTYKHINEVYYAKKKRRAQQAPPQDSSNKKEKKVLNHGYDDDNHDYIVRSGERWLERYEIDSLIGKGSFGQVVKAYDHQTQELVAIKIIKNKKAFLNQAQIELRLLELMNQHDTEMKYYIVHLKRHFMFRNHLCLVFELLSYNLYDLLRNTHFRGVSLNLTRKLAQQLCTALLFLATPELSIIHCDLKPENILLCNPKRSAIKIVDFGSSCQLGQRIYQYIQSRFYRSPEVLLGTPYDLAIDMWSLGCILVEMHTGEPLFSGSNEVDQMNRIVEVLGIPPAAMLDQAPKARKYFERLPGGGWTLRRTKELRKDYQGPGTRRLQEDLVLRMLEYEPAARISPLGALQHGFFRRTADEATNTGPAGSSASTSPAPLDTCPSSSTASSISSSGGSSGSSSDNRTYRYSNRYCGGPGPPITDCEMNSPQVPPSQPLRPWAGGDVPHKTHQAPASASSLPGTGAQLPPQPRYLGRPPSPTSPPPPELMDVSLVGGPADCSPPHPAPAPQHPAASALRTRMTGGRPPLPPPDDPATLGPHLGLRGVPQSTAASS

SEQ ID NO: 24716 - protein, 523 aa, Homo sapiens
MAAALQVLPRLARAPLHPLLWRGSVARLASSMALAEQARQLFESAVGAVLPGPMLHRALSLDPGGRQLKVRDRNFQLRQNLYLVGFGKAVLGMAAAAEELLGQHLVQGVISVPKGIRAAMERAGKQEMLLKPHSRVQVFEGAEDNLPDRDALRAALAIQQLAEGLTADDLLLVLISGGGSALLPAPIPPVTLEEKQTLTRLLAARGATIQELNTIRKALSQLKGGGLAQAAYPAQVVSLILSDVVGDPVEVIASGPTVASSHNVQDCLHILNRYGLRAALPRSVKTVLSRADSDPHGPHTCGHVLNVIIGSNVLALAEAQRQAEALGYQAVVLSAAMQGDVKSMAQFYGLLAHVARTRLTPSMAGASVEEDAQLHELAAELQIPDLQLEEALETMAWGRGPVCLLAGGEPTVQLQGSGRGGRNQELALRVGAELRRWPLGPIDVLFLSGGTDGQDGPTEAAGAWVTPELASQAAAEGLDIATFLAHNDSHTFFCCLQGGAHLLHTGMTGTNVMDTHLLFLRPR

SEQ ID NO: 24717 - protein, 234 aa, Homo sapiens
MAAALQVLPRLARAPLHPLLWRGSVARLASSMALAEQARQLFESAVGAVLPGPMLHRALSLDPGGRQLKVRDRNFQLRQNLYLVGFGKAVLGMAAAAEELLGQHLVQGVISVPKGIRAAMERAGKQEMLLKPHSRVQVFEGAEDNLPDRDALRAALAIQQLAEGLTADDLLLVLISGGEPHPVRCGGGPCGGDCQWPHRGQFPQCARLPAYPQSLRPPCSPATFCEDCAVSGRL

SEQ ID NO: 24718 - protein, 457 aa, Homo sapiens
MAAALQVLPRLARAPLHPLLWRGSVARLASSMALAEQARQLFESAVGAVLPGPMLHRALSLDPGGRQLKVRDRNFQLRQNLYLVGFGKAVLGMAAAAEELLGQHLVQGVISVPKGIRAAPIPPVTLEEKQTLTRLLAARGATIQELNTIRKALSQLKGGGLAQAAYPAQVVSLILSDVVGDPVEVIASGPTVASSHNVQDCLHILNRYGLRAALPRSVKTVLSRADSDPHGPHTCGHVLNVIIGSNVLALAEAQRQAEALGYQAVVLSAAMQGDVKSMAQFYGLLAHVARTRLTPSMAGASVEEDAQLHELAAELQIPDLQLEEALETMAWGRGPVCLLAGGEPTVQLQGSGRGGRNQELALRVGAELRRWPLGPIDVLFLSGGTDGQDGPTEAAGAWVTPELASQAAAEGLDIATFLAHNDSHTFFCCLQGGAHLLHTGMTGTNVMDTHLLFLRPR

SEQ ID NO: 24719 - protein, 367 aa, Homo sapiens
MAAALQVLPRLARAPLHPLLWRGSVARLASSMALAEQARQLFESAVGAVLPGPMLHRALSLDPGGRQLKVRDRNFQLRQNLYLVGFGKAVLGMAAAAEELLGQHLVQGVISVPKGIRAAMERAGKQEMLLKPHSRVQVFEGAEDNLPDRDALRAALAIQQLAEGLTADDLLLVLISGGGSALLPAPIPPVTLEEKQTLTRLLAARGATIQELNTIRKALSQLKGGGLAQAAYPAQVVSLILSDVVGDPVEVIASGPTVASSHNVQDCLHILNRYGLRAALPRSVKTVLSRADSDPHGPHTCGHVLNVIIGSNVLALAEAQRQAEALGYQAVVLSAAMQGWGTPAAHRDDRYQCHGHPPLVPAASVMA

SEQ ID NO: 24720 - protein, 240 aa, Homo sapiens
MLLKPHSRVQVFEGAEDNLPDRDALRAALAIQQLAEGLTADDLLLVLISGGGSALLPAPIPPVTLEEKQTLTRLLAARGATIQELNTIRKALSQLKGGGLAQAAYPAQVVSLILSDVVGDPVEVIASGPTVASSHNVQDCLHILNRYGLRAALPRSVKTVLSRADSDPHGPHTCGHVLNVIIGSNVLALAEAQRQAEALGYQAVVLSAAMQGWGTPAAHRDDRYQCHGHPPIVPAASVMA

SEQ ID NO: 24721 - protein, 187 aa, Homo sapiens
MQGDVKSMAQFYGLLAHVARTRLTPSMAGASVEEDAQLHELAAELQIPDLQLEEALETMAWGRGPVCLLAGGEPTVQLQGSGRGGRNQELALRVGAELRRWPLGPIDVLFLSGGTDGQDGPTEAAGAWVTPELASQAAAEGLDIATFLAHNDSHTFFCCLQGGAHLLHTGMTGTNVMDTHLLFLRPR

SEQ ID NO: 24722 - protein, 205 aa, Homo sapiens
MAAALQVLPRLARAPLHPLLWRGSVARLASSMALAEQARQLFESAVGAVLPGPMLHRALSLDPGGRQLKVRDRNFQLRQNLYLVGFGKAVLGMAAAAEELLGQHLVQGVISVPKGIRAAMERAGKQEMLLKPHSRVQVFEGAEDNLPDRDALRAALAIQQLAEGLTADDLLLVLISGWGTPAAHRDDRYQCHGHPPLVPAASVMA

SEQ ID NO: 24723 - protein, 386 aa, Homo sapiens
MAAIPALDPEAEPSMDVILVGSSELSSSVSPGTGRDLIAYEVKANQRNIEDICICCGSLQVHTQHPLFEGGICAPCKDKFLDALFLYDDDGYQSYCSICCSGETLLICGNPDCTRCYCFECVDSLVGPGTSGKVHAMSNWVCYLCLPSSRSGLLQRRRKWRSQLKAFYDRESENPLEMFETVPVWRRQPVRVLSLFEDIKKELTSLGFLESGSDPGQLKHVVDVTDTVRKDVEEWGPFDLVYGATPPLGHTCDRPPSWYLFQFHRLLQYARPKPGSPRPFFWMFVDNLVLNKEDLDVASRFLEMEPVTIPDVHGGSLQNAVRVWSNIPAIRSRHWALVSEEELSLLAQNKQSSKLAAKWPTKLVKNCFLPLREYFKYFSTELTSSL

SEQ ID NO: 24724 - protein, 387 aa, Homo sapiens
MAAIPALDPEAEPSMDVILVGSSELSSSVSPGTGRDLIAYEVKANQRNIEDICICCGSLQVHTQHPLFEGGICAPCKDKFLDALFLYDDDGYQSYCSICCSGETLLICGNPDCTRCYCFECVDSLVGPGTSGKVHAMSNWVCYLCLPSSRSGLLQRRRKWRSQLKAFYDRESENPLEMFETVPVWRRQPVRVLSLFEDIKKELTSLGFLESGSDPGQLKHVVDVTDTVRKDVEEWGPFDLVYGATPPLGHTCDRPPSWYLFQFHRLLQYARPKPGSPRPFFWMFVDNLVLNKEDLDVASRFLEMEPVTIPDVHGGSLQNAVRVWSNIPAIRSSRHWALVSEEELSLLAQNKQSSKLAAKWPTKLVKNCFLPLREYFKYFSTELTSSL

SEQ ID NO: 24725 - protein, 1537 aa, Homo sapiens
MGEKLELRLKSPVGAEPAVYPWPLPVYDKHHDAAHEIIETIRWVCEEIPDLKLAMENYVLIDYDTKSFESMQRLCDKYNRAIDSIHQLWKGTTQPMKLNTRPSTGLLRHILQQVYNHSVTDPEKLNNYEPFSPEVYGETSFDLVAQMIDEIKMTDDDLFVDLGSGVGQVVLQVAAATNCKHHYGVEKADIPAKYAETMDREFRKWMKWYGKKHAEYTLERGDFLSEEWRERIANTSVIFVNNFAFGPEVDHQLKERFANMKEGGRIVSSKPFAPLNFRINSRNLSDIGTIMRVVELSPLKGSVSWTGKPVSYYLHTIDRTILENYFSSLKNPKLREEQEAARRRQQRESKSNAATPTKGPEGKVAGPADAPMDSGAEEEKAGAATVKKPSPSKARKKKLNKKGRKMAGRKRGRPKKMNTANPERKPKKNQTALDALHAQTVSQTAASSPQDAYRSPHSPFYQLPPSVQRHSPNPLLVAPTPPALQKLLESFKIQYLQFLAYTKTPQYKASLQELLGQEKEKNAQLLGAAQQLLSHCQAQKEEIRRLFQQKLDELGVKALTYNDLIQAQKEISAHNQQLREQSEQLEQDNRALRGQSLQLLKARCEELQLDWATLSLEKLLKEKQALKSQISEKQRHCLELQISIVELEKSQRQQELLQLKSCVPPDDALSLHLRGKGALGRELEPDASRLHLELDCTKFSLPHLSSMSPELSMNGQAAGYELCGVLSRPSSKQNTPQYLASPLDQEVVPCTPSHVGRPRLEKLSGLAAPDYTRLSPAKIVLRRHLSQDHTVPGRPAASELHSRAEHTKENGLPYQSPSVPGSMKLSPQDPRPLSPGALQLAGEKSSEKGLRERAYGSSGELITSLPISIPLSTVQPNKLPVSIPLASVVLPSRAERARSTPSPVLQPRDPSSTLEKQIGANAHGAGSRSLALAPAGFSYAGSVAISGALAGSPASLTPGAEPATLDESSSSGSLFATVGSRSSTPQHPLLLAQPRNSLPASPAHQLSSSPRLGGAAQGPLPEASKGDLPSDSGFSDPESEAKRRIVFTITTGAGSAKQSPSSKHSPLTASARGDCVPSHGQDSRRRGRRKRASAGTPSLSAGVSPKRRALPSVAGLFTQPSGSPLNLNSMVSNINQPLEITAISSPETSLKSSPVPYQDHDQPPVLKKERPLSQTNGAHYSPLTSDEEPGSEDEPSSARIERKIATISLESKSPPKTLENGGGLAGRKPAPAGEPVNSSKWKSTFSPISDIGLAKSADSPLQASSALSQNSLFTFRPALEEPSADAKLAAHPRKGFPGSLSGADGLSPGTNPANGCTFGGGLAADLSLHSFSDGASLPHKGPEAAGLSSPLSFPSQRGKEGSDANPFLSKRQLDGLAGLKGEGSRGKEAGEGGLPLCGPTDKTPLLSGKAAKARDREVDLKNGHNLFISAAAVPPGSLLSGPGLAPAASSAGGAASSAQTHRSFLGPFPPGPQFALGPMSLQANLGSVAGSSVLQSLFSSVPAAAGLVHVSSAATRLTNSHAMGSFSGVAGGTVGGN

SEQ ID NO: 24726 - protein, 1739 aa, Homo sapiens
MGEKLELRLKSPVGAEPAVYPWPLPVYDKHHDAAHEIIETIRWVCEEIPDLKLAMENYVLIDYDTKSFESMQRLCDKYNRAIDSIHQLWKGTTQPMKLNTRPSTGLLRHILQQVYNHSVTDPEKLNNYEPFSPEVYGETSFDLVAQMIDEIKMTDDDLFVDLGSGVGQVVLQVAAATNCKHHYGVEKADIPAKYAETMDREFRKWMKWYGKKHAEYTLERGDFLSEEWRERIANTSVIFVNNFAFGPEVDHQLKERFANMKEGGRIVSSKPFAPLNFRINSRNLSDIGTIMRVVELSPLKGSVSWTGKPVSYYLHTIDRTILENYFSSLKNPKLREEQEAARRRQQRESKSNAATPTKGPEGKVAGPADAPMDSGAEEEKAGAATVKKPSPSKARKKKLNKKGRKMAGRKRGRPKKMNTANPERKPKKNQTALDALHAQTVSQTAASSPQDAYRSPHSPFYQLPPSVQRHSPNPLLVAPTPPALQKLLESFKIQYLQFLAYTKTPQYKASLQELLGQEKEKNAQLLGAAQQLLSHCQAQKEEIRRLFQQKLDELGVKALTYNDLIQAQKEISAHNQQLREQSEQLEQDNRALRGQSLQLLKARCEELQLDWATLSLEKLLKEKQALKSQISEKQRHCLELQISIVELEKSQRQQELLQLKSCVPPDDALSLHLRGKGALGRELEPDASRLHLELDCTKFSLPHLSSMSPELSMNGQAAGYELCGVLSRPSSKQNTPQYLASPLDQEVVPCTPSHVGRPRLEKLSGLAAPDYTRLSPAKIVLRRHLSQDHTVPGRPAASELHSRAEHTKENGLPYQSPSVPGSMKLSPQDPRPLSPGALQLAGEKSSEKGLRERAYGSSGELITSLPISIPLSTVQPNKLPVSIPLASVVLPSRAERARSTPSPVLQPRDPSSTLEKQIGANAHGAGSRSLALAPAGFSYAGSVAISGALAGSPASLTPGAEPATLDESSSSGSLFATVGSRSSTPQHPLLLAQPRNSLPASPAHQLSSSPRLGGAAQGPLPEASKGDLPSDSGFSDPESEAKRRIVFTITTGAGSAKQSPSSKHSPLTASARGDCVPSHGQDSRRRGRRKRASAGTPSLSAGVSPKRRALPSVAGLFTQPSGSPLNLNSMVSNINQPLEITAISSPETSLKSSPVPYQDHDQPPVLKKERPLSQTNGAHYSPLTSDEEPGSEDEPSSARIERKIATISLESKSPPKTLENGGGLAGRKPAPAGEPVNSSKWKSTFSPISDIGLAKSADSPLQASSALSQNSLFTFRPALEEPSADAKLAAHPRKGFPGSLSGADGLSPGTNPANGCTFGGGLAADLSLHSFSDGASLPHKGPEAAGLSSPLSFPSQRGKEGSDANPFLSKRQLDGLAGLKGEGSRGKEAGEGGLPLCGPTDKTPLLSGKAAKARDREVDLKNGHNLFISAAAVPPGSLLSGPGLAPAASSAGGAASSAQTHRSFLGPFPPGPQFALGPMSLQANLGSVAGSSVLQSLFSSVPAAAGLVHVSSAATRLTNSHAMGSFSGVAGGTVGGVVFNHAVPSASAHPFGARVGRGAACGSATLGPSPLQAAASASASSFQAPASVETRPPPPPPPPPPPLPPPAHLGRSPAGPPVLHAPPPPNAALPPPPTLLASNPEPALLQSLASLPPNQAFLPPTSAASLPPANASLSIKLTSLPHKGARPSFTVHHQPLPRLALAQAAPGIPQASATGPSAVWVSLGMPPPYAAHLSGVKPR

SEQ ID NO: 24727 - protein, 360 aa, Homo sapiens
MIPLLLAALLCVPAGALTCYGDSGQPVDWFVVYKLPALRGSGEAAQRGLQYKYLDESSGGWRDGRALINSPEGAVGRSLQPLYRSNTSQLAFLLYNDQPPQPSKAQDSSMRGHTKGVLLLDHDGGFWLVHSVPNFPPPASSAAYSWPHSACTYGQTLLCVSFPFAQFSKMGKQLTYTYPWVYNYQLEGIFAQEFPDLENVVKGHHVSQEPWNSSITLTSQAGAVFQSFAKFSKFGDDLYSGWLAAALGTNLQVQFWHKTVGILPSNCSDIWQVLNVNQIAFPGPAGPSFNSTEDHSKWCVSPKGPWTCVGDMNRNQGEEQRGGGTLCAQLPALWKAFQPLVKNYQPCNGMARKPSRAYKI

SEQ ID NO: 24728 - protein, 305 aa, Homo sapiens
MIPLLLAALLCVPAGALTCYGDSGQPVDWFVVYKLPALRGSGEAAQRGLQYKYLDESSGGWRDGRALINSPEGAVGRSLQPLYRSNTSQLAFLLYNDQPPQPSKAQDSSMRGHTKGKQLTYTYPWVYNYQLEGIFAQEFPDLENVVKGHHVSQEPWNSSITLTSQAGAVFQSFAKFSKFGDDLYSGWLAAALGTNLQVQFWHKTVGILPSNCSDIWQVLNVNQIAFPGPAGPSFNSTEDHSKWCVSPKGPWTCVGDMNRNQGEEQRGGGTLCAQLPALWKAFQPLVKNYQPCNGMARKPSRAYKI

SEQ ID NO: 24729 - protein, 282 aa, Homo sapiens
MALEAAGGPPEETLSLWKREQARLKAHVVDRDTEAWQRDPAFSGLQRVGGVDVSFVKGDSVRACASLVVLSFPELEVVYEESRMVSLTAPYVSGFLAFREVPFLLELVQQLREKEPGLMPQVLLVDGNGVLHHRGFGVACHLGVLTDLPCVGVAKKLLQVDGLENNALHKEKIRLLQTRGDSFPLLGDSGTVLGMALRSHDRSTRPLYISVGHRMSLEAAVRLTCCCCRFRIPEPVRQADICSREHIRKSLGLPGPPTPRSPKAQRPVACPKGDSGESSALC

SEQ ID NO: 24730 - protein, 237 aa, Homo sapiens
MALEAAGGPPEETLSLWKREQARLKAHVVDRDTEAWQRDPAFSGLQRVGGVDVSFVKGDSVRACASLVVLSFPELEVLLVDGNGVLHHRGFGVACHLGVLTDLPCVGVAKKLLQVDGLENNALHKEKIRLLQTRGDSFPLLGDSGTVLGMALRSHDRSTRPLYISVGHRMSLEAAVRLTCCCCRFRIPEPVRQADICSREHIRKSLGLPGPPTPRSPKAQRPVACPKGDSGESSALC

SEQ ID NO: 24731 - protein, 264 aa, Homo sapiens
MALEAAGGPPEETLSLWKREQARLKAHVVDRDTEAWQRDPAFSGLQRVGGVDVSFVKGDSVRACASLVVLSFPELEVLLVDGNGVLHHRGFGVACHLGVLTDLPCVGVAKKLLQVDGLENNALHKEKIRLLQTRGDSFPLLGDSGTVLGMALRSHDRSTRPLYISVGHRMSLEAAVRLTCCCCRFRIPEPVRQADICSREHIRKSLGLPGPPTPRSPKAQRPVACPKGDSGESSGEGQPPQDHSPGPRTAPRPGSQEQAGKDWQ

SEQ ID NO: 24732 - protein, 65 aa, Homo sapiens
MALRSHDRSTRPLYISVGHRMSLEAAVRLTCCCCRFRIPEPVRQHFVERGGESTRPRLIPDRTRW

SEQ ID NO: 24733 - protein, 88 aa, Homo sapiens
MALRSHDRSTRPLYISVGHRMSLEAAVRLTCCCCRFRIPEPVRQADICSREHIRKSLGLPGPPTPRSPKAQRPVACPKGDSGESSALC

SEQ ID NO: 24734 - protein, 308 aa, Homo sapiens
MALEAAGGPPEETLSLWKREQARLKAHVVDRDTEAWQRDPAFSGLQRVGGVDVSFVKGDSVRACASLVVLSFPELEVVYEESRMVSLTAPYVSGFLAFREVPFLLELVQQLREKEPGLMPQVLLVDGNGVLHHRGFGVACHLGVLTDLPCVGVAKKLLQVDGLENNALHKEKIRLLQTRGDSFPLLGDSGTVLGMALRSHDRSTRPLYISVGHRMSLEAAVRLTCCCCRFRIPEPVRQADICSREHIRKSLGLPGPPTPRSPKAQRPVACPKGDSGESSGGAPSPQRQADRTTPGGRRSTAQHQVGQR

SEQ ID NO: 24735 - protein, 309 aa, Homo sapiens
MALEAAGGPPEETLSLWKREQARLKAHVVDRDTEAWQRDPAFSGLQRVGGVDVSFVKGDSVRACASLVVLSFPELEVVYEESRMVSLTAPYVSGFLAFREVPFLLELVQQLREKEPGLMPQVLLVDGNGVLHHRGFGVACHLGVLTDLPCVGVAKKLLQVDGLENNALHKEKIRLLQTRGDSFPLLGDSGTVLGMALRSHDRSTRPLYISVGHRMSLEAAVRLTCCCCRFRIPEPVRQADICSREHIRKSLGLPGPPTPRSPKAQRPVACPKGDSGESSGEGQPPQDHSPGPRTAPRPGSQEQAGKDWQ

SEQ ID NO: 24736 - protein, 299 aa, Homo sapiens
MGGPRALLAALWALEAAGTAALRIGAFNIQSFGDSKVSDPACGSIIAKILAGYDLALVQEVRDPDLSAVSALMEQINSVSEHEYSFVSSQPLGRDQYKEMYLFVYRKDAVSVVDTYLYPDPEDVFSREPFVVKFSAPGTGERAPPLPSRRALTPPPLPAAAQNLVLIPLHAAPHQAVAEIDALYDVYLDVIDKWGTDDMLFLGDFNADCSYVRAQDWAAIRLRSSEVFKWLIPDSADTTVGNSDCAYDRIVACGARLRRSLKPQSATVHDFQEEFGLDQTQALAISDHFPVEVTLKFHR

SEQ ID NO: 24737 - protein, 278 aa, Homo sapiens
MGGPRALLAALWALEAAGTAALRIGAFNIQSFGDSKVSDPACGSIIAKILAGYDLALVQEVRDPDLSAVSALMEQINSVSEHEYSFVSSQPLGRDQYKEMYLFVYRKDAVSVVDTYLYPDPEDVFSREPFVVKFSAPGTAQNLVLIPLHAAPHQAVAEIDALYDVYLDVIDKWGTDDMLFLGDFNADCSYVRAQDWAAIRLRSSEVFKWLIPDSADTTVGNSDCAYDRIVACGARLRRSLKPQSATVHDFQEEFGLDQTQALAISDHFPVEVTLKFHR

SEQ ID NO: 24738 - protein, 488 aa, Homo sapiens
MQPTGREGSRALSRRYLRRLLLLLLLLLLRQPVTRAETTPGAPRALSTLGSPSLFTTPGVPSALTTPGLTTPGTPKTLDLRGRAQALMRSFPLVDGHNDLPQVLRQRYKNVLQDVNLRNFSHGQTSLDRLRDGLVGAQFWSASVSCQSQDQTAVRLALEQIDLIHRMCASYSELELVTSAEGLNSSQKLACLIGVEGGHSLDSSLSVLRSFYVLGVRYLTLTFTCSTPWAESSTKFRHHMYTNVSGLTSFGEKVVEELNRLGMMIDLSYASDTLIRRVLEVSQAPVIFSHSAARAVCDNLLNVPDDILQLLKKNGGIVMVTLSMGVLQCNLLANVSTVADHFDHIRAVIGSEFIGIGGNYDGTGRFPQGLEDVSTYPVLIEELLSRSWSEEELQGVLRGNLLRVFRQVEKVREESRAQSPVEAEFPYGQLSTSCHSHLVPQNGHQATHLEVTKQPTNRVPWRSSNASPYLVPGLVAAATIPTFTQWLC

SEQ ID NO: 24739 - protein, 727 aa, Homo sapiens
MPPPADIVKVAIEWPGAYPKLMEIDQKKPLSAIIKEVCDGWSLANHEYFALQHADSSNFYITEKNRNEIKNGTILRLTTSPAQNAQQLHERIQSSSMDAKLEALKDLASLSRDVTFAQEFINLDGISLLTQMVESGTERYQKLQKIMKPCFGDMLSFTLTAFVELMDHGIVSWDTFSVAFIKKIASFVNKSAIDISILQRSLAILESMVLNSHDLYQKVAQEITIGQLIPHLQGSDQEIQTYTIAVINALFLKAPDERRQEMANILAQKQLRSIILTHVIRAQRAINNEMAHQLYVLQVLTFNLLEDRMMTKMDPQDQAQRDIIFELRRIAFDAESEPNNSSGSMEKRKSMYTRDYKKLGFINHVNPAMDFTQTPPGMLALDNMLYFAKHHQDAYIRIVLENSSREDKHECPFGRSSIELTKMLCEILKVGELPSETCNDFHPMFFTHDRSFEEFFCICIQLLNKTWKEMRATSEDFNKVMQVVKEQVMRALTTKPSSLDQFKSKLQNLSYTEILKIRQSERMNQEDFQSRPILELKEKIQPEILELIKQQRLNRLVEGTCFRKLNARRRQDKFWYCRLSPNHKVLHYGDLEESPQGEVPHDSLQDKLPVADIKAVVTGKDCPHMKEKGALKQNKEVLELAFSILYDSNCQLNFIAPDKHEYCIWTDGLNALLGKDMMSDLTRNDLDTLLSMEIKLRLLDLENIQIPDAPPPIPKEPSNYDFVYDCN

SEQ ID NO: 24740 - protein, 247 aa, Homo sapiens
MQVVKEQVMRALTTKPSSLDQFKSKLQNLSYTEILKIRQSERMNQEDFQSRPILELKEKIQPEILELIKQQRLNRLVEGTCFRKLNARRRQDKFWYCRLSPNHKVLHYGDLEESPQGEVPHDSLQDKLPVADIKAVVTGKDCPHMKEKGALKQNKEVLELAFSILYDSNCQLNFIAPDKHEYCIWTDGLNALLGKDMMSDLTRNDLDTLLSMEIKLRLLDLENIQIPDAPPPIPKEPSNYDFVYDCN

SEQ ID NO: 24741 - protein, 429 aa, Homo sapiens
MSEHQKEQTLDTPSLRTVTLTVRVHGFILEVSKTKNPPIPDTFWPPRWDHRPSPGGETNAYCQMNHVNPAMDFTQTPPGMLALDNMLYFAKHHQDAYIRIVLENSSREDKHECPFGRSSIELTKMLCEILKVGELPSETCNDFHPMFFTHDRSFEEFFCICIQLLNKTWKEMRATSEDFNKVMQVVKEQVMRALTTKPSSLDQFKSKLQNLSYTEILKIRQSERMNQEDFQSRPILELKEKIQPEILELIKQQRLNRLVEGTCFRKLNARRRQDKFWYCRLSPNHKVLHYGDLEESPQGEVPHDSLQDKLPVADIKAVVTGKDCPHMKEKGALKQNKEVLELAFSILYDSNCQLNFIAPDKHEYCIWTDGLNALLGKDMMSDLTRNDLDTLLSMEIKLRLLDLENIQIPDAPPPIPKEPSNYDFVYDCN

SEQ ID NO: 24742 - protein, 2140 aa, Homo sapiens
MAERRAFAQKISRTVAAEVRKQISGQYSGSPQLLKNLNIVGNISHHTTVPLTEAVDPVDLEDYLITHPLAVDSGPLRDLIEFPPDDIEVVYSPRDCRTLVSAVPEESEMDPHVRDCIRSYTEDWAIVIRKYHKLGTGFNPNTLDKQKERQKGLPKQVFESDEAPDGNSYQDDQDDLKRRSMSIDDTPRGSWACSIFDLKNSLPDALLPNLLDRTPNEEIDRQNDDQRKSNRHKELFALHPSPDEEEPIERLSVPDIPKEHFGQRLLVKCLSLKFEIEIEPIFASLALYDVKEKKKISENFYFDLNSEQMKGLLRPHVPPAAITTLARSAIFSITYPSQDVFLVIKLEKVLQQGDIGECAEPYMIFKEADATKNKEKLEKLKSQADQFCQRLGKYRMPFAWTAIHLMNIVSSAGSLERDSTEVEISTGERKGSWSERRNSSIVGRRSLERTTSGDDACNLTSFRPATLTVTNFFKQEGDRLSDEDLYKFLADMRRPSSVLRRLRPITAQLKIDISPAPENPHYCLTPELLQVKLYPDSRVRPTREILEFPARDVYVPNTTYRNLLYIYPQSLNFANRQGSARNITVKVQFMYGEDPSNAMPVIFGKSSCSEFSKEAYTAVVYHNRSPDFHEEIKVKLPATLTDHHHLLFTFYHVSCQQKQNTPLETPVGYTWIPMLQNGRLKTGQFCLPVSLEKPPQAYSVLSPEVPLPGMKWVDNHKGVFNVEVVAVSSIHTQDPYLDKFFALVNALDEHLFPVRIGDMRIMENNLENELKSSISALNSSQLEPVVRFLHLLLDKLILLVIRPPVIAGQIVNLGQASFEAMASIINRLHKNLEGNHDQHGRNSLLASYIHYVFRLPNTYPNSSSPGPGGLGGSVHYATMARSAVRPASLNLNRSRSLSNSNPDISGTPTSPDDEVRSIIGSKGLDRSNSWVNTGGPKAAPWGSNPSPSAESTQAMDRSCNRMSSHTETSSFLQTLTGRLPTKKLFHEELALQWVVCSGSVRESALQQAWFFFELMVKSMVHHLYFNDKLEAPRKSRFPERFMDDIAALVSTIASDIVSRFQKDTEMVERLNTSLAFFLNDLLSVMDRGFVFSLIKSCYKQVSSKLYSLPNPSVLVSLRLDFLRIICSHEHYVTLNLPCSLLTPPASPSPSVSSATSQSSGFSTNVQDQKIANMFELSVPFRQQHYLAGLVLTELAVILDPDAEGLFGLHKKVINMVHNLLSSHDSDPRYSDPQIKARVAMLYLPLIGIIMETVPQLYDFTETHNQRGRPICIATDDYESESGSMISQTVAMAIAGTSVPQLTRPGSFLLTSTSGRQHTTFSAESSRSLLICLLWVLKNADETVLQKWFTDLSVLQLNRLLDLLYLCVSCFEYKGKKVFERMNSLTFKKSKDMRAKLEEAILGSIGARQEMVRRSRGQLGTYTIASPPERSPSGSAFGSQENLRWRKDMTHWRQNTEKLDKSRAEIEHEALIDGNLATEANLIILDTLEIVVQTVSVTESKESILGGVLKVLLHSMACNQSAVYLQHCFATQRALVSKFPELLFEEETEQCADLCLRLLRHCSSSIGTIRSHASASLYLLMRQNFEIGNNFARVKMQVTMSLSSLVGTSQNFNEEFLRRSLKTILTYAEEDLELRETTFPDQVQDLVFNLHMILSDTVKMKEHQEDPEMLIDLMYRIAKGYQTSPDLRLTWLQNMAGKHSERSNHAEAAQCLVHSAALVAEYLSMLEDRKYLPVGCVTFQNISSNVLEESAVSDDVVSPDEEGICSGKYFTESGLVGLLEQAAASFSMAGMYEAVNEVYKVLIPIHEANRDAKKLSTIHGKLQEAFSKIVHQSTGWERMFGTYFRVGFYGTKFGDLDEQEFVYKEPAITKLAEISHRLEGFYGERFGEDVVEVIKDSNPVDKCKLDPNKAYIQITYVEPYFDTYEMKDRITYFDKNYNLRRFMYCTPFTLDGRAHGELHEQFKRKTILTTSHAFPYIKTRVNVTHKEEIILTPIEVAIEDMQKKTQELAFATHQDPADPKMLQMVLQGSVGTTVNQGPLEVAQVFLSEIPSDPKLFRHHNKLRLCFKDFTKRCEDALRKNKSLIGPDQKEYQRELERNYHRLKEALQPLINRKIPQLYKAVLPVTCHRDSFSRMSLRKMDL

SEQ ID NO: 24743 - protein, 2129 aa, Homo sapiens
MAERRAFAQKISRTVAAEVRKQISGQYSGSPQLLKNLNIVGNISHHTTVPLTEAVDPVDLEDYLITHPLAVDSGPLRDLIEFPPDDIEVVYSPRDCRTLVSAVPEESEMDPHVRDCIRSYTEDWAIVIRKYHKLGTGFNPNTLDKQKERQKGLPKQVFESDEAPDGNSYQDDQDDLKRRSMSIDDTPRGSWACSIFDLKNSLPDALLPNLLDRTPNEEIDRQNDDQRKSNRHKELFALHPSPDEEEPIERLSVPDIPKEHFGQRLLVKCLSLKFEIEIEPIFASLALYDVKEKKKISENFYFDLNSEQMKGLLRPHVPPAAITTLARSAIFSITYPSQDVFLVIKLEKVLQQGDIGECAEPYMIFKEADATKNKEKLEKLKSQADQFCQRLGKYRMPFAWTAIHLMNIVSSAGSLERDSTEVEISTGERKGSWSERRNSSIVGRRSLERTTSGDDACNLTSFRPATLTVTNFFKQEGDRLSDEDLYKFLADMRRPSSVLRRLRPITAQLKIDISPAPENPHYCLTPELLQVKLYPDSRVRPTREILEFPARDVYVPNTTYRNLLYIYPQSLNFANRQGSARNITVKVQFMYGEDPSNAMPVIFGKSSCSEFSKEAYTAVVYHNRSPDFHEEIKVKLPATLTDHHHLLFTFYHVSCQQKQNTPLETPVGYTWIPMLQNGRLKTGQFCLPVSLEKPPQAYSVLSPEVPLPGMKWVDNHKGVFNVEVVAVSSIHTQDPYLDKFFALVNALDEHLFPVRIGDMRIMENNLENELKSSISALNSSQLEPVVRFLHLLLDKLILLVIRPPVIAGQIVNLGQASFEAMASIINRLHKNLEGNHDQHGRNSLLASYIHYVFRLPNTYPNSSSPGPGGLGGSVHYATMARSAVRPASLNLNRSRSLSNSNPDISGTPTSPDDEVRSIIGSKGLDRSNSWVNTGGPKAAPWGSNPSPSAESTQAMDRSCNRMSSHTETSSFLQTLTGRLPTKKLFHEELALQWVVCSGSVRESALQQAWFFFELMVKSMVHHLYFNDKLEAPRKSRFPERFMDDIAALVSTIASDIVSRFQKDTEMVERLNTSLAFFLNDLLSVMDRGFVFSLIKSCYKQVSSKLYSLPNPSVLVSLRLDFLRIICSHEHYVTLNLPCSLLTPPASPSPSVSSATSQSSGFSTNVQDQKIANMFELSVPFRQQHYLAGLVLTELAVILDPDAEGLFGLHKKVINMVHNLLSSHDSDPRYSDPQIKARVAMLYLPLIGIIMETVPQLYDFTETHNQRGRPICIATDDYESESGSMISQTVAMAIAGTSVPQLTRPGSFLLTSTSGRQHTTFSAESSRSLLICLLWVLKNADETVLQKWFTDLSVLQLNRLLDLLYLCVSCFEYKGKKVFERMNSLTFKKSKDMRAKLEEAILGSIGARQEMVRRSRGQLERSPSGSAFGSQENLRWRKDMTHWRQNTEKLDKSRAEIEHEALIDGNLATEANLIILDTLEIVVQTVSVTESKESILGGVLKVLLHSMACNQSAVYLQHCFATQRALVSKFPELLFEEETEQCADLCLRLLRHCSSSIGTIRSHASASLYLLMRQNFEIGNNFARVKMQVTMSLSSLVGTSQNFNEEFLRRSLKTILTYAEEDLELRETTFPDQVQDLVFNLHMILSDTVKMKEHQEDPEMLIDLMYRIAKGYQTSPDLRLTWLQNMAGKHSERSNHAEAAQCLVHSAALVAEYLSMLEDRKYLPVGCVTFQNISSNVLEESAVSDDVVSPDEEGICSGKYFTESGLVGLLEQAAASFSMAGMYEAVNEVYKVLIPIHEANRDAKKLSTIHGKLQEAFSKIVHQDGKRMFGTYFRVGFYGTKFGDLDEQEFVYKEPAITKLAEISHRLEGFYGERFGEDVVEVIKDSNPVDKCKLDPNKAYIQITYVEPYFDTYEMKDRITYFDKNYNLRRFMYCTPFTLDGRAHGELHEQFKRKTILTTSHAFPYIKTRVNVTHKEEIILTPIEVAIEDMQKKTQELAFATHQDPADPKMLQMVLQGSVGTTVNQGPLEVAQVFLSEIPSDPKLFRHHNKLRLCFKDFTKRCEDALRKNKSLIGPDQKEYQRELERNYHRLKEALQPLINRKIPQLYKAVLPVTCHRDSFSRMSLRKMDL

SEQ ID NO: 24744 - protein, 2100 aa, Homo sapiens
MAERRAFAQKISRTVAAEVRKQISGQYSGSPQLLKNLNIVGNISHHTTVPLTEAVDPVDLEDYLITHPLAVDSGPLRDLIEFPPDDIEVVYSPRDCRTLVSAVPEESEMDPHVRDCIRSYTEDWAIVIRKYHKLGTGFNPNTLDKQKERQKGLPKQVFESDEAPDGNSYQDDQDDLKRRSMSIDDTPRGSWACSIFDLKNSLPDALLPNLLDRTPNEEIDRQNDDQRKSNRHKELFALHPSPDEEEPIERLSVPDIPKEHFGQRLLVKCLSLKFEIEIEPIFASLALYDVKEKKKISENFYFDLNSEQMKGLLRPHVPPAAITTLARSAIFSITYPSQDVFLVIKLEKVLQQGDIGECAEPYMIFKEADATKNKEKLEKLKSQADQFCQRLGKYRMPFAWTAIHLMNIVSSAGSLERDSTEVEISTGERKGSWSERRNSSIVGRRSLERTTSGDDACNLTSFRPATLTVTNFFKQEGDRLSDEDLYKFLADMRRPSSVLRRLRPITAQLKIDISPAPENPHYCLTPELLQVKLYPDSRVRPTREILEFPARDVYVPNTTYRNLLYIYPQSLNFANRQGSARNITVKVQFMYGEDPSNAMPVIFGKSSCSEFSKEAYTAVVYHNRSPDFHEEIKVKLPATLTDHHHLLFTFYHVSCQQKQNTPLETPVGYTWIPMLQNGRLKTGQFCLPVSLEKPPQAYSVLSPEVPLPGMKWVDNHKGVFNVEVVAVSSIHTQDPYLDKFFALVNALDEHLFPVRIGDMRIMENNLENELKSSISALNSSQLEPVVRFLHLLLDKLILLVIRPPVIAGQIVNLGQASFEAMASIINRLHKNLEGNHDQHGRNSLLASYIHYVFRLPNTYPNSSSPGPGGLGGSVHYATMARSAVRPASLNLNRSRSLSNSNPDISGTPTSPDDEVRSIIGSKAMDRSCNRMSSHTETSSFLQTLTGRLPTKKLFHEELALQWVVCSGSVRESALQQAWFFFELMVKSMVHHLYFNDKLEAPRKSRFPERFMDDIAALVSTIASDIVSRFQKDTEMVERLNTSLAFFLNDLLSVMDRGFVFSLIKSCYKQVSSKLYSLPNPSVLVSLRLDFLRIICSHEHYVTLNLPCSLLTPPASPSPSVSSATSQSSGFSTNVQDQKIANMFELSVPFRQQHYLAGLVLTELAVILDPDAEGLFGLHKKVINMVHNLLSSHDSDPRYSDPQIKARVAMLYLPLIGIIMETVPQLYDFTETHNQRGRPICIATDDYESESGSMISQTVAMAIAGTSVPQLTRPGSFLLTSTSGRQHTTFSAESSRSLLICLLWVLKNADETVLQKWFTDLSVLQLNRLLDLLYLCVSCFEYKGKKVFERMNSLTFKKSKDMRAKLEEAILGSIGARQEMVRRSRGQLERSPSGSAFGSQENLRWRKDMTHWRQNTEKLDKSRAEIEHEALIDGNLATEANLIILDTLEIVVQTVSVTESKESILGGVLKVLLHSMACNQSAVYLQHCFATQRALVSKFPELLFEEETEQCADLCLRLLRHCSSSIGTIRSHASASLYLLMRQNFEIGNNFARVKMQVTMSLSSLVGTSQNFNEEFLRRSLKTILTYAEEDLELRETTFPDQVQDLVFNLHMILSDTVKMKEHQEDPEMLIDLMYRIAKGYQTSPDLRLTWLQNMAGKHSERSNHAEAAQCLVHSAALVAEYLSMLEDRKYLPVGCVTFQNISSNVLEESAVSDDVVSPDEEGICSGKYFTESGLVGLLEQAAASFSMAGMYEAVNEVYKVLIPIHEANRDAKKLSTIHGKLQEAFSKIVHQSTGWERMFGTYFRVGFYGTKFGDLDEQEFVYKEPAITKLAEISHRLEGFYGERFGEDVVEVIKDSNPVDKCKLDPNKAYIQITYVEPYFDTYEMKDRITYFDKNYNLRRFMYCTPFTLDGRAHGELHEQFKRKTILTTSHAFPYIKTRVNVTHKEEIILTPIEVAIEDMQKKTQELAFATHQDPADPKMLQMVLQGSVGTTVNQGPLEVAQVFLSEIPSDPKLFRHHNKLRLCFKDFTKRCEDALRKNKSLIGPDQKEYQRELERNYHRLKEALQPLINRKIPQLYKAVLPVTCHRDSFSRMSLRKMDL

SEQ ID NO: 24745 - protein, 2098 aa, Homo sapiens
MAERRAFAQKISRTVAAEVRKQISGQYSGSPQLLKNLNIVGNISHHTTVPLTEAVDPVDLEDYLITHPLAVDSGPLRDLIEFPPDDIEVVYSPRDCRTLVSAVPEESEMDPHVRDCIRSYTEDWAIVIRKYHKLGTGFNPNTLDKQKERQKGLPKQVFESDEAPDGNSYQDDQDDLKRRSMSIDDTPRGSWACSIFDLKNSLPDALLPNLLDRTPNEEIDRQNDDQRKSNRHKELFALHPSPDEEEPIERLSVPDIPKEHFGQRLLVKCLSLKFEIEIEPIFASLALYDVKEKKKISENFYFDLNSEQMKGLLRPHVPPAAITTLARSAIFSITYPSQDVFLVIKLEKVLQQGDIGECAEPYMIFKEADATKNKEKLEKLKSQADQFCQRLGKYRMPFAWTAIHLMNIVSSAGSLERDSTEVEISTGERKGSWSERRNSSIVGRRSLERTTSGDDACNLTSFRPATLTVTNFFKQEGDRLSDEDLYKFLADMRRPSSVLRRLRPITAQLKIDISPAPENPHYCLTPELLQVKLYPDSRVRPTREILEFPARDVYVPNTTYRNLLYIYPQSLNFANRQGSARNITVKVQFMYGEDPSNAMPVIFGKSSCSEFSKEAYTAVVYHNRSPDFHEEIKVKLPATLTDHHHLLFTFYHVSCQQKQNTPLETPVGYTWIPMLQNGRLKTGQFCLPVSLEKPPQAYSVLSPEVPLPGMKWVDNHKGVFNVEVVAVSSIHTQDPYLDKFFALVNALDEHLFPVRIGDMRIMENNLENELKSSISALNSSQLEPVVRFLHLLLDKLILLVIRPPVIAGQIVNLGQASFEAMASIINRLHKNLEGNHDQHGRNSLLASYIHYVFRLPNTYPNSSSPGPGGLGGSVHYATMARSAVRPASLNLNRSRSLSNSNPDISGTPTSPDDEVRSIIGSKAMDRSCNRMSSHTETSSFLQTLTGRLPTKKLFHEELALQWVVCSGSVRESALQQAWFFFELMVKSMVHHLYFNDKLEAPRKSRFPERFMDDIAALVSTIASDIVSRFQKDTEMVERLNTSLAFFLNDLLSVMDRGFVFSLIKSCYKQVSSKLYSLPNPSVLVSLRLDFLRIICSHEHYVTLNLPCSLLTPPASPSPSVSSATSQSSGFSTNVQDQKIANMFELSVPFRQQHYLAGLVLTELAVILDPDAEGLFGLHKKVINMVHNLLSSHDSDPRYSDPQIKARVAMLYLPLIGIIMETVPQLYDFTETHNQRGRPICIATDDYESESGSMISQTVAMAIAGTSVPQLTRPGSFLLTSTSGRQHTTFSAESSRSLLICLLWVLKNADETVLQKWFTDLSVLQLNRLLDLLYLCVSCFEYKGKKVFERMNSLTFKKSKDMRAKLEEAILGSIGARQEMVRRSRGQLERSPSGSAFGSQENLRWRKDMTHWRQNTEKLDKSRAEIEHEALIDGNLATEANLIILDTLEIVVQTVSVTESKESILGGVLKVLLHSMACNQSAVYLQHCFATQRALVSKFPELLFEEETEQCADLCLRLLRHCSSSIGTIRSHASASLYLLMRQNFEIGNNFARVKMQVTMSLSSLVGTSQNFNEEFLRRSLKTILTYAEEDLELRETTFPDQVQDLVFNLHMILSDTVKMKEHQEDPEMLIDLMYRIAKGYQTSPDLRLTWLQNMAGKHSERSNHAEAAQCLVHSAALVAEYLSMLEDRKYLPVGCVTFQNISSNVLEESAVSDDVVSPDEEGICSGKYFTESGLVGLLEQAAASFSMAGMYEAVNEVYKVLIPIHEANRDAKKLSTIHGKLQEAFSKIVHQDGKRMFGTYFRVGFYGTKFGDLDEQEFVYKEPAITKLAEISHRLEGFYGERFGEDVVEVIKDSNPVDKCKLDPNKAYIQITYVEPYFDTYEMKDRITYFDKNYNLRRFMYCTPFTLDGRAHGELHEQFKRKTILTTSHAFPYIKTRVNVTHKEEIILTPIEVAIEDMQKKTQELAFATHQDPADPKMLQMVLQGSVGTTVNQGPLEVAQVFLSEIPSDPKLFRHHNKLRLCFKDFTKRCEDALRKNKSLIGPDQKEYQRELERNYHRLKEALQPLINRKIPQLYKAVLPVTCHRDSFSRMSLRKMDL

SEQ ID NO: 24746 - protein, 2109 aa, Homo sapiens
MAERRAFAQKISRTVAAEVRKQISGQYSGSPQLLKNLNIVGNISHHTTVPLTEAVDPVDLEDYLITHPLAVDSGPLRDLIEFPPDDIEVVYSPRDCRTLVSAVPEESEMDPHVRDCIRSYTEDWAIVIRKYHKLGTGFNPNTLDKQKERQKGLPKQVFESDEAPDGNSYQDDQDDLKRRSMSIDDTPRGSWACSIFDLKNSLPDALLPNLLDRTPNEEIDRQNDDQRKSNRHKELFALHPSPDEEEPIERLSVPDIPKEHFGQRLLVKCLSLKFEIEIEPIFASLALYDVKEKKKISENFYFDLNSEQMKGLLRPHVPPAAITTLARSAIFSITYPSQDVFLVIKLEKVLQQGDIGECAEPYMIFKEADATKNKEKLEKLKSQADQFCQRLGKYRMPFAWTAIHLMNIVSSAGSLERDSTEVEISTGERKGSWSERRNSSIVGRRSLERTTSGDDACNLTSFRPATLTVTNFFKQEGDRLSDEDLYKFLADMRRPSSVLRRLRPITAQLKIDISPAPENPHYCLTPELLQVKLYPDSRVRPTREILEFPARDVYVPNTTYRNLLYIYPQSLNFANRQGSARNITVKVQFMYGEDPSNAMPVIFGKSSCSEFSKEAYTAVVYHNRSPDFHEEIKVKLPATLTDHHHLLFTFYHVSCQQKQNTPLETPVGYTWIPMLQNGRLKTGQFCLPVSLEKPPQAYSVLSPEVPLPGMKWVDNHKGVFNVEVVAVSSIHTQDPYLDKFFALVNALDEHLFPVRIGDMRIMENNLENELKSSISALNSSQLEPVVRFLHLLLDKLILLVIRPPVIAGQIVNLGQASFEAMASIINRLHKNLEGNHDQHGRNSLLASYIHYVFRLPNTYPNSSSPGPGGLGGSVHYATMARSAVRPASLNLNRSRSLSNSNPDISGTPTSPDDEVRSIIGSKAMDRSCNRMSSHTETSSFLQTLTGRLPTKKLFHEELALQWVVCSGSVRESALQQAWFFFELMVKSMVHHLYFNDKLEAPRKSRFPERFMDDIAALVSTIASDIVSRFQKDTEMVERLNTSLAFFLNDLLSVMDRGFVFSLIKSCYKQVSSKLYSLPNPSVLVSLRLDFLRIICSHEHYVTLNLPCSLLTPPASPSPSVSSATSQSSGFSTNVQDQKIANMFELSVPFRQQHYLAGLVLTELAVILDPDAEGLFGLHKKVINMVHNLLSSHDSDPRYSDPQIKARVAMLYLPLIGIIMETVPQLYDFTETHNQRGRPICIATDDYESESGSMISQTVAMAIAGTSVPQLTRPGSFLLTSTSGRQHTTFSAESSRSLLICLLWVLKNADETVLQKWFTDLSVLQLNRLLDLLYLCVSCFEYKGKKVFERMNSLTFKKSKDMRAKLEEAILGSIGARQEMVRRSRGQLGTYTIASPPERSPSGSAFGSQENLRWRKDMTHWRQNTEKLDKSRAEIEHEALIDGNLATEANLIILDTLEIVVQTVSVTESKESILGGVLKVLLHSMACNQSAVYLQHCFATQRALVSKFPELLFEEETEQCADLCLRLLRHCSSSIGTIRSHASASLYLLMRQNFEIGNNFARVKMQVTMSLSSLVGTSQNFNEEFLRRSLKTILTYAEEDLELRETTFPDQVQDLVFNLHMILSDTVKMKEHQEDPEMLIDLMYRIAKGYQTSPDLRLTWLQNMAGKHSERSNHAEAAQCLVHSAALVAEYLSMLEDRKYLPVGCVTFQNISSNVLEESAVSDDVVSPDEEGICSGKYFTESGLVGLLEQAAASFSMAGMYEAVNEVYKVLIPIHEANRDAKKLSTIHGKLQEAFSKIVHQSTGWERMFGTYFRVGFYGTKFGDLDEQEFVYKEPAITKLAEISHRLEGFYGERFGEDVVEVIKDSNPVDKCKLDPNKAYIQITYVEPYFDTYEMKDRITYFDKNYNLRRFMYCTPFTLDGRAHGELHEQFKRKTILTTSHAFPYIKTRVNVTHKEEIILTPIEVAIEDMQKKTQELAFATHQDPADPKMLQMVLQGSVGTTVNQGPLEVAQVFLSEIPSDPKLFRHHNKLRLCFKDFTKRCEDALRKNKSLIGPDQKEYQRELERNYHRLKEALQPLINRKIPQLYKAVLPVTCHRDSFSRMSLRKMDL

SEQ ID NO: 24747 - protein, 2131 aa, Homo sapiens
MAERRAFAQKISRTVAAEVRKQISGQYSGSPQLLKNLNIVGNISHHTTVPLTEAVDPVDLEDYLITHPLAVDSGPLRDLIEFPPDDIEVVYSPRDCRTLVSAVPEESEMDPHVRDCIRSYTEDWAIVIRKYHKLGTGFNPNTLDKQKERQKGLPKQVFESDEAPDGNSYQDDQDDLKRRSMSIDDTPRGSWACSIFDLKNSLPDALLPNLLDRTPNEEIDRQNDDQRKSNRHKELFALHPSPDEEEPIERLSVPDIPKEHFGQRLLVKCLSLKFEIEIEPIFASLALYDVKEKKKISENFYFDLNSEQMKGLLRPHVPPAAITTLARSAIFSITYPSQDVFLVIKLEKVLQQGDIGECAEPYMIFKEADATKNKEKLEKLKSQADQFCQRLGKYRMPFAWTAIHLMNIVSSAGSLERDSTEVEISTGERKGSWSERRNSSIVGRRSLERTTSGDDACNLTSFRPATLTVTNFFKQEGDRLSDEDLYKFLADMRRPSSVLRRLRPITAQLKIDISPAPENPHYCLTPELLQVKLYPDSRVRPTREILEFPARDVYVPNTTYRNLLYIYPQSLNFANRQGSARNITVKVQFMYGEDPSNAMPVIFGKSSCSEFSKEAYTAVVYHNRSPDFHEEIKVKLPATLTDHHHLLFTFYHVSCQQKQNTPLETPVGYTWIPMLQNGRLKTGQFCLPVSLEKPPQAYSVLSPEVPLPGMKWVDNHKGVFNVEVVAVSSIHTQDPYLDKFFALVNALDEHLFPVRIGDMRIMENNLENELKSSISALNSSQLEPVVRFLHLLLDKLILLVIRPPVIAGQIVNLGQASFEAMASIINRLHKNLEGNHDQHGRNSLLASYIHYVFRLPNTYPNSSSPGPGGLGGSVHYATMARSAVRPASLNLNRSRSLSNSNPDISGTPTSPDDEVRSIIGSKGLDRSNSWVNTGGPKAAPWGSNPSPSAESTQAMDRSCNRMSSHTETSSFLQTLTGRLPTKKLFHEELALQWVVCSGSVRESALQQAWFFFELMVKSMVHHLYFNDKLEAPRKSRFPERFMDDIAALVSTIASDIVSRFQKDTEMVERLNTSLAFFLNDLLSVMDRGFVFSLIKSCYKQVSSKLYSLPNPSVLVSLRLDFLRIICSHEHYVTLNLPCSLLTPPASPSPSVSSATSQSSGFSTNVQDQKIANMFELSVPFRQQHYLAGLVLTELAVILDPDAEGLFGLHKKVINMVHNLLSSHDSDPRYSDPQIKARVAMLYLPLIGIIMETVPQLYDFTETHNQRGRPICIATDDYESESGSMISQTVAMAIAGTSVPQLTRPGSFLLTSTSGRQHTTFSAESSRSLLICLLWVLKNADETVLQKWFTDLSVLQLNRLLDLLYLCVSCFEYKGKKVFERMNSLTFKKSKDMRAKLEEAILGSIGARQEMVRRSRGQLERSPSGSAFGSQENLRWRKDMTHWRQNTEKLDKSRAEIEHEALIDGNLATEANLIILDTLEIVVQTVSVTESKESILGGVLKVLLHSMACNQSAVYLQHCFATQRALVSKFPELLFEEETEQCADLCLRLLRHCSSSIGTIRSHASASLYLLMRQNFEIGNNFARVKMQVTMSLSSLVGTSQNFNEEFLRRSLKTILTYAEEDLELRETTFPDQVQDLVFNLHMILSDTVKMKEHQEDPEMLIDLMYRIAKGYQTSPDLRLTWLQNMAGKHSERSNHAEAAQCLVHSAALVAEYLSMLEDRKYLPVGCVTFQNISSNVLEESAVSDDVVSPDEEGICSGKYFTESGLVGLLEQAAASFSMAGMYEAVNEVYKVLIPIHEANRDAKKLSTIHGKLQEAFSKIVHQSTGWERMFGTYFRVGFYGTKFGDLDEQEFVYKEPAITKLAEISHRLEGFYGERFGEDVVEVIKDSNPVDKCKLDPNKAYIQITYVEPYFDTYEMKDRITYFDKNYNLRRFMYCTPFTLDGRAHGELHEQFKRKTILTTSHAFPYIKTRVNVTHKEEIILTPIEVAIEDMQKKTQELAFATHQDPADPKMLQMVLQGSVGTTVNQGPLEVAQVFLSEIPSDPKLFRHHNKLRLCFKDFTKRCEDALRKNKSLIGPDQKEYQRELERNYHRLKEALQPLINRKIPQLYKAVLPVTCHRDSFSRMSLRKMDL

SEQ ID NO: 24748 - protein, 632 aa, Homo sapiens
MAERRAFAQKISRTVAAEVRKQISGQYSGSPQLLKNLNIVGNISHHTTVPLTEAVDPVDLEDYLITHPLAVDSGPLRDLIEFPPDDIEVVYSPRDCRTLVSAVPEESEMDPHVRDCIRSYTEDWAIVIRKYHKLGTGFNPNTLDKQKERQKGLPKQVFESDEAPDGNSYQDDQDDLKRRSMSIDDTPRGSWACSIFDLKNSLPDALLPNLLDRTPNEEIDRQNDDQRKSNRHKELFALHPSPDEEEPIERLSVPDIPKEHFGQRLLVKCLSLKFEIEIEPIFASLALYDVKEKKKISENFYFDLNSEQMKGLLRPHVPPAAITTLARSAIFSITYPSQDVFLVIKLEKVLQQGDIGECAEPYMIFKEADATKNKEKLEKLKSQADQFCQRLGKYRMPFAWTAIHLMNIVSSAGSLERDSTEVEISTGERKGSWSERRNSSIVGRRSLERTTSGDDACNLTSFRPATLTVTNFFKQEGDRLSDEDLYKFLADMRRPSSVLRRLRPITAQLKIDISPAPENPHYCLTPELLQVKLYPDSRVRPTREILEFPARDVYVPNTTYRNLLYIYPQSLNFANRQGSARNITVKVQFMYGEDPSNAMPSPSCTHPIPTVRPLPLWCYHSIFSLLSWDFIT

SEQ ID NO: 24749 - protein, 814 aa, Homo sapiens
MQDAENVAVPEAAEERAEPGQQQPAAEPPPAEGLLRPAGPGAPEAAGTEASSEEVGIAEAGPESEVRTEPAAEAEAASGPSESPSPPAAEELPGSHAEPPVPAQGEAPGEQARDERSDSRAQAVSEDAGGNEGRAAEAEPRALENGDADEPSFSDPEDFVDDVSEEELLGDVLKDRPQEADGIDSVIVVDNVPQVGPDRLEKLKNVIHKIFSKFGKITNDFYPEEDGKTKGYIFLEYASPAHAVDAVKNADGYKLDKQHTFRVNLFTDFDKYMTISDEWDIPEKQPFKDLGNLRYWLEEAECRDQYSVIFESGDRTSIFWNDVKDPVSIEERARWTETYVRWSPKGTYLATFHQRGIALWGGEKFKQIQRFSHQGVQLIDFSPCERYLVTFSPLMDTQDDPQAIIIWDILTGHKKRGFHCESSAHWPIFKWSHDGKFFARMTLDTLSIYETPSMGLLDKKSLKISGIKDFSWSPGGNIIAFWVPEDKDIPARVTLMQLPTRQEIRVRNLFNVVDCKLHWQKNGDYLCVKVDRTPKGTQGVVTNFEIFRMREKQVPVDVVEMKETIIAFAWEPNGSKFAVLHGEAPRISVSFYHVKNNGKIELIKMFDKQQANTIFWSPQGQFVVLAGLRSMNGALAFVDTSDCTVMNIAEHYMASDVEWDPTGRYVVTSVSWWSHKVDNAYWLWTFQGRLLQKNNKDRFCQLLWRPRPPTLLSQEQIKQIKKDLKKYSKIFEQKDRLSQSKASKELVERRRTMMEDFRKYRKMAQELYMEQKNERLELRGGVDTDELDSNVDDWEEETIEFFVTEEIIPLGNQE

SEQ ID NO: 24750 - protein, 873 aa, Homo sapiens
MQDAENVAVPEAAEERAEPGQQQPAAEPPPAEGLLRPAGPGAPEAAGTEASSEEVGIAEAGPESEVRTEPAAEAEAASGPSESPSPPAAEELPGSHAEPPVPAQGEAPGEQARDERSDSRAQAVSEDAGGNEGRAAEAEPRALENGDADEPSFSDPEDFVDDVSEEELLGDVLKDRPQEADGIDSVIVVDNVPQVGPDRLEKLKNVIHKIFSKFGKITNDFYPEEDGKTKGYIFLEYASPAHAVDAVKNADGYKLDKQHTFRVNLFTDFDKYMTISDEWDIPEKQPFKDLGNLRYWLEEAECRDQYSVIFESGDRTSIFWNDVKDPVSIEERARWTETYVRWSPKGTYLATFHQRGIALWGGEKFKQIQRFSHQGVQLIDFSPCERYLVTFSPLMDTQDDPQAIIIWDILTGHKKRGFHCESSAHWPIFKWSHDGKFFARMTLDTLSIYETPSMGLLDKKSLKISGIKDFSWSPGGNIIAFWVPEDKDIPARVTLMQLPTRQEIRVRNLFNVVDCKLHWQKNGDYLCVKVDRTPKGTQGVVTNFEIFRMREKQVPVDVVEMKETIIAFAWEPNGSKFAVLHGEAPRISVSFYHVKNNGKIELIKMFDKQQANTIFWSPQGQFVVLAGLRSMNGALAFVDTSDCTVMNIAEHYMASDVEWDPTGRYVVTSVSWWSHKVDNAYWLWTFQGRLLQKNNKDRFCQLLWRPRPPTLLSQEQIKQIKKDLKKYSKIFEQKDRLSQSKASKELVERRRTMMEDFRKYRKMAQELYMEQKNERLELRGGVDTDELDSNVDDWEEETIEFFVTEEIIPLGIRSDLEHCAQPCVLWSRGRPAGSRVTPASSLCSLALDCDCAWILPLRHIFVPFSPWCLQWGI

SEQ ID NO: 24751 - protein, 588 aa, Homo sapiens
MVTPVTWMDNPIEIYVNDSVWVPGPIDDRCPAKPEEEGMMINISIGYRYPPICLGRAPGCLMPAVQNWLVEVPTVSPISRFTYHMVSGMSLRPRVNYLQDFSYQRSLKFRPKGKPCPKEIPKESKNTEVLVWEECVANSAVILQNNEFGTIIDWAPRGQFYHNCSGQTQSCPSAQVSPAVDSDLTESLDKHKHKKLQSFYPWEWGEKRISTPRPKIVSPVSGPEHPELWRLTVASHHIRIWSGNQTLETRDCKPFYTIDLNSSLTVPLQSCVKPPYMLVVGNIVIKPDSQTITCENCRLLSCIDSTFNWQHRILLVRAREGVWIPVSMDRPWEASPSVHILTEVLKGVLNRSKRFIFTLIAVIMGLIAVTATAAVAGVALHSSVQSVNFVNDWQKNSTRLWNSQSSIDQKLANQINDLRQTVIWMGDRLMSLEHRFQLQCDWNTSDFCITPQIYNESEHHWDMVRRHLQGREDNLTLDISKLKEQIFEASKAHLNLVPGTEAIAGVADGLANLNPVTWVKTIGSTTIINLILILVCLFCLLLVCRCTQQLRRDSDHRERAMMTMAVLSKRKGGNVGKSKRDQIVTVSV

SEQ ID NO: 24752 - protein, 351 aa, Homo sapiens
MPGSAAKGSELSERIESFVETLKRGGGPRSSEEMARETLGLLRQIITDHRWSNAGELMELIRREGRRMTAAQPSETTVGNMVRRVLKIIREEYGRLHGRSDESDQQESLHKLLTSGGLNEDFSFHYAQLQSNIIEAINELLVELEGTMENIAAQALEHIHSNEVIMTIGFSRTVEAFLKEAARKRKFHVIVAECAPFCQGHEMAVNLSKAGIETTVMTDAAIFAVMSRVNKVIIGTKTILANGALRAVTGTHTLALAAKHHSTPLIVCAPMFKLSPQFPNEEDSFHKFVAPEEVLPFTEGDILEKVSVHCPVFDYVPPELITLFISNIGGNAPSYIYRLMSELYHPDDHVL

SEQ ID NO: 24753 - protein, 201 aa, Homo sapiens
MRLLPLLRTVLWAAFLGSPLRGGSSLRHVVYWNSSNPRLLRGDAVVELGLNDYLDIVCPHYEGPGPPEGPETFALYMVDWPGYESCQAEGPRAYKRWVCSLPFGHVQFSEKIQRFTPFSLGFEFLPGETYYYISVPTPESSGQCLRLQVSVCCKERKSESAHPVGSPGESGTSGWRGGDTPSPLCLLLLLLLLILRLLRIL

SEQ ID NO: 24754 - protein, 193 aa, Homo sapiens
MRLLPLLRTVLWAAFLGSPLRGGSSLRHVVYWNSSNPRLLRGDAVVELGLNDYLDIVCPHYEGPGPPEGPETFALYMVDWPGYESCQAEGPRAYKRWVCSLPFGHVQFSEKIQRFTPFSLGFEFLPGETYYYISVPTPESSGQCLRLQVSVCCKERNLPSHPKEPESSQDPLEEEGSLLPALGVPIQTDKMEH

SEQ ID NO: 24755 - protein, 207 aa, Homo sapiens
MRLLPLLRTVLWAAFLGSPLRGGSSLRHVVYWNSSNPRLLRGDAVVELGLNDYLDIVCPHYEGPGPPEGPETFALYMVDWPGYESCQAEGPRAYKRWVCSLPFGHVQFSEKIQRFTPFSLGFEFLPGETYYYISVPTPESSGQCLRLQVSVCCKERRARVLPRSPGGGGIPAACTGGANSDRQDGALMGEIRGSEVTLAGACPLITG

SEQ ID NO: 24756 - protein, 163 aa, Homo sapiens
MFFSEARARSRTWEASPSEHRKWVEVFKACDEDHKGYLSREDFKTAVVMLFGYKPSKIEVDSVMSSINPNTSGILLEGFLNIVRKKKEAQRYRNEVRHIFTAFDTYYRGFLTLEDFKKAFRQVAPKLPERTVLEVFREVDRDSDGHVSFRDFEYALNYGQKEA

SEQ ID NO: 24757 - protein, 139 aa, Homo sapiens
MVFKACDEDHKGYLSREDFKTAVVMLFGYKPSKIEVDSVMSSINPNTSGILLEGFLNIVRKKKEAQRYRNEVRHIFTAFDTYYRGFLTLEDFKKAFRQVAPKLPERTVLEVFREVDRDSDGHVSFRDFEYALNYGQKEA

SEQ ID NO: 24758 - protein, 118 aa, Homo sapiens
MVFKACDEDHKGYLSREDFKTAVVMLFGYKPSKIEVDSVMSSINPNTSGILLEGFLNIVRKKKEAQRYRNEVRHIFTAFDTYYRGFLTLEDFKKAFRQVAPKLPERTVLEVFRGIFSA

SEQ ID NO: 24759 - protein, 61 aa, Homo sapiens
MFFSEARARSRTWEASPSEHRKWVEVFKACDEDHKGYLSREDFKTAVVMLFGYKPSKKWIL

SEQ ID NO: 24760 - protein, 142 aa, Homo sapiens
MFFSEARARSRTWEASPSEHRKWVEVFKACDEDHKGYLSREDFKTAVVMLFGYKPSKIEVDSVMSSINPNTSGILLEGFLNIVRKKKEAQRYRNEVRHIFTAFDTYYRGFLTLEDFKKAFRQVAPKLPERTVLEVFRGIFSA

SEQ ID NO: 24761 - protein, 115 aa, Homo sapiens
MLFGYKPSKIEVDSVMSSINPNTSGILLEGFLNIVRKKKEAQRYRNEVRHIFTAFDTYYRGFLTLEDFKKAFRQVAPKLPERTVLEVFREVDRDSDGHVSFRDFEYALNYGQKEA

SEQ ID NO: 24762 - protein, 273 aa, Homo sapiens
MRGSQEVLLMWLLVLAVGGTEHAYRPGRRVCAVRAHGDPVSESFVQRVYQPFLTTCDGHRACSTYRTIYRTAYRRSPGLAPARPRYACCPGWKRTSGLPGACGAAICQPPCRNGGSCVQPGRCRCPAGWRGDTCQSDVDECSARRGGCPQRCVNTAGSYWCQCWEGHSLSADGTLCVPKGGPPRVAPNPTGVDSAMKEEVQRLQSRVDLLEEKLQLVLAPLHSLASQALEHGLPDPGSLLVHSFQQLGRIDSLSEQISFLEEQLGSCSCKKDS

SEQ ID NO: 24763 - protein, 584 aa, Homo sapiens
MARPSPLCLLLLLTLLTPIVPSNSLLTEPPFRWRFYLHETWTQGNRLSTVTLATVDCQPHGCQAQVTFNFTSFKSVLRGWSNPTICFVYDQTHSNCRDYWVDTNGGCPYAYCRMHVTQLHTAKKLQHTYRLTSDGRTTYFLTIPDPWDSRWVSGVTGRLYRWPTDSYPVGKLRIFLTYIRVIPQVLSNLKDQADNIKHQEEVINTLVQSHPKADMVTYDDKAEAGPFSWITLVRHGARLVNMAGLVNLSHCFLCTALSQPPLVAVPLPQAFNTSGNHTAHPSGVFSEQVPLFRDPLQPQFPFCYTTPNSSWCNQTYSGSLSNLSAPAGGYFWCNFTLTKHLNISSNNTLSRNLCLPISLVPRLTLYSEAELSSLVNPPMRQKRAVFPPLVIGVSLTSSLVASGLGTGAIVHFISSSQDLSIKLQMAIEASAESLASLQRQITSVAKVAMQNRRALDLLTADKGGTCMFLGEECCYYINESGLVETSLLTLDKIRDGLHRPSSTPNYGGGWWQSPLTTWIIPFISPILIICLLLLIAPCVLKFIKNRISEVSRVTVNQMLLHPYSRLPTSEDHYDDALTQQEAAR

SEQ ID NO: 24764 - protein, 211 aa, Homo sapiens
MNRKKLQKLTDTLTKNCKHFNKFEVNCLIKLFYDLVGGVERQGLVVGLDRNAFRNILHVTFGMTDDMIMDRVFRGFDKDNDGCVNVLEWIHGLSLFLRGSLEEKMKYCFEVFDLNGDGFISKEEMFHMLKNSLLKQPSEEDPDEGIKDLVEITLKKMDHDHDGKLSFADYELAVREETLLLEAFGPCLPDPKSQMEFEAQVFKDPNEFNDM

SEQ ID NO: 24765 - protein, 159 aa, Homo sapiens
MNRKKLQKLTDTLTKNCKHLFRGFDKDNDGCVNVLEWIHGLSLFLRGSLEEKMKYCFEVFDLNGDGFISKEEMFHMLKNSLLKQPSEEDPDEGIKDLVEITLKKMDHDHDGKLSFADYELAVREETLLLEAFGPCLPDPKSQMEFEAQVFKDPNEFNDM

SEQ ID NO: 24766 - protein, 212 aa, Homo sapiens
MDYLLMIFSLLFVACQGAPETAVLGAELSAVGENGGEKPTPSPPWRLRRSKRCSCSSLMDKECVYFCHLDIIWVNTPEHVVPYGLGSPRSKRALENLLPTKATDRENRCQCASQKDKKCWNFCQAGKELRAEDIMEKDWNNHKKGKDCSKLGKKCIYQQLVRGRKIRRSSEEHLRQTRSETMRNSVKSSFHDPKLKGKPSRERYVTHNRAHW

SEQ ID NO: 24767 - protein, 133 aa, Homo sapiens
MATNFLVGEKIWFHKFKYGDAERRFYEQMNGPVAGASLQEASMILHDIARARENIPKSLAGSLGPGASSGPSGDHSELVVRIASLEVDNQRDLAERAGEELARPLGHSPADPAHVSHAPSGAPGQEASHTSRG

SEQ ID NO: 24768 - protein, 725 aa, Homo sapiens
MADEDLIFRLEGVDGGQSPRAGHDGDSDGDSDDEEGYFICPITDDPSSNQNVNSKVNKYYSNLTKSERYSSSGSPANSFHFKEAWKHAIQKAKHMPDPWAEFHLEDIATERATRHRYNAVTGEWLDDEVLIKMASQPFGRGAMRECFRTKKLSNFLHAQQWKGASNYVAKRYIEPVDRDVYFEDVRLQMEAKLWGEEYNRHKPPKQVDIMQMCIIELKDRPGKPLFHLEHYIEGKYIKYNSNSGFVRDDNIRLTPQAFSHFTFERSGHQLIVVDIQGVGDLYTDPQIHTETGTDFGDGNLGVRGMALFFYSHACNRICESMGLAPFDLSPRERDAVNQNTKLLQSAKTILRGTEEKCGSPQVRTLSGSRPPLLRPLSENSGDENMSDVTFDSLPSSPSSATPHSQKLDHLHWPVFSDLDNMASRDHDHLDNHRESENSGDSGYPSEKRGELDDPEPREHGHSYSNRKYESDEDSLGSSGRVCVEKWNLLNSSRLHLPRASAVALEVQRLNALDLEKKIGKSILGKVHLAMVRYHEGGRFCEKGEEWDQESAVFHLEHAANLGELEAIVGLGLMYSQLPHHILADVSLKETEENKTKGFDYLLKAAEAGDRQSMILVARAFDSGQNLSPDRCQDWLEALHWYNTALEMTDCDEGGEYDGMQDEPRYMMLAREAEMLFTGGYGLEKDPQRSGDLYTQAAEAAMEAMKGRLANQYYQKAEEAWAQMEE

SEQ ID NO: 24769 - protein, 462 aa, Homo sapiens
MGKEKTHINIVVIGHVDSGKSTTTGHLIYKCGGIDKRTIEKFEKEAAEMGKGSFKYAWVLDKLKAERERGITIDISLWKFETSKYYVTIIDAPGHRDFIKNMITGTSQADCAVLIVAAGVGEFEAGISKNGQTREHALLAYTLGVKQLIVGVNKMDSTEPPYSQKRYEEIVKEVSTYIKKIGYNPDTVAFVPISGWNGDNMLEPSANMPWFKGWKVTRKDGNASGTTLLEALDCILPPTRPTDKPLRLPLQDVYKIGGIGTVPVGRVETGVLKPGMVVTFAPVNVTTEVKSVEMHHEALSEALPGDNVGFNVKNVSVKDVRRGNVAGDSKNDPPMEAAGFTAQVIILNHPGQISAGYAPVLDCHTAHIACKFAELKEKIDRRSGKKLEDGPKFLKSGDAAIVDMVPGKPMCVESFSDYPPLGRFAVRDMRQTVAVGVIKAVDKKAAGAGKVTKSAQKAQKAK

SEQ ID NO: 24770 - protein, 462 aa, Homo sapiens
MGKEKTHINIVVIGHVDSGKSTTTGHLIYKCGGIDKRTIEKFEKEAAEMGKGSFKYAWVLDKLKAERERGITIDISLWKFETSKYYVTIIDAPGHRDFIKNMITGTSQADCAVLIVAAGVGEFEAGISKNGQTREHALLAYTLGVKQLIVGVNKMDSTEPPYSQKRYEEIVKEVSTYIKKIGYNPDTVAFVPISGWNGDNMLEPSANMPWFKGWKVTRKDGNASGTTLLEALDCILPPTRPTDKPLRLPLQDVYKIGGIGTVPVGRVETGVLKPGMVVTFAPVNVTTEVKSVEMHHEALSEALPGDNVGFKVKNVSVKDVRRGNVAGDSKNDPPMEAAGFTAQVIILNHPGQISAGYAPVLDCHMAHIACKFAELKEKIDRRSGKKLEDGPKFLKSGDAAIVDMVPGKPMCVESFSDYPPLGRFAVRDMRQTVAVGVIKAVDKKAAGAGKVTKSAQKAQKAK

SEQ ID NO: 24771 - protein, 567 aa, Homo sapiens
MWLRAFILATLSASAAWGHPSSPPVVDTVHGKVLGKFVSLEGFAQPVAIFLGIPFAKPPLGPLRFTPPQPAEPWSFVKNATSYPPMCTQDPKAGQLLSELFTNRKENIPLKLSEDCLYLNIYTPADLTKKNRLPVMVWIHGGGLMVGAASTYDGLALAAHENVVVVTIQYRLGIWGFFSTGDEHSRGNWGHLDQVAALRWVQDNIASFGGNPGSVTIFGESAGGESVSVLVLSPLAKNLFHRAISESGVALTSVLVKKGDVKPLAEQIAITAGCKTTTSAVMVHCLRQKTEEELLETTLKMKFLSLDLQGDPRESQPLLGTVIDGMLLLKTPEELQAERNFHTVPYMVGINKQEFGWLIPMQLMSYPLSEGQLDQKTAMSLLWKSYPLVCIAKELIPEATEKYLGGTDDTVKKKDLFLDLIADVMFGVPSVIVARNHRDAGAPTYMYEFQYRPSFSSDMKPKTVIGDHGDELFSVFGAPFLKEGASEEEIRLSKMVMKFWANFARNGNPNGEGLPHWPEYNQKEGYLQIGANTQAAQKLKDKEVAFWTNLFAKKAVEKPPQTEHIEL

SEQ ID NO: 24772 - protein, 568 aa, Homo sapiens
MWLRAFILATLSASAAWAGHPSSPPVVDTVHGKVLGKFVSLEGFAQPVAIFLGIPFAKPPLGPLRFTPPQPAEPWSFVKNATSYPPMCTQDPKAGQLLSELFTNRKENIPLKLSEDCLYLNIYTPADLTKKNRLPVMVWIHGGGLMVGAASTYDGLALAAHENVVVVTIQYRLGIWGFFSTGDEHSRGNWGHLDQVAALRWVQDNIASFGGNPGSVTIFGESAGGESVSVLVLSPLAKNLFHRAISESGVALTSVLVKKGDVKPLAEQIAITAGCKTTTSAVMVHCLRQKTEEELLETTLKMKFLSLDLQGDPRESQPLLGTVIDGMLLLKTPEELQAERNFHTVPYMVGINKQEFGWLIPMQLMSYPLSEGQLDQKTAMSLLWKSYPLVCIAKELIPEATEKYLGGTDDTVKKKDLFLDLIADVMFGVPSVIVARNHRDAGAPTYMYEFQYRPSFSSDMKPKTVIGDHGDELFSVFGAPFLKEGASEEEIRLSKMVMKFWANFARNGNPNGEGLPHWPEYNQKEGYLQIGANTQAAQKLKDKEVAFWTNLFAKKAVEKPPQTEHIEL

SEQ ID NO: 24773 - protein, 566 aa, Homo sapiens
MWLRAFILATLSASAAWGHPSSPPVVDTVHGKVLGKFVSLEGFAQPVAIFLGIPFAKPPLGPLRFTPPQPAEPWSFVKNATSYPPMCTQDPKAGQLLSELFTNRKENIPLKLSEDCLYLNIYTPADLTKKNRLPVMVWIHGGGLMVGAASTYDGLALAAHENVVVVTIQYRLGIWGFFSTGDEHSRGNWGHLDQVAALRWVQDNIASFGGNPGSVTIFGESAGGESVSVLVLSPLAKNLFHRAISESGVALTSVLVKKGDVKPLAEQIAITAGCKTTTSAVMVHCLRQKTEEELLETTLKMKFLSLDLQGDPRESQPLLGTVIDGMLLLKTPEELQAERNFHTVPYMVGINKQEFGWLIPMLMSYPLSEGQLDQKTAMSLLWKSYPLVCIAKELIPEATEKYLGGTDDTVKKKDLFLDLIADVMFGVPSVIVARNHRDAGAPTYMYEFQYRPSFSSDMKPKTVIGDHGDELFSVFGAPFLKEGASEEEIRLSKMVMKFWANFARNGNPNGEGLPHWPEYNQKEGYLQIGANTQAAQKLKDKEVAFWTNLFAKKAVEKPPQTEHIEL

SEQ ID NO: 24774 - protein, 1021 aa, Homo sapiens
MATEGAAQLGNRVAGMVCSLWVLLLVSSVLALEEVLLDTTGETSEIGWLTYPPGGWDEVSVLDDQRRLTRTFEACHVAGAPPGTGQDNWLQTHFVERRGAQRAHIRLHFSVRACSSLGVSGGTCRETFTLYYRQAEEPDSPDSVSSWHLKRWTKVDTIAADESFPSSSSSSSSSSSAAWAVGPHGAGQRAGLQLNVKERSFGPLTQRGFYVAFQDTGACLALVAVRLFSYTCPAVLRSFASFPETQASGAGGASLVAAVGTCVAHAEPEEDGVGGQAGGSPPRLHCNGEGKWMVAVGGCRCQPGYQPARGDKACQACPRGLYKSSAGNAPCSPCPARSHAPNPAAPVCPCLEGFYRASSDPPEAPCTGPPSAPQELWFEVQGSALMLHWRLPRELGGRGDLLFNVVCKECEGRQEPASGGGGTCHRCRDEVHFDPRQRGLTESRVLVGGLRAHVPYILEVQAVNGVSELSPDPPQAAAINVSTSHEVPSAVPVVHQVSRASNSITVSWPQPDQTNGNILDYQLRYYDQAEDESHSFTLTSETNTATVTQLSPGHIYGFQVRARTAAGHGPYGGKVYFQTLPQGELSSQLPERLSLVIGSILGALAFLLLAAITVLAVVFQRKRRGTGYTEQLQQYSSPGLGVKYYIDPSTYEDPCQAIRELAREVDPAYIKIEEVIGTGSFGEVRQGRLQPRGRREQTVAIQALWAGGAESLQMTFLGRAAVLGQFQHPNILRLEGVVTKSRPLMVLTEFMELGPLDSFLRQREGQFSSLQLVAMQRGVAAAMQYLSSFAFVHRSLSAHSVLVNSHLVCKVARLGHSPQGPSCLLRWAAPEVIAHGKHTTSSDVWSFGILMWEVMSYGERPYWDMSEQEVLNAIEQEFRLPPPPGCPPGLHLLMLDTWQKDRARRPHFDQLVAAFDKMIRKPDTLQAGGDPGERPSQALLTPVALDFPCLDSPQAWLSAIGLECYQDNFSKFGLCTFSDVAQLSLEDLPALGITLAGHQKKLLHHIQLLQQHLRQQGSVEV

SEQ ID NO: 24775 - protein, 744 aa, Homo sapiens
MATEGAAQLGNRVAGMVAVGGCRCQPGYQPARGDKACQACPRGLYKSSAGNAPCSPCPARSHAPNPAAPVCPCLEGFYRASSDPPEAPCTGPPSAPQELWFEVQGSALMLHWRLPRELGGRGDLLFNVVCKECEGRQEPASGGGGTCHRCRDEVHFDPRQRGLTESRVLVGGLRAHVPYILEVQAVNGVSELSPDPPQAAAINVSTSHEVPSAVPVVHQVSRASNSITVSWPQPDQTNGNILDYQLRYYDQAEDESHSFTLTSETNTATVTQLSPGHIYGFQVRARTAAGHGPYGGKVYFQTLPQGELSSQLPERLSLVIGSILGALAFLLLAAITVLAVVFQRKRRGTGYTEQLQQYSSPGLGVKYYIDPSTYEDPCQAIRELAREVDPAYIKIEEVIGTGSFGEVRQGRLQPRGRREQTVAIQALWAGGAESLQMTFLGRAAVLGQFQHPNILRLEGVVTKSRPLMVLTEFMELGPLDSFLRQREGQFSSLQLVAMQRGVAAAMQYLSSFAFVHRSLSAHSVLVNSHLVCKVARLGHSPQGPSCLLRWAAPEVIAHGKHTTSSDVWSFGILMWEVMSYGERPYWDMSEQEVLNAIEQEFRLPPPPGCPPGLHLLMLDTWQKDRARRPHFDQLVAAFDKMIRKPDTLQAGGDPGERPSQALLTPVALDFPCLDSPQAWLSAIGLECYQDNFSKFGLCTFSDVAQLSLEDLPALGITLAGHQKKLLHHIQLLQQHLRQQGSVEV

SEQ ID NO: 24776 - protein, 540 aa, Homo sapiens
MATEGAAQLGNRVAGMVCSLWVLLLVSSVLALEEVLLDTTGETSEIGWLTYPPGGWDEVSVLDDQRRLTRTFEACHVAGAPPGTGQDNWLQTHFVERRGAQRAHIRLHFSVRACSSLGVSGGTCRETFTLYYRQAEEPDSPDSVSSWHLKRWTKVDTIAADESFPSSSSSSSSSSSAAWAVGPHGAGQRAGLQLNVKERSFGPLTQRGFYVAFQDTGACLALVAVRLFSYTCPAVLRSFASFPETQASGAGGASLVAAVGTCVAHAEPEEDGVGGQAGGSPPRLHCNGEGKWMVAVGGCRCQPGYQPARGDKACQACPRGLYKSSAGNAPCSPCPARSHAPNPAAPVCPCLEGFYRASSDPPEAPCTGPPSAPQELWFEVQGSALMLHWRLPRELGGRGDLLFNVVCKECEGRQEPASGGGGTCHRCRDEVHFDPRQRGLTESRVLVGGLRAHVPYILEVQAVNGVSELSPDPPQAAAINVSTSHEGELFSLAFRIPCLRSFEPPSLLLISSLVHPCRPPLKADPAPRDSYPHNNFPFAL

SEQ ID NO: 24777 - protein, 571 aa, Homo sapiens
MERAVRVESGVLVGVVCLLLACPATATGPEVAQPEVDTTLGRVRGRQVGVKGTDRLVNVFLGIPFAQPPLGPDRFSAPHPAQPWEGVRDASTAPPMCLQDVESMNSSRFVLNGKQQIFSVSEDCLVLNVYSPAEVPAGSGRPVMVWVHGGALITGAATSYDGSALAAYGDVVVVTVQYRLGVLGFFSTGDEHAPGNQGFLDVVAALRWVQENIAPFGGDLNCVTVFGGSAGGSIISGLVLSPVAAGLFHRAITQSGVITTPGIIDSHPWPLAQKIANTLACSSSSPAEMVQCLQQKEGEELVLSKKLKNTIYPLTVDGTVFPKSPKELLKEKPFHSVPFLMGVNNHEFSWLIPRGWGLLDTMEQMSREDMLAISTPVLTSLDVPPEMMPTVIDEYLGSNSDAQAKCQAFQEFMGDVFINVPTVSFSRYLRDSGSPVFFYEFQHRPSSFAKIKPAWVKADHGAEGAFVFGGPFLMDESSRLAFPEATEEEKQLSLTMMAQWTHFARTGDPNSKALPPWPQFNQAEQYLEINPVPRAGQKFREAWMQFWSETLPSKIQQWHQKQKNRKAQEDL

SEQ ID NO: 24778 - protein, 210 aa, Homo sapiens
MEQMSREDMLAISTPVLTSLDVPPEMMPTVIDEYLGSNSDAQAKCQAFQEFMGDVFINVPTVSFSRYLRDSGSPVFFYEFQHRPSSFAKIKPAWVKADHGAEGAFVFGGPFLMDESSRLAFPEATEEEKQLSLTMMAQWTHFARTGDPNSKALPPWPQFNQAEQYLEINPVPRAGQKFREAWMQFWSETLPSKIQQWHQKQKNRKAQEDL

SEQ ID NO: 24779 - protein, 592 aa, Homo sapiens
MEMQDLTSPHSRLSGSSESPSGPKLGNSHINSNSMTPNGTEVKTEPMSSSETASTTADGSLNNFSGSAIGSSSFSPRPTHQFSPPQIYPSNRPYPHILPTPSSQTMAAYGQTQFTTGMQQATAYATYPQPGQPYGISSYGALWAGIKTEGGLSQSQSPGQTGFLSYGTSFSTPQPGQAPYSYQMQGSSFTTSSGIYTGNNSLTNSSGFNSSQQDYPSYPSFGQGQYAQYYNSSPYPAHYMTSSNTSPTTPSTNATYQLQEPPSGITSQAVTDPTAEYSTIHSPSTPIKDSDSDRLRRGSDGKSRGRGRRNNNPSPPPDSDLERVFIWDLDETIIVFHSLLTGSYANRYGRDPPTSVSLGLRMEEMIFNLADTHLFFNDLEECDQVHIDDVSSDDNGQDLSTYNFGTDGFPAAATSANLCLATGVRGGVDWMRKLAFRYRRVKEIYNTYKNNVGGLLGPAKREAWLQLRAEIEALTDSWLTLALKALSLIHSRTNCVNILVTTTQLIPALAKVLLYGLGIVFPIENIYSATKIGKESCFERIIQRFGRKVVYVVIGDGVEEEQGAKKHAMPFWRISSHSDLMALHHALELEYL

SEQ ID NO: 24780 - protein, 559 aa, Homo sapiens
MLLFPQVAVKTEPMSSSETASTTADGSLNNFSGSAIGSSSFSPRPTHQFSPPQIYPSNRPYPHILPTPSSQTMAAYGQTQFTTGMQQATAYATYPQPGQPYGISSYGALWAGIKTEGGLSQSQSPGQTGFLSYGTSFSTPQPGQAPYSYQMQGSSFTTSSGIYTGNNSLTNSSGFNSSQQDYPSYPSFGQGQYAQYYNSSPYPAHYMTSSNTSPTTPSTNATYQLQEPPSGITSQAVTDPTAEYSTIHSPSTPIKDSDSDRLRRGSDGKSRGRGRRNNNPSPPPDSDLERVFIWDLDETIIVFHSLLTGSYANRYGRDPPTSVSLGLRMEEMIFNLADTHLFFNDLEECDQVHIDDVSSDDNGQDLSTYNFGTDGFPAAATSANLCLATGVRGGVDWMRKLAFRYRRVKEIYNTYKNNVGGLLGPAKREAWLQLRAEIEALTDSWLTLALKALSLIHSRTNCVNILVTTTQLIPALAKVLLYGLGIVFPIENIYSATKIGKESCFERIIQRFGRKVVYVVIGDGVEEEQGAKKHAMPFWRISSHSDLMALHHALELEYL

SEQ ID NO: 24781 - protein, 557 aa, Homo sapiens
MEMQDLTSPHSRLSGSSESPSGPKLGNSHINSNSMTPNGTEVKTEPMSSSETASTTADGSLNNFSGSAIGSSSFSPRPTHQFSPPQIYPSNRPYPHILPTPSSQTMAAYGQTQFTTGMQQATAYATYPQPGQPYGISSYGIKTEGGLSQSQSPGQTGFLSYGTSFSTPQPGQAPYSYQMQGSSFTTSSGIYTGNNSLTNSSGFNSSQQDYPSYPSFGQGQYAQYYNSSPYPAHYMTSSNTSPTTPSTNATYQLQEPPSGITSQAVTDPTAEYSTIHSPSTPIKDSDSDRLRRGSDGKSRGRGRRNNNPSPPPDSDLERVFIWDLDETIIVFHSLLTGSYANRYGRECDQVHIDDVSSDDNGQDLSTYNFGTDGFPAAATSANLCLATGVRGGVDWMRKLAFRYRRVKEIYNTYKNNVGGLLGPAKREAWLQLRAEIEALTDSWLTLALKALSLIHSRTNCVNILVTTTQLIPALAKVLLYGLGIVFPIENIYSATKIGKESCFERIIQRFGRKVVYVVIGDGVEEEQGAKKHAMPFWRISSHSDLMALHHALELEYL

SEQ ID NO: 24782 - protein, 559 aa, Homo sapiens
MRLHRLRARLSAVACGLLLLLVRGQGQDSASPIRTTHTGQVLGSLVHVKGANAGVQTFLGIPFAKPPLGPLRFAPPEPPESWSGVRDGTTHPAMCLQDLTAVESEFLSQFNMTFPSDSMSEDCLYLSIYTPAHSHEGSNLPVMVWIHGGALVFGMASLYDGSMLAALENVVVVIIQYRLGVLGFFSTGDKHATGNWGYLDQVAALRWVQQNIAHFGGNPDRVTIFGESAGGTSVSSLVVSPISQGLFHGAIMESGVALLPGLIASSADVISTVVANLSACDQVDSEALVGCLRGKSKEEILAINKPFKMIPGVVDGVFLPRHPQELLASADFQPVPSIVGVNNNEFGWLIPKVMRIYDTQKEMDREASQAALQKMLTLLMLPPTFGDLLREEYIGDNGDPQTLQAQFQEMMADSMFVIPALQVAHFQCSRAPVYFYEFQHQPSWLKNIRPPHMKADHGDELPFVFRSFFGGNYIKFTEEEEQLSRKMMKYWANFARNGNPNGEGLPHWPLFDQEEQYLQLNLQPAVGRALKAHRLQFWKKALPQKIQELEEPEERHTEL

SEQ ID NO: 24783 - protein, 543 aa, Homo sapiens
MRLHRLRARLSAVACGLLLLLVRGQGQDSASPIRTTHTGQVLGSLVHVKGANAGVQTFLGIPFAKPPLGPLRFAPPEPPESWSGVRDGTTHPAMCLQDLTAVESEFLSQFNMTFPSDSMSEDCLYLSIYTPAHSHEGSNLPVMVWIHGGALVFGMASLYDGSMLAALENVVVVIIQYRLGVLGFFSTGDKHATGNWGYLDQVAALRWVQQNIAHFGGNPDRVTIFGESAGGTSVSSLVVSPISQGLFHGAIMESGVALLPGLIASSADVISTVVANLSACDQVDSEALVGCLRGKSKEEILAINKPFKMIPGVVDGVFLPRHPQELLASADFQPVPSIVGVNNNEFGWLIPKVMRIYDTQKEMDREASQAALQKMLTLLMLPPTFGDLLREEYIGDNGDPQTLQAQFQEMMADSMFVIPALQVAHFQCSRAPVYFYEFQHQPSWLKNIRPPHMKADHVKFTEEEEQLSRKMMKYWANFARNGNPNGEGLPHWPLFDQEEQYLQLNLQPAVGRALKAHRLQFWKKALPQKIQELEEPEERHTEL

SEQ ID NO: 24784 - protein, 623 aa, Homo sapiens
MTAQSRSPTTPTFPGPSQRTPLTPCPVQTPRLGKALIHCWTDPGQPLGEQQRVRRQRTETSEPTMRLHRLRARLSAVACGLLLLLVRGQGQDSASPIRTTHTGQVLGSLVHVKGANAGVQTFLGIPFAKPPLGPLRFAPPEPPESWSGVRDGTTHPAMCLQDLTAVESEFLSQFNMTFPSDSMSEDCLYLSIYTPAHSHEGSNLPVMVWIHGGALVFGMASLYDGSMLAALENVVVVIIQYRLGVLGFFSTGDKHATGNWGYLDQVAALRWVQQNIAHFGGNPDRVTIFGESAGGTSVSSLVVSPISQGLFHGAIMESGVALLPGLIASSADVISTVVANLSACDQVDSEALVGCLRGKSKEEILAINKPFKMIPGVVDGVFLPRHPQELLASADFQPVPSIVGVNNNEFGWLIPKVMRIYDTQKEMDREASQAALQKMLTLLMLPPTFGDLLREEYIGDNGDPQTLQAQFQEMMADSMFVIPALQVAHFQCSRAPVYFYEFQHQPSWLKNIRPPHMKADHGDELPFVFRSFFGGNYIKFTEEEEQLSRKMMKYWANFARNGNPNGEGLPHWPLFDQEEQYLQLNLQPAVGRALKAHRLQFWKKALPQKIQELEEPEERHTEL

SEQ ID NO: 24785 - protein, 607 aa, Homo sapiens
MTAQSRSPTTPTFPGPSQRTPLTPCPVQTPRLGKALIHCWTDPGQPLGEQQRVRRQRTETSEPTMRLHRLRARLSAVACGLLLLLVRGQGQDSASPIRTTHTGQVLGSLVHVKGANAGVQTFLGIPFAKPPLGPLRFAPPEPPESWSGVRDGTTHPAMCLQDLTAVESEFLSQFNMTFPSDSMSEDCLYLSIYTPAHSHEGSNLPVMVWIHGGALVFGMASLYDGSMLAALENVVVVIIQYRLGVLGFFSTGDKHATGNWGYLDQVAALRWVQQNIAHFGGNPDRVTIFGESAGGTSVSSLVVSPISQGLFHGAIMESGVALLPGLIASSADVISTVVANLSACDQVDSEALVGCLRGKSKEEILAINKPFKMIPGVVDGVFLPRHPQELLASADFQPVPSIVGVNNNEFGWLIPKVMRIYDTQKEMDREASQAALQKMLTLLMLPPTFGDLLREEYIGDNGDPQTLQAQFQEMMADSMFVIPALQVAHFQCSRAPVYFYEFQHQPSWLKNIRPPHMKADHVKFTEEEEQLSRKMMKYWANFARNGNPNGEGLPHWPLFDQEEQYLQLNLQPAVGRALKAHRLQFWKKALPQKIQELEEPEERHTEL

SEQ ID NO: 24786 - protein, 987 aa, Homo sapiens
MELRVLLCWASLAAALEETLLNTKLETADLKWVTFPQVDGQWEELSGLDEEQHSVRTYEVCDVQRAPGQAHWLRTGWVPRRGAVHVYATLRFTMLECLSLPRAGRSCKETFTVFYYESDADTATALTPAWMENPYIKVDTVAAEHLTRKRPGAEATGKVNVKTLRLGPLSKAGFYLAFQDQGACMALLSLHLFYKKCAQLTVNLTRFPETVPRELVVPVAGSCVVDAVPAPGPSPSLYCREDGQWAEQPVTGCSCAPGFEAAEGNTKCRACAQGTFKPLSGEGSCQPCPANSHSNTIGSAVCQCRVGYFRARTDPRGAPCTTPPSAPRSVVSRLNGSSLHLEWSAPLESGGREDLTYALRCRECRPGGSCAPCGGDLTFDPGPRDLVEPWVVVRGLRPDFTYTFEVTALNGVSSLATGPVPFEPVNVTTDREVPPAVSDIRVTRSSPSSLSLAWAVPRAPSGAVLDYEVKYHEKGAEGPSSVRFLKTSENRAELRGLKRGASYLVQVRARSEAGYGPFGQEHHSQTQLDESEGWREQLALIAGTAVVGVVLVLVVIVVAVLCLRKQSNGREAEYSDKHGQYLIGHGTKVYIDPFTYEDPNEAVREFAKEIDVSYVKIEEVIGAGEFGEVCRGRLKAPGKKESCVAIKTLKGGYTERQRREFLSEASIMGQFEHPNIIRLEGVVTNSMPVMILTEFMENGALDSFLRLNDGQFTVIQLVGMLRGIASGMRYLAEMSYVHRDLAARNILVNSNLVCKVSDFGLSRFLEENSSDPTYTSSLGGKIPIRWTAPEAIAFRKFTSASDAWSYGIVMWEVMSFGERPYWDMSNQDVINAIEQDYRLPPPPDCPTSLHQLMLDCWQKDRNARPRFPQVVSALDKMIRNPASLKIVARENGGASHPLLDQRQPHYSAFGSVGEWLRAIKMGRYEESFAAAGFGSFELVSQISAEDLLRIGVTLAGHQKKILASVQHMKSQAKPGTPGGTGGPAPQY

SEQ ID NO: 24787 - protein, 516 aa, Homo sapiens
MELRVLLCWASLAAALEETLLNTKLETADLKWVTFPQVDGQWEELSGLDEEQHSVRTYEVCDVQRAPGQAHWLRTGWVPRRGAVHVYATLRFTMLECLSLPRAGRSCKETFTVFYYESDADTATALTPAWMENPYIKVDTVAAEHLTRKRPGAEATGKVNVKTLRLGPLSKAGFYLAFQDQGACMALLSLHLFYKKCAQLTVNLTRFPETVPRELVVPVAGSCVVDAVPAPGPSPSLYCREDGQWAEQPVTGCSCAPGFEAAEGNTKCRACAQGTFKPLSGEGSCQPCPANSHSNTIGSAVCQCRVGYFRARTDPRGAPCTTPPSAPRSVVSRLNGSSLHLEWSAPLESGGREDLTYALRCRECRPGGSCAPCGGDLTFDPGPRDLVEPWVVVRGLRPDFTYTFEVTALNGVSSLATGPVPFEPVNVTTDREVPPAVSDIRVTRSSPSSLSLAWAVPRAPSGAVLDYEVKYHEKGAEGPSSVRFLKTSENRAELRGLKRGASYLVQRARAGGSSWP

SEQ ID NO: 24788 - protein, 306 aa, Homo sapiens
MELRVLLCWASLAAALEETLLNTKLETADLKWVTFPQVDGQWEELSGLDEEQHSVRTYEVCDVQRAPGQAHWLRTGWVPRRGAVHVYATLRFTMLECLSLPRAGRSCKETFTVFYYESDADTATALTPAWMENPYIKVDTVAAEHLTRKRPGAEATGKVNVKTLRLGPLSKAGFYLAFQDQGACMALLSLHLFYKKCAQLTVNLTRFPETVPRELVVPVAGSCVVDAVPAPGPSPSLYCREDGQWAEQPVTGCSCAPGFEAAEGNTKCRGRRGSQQRAVPEDVRKPGRAAGAEAGSQLPGAGTGAL

SEQ ID NO: 24789 - protein, 414 aa, Homo sapiens
MELRVLLCWASLAAALEETLLNTKLETADLKWVTFPQVDGQWEELSGLDEEQHSVRTYEVCDVQRAPGQAHWLRTGWVPRRGAVHVYATLRFTMLECLSLPRAGRSCKETFTVFYYESDADTATALTPAWMENPYIKVDTVAAEHLTRKRPGAEATGKVNVKTLRLGPLSKAGFYLAFQDQGACMALLSLHLFYKKCAQLTVNLTRFPETVPRELVVPVAGSCVVDAVPAPGPSPSLYCREDGQWAEQPVTGCSCAPGFEAAEGNTKCRACAQGTFKPLSGEGSCQPCPANSHSNTIGSAVCQCRVGYFRARTDPRGAPCTTPPSAPRSVVSRLNGSSLHLEWSAPLESGGREDLTYALRCRECRPGGSCAPCGGDLTFDPGPRDLVEPWVVVRGLRPDFTYTFEYLLQCLTSG

SEQ ID NO: 24790 - protein, 1412 aa, Homo sapiens
MTTKRSLFVRLVPCRCLRGEEETVTTLDYSHCSLEQVPKEIFTFEKTLEELYLDANQIEELPKQLFNCQSLHKLSLPDNDLTTLPASIANLINLRELDVSKNGIQEFPENIKNCKVLTIVEASVNPISKLPDGFSQLLNLTQLYLNDAFLEFLPANFGRLTKLQILELRENQLKMLPKTMNRLTQLERLDLGSNEFTEVPEVLEQLSGLKEFWMDANRLTFIPGFIGSLKQLTYLDVSKNNIEMVEEGISTCENLQDLLLSSNSLQQLPETIGSLKNITTLKIDENQLMYLPDSIGGLISVEELDCSFNEVEALPSSIGQLTNLRTFAADHNYLQQLPPEIGSWKNITVLFLHSNKLETLPEEMGDMQKLKVINLSDNRLKNLPFSFTKLQQLTAMWLSDNQSKPLIPLQKETDSETQKMVLTNYMFPQQPRTEDVMFISDNESFNPSLWEEQRKQRAQVAFECDEDKDEREAPPREGNLKRYPTPYPDELKNMVKTVQTIVHRLKDEETNEDSGRDLKPHEDQQDINKDVGVKTSESTTTVKSKVDEREKYMIGNSVQKISEPEAEISPGSLPVTANMKASENLKHIVNHDDVFEESEELSSDEEMKMAEMRPPLIETSINQPKVVALSNNKKDDTKETDSLSDEVTHNSNQNNSNCSSPSRMSDSVSLNTDSSQDTSLCSPVKQTHIDINSKIRQEDENFNSLLQNGDILNSSTEEKFKAHDKKDFNLPEYDLNVEERLVLIEKSVDSTATADDTHKLDHINMNLNKLITNDTFQPEIMERSKTQDIVLGTSFLSINSKEETEHLENGNKYPNLESVNKVNGHSEETSQSPNRTEPHDSDCSVDLGISKSTEDLSPQKSGPVGSVVKSHSITNMEIGGLKIYDILSDNGPQQPSTTVKITSAVDGKNIVRSKSATLLYDQPLQVFTGSSSSSDLISGTKAIFKFDSNHNPEEPNIIRGPTSGPQSAPQIYGPPQYNIQYSSSAAVKDTLWHSKQNPQIDHASFPPQLLPRSESTENQSYAKHSANMNFSNHNNVRANTAYHLHQRLGPARHGEMWAISPNDRLIPAVTRSTIQRQSSVSSTASVNLGDPGSTRRAQIPEGDYLSYREFHSAGRTPPMMPGSQRPLSARTYSIDGPNASRPQSARPSINEIPERTMSVSDFNYSRTSPSKRPNARVGSEHSLLDPPGKSKVPRDWREQVLRHIEAKKLEKKHPQTSSSGDPCQDGIFISGQQNYSSATLSHKDVPPDSLMKMPLSNGQMGQPLRPQANYSQIHHPPQASVARHPSREQLIDYLMLKVAHQPPYTQPHCSPRQGHELAKQEIRVRVEKDPELGFSISGGVGGRGNPFRPDDDGIFVTRVQPEGPASKLLQPGDKIIQANGYSFINIEHGQAVSLLKTFQNTVELIIVREVSS

SEQ ID NO: 24791 - protein, 1371 aa, Homo sapiens
MTTKRSLFVRLVPCRCLRGEEETVTTLDYSHCSLEQVPKEIFTFEKTLEELYLDANQIEELPKQLFNCQSLHKLSLPDNDLTTLPASIANLINLRELDVSKNGIQEFPENIKNCKVLTIVEASVNPISKLPDGFSQLLNLTQLYLNDAFLEFLPANFGRLTKLQILELRENQLKMLPKTMNRLTQLERLDLGSNEFTEVPEVLEQLSGLKEFWMDANRLTFIPGFIGSLKQLTYLDVSKNNIEMVEEGISTCENLQDLLLSSNSLQQLPETIGSLKNITTLKIDENQLMYLPDSIGGLISVEELDCSFNEVEALPSSIGQLTNLRTFAADHNYLQQLPPEIGSWKNITVLFLHSNKLETLPEEMGDMQKLKVINLSDNRLKNLPFSFTKLQQLTAMWLSDNQSKPLIPLQKETDSETQKMVLTNYMFPQQPRTEDVMFISDNESFNPSLWEEQRKQRAQVAFECDEDKDEREAPPREGNLKRYPTPYPDELKNMVKTVQTIVHRLKDEETNEDSGRDLKPHEDQQDINKDVGVKTSESTTTVKSKVDEREKYMIGNSVQKISEPEAEISPGSLPVTANMKASENLKHIVNHDDVFEESEELSSDEEMKMAEMRPPLIETSINQPKVVALSNNKKDDTKETDSLSDEVTHNSNQNNSNCSSPSRMSDSVSLNTDSSQDTSLCSPVKQTHIDINSKIRQEDENFNSLLQNGDILNSSTEEKFKAHDKKDFNLPEYDLNVEERLVLIEKSVDSTATADDTHKLDHINMNLNKLITNDTFQPEIMERSKTQDIVLGTSFLSINSKEETEHLENGNKYPNLESVNKVNGHSEETSQSPNRTEPHDSDCSVDLGISKSTEDLSPQKSGPVGSVVKSHSITNMEIGGLKIYDILSDNGPQQPSTTVKITSAVDGKNIVRSKSATLLYDQPLQVFTGSSSSSDLISGTKAIFKFDSNHNPEEPNIIRGPTSGPQSAPQIYGPPQYNIQYSSSAAVKDTLWHSKQNPQIDHASFPPQLLPRSESTENQSYAKHSANMNFSNHNNVRANTAYHLHQRLGPARHGEMWAISPNDRLIPAVTRSTIQRQSSVSSTASVNLGDPGSTRRAQIPEGDYLSYREFHSAGRTPPMMPGSQRPLSARTYSIDGPNASRPQSARPSINEIPERTMSVSDFNYSRTSPSKRPNARVGSEHSLLDPPGKSKVPRDWREQVLRHIEAKKLEKMPLSNGQMGQPLRPQANYSQIHHPPQASVARHPSREQLIDYLMLKVAHQPPYTQPHCSPRQGHELAKQEIRVRVEKDPELGFSISGGVGGRGNPFRPDDDGIFVTRVQPEGPASKLLQPGDKIIQANGYSFINIEHGQAVSLLKTFQNTVELIIVREVSS

SEQ ID NO: 24792 - protein, 1360 aa, Homo sapiens
MTTKRSLFVRLVPCRCLRGEEETVTTLDYSHCSLEQVPKEIFTFEKTLEELYLDANQIEELPKQLFNCQSLHKLSLPDNDLTTLPASIANLINLRELDVSKNGIQEFPENIKNCKVLTIVEASVNPISKLPDGFSQLLNLTQLYLNDAFLEFLPANFGRLTKLQILELRENQLKMLPKTMNRLTQLERLDLGSNEFTEVPEVLEQLSGLKEFWMDANRLTFIPGFIGSLKQLTYLDVSKNNIEMVEEGISTCENLQDLLLSSNSLQQLPETIGSLKNITTLKIDENQLMYLPDSIGGLISVEELDCSFNEVEALPSSIGQLTNLRTFAADHNYLQQLPPEIGSWKNITVLFLHSNKLETLPEEMGDMQKLKVINLSDNRLKNLPFSFTKLQQLTAMWLSDNQSKPLIPLQKETDSETQKMVLTNYMFPQQPRTEDVMFISDNESFNPSLWEEQRKQRAQVAFECDEDKDEREAPPREGNLKRYPTPYPDELKNMVKTVQTIVHRLKDEETNEDSGRDLKPHEDQQDINKDVGVKTSESTTTVKSKVDEREKYMIGNSVQKISEPEAEISPGSLPVTANMKASENLKHIVNHDDVFEESEELSSDEEMKMAEMRPPLIETSINQPKVVALSNNKKDDTKETDSLSDEVTHNSNQNNSNCSSPSRMSDSVSLNTDSSQDTSLCSPVKQTHIDINSKIRQEDENFNSLLQNGDILNSSTEEKFKAHDKKDFNLPEYDLNVEERLVLIEKSVDSTATADDTHKLDHINMNLNKLITNDTFQPEIMERSKTQDIVLGTSFLSINSKEETEHLENGNKYPNLESVNKVNGHSEETSQSPNRTEPHDSDCSVDLGISKSTEDLSPQKSGPVGSVVKSHSITNMEIGGLKIYDILSDNGPQQPSTTVKITSAVDGKNIVRSKSATLLYDQPLQVFTGSSSSSDLISGTKAIFKFDSNHNPEEPNIIRGPTSGPQSAPQIYGPPQYNIQYSSSAAVKDTLWHSKQNPQIDHASFPPQLLPRSESTENQSYAKHSANMNFSNHNNVRANTAYHLHQRLGPARHGEMWAISPNDRLIPAVTRSTIQRQSSVSSTASVNLGDPGSTRRAQIPEGDYLSYREFHSAGRTPPMMPGSQRPLSARTYSIDGPNASRPQSARPSINEIPERTMSVSDFNYSRTSPSKRPNARVGSEHSLLDPPGKSKVPRDWREQVLRHIEAKKLEKMPLSNGQMGQPLRPQASVARHPSREQLIDYLMLKVAHQPPYTQPHCSPRQGHELAKQEIRVRVEKDPELGFSISGGVGGRGNPFRPDDDGIFVTRVQPEGPASKLLQPGDKIIQANGYSFINIEHGQAVSLLKTFQNTVELIIVREVSS

SEQ ID NO: 24793 - protein, 1346 aa, Homo sapiens
MTTKRSLFVRLVPCRCLRGEEETVTTLDYSHCSLEQVPKEIFTFEKTLEELYLDANQIEELPKQLFNCQSLHKLSLPDNDLTTLPASIANLINLRELDVSKNGIQEFPENIKNCKVLTIVEASVNPISKLPDGFSQLLNLTQLYLNDAFLEFLPANFGRLTKLQILELRENQLKMLPKTMNRLTQLERLDLGSNEFTEVPEVLEQLSGLKEFWMDANRLTFIPGFIGSLKQLTYLDVSKNNIEMVEEGISTCENLQDLLLSSNSLQQLPETIGSLKNITTLKIDENQLMYLPDSIGGLISVEELDCSFNEVEALPSSIGQLTNLRTFAADHNYLQQLPPEIGSWKNITVLFLHSNKLETLPEEMGDMQKLKVINLSDNRLKNLPFSFTKLQQLTAMWLSDNQSKPLIPLQKETDSETQKMVLTNYMFPQQPRTEDVMFISDNESFNPSLWEEQRKQRAQVAFECDEDKDEREAPPREGNLKRYPTPYPDELKNMVKTVQTIVHRLKDEETNEDSGRDLKPHEDQQDINKDVGVKTSESTTTVKSKVDEREKYMIGNSVQKISEPEAEISPGSLPVTANMKASENLKHIVNHDDVFEESEELSSDEEMKMAEMRPPLIETSINQPKVVALSNNKKDDTKETDSLSDEVTHNSNQNNSNCSSPSRMSDSVSLNTDSSQDTSLCSPVKQTHIDINSKIRQEDENFNSLLQNGDILNSSTEEKFKAHDKKDFNLPEYDLNVEERLVLIEKSVDSTATADDTHKLDHINMNLNKLITNDTFQPEIMERSKTQDIVLGTSFLSINSKEETEHLENGNKYPNLESVNKVNGHSEETSQSPNRTEPHDSDCSVDLGISKSTEDLSPQKSGPVGSVVKSHSITNMEIGGLKIYDILSDNGPQQPSTTVKITSAVDGKNIVRSKSATLLYDQPLQVFTGSSSSSDLISGTKAIFKFDSNHNPEEPNIIRGPTSGPQSAPQIYGPPQYNIQYSSSAAVKDTLWHSKQNPQIDHASFPPQLLPRSESTENQSYAKHSANMNFSNHNNVRANTAYHLHQRLGPARHGEMWAISPNDRLIPAVTRSTIQRQSSVSSTASVNLGDPGSTRRAQIPEGDYLSYREFHSAGRTPPMMPGSQRPLSARTYSIDGPNASRPQSARPSINEIPERTMSVSDFNYSRTSPSKRPNARVGSEHSLLDPPGKSKVPRDWREQVLRHIEAKKLEKMPLSNGQMGQPLRPQANYSQIHHPPQASVARHPSREQLIDYLMLKVAHQPPYTQPHCSPRQGHELAKQEIRVRVEKDPELGFSISGGVGGRGNPFRPDDDANGYSFINIEHGQAVSLLKTFQNTVELIIVREVSS

SEQ ID NO: 24794 - protein, 1356 aa, Homo sapiens
MTTKRSLFVRLVPCRCLRGEEETVTTLDYSHCSLEQVPKEIFTFEKTLEELYLDANQIEELPKQLFNCQSLHKLSLPDNDLTTLPASIANLINLRELDVSKNGIQEFPENIKNCKVLTIVEASVNPISKLPDGFSQLLNLTQLYLNDAFLEFLPANFGRLTKLQILELRENQLKMLPKTMNRLTQLERLDLGSNEFTEVPEVLEQLSGLKEFWMDANRLTFIPGFIGSLKQLTYLDVSKNNIEMVEEGISTCENLQDLLLSSNSLQQLPETIGSLKNITTLKIDENQLMYLPDSIGGLISVEELDCSFNEVEALPSSIGQLTNLRTFAADHNYLQQLPPEIGSWKNITVLFLHSNKLETLPEEMGDMQKLKVINLSDNRLKNLPFSFTKLQQLTAMWLSDNQSKPLIPLQKETDSETQKMVLTNYMFPQQPRTEDVMFISDNESFNPSLWEEQRKQRAQVAFECDEDKDEREAPPREGNLKRYPTPYPDELKNMVKTVQTIVHRLKDEETNEDSGRDLKPHEDQQDINKDVGVKTSESTTTVKSKVDEREKYMIGNSVQKISEPEAEISPGSLPVTANMKASENLKHIVNHDDVFEESEELSSDEEMKMAEMRPPLIETSINQPKVVALSNNKKDDTKETDSLSDEVTHNSNQNNSNCSSPSRMSDSVSLNTDSSQDTSLCSPVKQTHIDINSKIRQEDENFNSLLQNGDILNSSTEEKFKAHDKKDFNLPEYDLNVEERLVLIEKSVDSTATADDTHKLDHINMNLNKLITNDTFQPEIMERSKTQDIVLGTSFLSINSKEETEHLENGNKYPNLESVNKVNGHSEETSQSPNRTEPHDSDCSVDLGISKSTEDLSPQKSGPVGSVVKSHSITNMEIGGLKIYDILSDNGPQQPSTTVKITSAVDGKNIVRSKSATLLYDQPLQVFTGSSSSSDLISGTKAIFKFDSNHNPEEPNIIRGPTSGPQSAPQIYGPPQYNIQYSSSAAVKDTLWHSKQNPQIDHASFPPQLLPRSESTENQSYAKHSANMNFSNHNNVRANTAYHLHQRLGPARHGEMWAISPNDRLIPAVTRSTIQRQSSVSSTASVNLGDPGSTRRAQIPEGDYLSYREFHSAGRTPPMMPGSQRPLSARTYSIDGPNASRPQSARPSINEIPERTMSVSDFNYSRTSPSKRPNARVGSEHSLLDPPGKSKVPRDWREQVLRHIEAKKLEKANYSQIHHPPQASVARHPSREQLIDYLMLKVAHQPPYTQPHCSPRQGHELAKQEIRVRVEKDPELGFSISGGVGGRGNPFRPDDDGIFVTRVQPEGPASKLLQPGDKIIQANGYSFINIEHGQAVSLLKTFQNTVELIIVREVSS

SEQ ID NO: 24795 - protein, 1340 aa, Homo sapiens
MTTKRSLFVRLVPCRCLRGEEETVTTLDYSHCSLEQVPKEIFTFEKTLEELYLDANQIEELPKQLFNCQSLHKLSLPDNDLTTLPASIANLINLRELDVSKNGIQEFPENIKNCKVLTIVEASVNPISKLPDGFSQLLNLTQLYLNDAFLEFLPANFGRLTKLQILELRENQLKMLPKTMNRLTQLERLDLGSNEFTEVPEVLEQLSGLKEFWMDANRLTFIPGFIGSLKQLTYLDVSKNNIEMVEEGISTCENLQDLLLSSNSLQQLPETIGSLKNITTLKIDENQLMYLPDSIGGLISVEELDCSFNEVEALPSSIGQLTNLRTFAADHNYLQQLPPEIGSWKNITVLFLHSNKLETLPEEMGDMQKLKVINLSDNRLKNLPFSFTKLQQLTAMWLSDNQSKPLIPLQKETDSETQKMVLTNYMFPQQPRTEDVMFISDNESFNPSLWEEQRKQRAQVAFECDEDKDEREAPPREGNLKRYPTPYPDELKNMVKTVQTIVHRLKDEETNEDSGRDLKPHEDQQDINKDVGVKTSESTTTVKSKVDEREKYMIGNSVQKISEPEAEISPGSLPVTANMKASENLKHIVNHDDVFEESEELSSDEEMKMAEMRPPLIETSINQPKVVALSNNKKDDTKETDSLSDEVTHNSNQNNSNCSSPSRMSDSVSLNTDSSQDTSLCSPVKQTHIDINSKIRQEDENFNSLLQNGDILNSSTEEKFKAHDKKDFNLPEYDLNVEERLVLIEKSVDSTATADDTHKLDHINMNLNKLITNDTFQPEIMERSKTQDIVLGTSFLSINSKEETEHLENGNKYPNLESVNKVNGHSEETSQSPNRTEPHDSDCSVDLGISKSTEDLSPQKSGPVGSVVKSHSITNMEIGGLKIYDILSDNGPQQPSTTVKITSAVDGKNIVRSKSATLLYDQPLQVFTGSSSSSDLISGTKAIFKFDSNHNPEEPNIIRGPTSGPQSAPQIYGPPQYNIQYSSSAAVKDTLWHSKQNPQIDHASFPPQLLPRSESTENQSYAKHSANMNFSNHNNVRANTAYHLHQRLGPARHGEMWAISPNDRLIPAVTRSTIQRQSSVSSTASVNLGDPGSTRRAQIPEGDYLSYREFHSAGRTPPMMPGSQRPLSARTYSIDGPNASRPQSARPSINEIPERTMSVSDFNYSRTSPSKRPNARVGSEHSLLDPPGKSKVPRDWREQVLRHIEAKKLEKMPLSNGQMGQPLRPQANYSQIHHPPQASVARHPSREQLIDYLMLKVAHQPPYTQPHCSPRQGHELAKQEGIFVTRVQPEGPASKLLQPGDKIIQANGYSFINIEHGQAVSLLKTFQNTVELIIVREVSS

SEQ ID NO: 24796 - protein, 1302 aa, Homo sapiens
MTTKRSLFVRLVPCRCLRGEEETVTTLDYSHCSLEQVPKEIFTFEKTLEELYLDANQIEELPKQLFNCQSLHKLSLPDNDLTTLPASIANLINLRELDVSKNGIQEFPENIKNCKVLTIVEASVNPISKLPDGFSQLLNLTQLYLNDAFLEFLPANFGRLTKLQILELRENQLKMLPKTMNRLTQLERLDLGSNEFTEVPEVLEQLSGLKEFWMDANRLTFIPGFIGSLKQLTYLDVSKNNIEMVEEGISTCENLQDLLLSSNSLQQLPETIGSLKNITTLKIDENQLMYLPDSIGGLISVEELDCSFNEVEALPSSIGQLTNLRTFAADHNYLQQLPPEIGSWKNITVLFLHSNKLETLPEEMGDMQKLKVINLSDNRLKNLPFSFTKLQQLTAMWLSDNQSKPLIPLQKETDSETQKMVLTNYMFPQQPRTEDVMFISDNESFNPSLWEEQRKQRAQVAFECDEDKDEREAPPREGNLKRYPTPYPDELKNMVKTVQTIVHRLKDEETNEDSGRDLKPHEDQQDINKDVGVKTSESTTTVKSKVDEREKYMIGNSVQKISEPEAEISPGSLPVTANMKASENLKHIVNHDDVFEESEELSSDEEMKMAEMRPPLIETSINQPKVVALSNNKKDDTKETDSLSDEVTHNSNQNNSNCSSPSRMSDSVSLNTDSSQDTSLCSPVKQTHIDINSKIRQEDENFNSLLQNGDILNSSTEEKFKAHDKKDFNLPEYDLNVEERLVLIEKSVDSTATADDTHKLDHINMNLNKLITNDTFQPEIMERSKTQDIVLGTSFLSINSKEETEHLENGNKYPNLESVNKVNGHSEETSQSPNRTEPHDSDCSVDLGISKSTEDLSPQKSGPVGSVVKSHSITNMEIGGLKIYDILSDNGPQQPSTTVKITSAVDGKNIVRSKSATLLYDQPLQVFTGSSSSSDLISGTKAIFKFDSNHNPEEPNIIRGPTSGPQSAPQIYGPPQYNIQYSSSAAVKDTLWHSKQNPQIDHASFPPQLLPRSESTENQSYAKHSANMNFSNHNNVRANTAYHLHQRLGPARHGEMWAISPNDRLIPAVTRSTIQRQSSVSSTASVNLGDPGSTRRAQIPEGDYLSYREFHSAGRTPPMMPGSQRPLSARTYSIDGPNASRPQSARPSINEIPERTMSVSDFNYSRTSPSKRPNARVGSEHSLLDPPGKSKVPRDWREQVLRHIEAKKLEKIRVRVEKDPELGFSISGGVGGRGNPFRPDDDGIFVTRVQPEGPASKLLQPGDKIIQANGYSFINIEHGQAVSLLKTFQNTVELIIVREVSS

SEQ ID NO: 24797 - protein, 1419 aa, Homo sapiens
MTTKRSLFVRLVPCRCLRGEEETVTTLDYSHCSLEQVPKEIFTFEKTLEELYLDANQIEELPKQLFNCQSLHKLSLPDNDLTTLPASIANLINLRELDVSKNGIQEFPENIKNCKVLTIVEASVNPISKLPDGFSQLLNLTQLYLNDAFLEFLPANFGRLTKLQILELRENQLKMLPKTMNRLTQLERLDLGSNEFTEVPEVLEQLSGLKEFWMDANRLTFIPGFIGSLKQLTYLDVSKNNIEMVEEGISTCENLQDLLLSSNSLQQLPETIGSLKNITTLKIDENQLMYLPDSIGGLISVEELDCSFNEVEALPSSIGQLTNLRTFAADHNYLQQLPPEIGSWKNITVLFLHSNKLETLPEEMGDMQKLKVINLSDNRLKNLPFSFTKLQQLTAMWLSDNQSKPLIPLQKETDSETQKMVLTNYMFPQQPRTEDVMFISDNESFNPSLWEEQRKQRAQVAFECDEDKDEREAPPREGNLKRYPTPYPDELKNMVKTVQTIVHRLKDEETNEDSGRDLKPHEDQQDINKDVGVKTSESTTTVKSKVDEREKYMIGNSVQKISEPEAEISPGSLPVTANMKASENLKHIVNHDDVFEESEELSSDEEMKMAEMRPPLIETSINQPKVVALSNNKKDDTKETDSLSDEVTHNSNQNNSNCSSPSRMSDSVSLNTDSSQDTSLCSPVKQTHIDINSKIRQEDENFNSLLQNGDILNSSTEEKFKAHDKKDFNLPEYDLNVEERLVLIEKSVDSTATADDTHKLDHINMNLNKLITNDTFQPEIMERSKTQDIVLGTSFLSINSKEETEHLENGNKYPNLESVNKVNGHSEETSQSPNRTEPHDSDCSVDLGISKSTEDLSPQKSGPVGSVVKSHSITNMEIGGLKIYDILSDNGPQQPSTTVKITSAVDGKNIVRSKSATLLYDQPLQVFTGSSSSSDLISGTKAIFKFDSNHNPEEPNIIRGPTSGPQSAPQIYGPPQYNIQYSSSAAVKDTLWHSKQNPQIDHASFPPQLLPRSESTENQSYAKHSANMNFSNHNNVRANTAYHLHQRLGPARHGEMWAISPNDRLIPAVTRSTIQRQSSVSSTASVNLGDPGSTRRAQIPEGDYLSYREFHSAGRTPPMMPGSQRPLSARTYSIDGPNASRPQSARPSINEIPERTMSVSDFNYSRTSPSKRPNARVGSEHSLLDPPGKSKVPRDWREQVLRHIEAKKLEKSMLSRSFNSNFTTVSSFHCGSSRDLHGSQGSLALSVADRRGSGGHIFRMPLSNGQMGQPLRPQANYSQIHHPPQASVARHPSREQLIDYLMLKVAHQPPYTQPHCSPRQGHELAKQEIRVRVEKDPELGFSISGGVGGRGNPFRPDDDGIFVTRVQPEGPASKLLQPGDKIIQANGYSFINIEHGQAVSLLKTFQNTVELIIVREVSS

SEQ ID NO: 24798 - protein, 1367 aa, Homo sapiens
MTTKRSLFVRLVPCRCLRGEEETVTTLDYSHCSLEQVPKEIFTFEKTLEELYLDANQIEELPKQLFNCQSLHKLSLPDNDLTTLPASIANLINLRELDVSKNGIQEFPENIKNCKVLTIVEASVNPISKLPDGFSQLLNLTQLYLNDAFLEFLPANFGRLTKLQILELRENQLKMLPKTMNRLTQLERLDLGSNEFTEVPEVLEQLSGLKEFWMDANRLTFIPGFIGSLKQLTYLDVSKNNIEMVEEGISTCENLQDLLLSSNSLQQLPETIGSLKNITTLKIDENQLMYLPDSIGGLISVEELDCSFNEVEALPSSIGQLTNLRTFAADHNYLQQLPPEIGSWKNITVLFLHSNKLETLPEEMGDMQKLKVINLSDNRLKNLPFSFTKLQQLTAMWLSDNQSKPLIPLQKETDSETQKMVLTNYMFPQQPRTEDVMFISDNESFNPSLWEEQRKQRAQVAFECDEDKDEREAPPREGNLKRYPTPYPDELKNMVKTVQTIVHRLKDEETNEDSGRDLKPHEDQQDINKDTSESTTTVKSKVDEREKYMIGNSVQKISEPEAEISPGSLPVTANMKASENLKHIVNHDDVFEESEELSSDEEMKMAEMRPPLIETSINQPKVVALSNNKKDDTKETDSLSDEVTHNSNQNNSNCSSPSRMSDSVSLNTDSSQDTSLCSPVKQTHIDINSKIRQEDENFNSLLQNGDILNSSTEEKFKAHDKKDFNLPEYDLNVEERLVLIEKSVDSTATADDTHKLDHINMNLNKLITNDTFQPEIMERSKTQDIVLGTSFLSINSKEETEHLENGNKYPNLESVNKVNGHSEETSQSPNRTEPHDSDCSVDLGISKSTEDLSPQKSGPVGSVVKSHSITNMEIGGLKIYDILSDNGPQQPSTTVKITSAVDGKNIVRSKSATLLYDQPLQVFTGSSSSSDLISGTKAIFKFDSNHNPEEPNIIRGPTSGPQSAPQIYGPPQYNIQYSSSAAVKDTLWHSKQNPQIDHASFPPQLLPRSESTENQSYAKHSANMNFSNHNNVRANTAYHLHQRLGPARHGEMWAISPNDRLIPAVTRSTIQRQSSVSSTASVNLGDPGSTRRAQIPEGDYLSYREFHSAGRTPPMMPGSQRPLSARTYSIDGPNASRPQSARPSINEIPERTMSVSDFNYSRTSPSKRPNARVGSEHSLLDPPGKSKVPRDWREQVLRHIEAKKLEKMPLSNGQMGQPLRPQANYSQIHHPPQASVARHPSREQLIDYLMLKVAHQPPYTQPHCSPRQGHELAKQEIRVRVEKDPELGFSISGGVGGRGNPFRPDDDGIFVTRVQPEGPASKLLQPGDKIIQANGYSFINIEHGQAVSLLKTFQNTVELIIVREVSS

SEQ ID NO: 24799 - protein, 1104 aa, Homo sapiens
MERSPGEGPSPSPMDQPSAPSDPTDQPPAAHAKPDPGSGGQPAGPGAAGEALAVLTSFGRRLLVLIPVYLAGAVGLSVGFVLFGLALYLGWRRVRDEKERSLRAARQLLDDEEQLTAKTLYMSHRELPAWVSFPDVEKAEWLNKIVAQVWPFLGQYMEKLLAETVAPAVRGSNPHLQTFTFTRVELGEKPLRIIGVKVHPGQRKEQILLDLNISYVGDVQIDVEVKKYFCKAGVKGMQLHGVLRVILEPLIGDLPFVGAVSMFFIRRPTLDINWTGMTNLLDIPGLSSLSDTMIMDSIAAFLVLPNRLLVPLVPDLQDVAQLRSPLPRGIIRIHLLAARGLSSKDKYVKGLIEGKSDPYALVRLGTQTFCSRVIDEELNPQWGETYEVMVHEVPGQEIEVEVFDKDPDKDDFLGRMKLDVGKVLQASVLDDWFPLQGGQGQVHLRLEWLSLLSDAEKLEQVLQWNWGVSSRPDPPSAAILVVYLDRAQDLPLKKGNKEPNPMVQLSIQDVTQESKAVYSTNCPVWEEAFRFFLQDPQSQELDVQVKDDSRALTLGALTLPLARLLTAPELILDQWFQLSSSGPNSRLYMKLVMRILYLDSSEICFPTVPGCPGAWDVDSENPQRGSSVDAPPRPCHTTPDSQFGTEHVLRIHVLEAQDLIAKDRFLGGLVKGKSDPYVKLKLAGRSFRSHVVREDLNPRWNEVFEVIVTSVPGQELEVEVFDKDLDKDDFLGRCKVRLTTVLNSGFLDEWLTLEDVPSGRLHLRLERLTPRPTAAELEEVLQVNSLIQTQKSAELAAALLSIYMERAEDLPLRKGTKHLSPYATLTVGDSSHKTKTISQTSAPVWDESASFLIRKPHTESLELQVRGEGTGVLGSLSLPLSELLVADQLCLDRWFTLSSGQGQVLLRAQLGILVSQHSGVEAHSHSYSHSSSSLSEEPELSGGPPHITSSAPELRQRLTHVDSPLEAPAGPLGQVKLTLWYYSEERKLVSIVHGCRSLRQNGRDPPDPYVSLLLLPDKNRGTKRRTSQKKRTLSPEFNERFEWELPLDEAQRRKLDVSVKSNSSFMSRERELLGKVQLDLAETDLSQGVARWYDLMDNKDKGSS

SEQ ID NO: 24800 - protein, 1114 aa, Homo sapiens
MERSPGEGPSPSPMDQPSAPSDPTDQPPAAHAKPDPGSGGQPAGPGAAGEALAVLTSFGRRLLVLIPVYLAGAVGLSVGFVLFGLALYLGWRRVRDEKERSLRAARQLLDDEEQLTAKTLYMSHRELPAWVSFPDVEKAEWLNKIVAQVWPFLGQYMEKLLAETVAPAVRGSNPHLQTFTFTRVELGEKPLRIIGVKVHPGQRKEQILLDLNISYVGDVQIDVEVKKYFCKAGVKGMQLHGVLRVILEPLIGDLPFVGAVSMFFIRRPTLDINWTGMTNLLDIPGLSSLSDTMIMDSIAAFLVLPNRLLVPLVPDLQDVAQLRSPLPRGIIRIHLLAARGLSSKDKYVKGLIEGKSDPYALVRLGTQTFCSRVIDEELNPQWGETYEVMVHEVPGQEIEVEVFDKDPDKDDFLGRMKLDVGKVLQASVLDDWFPLQGGQGQVHLRLEWLSLLSDAEKLEQVLQWNWGVSSRPDPPSAAILVVYLDRAQDLPMVTSELYPPQLKKGNKEPNPMVQLSIQDVTQESKAVYSTNCPVWEEAFRFFLQDPQSQELDVQVKDDSRALTLGALTLPLARLLTAPELILDQWFQLSSSGPNSRLYMKLVMRILYLDSSEICFPTVPGCPGAWDVDSENPQRGSSVDAPPRPCHTTPDSQFGTEHVLRIHVLEAQDLIAKDRFLGGLVKGKSDPYVKLKLAGRSFRSHVVREDLNPRWNEVFEVIVTSVPGQELEVEVFDKDLDKDDFLGRCKVRLTTVLNSGFLDEWLTLEDVPSGRLHLRLERLTPRPTAAELEEVLQVNSLIQTQKSAELAAALLSIYMERAEDLPLRKGTKHLSPYATLTVGDSSHKTKTISQTSAPVWDESASFLIRKPHTESLELQVRGEGTGVLGSLSLPLSELLVADQLCLDRWFTLSSGQGQVLLRAQLGILVSQHSGVEAHSHSYSHSSSSLSEEPELSGGPPHITSSAPELRQRLTHVDSPLEAPAGPLGQVKLTLWYYSEERKLVSIVHGCRSLRQNGRDPPDPYVSLLLLPDKNRGTKRRTSQKKRTLSPEFNERFEWELPLDEAQRRKLDVSVKSNSSFMSRERELLGKVQLDLAETDLSQGVARWYDLMDNKDKGSS

SEQ ID NO: 24801 - protein, 366 aa, Homo sapiens
MPMISVLGKMFLWQREGPGGRWTCQTSRRVSSDPAWAVEWIELPRGLSLSSLGSARTLRGWSRSSRPSSVDSQDLPEVNVGDTVAMLPKSRRALTIQEIAALARSSLHGISQVVKDHVTKPTAMAQGRVAHLIEWKGWSKPSDSPAALESAFSSYSDLSEGEQEARFAAGVAEQFAIAEAKLRAWSSVDGEDSTDDSYDEDFAGGMDTDMAGQLPLGPHLQDLFTGHRFSRPVRQGSVEPESDCSQTVSPDTLCSSLCSLEDGLLGSPARLASQLLGDELLLAKLPPSRESAFRSLGPLEAQDSLYNSPLTESCLSPAEEEPAPCKDCQPLCPPLTGSWERQRQASDLASSGVVSLDEDEAEPEEQ

SEQ ID NO: 24802 - protein, 335 aa, Homo sapiens
MFLATLSFLLPFAHPFGTVSCEYMLGSPLSSLAQVNLSPFSHPKVHMDPNYCHPSTSLHLCSLAWSFTRLLHPPLSPGISQVVKDHVTKPTAMAQGRVAHLIEWKGWSKPSDSPAALESAFSSYSDLSEGEQEARFAAGVAEQFAIAEAKLRAWSSVDGEDSTDDSYDEDFAGGMDTDMAGQLPLGPHLQDLFTGHRFSRPVRQGSVEPESDCSQTVSPDTLCSSLCSLEDGLLGSPARLASQLLGDELLLAKLPPSRESAFRSLGPLEAQDSLYNSPLTESCLSPAEEEPAPCKDCQPLCPPLTGSWERQRQASDLASSGVVSLDEDEAEPEEQ

SEQ ID NO: 24803 - protein, 281 aa, Homo sapiens
MLPKSRRALTIQEIAALARSSLHGISQVVKDHVTKPTAMAQGRVAHLIEWKGWSKPSDSPAALESAFSSYSDLSEGEQEARFAAGVAEQFAIAEAKLRAWSSVDGEDSTDDSYDEDFAGGMDTDMAGQLPLGPHLQDLFTGHRFSRPVRQGSVEPESDCSQTVSPDTLCSSLCSLEDGLLGSPARLASQLLGDELLLAKLPPSRESAFRSLGPLEAQDSLYNSPLTESCLSPAEEEPAPCKDCQPLCPPLTGSWERQRQASDLASSGVVSLDEDEAEPEEQ

SEQ ID NO: 24804 - protein, 155 aa, Homo sapiens
MGLRAGSRCRADHLAQPQPQGHLAPVLRCGECWRARGLPGGCCLHTEGGCSLGAQAGWRTAGWEARGRRDLGLETTSAHSRSLLHLSSWRRPDVGEAAGAELLQRAPLQQPDPAQAAVEGGLLARLPRPQDQGCGQHRPHSPRLVDIALPGGGWT

SEQ ID NO: 24805 - protein, 254 aa, Homo sapiens
MAEAVLRVARRQLSQRGGSGAPILLRQMFEPVSCTFTYLLGDRESREAVLIDPVLETAPRDAQLIKELGLRLLYAVNTHCHADHITGSGLLRSLLPGCQSVISRLSGAQADLHIEDGDSIRFGRFALETRASPGHTPGCVTFVLNDHSMAFTGDALLIRGCGRTDFQQGCAKTLYHSVHEKIFTLPGDCLIYPAHDYHGFTVSTVEEERTLNPRLTLSCEEFVKIMGNLNLPKPQQIDFAVPANMRCGVQTPTA

SEQ ID NO: 24806 - protein, 810 aa, Homo sapiens
MVTNKMTAAFRNPSGKQVATDKVAEKLSSTLSWVKNTVSHTVSQMASQVASPSTSLHTTSSSTTLSTPALSPSSPSQLSPDDLELLAKLEEQNRLLETDSKSLRSVNGSRRNSGSSLVSSSSASSNLSHLEEDSWILWGRIVNEWEDVRKKKEKQVKELVHKGIPHHFRAIVWQLLCSAQSMPIKDQYSELLKMTSPCEKLIRRDIARTYPEHNFFKEKDSLGQEVLFNVMKAYSLVDREVGYCQGSAFIVGLLLMQMPEEEAFCVFVKLMQDYRLRELFKPSMAELGLCMYQFECMIQEHLPELFVHFQSQSFHTSMYASSWFLTIFLTTFPLPIATRIFDIFMSEGLEIVFRVGLALLQMNQAELMQLDMEGMLQHFQKVIPHQFDGVPDKLIQAAYQVKYNSKKMKKLEKEYTTIKTKEMEEQVEIKRLRTENRLLKQRIETLEKHKCSSNYNEDFVLQLEKELVQARLSEAESQCALKEMQDKVLDIEKRNNSLPDENNIARLQEELIAVKLREAEAIMGLKELRQQVKDLEEHWQRHLARTTGRWKDPPKKNAMNELQDELMTIRLREAETQAEIREIKQRMMEMETQNQINSNHLRRAEQEVISLQEKVQYLSAQNKGLLTQLSEAKRKQAEIECKNKEEVMAVRLREADSIAAVAELRQHIAELEIQKEEGKLQGQLNKSDSNQYIGELKDQIAELNHELRCLKGQRGFSGQPPFDGIHIVNHLIGDDESFHSSDEDFIDNSLQETGVGFPLHGKSGSMSLDPAVADGSESETEDSVLETRESNQVVQKERPPRRRESYSTTV

SEQ ID NO: 24807 - protein, 821 aa, Homo sapiens
MVTNKMTAAFRNPSGKQVATDKVAEKLSSTLSWVKNTVSHTVSQMASQVASPSTSLHTTSSSTTLSTPALSPSSPSQLSPDDLELLAKLEEQNRLLETDSKSLRSVNGSRRNSGSSLVSSSSASSNLSHLEEDSWILWGRIVNEWEDVRKKKEKQVKELVHKGIPHHFRAIVWQLLCSAQSMPIKDQYSELLKMTSPCEKLIRRDIARTYPEHNFFKEKDSLGQEVLFNVMKAYSLVDREVGYCQGSAFIVGLLLMQMPEEEAFCVFVKLMQDYRLRELFKPSMAELGLCMYQFECMIQEHLPELFVHFQSQSFHTSMYASSWFLTIFLTTFPLPIATRIFDIFMSEGLEIVFRVGLALLQMNQAELMQLDMEGMLQHFQKVIPHQFDGVPDKLIQAAYQVKYNSKKMKKLEKEYTTIKTKEMEEQVEIKRLRTENRLLKQRIETLEKESASLADRLIQHKCSSNYNEDFVLQLEKELVQARLSEAESQCALKEMQDKVLDIEKRNNSLPDENNIARLQEELIAVKLREAEAIMGLKELRQQVKDLEEHWQRHLARTTGRWKDPPKKNAMNELQDELMTIRLREAETQAEIREIKQRMMEMETQNQINSNHLRRAEQEVISLQEKVQYLSAQNKGLLTQLSEAKRKQAEIECKNKEEVMAVRLREADSIAAVAELRQHIAELEIQKEEGKLQGQLNKSDSNQYIGELKDQIAELNHELRCLKGQRGFSGQPPFDGIHIVNHLIGDDESFHSSDEDFIDNSLQETGVGFPLHGKSGSMSLDPAVADGSESETEDSVLETRESNQVVQKERPPRRRESYSTTV

SEQ ID NO: 24808 - protein, 332 aa, Homo sapiens
MDSTSSLHGSSLHRPSTEQTRTDFSWDGINLSMEDTTSILPKLKRNSNAYGIGALAKSSFSGISRSMKDHVTKPTAMGQGRVAHMIEWQGWGKTPAVQPQHSHESVRRDTDAYSDLSDGEKEARFLAGVMEQFAISEATLMAWSSMDGEDMSVNSTQEPLGCNYSDNYQELMDSQDALAQAPMDGWPHSYVSQGMYCLGSSDAWEASDQSLIASPATGSYLGPAFDDSQPSLHEMGPSQPASGYSALEPPPLLGGDTDWAPGVGAVDLARGPAEEEKRPLAPEEEEDAGCRDLESLSPREDPEMSTALSRKVSDVTSSGVQSFDEEEGEANN

SEQ ID NO: 24809 - protein, 348 aa, Homo sapiens
MGCIGSRTVGNEVIAVDWKGLKDVDQINMDSTSSLHGSSLHRPSTELSMEDTTSILPKLKRNSNAYGIGALAKSSFSGISRSMKDHVTKPTAMGQGRVAHMIEWQGWGKTPAVQPQHSHESVRRDTDAYSDLSDGEKEARFLAGVMEQFAISEATLMAWSSMDGEDMSVNSTQEPLGCNYSDNYQELMDSQDALAQAPMDGWPHSYVSQGMYCLGSSDAWEASDQSLIASPATGSYLGPAFDDSQPSLHEMGPSQPASGYSALEPPPLLGGDTDWAPGVGAVDLARGPAEEEKRPLAPEEEEDAGCRDLESLSPREDPEMSTALSRKVSDVTSSGVQSFDEEEGEANN

SEQ ID NO: 24810 - protein, 360 aa, Homo sapiens
MGCIGSRTVGNEVIAVDWKGLKDVDQINMDSTSSLHGSSLHRPSTEQTRTDFSWDGINLSMEDTTSILPKLKRNSNAYGIGALAKSSFSGISRSMKDHVTKPTAMGQGRVAHMIEWQGWGKTPAVQPQHSHESVRRDTDAYSDLSDGEKEARFLAGVMEQFAISEATLMAWSSMDGEDMSVNSTQEPLGCNYSDNYQELMDSQDALAQAPMDGWPHSYVSQGMYCLGSSDAWEASDQSLIASPATGSYLGPAFDDSQPSLHEMGPSQPASGYSALEPPPLLGGDTDWAPGVGAVDLARGPAEEEKRPLAPEEEEDAGCRDLESLSPREDPEMSTALSRKVSDVTSSGVQSFDEEEGEANN

SEQ ID NO: 24811 - protein, 468 aa, Homo sapiens
MGRGWGFLFGLLGAVWLLSSGHGEEQPPETAAQRCFCQVSGYLDDCTCDVETIDRFNNYRLFPRLQKLLESDYFRYYKVNLKRPCPFWNDISQCGRRDCAVKPCQSDEVPDGIKSASYKYSEEANNLIEECEQAERLGAVDESLSEETQKAVLQWTKHDDSSDNFCEADDIQSPEAEYVDLLLNPERYTGYKGPDAWKIWNVIYEENCFKPQTIKRPLNPLASGQGTSEENTFYSWLEGLCVEKRAFYRLISGLHASINVHLSARYLLQETWLEKKWGHNITEFQQRFDGILTEGEGPRRLKNLYFLYLIELRALSKVLPFFERPDFQLFTGNKIQDEENKMLLLEILHEIKSFPLHFDENSFFAGDKKEAHKLKEDFRLHFRNISRIMDCVGCFKCRLWGKLQTQGLGTALKILFSEKLIANMPESGPSYEFHLTRQEIVSLFNAFGRISTSVKELENFRNLLQNIH

SEQ ID NO: 24812 - protein, 407 aa, Homo sapiens
MESRKDMVVFLDGGQLGTLVGKRVSNLSEAVGSPLPEPPEKMVPRGCLSPRAVPPATRERGGGGPEEEPVDGLAGSAAGPGAEPQVAGAAMLGPGPPAPSVDSLSGQGQPSSSDTESDFYEEIEVSCTPDCATGNAEYQHSKGSGSEALVGSPNGGSETPKSNGGSGGGGSQGTLACSASDQMRRYRTAFTREQIARLEKEFYRENYVSRPRRCELAAALNLPETTIKVWFQNRRMKDKRQRLAMTWPHPADPAFYTYMMSHAAAAGGLPYPFPSHLPLPYYSPVGLGAASAASAAASPFSGSLRPLDTFRVLSQPYPRPELLCAFRHPPLYPGPAHGLGASAGGPCSCLACHSGPANGLAPRAAAASDFTCASTSRSDSFLTFAPSVLSKASSVALDQREEVPLTR

SEQ ID NO: 24813 - protein, 225 aa, Homo sapiens
MRRYRTAFTREQIARLEKEFYRENYVSRPRRCELAAALNLPETTIKVWFQNRRMKDKRQRLAMTWPHPADPAFYTYMMSHAAAAGGLPYPFPSHLPLPYYSPVGLGAASAASAAASPFSGSLRPLDTFRVLSQPYPRPELLCAFRHPPLYPGPAHGLGASAGGPCSCLACHSGPANGLAPRAAAASDFTCASTSRSDSFLTFAPSVLSKASSVALDQREEVPLTR

SEQ ID NO: 24814 - protein, 132 aa, Homo sapiens
MCSAGELLRGGDGGERDEDGDALAEREAAGTGWDPGASPRRRGQRPKESEQDVEDSQNHTGEPVGDDYKKMGTLFGELNKNLINMGFTRMYFGERIVEPVIVIFFWVMLWFLGLQALGLVAVLCLVIIYVQQ

SEQ ID NO: 24815 - protein, 341 aa, Homo sapiens
MQEGELAISPISPVAAMPPLGTHVQARCEAQINLLGEGGICKLPGRLRIQPALWSREDVLHWLRWAEQEYSLPCTAEHGFEMNGRALCILTKDDFRHRAPSSGDVLYELLQYIKTQRRALVCGPFFGGIFRLKTPTQHSPVPPEEVTGPSQMDTRRGHLLQPPDPGLTSNFGHLDDPGLARWTPGKEESLNLCHCAELGCRTQGVCSFPAMPQAPIDGRIADCRLLWDYVYQLLLDTRYEPYIKWEDKDAKIFRVVDPNGLARLWGNHKNRVNMTYEKMSRALRHYYKLNIIKKEPGQKLLFRFLKTPGKMVQDKHSHLEPLESQEQDRIEFKDKRPEISP

SEQ ID NO: 24816 - protein, 282 aa, Homo sapiens
MHRGARVRDERTRPLHPHQGRLPAPCAQLRSGKRTGFPLSGNPGDVLYELLQYIKTQRRALVCGPFFGGIFRLKTPTQHSPVPPEEVTGPSQMDTRRGHLLQPPDPGLTSNFGHLDDPGLARWTPGKEESLNLCHCAELGCRTQGVCSFPAMPQAPIDGRIADCRLLWDYVYQLLLDTRYEPYIKWEDKDAKIFRVVDPNGLARLWGNHKNRVNMTYEKMSRALRHYYKLNIIKKEPGQKLLFRFLKTPGKMVQDKHSHLEPLESQEQDRIEFKDKRPEISP

SEQ ID NO: 24817 - protein, 260 aa, Homo sapiens
MNGRALCILTKDDFRHRAPSSGDVLYELLQYIKTQRRALVCGPFFGGIFRLKTPTQHSPVPPEEVTGPSQMDTRRGHLLQPPDPGLTSNFGHLDDPGLARWTPGKEESLNLCHCAELGCRTQGVCSFPAMPQAPIDGRIADCRLLWDYVYQLLLDTRYEPYIKWEDKDAKIFRVVDPNGLARLWGNHKNRVNMTYEKMSRALRHYYKLNIIKKEPGQKLLFRFLKTPGKMVQDKHSHLEPLESQEQDRIEFKDKRPEISP

SEQ ID NO: 24818 - protein, 286 aa, Homo sapiens
MQEGELAISPISPVAAMPPLGTHVQARCEAQINLLGEGGICKLPGRLRDVLYELLQYIKTQRRALVCGPFFGGIFRLKTPTQHSPVPPEEVTGPSQMDTRRGHLLQPPDPGLTSNFGHLDDPGLARWTPGKEESLNLCHCAELGCRTQGVCSFPAMPQAPIDGRIADCRLLWDYVYQLLLDTRYEPYIKWEDKDAKIFRVVDPNGLARLWGNHKNRVNMTYEKMSRALRHYYKLNIIKKEPGQKLLFRFLKTPGKMVQDKHSHLEPLESQEQDRIEFKDKRPEISP

SEQ ID NO: 24819 - protein, 317 aa, Homo sapiens
MQEGELAISPISPVAAMPPLGTHVQARCEAQINLLGEGGICKLPGRLRIQPALWSREDVLHWLRWAEQEYSLPCTAEHGFEMNGRALCILTKDDFRHRAPSSGDVLYELLQYIKTQRRALVCGPFFGGIFRLKTPTQHSPVPPEEVTGPSQMDTRRGHLLQPPDPGLTSNFGHLDDPGLARWTPGKEESLNLCHCAELGCRTQGVCSFPAMPQAPIDGRIADCRLLWDYVYQLLLDTRYEPYIKWEDKDAKIFRVVDPNGLARLWGNHKNRVNMTYEKMSRALRHYYKLNIIKKEPGQKLLFRNGLQLIFIFIWSFQ

SEQ ID NO: 24820 - protein, 262 aa, Homo sapiens
MQEGELAISPISPVAAMPPLGTHVQARCEAQINLLGEGGICKLPGRLRDVLYELLQYIKTQRRALVCGPFFGGIFRLKTPTQHSPVPPEEVTGPSQMDTRRGHLLQPPDPGLTSNFGHLDDPGLARWTPGKEESLNLCHCAELGCRTQGVCSFPAMPQAPIDGRIADCRLLWDYVYQLLLDTRYEPYIKWEDKDAKIFRVVDPNGLARLWGNHKNRVNMTYEKMSRALRHYYKLNIIKKEPGQKLLFRNGLQLIFIFIWSFQ

SEQ ID NO: 24821 - protein, 264 aa, Homo sapiens
MQEGELAISPISPVAAMPPLGTHVQARCEAQINLLGEGGICKLPGRLRIQPALWSREDVLHWLRWAEQEYSLPCTAEHGFEMNGRALCILTKDDFRHRAPSSGDVLYELLQYIKTQRRALVCGPFFGGIFRLKTPTQHSPVPPEDCRLLWDYVYQLLLDTRYEPYIKWEDKDAKIFRVVDPNGLARLWGNHKNRVNMTYEKMSRALRHYYKLNIIKKEPGQKLLFRFLKTPGKMVQDKHSHLEPLESQEQDRIEFKDKRPEISP

SEQ ID NO: 24822 - protein, 190 aa, Homo sapiens
MDTRRGHLLQPPDPGLTSNFGHLDDPGLARWTPGKEESLNLCHCAELGCRTQGVCSFPAMPQAPIDGRIADCRLLWDYVYQLLLDTRYEPYIKWEDKDAKIFRVVDPNGLARLWGNHKNRVNMTYEKMSRALRHYYKLNIIKKEPGQKLLFRFLKTPGKMVQDKHSHLEPLESQEQDRIEFKDKRPEISP

SEQ ID NO: 24823 - protein, 515 aa, Homo sapiens
MSTIAAFYGGKSILITGATGFLGKVLMEKLFRTSPDLKVIYILVRPKAGQTLQQRVFQILDSKLFEKVKEVCPNVHEKIRAIYADLNQNDFAISKEDMQELLSCTNIIFHCAATVRFDDTLRHAVQLNVTATRQLLLMASQMPKLEAFIHISTAYSNCNLKHIDEVIYPCPVEPKKIIDSLEWLDDAIIDEITPKLIRDWPNIYTYTKALGEMVVQQESRNLNIAIIRPSIVGATWQEPFPGWVDNINGPNGIIIATGKGFLRAIKATPMAVADVIPVDTVVNLMLAVGWYTAVHRPKSTLVYHITSGNMNPCNWHKMGVQVLATFEKIPFERPFRRPNANFTSNSFTSQYWNAVSHRAPAIIYDCYLRLTGRKPRMTKLMNRLLRTVSMLEYFINRSWEWSTYNTEMLMSELSPEDQRVFNFDVRQLNWLEYIENYVLGVKKYLLKEDMAGIPKAKQRLKRLRNIHYLFNTALFLIAWRLLIARSQMARNVWFFIVSFCYKFLSYFRASSTLKV

SEQ ID NO: 24824 - protein, 418 aa, Homo sapiens
MQELLSCTNIIFHCAATVRFDDTLRHAVQLNVTATRQLLLMASQMPKLEAFIHISTAYSNCNLKHIDEVIYPCPVEPKKIIDSLEWLDDAIIDEITPKLIRDWPNIYTYTKALGEMVVQQESRNLNIAIIRPSIVGATWQEPFPGWVDNINGPNGIIIATGKGFLRAIKATPMAVADVIPVDTVVNLMLAVGWYTAVHRPKSTLVYHITSGNMNPCNWHKMGVQVLATFEKIPFERPFRRPNANFTSNSFTSQYWNAVSHRAPAIIYDCYLRLTGRKPRMTKLMNRLLRTVSMLEYFINRSWEWSTYNTEMLMSELSPEDQRVFNFDVRQLNWLEYIENYVLGVKKYLLKEDMAGIPKAKQRLKRLRNIHYLFNTALFLIAWRLLIARSQMARNVWFFIVSFCYKFLSYFRASSTLKV

SEQ ID NO: 24825 - protein, 215 aa, Homo sapiens
MLEKRLLRMGMRLQLLRDRRISSRGPGLHRAKADPQQQKRLTTGLMTQAETQKEAQQRQAAMRKTALWHTGHLQPKTHTHTGMHTQTHRERERNTQRLRDRERRENGRHTHRHTHTLTHTHTHRDTHTASYRRGIETHTTRQPLRLRGSAHDENDPRVREQPRGTQADLSSRSRMAARLLGRLTPTNTVRAGLRLGSRAASPDPAWGFLIVVGPL

SEQ ID NO: 24826 - protein, 127 aa, Homo sapiens
MSFSGKYQLQSQENFEAFMKAIGLPEELIQKGKDIKGVSEIVQNGKHFKFTITAGSKVIQNEFTVGEECELETMTGEKVKTVVQLEGDNKLVTTFKNIKSVTELNGDIITNTMTLGDIVFKRISKRI

SEQ ID NO: 24827 - protein, 1005 aa, Homo sapiens
MEKQRALVAAKDGDVATLERLLEAGALGPGITDALGAGLVHHATRAGHLDCVKFLVQRAQLPGNQRAHNGATPAHDAAATGSLAELCWLVREGGCGLQDQDASGVSPLHLAARFGHPVLVEWLLHEGHSATLETREGARPLHHAAVSGDLTCLKLLTAAHGSSVNRRTRSGASPLYLACQEGHLHLAQFLVKDCGADVHLRALDGMSALHAAAARGHYSLVVWLVTFTDIGLTARDNEGATALHFAARGGHTPILDRLLLMGTPILRDSWGGTPLHDAAENGQMECCQTLVSHHVDPSLRDEDGYTAADLAEYHGHRDCAQYLREVAQPVPLLMTPPPPPFPPPPLLATRRSLEDGRRGGPGPGNPSPMSLSPAWPGHPDQPLPREQMTSPAPPRIITSATADPEGTETALAGDTSDGLAALQLDGLPSGDIDGLVPTRDERGQPIPEWKRQVMVRKLQARLGAESSAEAQDNGGSSGPTEQAAWRYSQTHQAILGPFGELLTEDDLVYLEKQIADLQLRRRCQEYESELGRLAAELQALLPEPLVSITVNSHFLPRAPGLEVEEASIPAAEPAGSAEASEVAPGVQPLPFWCSHISRLVRSLSLLLKGVHGLVQGDEKPSTRPLQDTCREASASPPRSEAQRQIQEWGVSVRTLRGNFESASGPLCGFNPGPCEPGAQHRQCLSGCWPALPKPRSGLASGEPRPGDTEEASDSGISCEEVPSEAGAAAGPDLASLRKERIIMLFLSHWRRSAYTPALKTVACRTLGARHAGLRGQEAARSPGPPSPPSEGPRLGHLWQQRSTITHLLGNWKAIMAHVPARQLRRLSRQPRGALSPEQFLPHVDGAPVPYSSLSLDLFMLGYFQLLECDLPAEERKLRHLLCFEVFEHLGTHGWEAVRAFHKAVTDEVAAGRRAWTDGFEDIKARFFGSSQRPAWDTEPGRKSGLTLLGPLPHAAVPCSGPEPTAQRLGSRSQQGSFNGEDICGYINRSFAFWKEKEAEMFNFGE

SEQ ID NO: 24828 - protein, 961 aa, Homo sapiens
MEKQRALVAAKDGDVATLERLLEAGALGPGITDALGAGLVHHATRAGHLDCVKFLVQRAQLPGNQRAHNGATPAHDAAATGSLAELCWLVREGGCGLQDQDASGVSPLHLAARFGHPVLVEWLLHEGHSATLETREGARPLHHAAVSGDLTCLKLLTAAHGSSVNRRTRSGASPLYLACQEGHLHLAQFLVKDCGADVHLRALDGMSALHAAAARGHYSLVVWLVTFTDIGLTARDNEGATALHFAARGGHTPILDRLLLMGTPILRDSWGGTPLHDAAENGQMEVPLLMTPPPPPFPPPPLLATRRSLEDGRRGGPGPGNPSPMSLSPAWPGHPDQPLPREQMTSPAPPRIITSATADPEGTETALAGDTSDGLAALQLDGLPSGDIDGLVPTRDERGQPIPEWKRQVMVRKLQARLGAESSAEAQDNGGSSGPTEQAAWRYSQTHQAILGPFGELLTEDDLVYLEKQIADLQLRRRCQEYESELGRLAAELQALLPEPLVSITVNSHFLPRAPGLEVEEASIPAAEPAGSAEASEVAPGVQPLPFWCSHISRLVRSLSLLLKGVHGLVQGDEKPSTRPLQDTCREASASPPRSEAQRQIQEWGVSVRTLRGNFESASGPLCGFNPGPCEPGAQHRQCLSGCWPALPKPRSGLASGEPRPGDTEEASDSGISCEEVPSEAGAAAGPDLASLRKERIIMLFLSHWRRSAYTPALKTVACRTLGARHAGLRGQEAARSPGPPSPPSEGPRLGHLWQQRSTITHLLGNWKAIMAHVPARQLRRLSRQPRGALSPEQFLPHVDGAPVPYSSLSLDLFMLGYFQLLECDLPAEERKLRHLLCFEVFEHLGTHGWEAVRAFHKAVTDEVAAGRRAWTDGFEDIKARFFGSSQRPAWDTEPGRKSGLTLLGPLPHAAVPCSGPEPTAQRLGSRSQQGSFNGEDICGYINRSFAFWKEKEAEMFNFGE

SEQ ID NO: 24829 - protein, 637 aa, Homo sapiens
MSLSPAWPGHPDQPLPREQMTSPAPPRIITSATADPEGTETALAGDTSDGLAALQLDGLPSGDIDGLVPTRDERGQPIPEWKRQVMVRKLQARLGAESSAEAQDNGGSSGPTEQAAWRYSQTHQAILGPFGELLTEDDLVYLEKQIADLQLRRRCQEYESELGRLAAELQALLPEPLVSITVNSHFLPRAPGLEVEEASIPAAEPAGSAEASEVAPGVQPLPFWCSHISRLVRSLSLLLKGVHGLVQGDEKPSTRPLQDTCREASASPPRSEAQRQIQEWGVSVRTLRGNFESASGPLCGFNPGPCEPGAQHRQCLSGCWPALPKPRSGLASGEPRPGDTEEASDSGISCEEVPSEAGAAAGPDLASLRKERIIMLFLSHWRRSAYTPALKTVACRTLGARHAGLRGQEAARSPGPPSPPSEGPRLGHLWQQRSTITHLLGNWKAIMAHVPARQLRRLSRQPRGALSPEQFLPHVDGAPVPYSSLSLDLFMLGYFQLLECDLPAEERKLRHLLCFEVFEHLGTHGWEAVRAFHKAVTDEVAAGRRAWTDGFEDIKARFFGSSQRPAWDTEPGRKSGLTLLGPLPHAAVPCSGPEPTAQRLGSRSQQGSFNGEDICGYINRSFAFWKEKEAEMFNFGE

SEQ ID NO: 24830 - protein, 464 aa, Homo sapiens
MMARRDPKSWAKRLVRAQTLQKQRRAPVGPSAPPPDEEDPRLKCKNCGAFGHTARSTRCPMKCWKAALVPATLGKKEGKENLKPWKPRGEANPGPLNKDKGEKEERPRQQDPQRKALLHMFSGKPPEKPLPNGKGSTESSDHLRVASGPMPVHTTSKRPRVDPVLADRSAAEMSGRGSVLASLSPLRKASLSSSSSLGPKERQTGAAADIPQPAVRHQGREPLLVVKPTHSRPEGGCREVPQAASKTHGLLQAARPQAQDKRPAVTSQPCPPAATHSLGLGSNLSFGPGAKRPAQAPIQACLNFPKKPRLGPFQIPESAIQGGELGAPENLQPPPAATELGPSTSPQMGRRTPAQVPSIDRQPPHSTPCLPTAQACTMSHHSAASHDGAQPLRVLFRRLENGRWSSSLLAAPSFHSPEKPGAFLAQSPHVSEKSEAPCVRVPPSVLYEDLQVSSSSEDSDSDLE

SEQ ID NO: 24831 - protein, 165 aa, Homo sapiens
MAPEENAGSELLLQSFKRRFLAARALRSFRWQSLEAKLRDSSDSELLRDILQKHEAVHTEPLDELYEVLVETLMAKESTQGHRSYLLTCCIAQKPSCRWSGSCGGWLPAGSTSGLLNSTWPLPSATQRCASCSPPSYAGLGSDGKRKLIMTRNCFPTESTWRWQS

SEQ ID NO: 24832 - protein, 131 aa, Homo sapiens
MAPEENAGSELLLQSFKRRFLAARALRSFRWQSLEAKLRDSSDSELLRDILQKTCCIAQKPSCRWSGSCGGWLPAGSTSGLLNSTWPLPSATQRCASCSPPSYAGLGSDGKRKLIMTRNCFPTESTWRWQS

SEQ ID NO: 24833 - protein, 158 aa, Homo sapiens
MAPEENAGSELLLQSFKRRFLAARALRSFRWQSLEAKLRDSSDSELLRDILQKTVKHPVCVKHPPSVKYARCFLSELIKKTCCIAQKPSCRWSGSCGGWLPAGSTSGLLNSTWPLPSATQRCASCSPPSYAGLGSDGKRKLIMTRNCFPTESTWRWQS

SEQ ID NO: 24834 - protein, 247 aa, Homo sapiens
MGPPLWPDLQEPPPPGTSSQIRSPLLCDVIKPAPHHDVTVRVVPPPRFLPLLLRPLPSDGDIAMRRDRGPKPALGGAGEVEPGGMAASPTGRPRRLQRYLQSGEFDQFRDFPIFESNFVQFCPDIYPAPTSDLWPQVTRLGEVANEVTMGVAASSPALELPDLLLLAGPAKENGHLQLFGLFPLKFVQLFVHDKSRCQLEVKLNTSRTFYLQLRAPLKTRDREFGQWVRLLYRLRFLSASAVPFTQE

SEQ ID NO: 24835 - protein, 231 aa, Homo sapiens
MGPPLWPDLQEPPPPGTSSQIRSPLLCDVIKPAPHHDVTVRVVPPPRFLPLLLRPLPSDGDIAMRRDRGPKPALGGAGEVEPGGMAASPTGRPRRLQRYLQSGEFDQFRDFPIFESNFVQVTRLGEVANEVTMGVAASSPALELPDLLLLAGPAKENGHLQLFGLFPLKFVQLFVHDKSRCQLEVKLNTSRTFYLQLRAPLKTRDREFGQWVRLLYRLRFLSASAVPFTQE

SEQ ID NO: 24836 - protein, 464 aa, Homo sapiens
MMARRDPTSWAKRLVRAQTLQKQRRAPVGPRAPPPDEEDPRLKCKNCGAFGHTARSTRCPMKCWKAALVPATLGKKEGKENLKPWKPRGEANPGPLNKDKGEKEERPRQQDPQRKALLHMFSGKPPEKPLPNGKGSTESSDYLRVASGPMPVHTTSKRPRLDPVLADRSATEMSGRGSVLASLSPLRKASLSSSSSLGPKERQTGAAADMPQPAVRHQGREPLLVVKPTHSRPEGGCREVPQAASKTHGLLQASRPQAQDKRPAVTPQPCPPAATHSLGLGSNLSFGPGAKRPAQAPIQACLNFPKKPRLGPFQIPESAIQGGELGAPENLQPPPAATELGPSTSPQMGRRTPAQVPSVDRQPPHSRPCLPTAQACTMSHHSAAGHDGAQPLRVLFRRLENGRWSSSLLAAPSFHSPEKPGAFLAQSPHVSEKSEAPCVRVPPSVLYEDLQVSSSSEDSDSDLE

SEQ ID NO: 24837 - protein, 165 aa, Homo sapiens
MAPEENAGTELLLQSLERRFLAARALRSFPWQSLEAKLRDSSDSELLRDILQKHEAVHTEPLDELYEVLAETLMAKESTQGHRSYLLTCCIAQKPSCRWSGSCGGWLPAGSTSGLLKSMWPLPSATQRRASCSPLSYAGLGSDGKWNLVMTRNCFPTKSTWRWQC

SEQ ID NO: 24838 - protein, 464 aa, Homo sapiens
MMARRDPTSWAKRLVRAQTLQKQRRAPVGPRAPPPDEEDPRLKCKNCGAFGHTARSTRCPMKCWKAALVPATLGKKEGKENLKPWKPRVEANPGPLNKDKGEKEERPRQQDPQRKALLHMFSGKPPEKPLPNGKGSTEPSDYLRVASGPMPVHTTSKRPRLDPVLADRSATEMSGRGSVLASLSPLRKASLSSSSSLGPKERQTGAAADMPQPAVRHQGREPLLVVKPTHSRPEGGCREVPQAASKTHGLLQAARPQAQDKRPAVTSQPCPPAATHSLGLGSNLSFGPGAKRPAQAPIQACLNFPKKPRLGPFQIPESAIQGGELGAPENLQPPPAATELGPSTSPQMGRRTPAQVPSVDRQPPHSRPCLPTAQACTMSHHPAASHDGAQPLRVLFRRLENGRWSSSLLAAPSFHSPEKPGAFLAQSPHVSEKSEAPCVRVPPSVLYEDLQVSSSSEDSDSDLE

SEQ ID NO: 24839 - protein, 104 aa, Homo sapiens
MSHTILLVQPTKRPEGRTYADYESVNECMEGVCKMYEEHLKRMNPNSPSITYDISQLFDFIDDLADLSCLVYRADTQTYQPYNKDWIKEKIYVLLRRQAQQAGK

SEQ ID NO: 24840 - protein, 458 aa, Homo sapiens
MRGLAVLLTVALATLLAPGAGAPVQSQGSQNKLLLVSFDGFRWNYDQDVDTPNLDAMARDGVKARYMTPAFVTMTSPCHFTLVTGKYIENHGVVHNMYYNTTSKVKLPYHATLGIQRWWDNGSVPIWITAQRQGLRAGSFFYPGGNVTYQGVAVTRSRKEGIAHNYKNETEWRANIDTVMAWFTEEDLDLVTLYFGEPDSTGHRYGPESPERREMVRQVDRTVGYLRESIARNHLTDRLNLIITSDHGMTTVDKRAGDLVEFHKFPNFTFRDIEFELLDYGPNGMLLPKEGRLEKVYDALKDAHPKLHVYKKEAFPEAFHYANNPRVTPLLMYSDLGYVIHGRINVQFNNGEHGFDNKDMDMKTIFRAVGPSFRAGLEVEPFESVHVYELMCRLLGIVPEANDGHLATLLPMLHTESALPPDGRPTLLPKGRSALPPSSRPLLVMGLLGTVILLSEVA

SEQ ID NO: 24841 - protein, 476 aa, Homo sapiens
METPGASASSLLLPAASRPPRKREAGEAGAATSKQRVLDEEEYIEGLQTVIQRDFFPDVEKLQAQKEYLEAEENGDLERMRQIAIKFGSALGKMSREPPPPYVTPATFETPEVHAGTGVVGNKPRPRGRGLEDGEAGEEEEKEPLPSLDVFLSRYTSEDNASFQEIMEVAKERSRARHAWLYQAEEEFEKRQKDNLELPSAEHQAIESSQASVETWKYKAKNSLMYYPEGVPDEEQLFKKPRQVVHKNTRFLRDPFSQALSRCQLQQAAALNAQHKQGKVGPDGKELIPQESPRVGGFGFVATPSPAPGVNESPMMTWGEVENTPLRVEGSETPYVDRTPGPAFKILEPGRRERLGLKMANEAAAKNRAKKQEALRRVTENLASLTPKGLSPAMSPALQRLVSRTASKYTDRALRASYTPSPARSTHLKTPASGLQTPTSTPAPGSATRTPLTQDPASITDNLLQLPARRKASDFF

SEQ ID NO: 24842 - protein, 275 aa, Homo sapiens
MAEPASVAAESLAGSRARAARTVLGQVVLPGEELLLPEQEDAEGPGGAVERPLSLNARACSRVRVVCGPGLRRCGDRLLVTKCGRLRHKEPGSGSGGGVYWVDSQQKRYVPVKGDHVIGIVTAKSGDIFKVDVGGSEPASLSYLSFEGATKRNRPNVQVGDLIYGQFVVANKDMEPEMVCIDSCGRANGMGVIGQDGLLFKVTLGLIRKLLAPDCEIIQEVGKLYPLEIVFGMNGRIWVKAKTIQQTLILANILEACEHMTSDQRKQIFSRLAES

SEQ ID NO: 24843 - protein, 164 aa, Homo sapiens
MAEPASVAAESLAGSRARAARTVLGQVVLPGEELLLPEQEDAEGPGGAVERPLSLNARACSRVRVVCGPGLRRCGDRLLVTKCGRLRHKEPGSGSGGGVYWVDSQQKRYVPVKGDHVIGIVTAKSGDIFKVDVGGSEPASLSYLSFEGATKRNRPNVQAISSRL

SEQ ID NO: 24844 - protein, 616 aa, Homo sapiens
MGRIGISCLFPASWHFSISPVGCPRILNTNLRQIMVISVLAAAVSLLYFSVVIIRNKYGRLTRDKKFQRYLARVTDIEATDTNNPNVNYGIVVDCGSSGSRVFVYCWPRHNGNPHDLLDIRQMRDKNRKPVVMKIKPGISEFATSPEKVSDYISPLLNFAAEHVPRAKHKETPLYILCTAGMRILPESQQKAILEDLLTDIPVHFDFLFSDSHAEVISGKQEGVYAWIGINFVLGRFEHIEDDDEAVVEVNIPGSESSEAIVRKRTAGILDMGGVSTQIAYEVPKTVSFASSQQEEVAKNLLAEFNLGCDVHQTEHVYRVYVATFLGFGGNAARQRYEDRIFANTIQKNRLLGKQTGLTPDMPYLDPCLPLDIKDEIQQNGQTIYLRGTGDFDLCRETIQPFMNKTNETQTSLNGVYQPPIHFQNSEFYGFSEFYYCTEDVLRMGGDYNAAKFTKAAKDYCATKWSILRERFDRGLYASHADLHRLKYQCFKSAWMFEVFHRGFSFPVNYKSLKTALQVYDKEVQWTLGAILYRTRFLPLRDIQQEAFRASHTHWRGVSFVYNHYLFSGCFLVVLLAILLYLLRLRRIHRRTPRSSSAAALWMEEGLPAQNAPGTL

SEQ ID NO: 24845 - protein, 608 aa, Homo sapiens
MGRIGISCLFPASWHFSISPVGCPRILNTNLRQIMVISVLAAAVSLLYFSVVIIRNKYGRLTRDKKFQRYLARVTDIEATDTNNPNVNYGIVVDCGSSGSRVFVYCWPRHNGNPHDLLDIRQMRDKNRKPVVMKIKPGISEFATSPEKVSDYISPLLNFAAEHVPRAKHKETPLYILCTAGMRILPESQQKAILEDLLTDIPVHFDFLFSDSHAEVISGKQEGVYAWIGINFVLGRFEHIEDDDEAVVEVNIPGSESSEAIVRKRTAGILDMGGVSTQIAYEVPKTEEVAKNLLAEFNLGCDVHQTEHVYRVYVATFLGFGGNAARQRYEDRIFANTIQKNRLLGKQTGLTPDMPYLDPCLPLDIKDEIQQNGQTIYLRGTGDFDLCRETIQPFMNKTNETQTSLNGVYQPPIHFQNSEFYGFSEFYYCTEDVLRMGGDYNAAKFTKAAKDYCATKWSILRERFDRGLYASHADLHRLKYQCFKSAWMFEVFHRGFSFPVNYKSLKTALQVYDKEVQWTLGAILYRTRFLPLRDIQQEAFRASHTHWRGVSFVYNHYLFSGCFLVVLLAILLYLLRLRRIHRRTPRSSSAAALWMEEGLPAQNAPGTL

SEQ ID NO: 24846 - protein, 293 aa, Homo sapiens
MAMEMRLPVARKPLSERLGRDTKKHLVVPGDTITTDTGFMRGHGTYMGEEKLIASVAGSVERVNKLICVKALKTRYIGEVGDIVVGRITEVQQKRWKVETNSRLDSVLLLSSMNLPGGELRRRSAEDELAMRGFLQEGDLISAEVQAVFSDGAVSLHTRSLKYGKLGQGVLVQVSPSLVKRQKTHFHDLPCGASVILGNNGFIWIYPTPEHKEEEAGGFIANLEPVSLADREVISRLRNCIISLVTQRMMLYDTSILYCYEASLPHQIKDILKPEIMEEIVMETRQRLLEQEG

SEQ ID NO: 24847 - protein, 267 aa, Homo sapiens
MAMEMRLPVARKPLSERLGRDTKKHLVVPGDTITTDTGFMRGHGTYMGEEKLIASVAGSVERVNKLICVKALKTRYIGEVGDIVVGRITEVQQKRWKVETNSRLDSVLLLSSMNLPGGELRRRSAEDELAMRGFLQEGDLISGVLVQVSPSLVKRQKTHFHDLPCGASVILGNNGFIWIYPTPEHKEEEAGGFIANLEPVSLADREVISRLRNCIISLVTQRMMLYDTSILYCYEASLPHQIKDILKPEIMEEIVMETRQRLLEQEG

SEQ ID NO: 24848 - protein, 263 aa, Homo sapiens
MAMEMRLPVARKPLSERLGRDTKKHLVVPGDTITTDTGFMRGHGTYMGEEKLIASVAGSVERVNKLICVKALKTRYIGEVGDIVVGRITERRRSAEDELAMRGFLQEGDLISAEVQAVFSDGAVSLHTRSLKYGKLGQGVLVQVSPSLVKRQKTHFHDLPCGASVILGNNGFIWIYPTPEHKEEEAGGFIANLEPVSLADREVISRLRNCIISLVTQRMMLYDTSILYCYEASLPHQIKDILKPEIMEEIVMETRQRLLEQEG

SEQ ID NO: 24849 - protein, 255 aa, Homo sapiens
MSSHRRKAKGRNRRSHRAMRVAHLELATYELAATESNPESSHPGYEAAMADRPQPGWRESLKMRVSKPFGMLMLSIWILLFVCYYLSYYLCSGSSYFVLANGHILPNSENAHGQSLEEDSALEALLNFFFPTTCNLRENQVAKPCNELQDLSESECLRHKCCFSSSGTTSFKCFAPFRDVPKQMMQMFGLGAISLILVCLPIYCRSLFWRSEPADDLQRQDNRVVTGLKKQRRKRKRKSEMLQKAARGREEHGDE

SEQ ID NO: 24850 - protein, 359 aa, Homo sapiens
MKLGCVLMAWALYLSLGVLWVAQMLLAASFETLQCEGPVCTEESSCHTEDDLTDAREAGFQVKAYTFSEPFHLIVSYDWLILQGPAKPVFEGDLLVLRCQAWQDWPLTQVTFYRDGSALGPPGPNREFSITVVQKADSGHYHCSGIFQSPGPGIPETASVVAITVQELFPAPILRAVPSAEPQAGSPMTLSCQTKLPLQRSAARLLFSFYKDGRIVQSRGLSSEFQIPTASEDHSGSYWCEAATEDNQVWKQSPQLEIRVQGASSSAAPPTLNPAPQKSAAPGTAPEEAPGPLPPPPTPSSEDPGFSSPLGMPDPHLYHQMGLLLKHMQDVRVLLGHLLMELRELSGHRKPGTTKATAE

SEQ ID NO: 24851 - protein, 365 aa, Homo sapiens
MKLGCVLMAWALYLSLGVLWVAQMLLAAGCHAAASFETLQCEGPVCTEESSCHTEDDLTDAREAGFQVKAYTFSEPFHLIVSYDWLILQGPAKPVFEGDLLVLRCQAWQDWPLTQVTFYRDGSALGPPGPNREFSITVVQKADSGHYHCSGIFQSPGPGIPETASVVAITVQELFPAPILRAVPSAEPQAGSPMTLSCQTKLPLQRSAARLLFSFYKDGRIVQSRGLSSEFQIPTASEDHSGSYWCEAATEDNQVWKQSPQLEIRVQGASSSAAPPTLNPAPQKSAAPGTAPEEAPGPLPPPPTPSSEDPGFSSPLGMPDPHLYHQMGLLLKHMQDVRVLLGHLLMELRELSGHRKPGTTKATAE

SEQ ID NO: 24852 - protein, 270 aa, Homo sapiens
MKLGCVLMAWALYLSLGVLWVAQMLLAASFETLQCEGPVCTEESSCHTEDDLTDAREAGFQVKAYTFSEPFHLIVSYELFPAPILRAVPSAEPQAGSPMTLSCQTKLPLQRSAARLLFSFYKDGRIVQSRGLSSEFQIPTASEDHSGSYWCEAATEDNQVWKQSPQLEIRVQGASSSAAPPTLNPAPQKSAAPGTAPEEAPGPLPPPPTPSSEDPGFSSPLGMPDPHLYHQMGLLLKHMQDVRVLLGHLLMELRELSGHRKPGTTKATAE

SEQ ID NO: 24853 - protein, 225 aa, Homo sapiens
MKLGCVLMAWALYLSLGVLWVAQMLLAAGCHAELFPAPILRAVPSAEPQAGSPMTLSCQTKLPLQRSAARLLFSFYKDGRIVQSRGLSSEFQIPTASEDHSGSYWCEAATEDNQVWKQSPQLEIRVQGASSSAAPPTLNPAPQKSAAPGTAPEEAPGPLPPPPTPSSEDPGFSSPLGMPDPHLYHQMGLLLKHMQDVRVLLGHLLMELRELSGHRKPGTTKATAE

SEQ ID NO: 24854 - protein, 219 aa, Homo sapiens
MKLGCVLMAWALYLSLGVLWVAQMLLELFPAPILRAVPSAEPQAGSPMTLSCQTKLPLQRSAARLLFSFYKDGRIVQSRGLSSEFQIPTASEDHSGSYWCEAATEDNQVWKQSPQLEIRVQGASSSAAPPTLNPAPQKSAAPGTAPEEAPGPLPPPPTPSSEDPGFSSPLGMPDPHLYHQMGLLLKHMQDVRVLLGHLLMELRELSGHRKPGTTKATAE

SEQ ID NO: 24855 - protein, 175 aa, Homo sapiens
MKLGCVLMAWALYLSLGVLWVAQMLLAASFETLQCEGPVCTEESSCHTEDDLTDAREAGFQVKAYTFSEPFHLIVSYGASSSAAPPTLNPAPQKSAAPGTAPEEAPGPLPPPPTPSSEDPGFSSPLGMPDPHLYHQMGLLLKHMQDVRVLLGHLLMELRELSGHRKPGTTKATAE

SEQ ID NO: 24856 - protein, 124 aa, Homo sapiens
MKLGCVLMAWALYLSLGVLWVAQMLLGASSSAAPPTLNPAPQKSAAPGTAPEEAPGPLPPPPTPSSEDPGFSSPLGMPDPHLYHQMGLLLKHMQDVRVLLGHLLMELRELSGHRKPGTTKATAE

SEQ ID NO: 24857 - protein, 264 aa, Homo sapiens
MKLGCVLMAWALYLSLGVLWVAQMLLAASFETLQCEGPVCTEESSCHTEDDLTDAREAGFQVKAYTFSEPFHLIVSYDWLILQGPAKPVFEGDLLVLRCQAWQDWPLTQVTFYRDGSALGPPGPNREFSITVVQKADSGHYHCSGIFQSPGPGIPETASVVAITVQGASSSAAPPTLNPAPQKSAAPGTAPEEAPGPLPPPPTPSSEDPGFSSPLGMPDPHLYHQMGLLLKHMQDVRVLLGHLLMELRELSGHRKPGTTKATAE

SEQ ID NO: 24858 - protein, 376 aa, Homo sapiens
MLKKISVGVAGDLNTVTMKLGCVLMAWALYLSLGVLWVAQMLLAASFETLQCEGPVCTEESSCHTEDDLTDAREAGFQVKAYTFSEPFHLIVSYDWLILQGPAKPVFEGDLLVLRCQAWQDWPLTQVTFYRDGSALGPPGPNREFSITVVQKADSGHYHCSGIFQSPGPGIPETASVVAITVQELFPAPILRAVPSAEPQAGSPMTLSCQTKLPLQRSAARLLFSFYKDGRIVQSRGLSSEFQIPTASEDHSGSYWCEAATEDNQVWKQSPQLEIRVQGASSSAAPPTLNPAPQKSAAPGTAPEEAPGPLPPPPTPSSEDPGFSSPLGMPDPHLYHQMGLLLKHMQDVRVLLGHLLMELRELSGHRKPGTTKATAE

SEQ ID NO: 24859 - protein, 382 aa, Homo sapiens
MLKKISVGVAGDLNTVTMKLGCVLMAWALYLSLGVLWVAQMLLAAGCHAAASFETLQCEGPVCTEESSCHTEDDLTDAREAGFQVKAYTFSEPFHLIVSYDWLILQGPAKPVFEGDLLVLRCQAWQDWPLTQVTFYRDGSALGPPGPNREFSITVVQKADSGHYHCSGIFQSPGPGIPETASVVAITVQELFPAPILRAVPSAEPQAGSPMTLSCQTKLPLQRSAARLLFSFYKDGRIVQSRGLSSEFQIPTASEDHSGSYWCEAATEDNQVWKQSPQLEIRVQGASSSAAPPTLNPAPQKSAAPGTAPEEAPGPLPPPPTPSSEDPGFSSPLGMPDPHLYHQMGLLLKHMQDVRVLLGHLLMELRELSGHRKPGTTKATAE

SEQ ID NO: 24860 - protein, 242 aa, Homo sapiens
MLKKISVGVAGDLNTVTMKLGCVLMAWALYLSLGVLWVAQMLLAAGCHAELFPAPILRAVPSAEPQAGSPMTLSCQTKLPLQRSAARLLFSFYKDGRIVQSRGLSSEFQIPTASEDHSGSYWCEAATEDNQVWKQSPQLEIRVQGASSSAAPPTLNPAPQKSAAPGTAPEEAPGPLPPPPTPSSEDPGFSSPLGMPDPHLYHQMGLLLKHMQDVRVLLGHLLMELRELSGHRKPGTTKATAE

SEQ ID NO: 24861 - protein, 287 aa, Homo sapiens
MLKKISVGVAGDLNTVTMKLGCVLMAWALYLSLGVLWVAQMLLAASFETLQCEGPVCTEESSCHTEDDLTDAREAGFQVKAYTFSEPFHLIVSYELFPAPILRAVPSAEPQAGSPMTLSCQTKLPLQRSAARLLFSFYKDGRIVQSRGLSSEFQIPTASEDHSGSYWCEAATEDNQVWKQSPQLEIRVQGASSSAAPPTLNPAPQKSAAPGTAPEEAPGPLPPPPTPSSEDPGFSSPLGMPDPHLYHQMGLLLKHMQDVRVLLGHLLMELRELSGHRKPGTTKATAE

SEQ ID NO: 24862 - protein, 192 aa, Homo sapiens
MLKKISVGVAGDLNTVTMKLGCVLMAWALYLSLGVLWVAQMLLAASFETLQCEGPVCTEESSCHTEDDLTDAREAGFQVKAYTFSEPFHLIVSYGASSSAAPPTLNPAPQKSAAPGTAPEEAPGPLPPPPTPSSEDPGFSSPLGMPDPHLYHQMGLLLKHMQDVRVLLGHLLMELRELSGHRKPGTTKATAE

SEQ ID NO: 24863 - protein, 236 aa, Homo sapiens
MLKKISVGVAGDLNTVTMKLGCVLMAWALYLSLGVLWVAQMLLELFPAPILRAVPSAEPQAGSPMTLSCQTKLPLQRSAARLLFSFYKDGRIVQSRGLSSEFQIPTASEDHSGSYWCEAATEDNQVWKQSPQLEIRVQGASSSAAPPTLNPAPQKSAAPGTAPEEAPGPLPPPPTPSSEDPGFSSPLGMPDPHLYHQMGLLLKHMQDVRVLLGHLLMELRELSGHRKPGTTKATAE

SEQ ID NO: 24864 - protein, 141 aa, Homo sapiens
MLKKISVGVAGDLNTVTMKLGCVLMAWALYLSLGVLWVAQMLLGASSSAAPPTLNPAPQKSAAPGTAPEEAPGPLPPPPTPSSEDPGFSSPLGMPDPHLYHQMGLLLKHMQDVRVLLGHLLMELRELSGHRKPGTTKATAE

SEQ ID NO: 24865 - protein, 209 aa, Homo sapiens
MDSDETGFEHSGLWVSVLAGLLLGACQAHPIPDSSPLLQFGGQVRQRYLYTDDAQQTEAHLEIREDGTVGGAADQSPESLLQLKALKPGVIQILGVKTSRFLCQRPDGALYGSLHFDPEACSFRELLLEDGYNVYQSEAHGLPLHLPGNKSPHRDPAPRGPARFLPLPGLPPALPEPPGILAPQPPDVGSSDPLSMVGPSQGRSPSYAS

SEQ ID NO: 24866 - protein, 288 aa, Homo sapiens
MVGVGGGDVEDVTPRPGGCQISGRGARGCNGIPGAAAWEAALPRRRPRRHPSVNPRSRAAGSPRTRGRRTEERPSGSRLGDRGRGRALPGGRLGGRGRGRAPERVGGRGRGRGTAAPRAAPAARGSRPGPAGTMAAGSITTLPALPEDGGSGAFPPGHFKDPKRLYCKNGGFFLRIHPDGRVDGVREKSDPHIKLQLQAEERGVVSIKGVCANRYLAMKEDGRLLASKCVTDECFFFERLESNNYNTYRSRKYTSWYVALKRTGQYKLGSKTGPGQKAILFLPMSAKS

SEQ ID NO: 24867 - protein, 210 aa, Homo sapiens
MGDRGRGRALPGGRLGGRGRGRAPERVGGRGRGRGTAAPRAAPAARGSRPGPAGTMAAGSITTLPALPEDGGSGAFPPGHFKDPKRLYCKNGGFFLRIHPDGRVDGVREKSDPHIKLQLQAEERGVVSIKGVCANRYLAMKEDGRLLASKCVTDECFFFERLESNNYNTYRSRKYTSWYVALKRTGQYKLGSKTGPGQKAILFLPMSAKS

SEQ ID NO: 24868 - protein, 155 aa, Homo sapiens [sequence omitted]

SEQ ID NO: 24869 - protein, 196 aa, Homo sapiens
MGGRGRGRAPERVGGRGRGRGTAAPRAAPAARGSRPGPAGTMAAGSITTLPALPEDGGSGAFPPGHFKDPKRLYCKNGGFFLRIHPDGRVDGVREKSDPHIKLQLQAEERGVVSIKGVCANRYLAMKEDGRLLASKCVTDECFFFERLESNNYNTYRSRKYTSWYVALKRTGQYKLGSKTGPGQKAILFLPMSAKS

SEQ ID NO: 24870 - protein, 122 aa, Homo sapiens
MAEPGGRGDYRKDGRLPSLSRSPLSTTLGTSPACGLEIPPTSGARPDGSCSLPAPVYHLKSRQWKGMGRGYRQRWRLQGRGDCDMGCVVQASGLFPAEMRERTTKKMATSPLDLCAGACWEM

SEQ ID NO: 24871 - protein, 542 aa, Homo sapiens
MEPDSVIEDKTIELMCSVPRSLWLGCANLVESMCALSCLQSMPSVRCLQISNGTSSVIVSRKRPSEGNYQKEKDLCIKYFDQWSESDQVEFVEHLISRMCHYQHGHINSYLKPMLQRDFITALPEQGLDHIAENILSYLDARSLCAAELVCKEWQRVISEGMLWKKLIERMVRTDPLWKGLSERRGWDQYLFKNRPTDGPPNSFYRSLYPKIIQDIETIESNWRCGRHNLQRIQCRSENSKGVYCLQYDDEKIISGLRDNSIKIWDKTSLECLKVLTGHTGSVLCLQYDERVIVTGSSDSTVRVWDVNTGEVLNTLIHHNEAVLHLRFSNGLMVTCSKDRSIAVWDMASATDITLRRVLVGHRAAVNVVDFDDKYIVSASGDRTIKVWSTSTCEFVRTLNGHKRGIACLQYRDRLVVSGSSDNTIRLWDIECGACLRVLEGHEELVRCIRFDNKRIVSGAYDGKIKVWDLQAALDPRAPASTLCLRTLVEHSGRVFRLQFDEFQIISSSHDDTILIWDFLNVPPSAQNETRSPSRTYTYISR

SEQ ID NO: 24872 - protein, 508 aa, Homo sapiens
MEPDSVIEDKTIELMISNGTSSVIVSRKRPSEGNYQKEKDLCIKYFDQWSESDQVEFVEHLISRMCHYQHGHINSYLKPMLQRDFITALPEQGLDHIAENILSYLDARSLCAAELVCKEWQRVISEGMLWKKLIERMVRTDPLWKGLSERRGWDQYLFKNRPTDGPPNSFYRSLYPKIIQDIETIESNWRCGRHNLQRIQCRSENSKGVYCLQYDDEKIISGLRDNSIKIWDKTSLECLKVLTGHTGSVLCLQYDERVIVTGSSDSTVRVWDVNTGEVLNTLIHHNEAVLHLRFSNGLMVTCSKDRSIAVWDMASATDITLRRVLVGHRAAVNVVDFDDKYIVSASGDRTIKVWSTSTCEFVRTLNGHKRGIACLQYRDRLVVSGSSDNTIRLWDIECGACLRVLEGHEELVRCIRFDNKRIVSGAYDGKIKVWDLQAALDPRAPASTLCLRTLVEHSGRVFRLQFDEFQIISSSHDDTILIWDFLNVPPSAQNETRSPSRTYTYISR

SEQ ID NO: 24873 - protein, 529 aa, Homo sapiens
MEPDSVIEDKTIELMNTSVMEDQNEDESPKKNTLWQISNGTSSVIVSRKRPSEGNYQKEKDLCIKYFDQWSESDQVEFVEHLISRMCHYQHGHINSYLKPMLQRDFITALPEQGLDHIAENILSYLDARSLCAAELVCKEWQRVISEGMLWKKLIERMVRTDPLWKGLSERRGWDQYLFKNRPTDGPPNSFYRSLYPKIIQDIETIESNWRCGRHNLQRIQCRSENSKGVYCLQYDDEKIISGLRDNSIKIWDKTSLECLKVLTGHTGSVLCLQYDERVIVTGSSDSTVRVWDVNTGEVLNTLIHHNEAVLHLRFSNGLMVTCSKDRSIAVWDMASATDITLRRVLVGHRAAVNVVDFDDKYIVSASGDRTIKVWSTSTCEFVRTLNGHKRGIACLQYRDRLVVSGSSDNTIRLWDIECGACLRVLEGHEELVRCIRFDNKRIVSGAYDGKIKVWDLQAALDPRAPASTLCLRTLVEHSGRVFRLQFDEFQIISSSHDDTILIWDFLNVPPSAQNETRSPSRTYTYISR

SEQ ID NO: 24874 - protein, 108 aa, Homo sapiens
MGVQVETISPGDGRTFPKRGQTCVVHYTGMLEDGKKFDSSRDRNKPFKFMLGKQEVIRGWEEGVAQMSVGQRAKLTISPDYAYGATGHPGIIPPHATLVFDVELLKLE

SEQ ID NO: 24875 - protein, 234 aa, Homo sapiens [sequence omitted]

SEQ ID NO: 24876 - protein, 555 aa, Homo sapiens
MARPDDEEGAAVAPGHPLAKGYLPLPRGAPVGKESVELQNGPKAGTFPVNGAPRDSLAAASGVLGGPQTPLAPEEETQARLLPAGAGAETPGAESSPLPLTALSPRRFVVLLIFSLYSLVNAFQWIQYSIISNVFEGFYGVTLLHIDWLSMVYMLAYVPLIFPATWLLDTRGLRLTALLGSGLNCLGAWIKCGSVQQHLFWVTMLGQCLCSVAQVFILGLPSRIASVWFGPKEVSTACATAVLGNQLGTAVGFLLPPVLVPNTQNDTNLLACNISTMFYGTSAVATLLFILTAIAFKEKPRYPPSQAQAALQDSPPEEYSYKKSIRNLFKNIPFVLLLITYGIMTGAFYSVSTLLNQMILTYYEGEEVNAGRIGLTLVVAGMVGSILCGLWLDYTKTYKQTTLIVYILSFIGMVIFTFTLDLRYIIIVFVTGGVLGFFMTGYLPLGFEFAVEITYPESEGTSSGLLNASAQIFGILFTLAQGKLTSDYGPKAGNIFLCVWMFIGIILTALIKSDLRRHNINIGITNVDVKAIPADSPTDQEPKTVMLSKQSESAI

SEQ ID NO: 24877 - protein, 279 aa, Homo sapiens
MFYGTSAVATLLFILTAIAFKEKPRYPPSQAQAALQDSPPEEYSYKKSIRNLFKNIPFVLLLITYGIMTGAFYSVSTLLNQMILTYYEGEEVNAGRIGLTLVVAGMVGSILCGLWLDYTKTYKQTTLIVYILSFIGMVIFTFTLDLRYIIIVFVTGGVLGFFMTGYLPLGFEFAVEITYPESEGTSSGLLNASAQIFGILFTLAQGKLTSDYGPKAGNIFLCVWMFIGIILTALIKSDLRRHNINIGITNVDVKAIPADSPTDQEPKTVMLSKQSESAI

SEQ ID NO: 24878 - protein, 822 aa, Homo sapiens [sequence omitted]

SEQ ID NO: 24879 - protein, 662 aa, Homo sapiens
MWSWKCLLFWAVLVTATLCTARPSPTLPEQAQPWGAPVEVESFLVHPGDLLQLRCRLRDDVQSINWLRDGVQLAESNRTRITGEEVEVQDSVPADSGLYACVTSSPSGSDTTYFSVNVSDALPSSEDDDDDDDSSSEEKETDNTKPNRMPVAPYWTSPEKMEKKLHAVPAAKTVKFKCPSSGTPNPTLRWLKNGKEFKPDHRIGGYKVRYATWSIIMDSVVPSDKGNYTCIVENEYGSINHTYQLDVVERSPHRPILQAGLPANKTVALGSNVEFMCKVYSDPQPHIQWLKHIEVNGSKIGPDNLPYVQILKTAGVNTTDKEMEVLHLRNVSFEDAGEYTCLAGNSIGLSHHSAWLTVLEALEERPAVMTSPLYLEIIIYCTGAFLISCMVGSVIVYKMKSGTKKSDFHSQMAVHKLAKSIPLRRQVTVSADSSASMNSGVLLVRPSRLSSSGTPMLAGVSEYELPEDPRWELPRDRLVLGKPLGEGCFGQVVLAEAIGLDKDKPNRVTKVAVKMLKSDATEKDLSDLISEMEMMKMIGKHKNIINLLGACTQDGPLYVIVEYASKGNLREYLQARRPPGLEYCYNPSHNPEEQLSSKDLVSCAYQVARGMEYLASKKVWNLKAPLVHTPRPGSQECPGDRGQCDEDSRLWPRTGHSPHRLL

SEQ ID NO: 24880 - protein, 61 aa, Homo sapiens
MWSWKCLLFWAVLVTATLCTARPSPTLPEQACPDLQEAKSCSASFHSITPLPFGLGTRLSD

SEQ ID NO: 24881 - protein, 820 aa, Homo sapiens
MWSWKCLLFWAVLVTATLCTARPSPTLPEQAQPWGAPVEVESFLVHPGDLLQLRCRLRDDVQSINWLRDGVQLAESNRTRITGEEVEVQDSVPADSGLYACVTSSPSGSDTTYFSVNVSDALPSSEDDDDDDDSSSEEKETDNTKPNRMPVAPYWTSPEKMEKKLHAVPAAKTVKFKCPSSGTPNPTLRWLKNGKEFKPDHRIGGYKVRYATWSIIMDSVVPSDKGNYTCIVENEYGSINHTYQLDVVERSPHRPILQAGLPANKTVALGSNVEFMCKVYSDPQPHIQWLKHIEVNGSKIGPDNLPYVQILKTAGVNTTDKEMEVLHLRNVSFEDAGEYTCLAGNSIGLSHHSAWLTVLEALEERPAVMTSPLYLEIIIYCTGAFLISCMVGSVIVYKMKSGTKKSDFHSQMAVHKLAKSIPLRRQVSADSSASMNSGVLLVRPSRLSSSGTPMLAGVSEYELPEDPRWELPRDRLVLGKPLGEGCFGQVVLAEAIGLDKDKPNRVTKVAVKMLKSDATEKDLSDLISEMEMMKMIGKHKNIINLLGACTQDGPLYVIVEYASKGNLREYLQARRPPGLEYCYNPSHNPEEQLSSKDLVSCAYQVARGMEYLASKKCIHRDLAARNVLVTEDNVMKIADFGLARDIHHIDYYKKTTNGRLPVKWMAPEALFDRIYTHQSDVWSFGVLLWEIFTLGGSPYPGVPVEELFKLLKEGHRMDKPSNCTNELYMMMRDCWHAVPSQRPTFKQLVEDLDRIVALTSNQEYLDLSMPLDQYSPSFPDTRSSTCSSGEDSVFSHEPLPEEPCLPRHPAQLANGGLKRR

SEQ ID NO: 24882 - protein, 660 aa, Homo sapiens
MWSWKCLLFWAVLVTATLCTARPSPTLPEQAQPWGAPVEVESFLVHPGDLLQLRCRLRDDVQSINWLRDGVQLAESNRTRITGEEVEVQDSVPADSGLYACVTSSPSGSDTTYFSVNVSDALPSSEDDDDDDDSSSEEKETDNTKPNRMPVAPYWTSPEKMEKKLHAVPAAKTVKFKCPSSGTPNPTLRWLKNGKEFKPDHRIGGYKVRYATWSIIMDSVVPSDKGNYTCIVENEYGSINHTYQLDVVERSPHRPILQAGLPANKTVALGSNVEFMCKVYSDPQPHIQWLKHIEVNGSKIGPDNLPYVQILKTAGVNTTDKEMEVLHLRNVSFEDAGEYTCLAGNSIGLSHHSAWLTVLEALEERPAVMTSPLYLEIIIYCTGAFLISCMVGSVIVYKMKSGTKKSDFHSQMAVHKLAKSIPLRRQVSADSSASMNSGVLLVRPSRLSSSGTPMLAGVSEYELPEDPRWELPRDRLVLGKPLGEGCFGQVVLAEAIGLDKDKPNRVTKVAVKMLKSDATEKDLSDLISEMEMMKMIGKHKNIINLLGACTQDGPLYVIVEYASKGNLREYLQARRPPGLEYCYNPSHNPEEQLSSKDLVSCAYQVARGMEYLASKKVWNLKAPLVHTPRPGSQECPGDRGQCDEDSRLWPRTGHSPHRLL

SEQ ID NO: 24883 - protein, 733 aa, Homo sapiens
MWSWKCLLFWAVLVTATLCTARPSPTLPEQDALPSSEDDDDDDDSSSEEKETDNTKPNRMPVAPYWTSPEKMEKKLHAVPAAKTVKFKCPSSGTPNPTLRWLKNGKEFKPDHRIGGYKVRYATWSIIMDSVVPSDKGNYTCIVENEYGSINHTYQLDVVERSPHRPILQAGLPANKTVALGSNVEFMCKVYSDPQPHIQWLKHIEVNGSKIGPDNLPYVQILKTAGVNTTDKEMEVLHLRNVSFEDAGEYTCLAGNSIGLSHHSAWLTVLEALEERPAVMTSPLYLEIIIYCTGAFLISCMVGSVIVYKMKSGTKKSDFHSQMAVHKLAKSIPLRRQVTVSADSSASMNSGVLLVRPSRLSSSGTPMLAGVSEYELPEDPRWELPRDRLVLGKPLGEGCFGQVVLAEAIGLDKDKPNRVTKVAVKMLKSDATEKDLSDLISEMEMMKMIGKHKNIINLLGACTQDGPLYVIVEYASKGNLREYLQARRPPGLEYCYNPSHNPEEQLSSKDLVSCAYQVARGMEYLASKKCIHRDLAARNVLVTEDNVMKIADFGLARDIHHIDYYKKTTNGRLPVKWMAPEALFDRIYTHQSDVWSFGVLLWEIFTLGGSPYPGVPVEELFKLLKEGHRMDKPSNCTNELYMMMRDCWHAVPSQRPTFKQLVEDLDRIVALTSNQEYLDLSMPLDQYSPSFPDTRSSTCSSGEDSVFSHEPLPEEPCLPRHPAQLANGGLKRR

SEQ ID NO: 24884 - protein, 573 aa, Homo sapiens
MWSWKCLLFWAVLVTATLCTARPSPTLPEQDALPSSEDDDDDDDSSSEEKETDNTKPNRMPVAPYWTSPEKMEKKLHAVPAAKTVKFKCPSSGTPNPTLRWLKNGKEFKPDHRIGGYKVRYATWSIIMDSVVPSDKGNYTCIVENEYGSINHTYQLDVVERSPHRPILQAGLPANKTVALGSNVEFMCKVYSDPQPHIQWLKHIEVNGSKIGPDNLPYVQILKTAGVNTTDKEMEVLHLRNVSFEDAGEYTCLAGNSIGLSHHSAWLTVLEALEERPAVMTSPLYLEIIIYCTGAFLISCMVGSVIVYKMKSGTKKSDFHSQMAVHKLAKSIPLRRQVTVSADSSASMNSGVLLVRPSRLSSSGTPMLAGVSEYELPEDPRWELPRDRLVLGKPLGEGCFGQVVLAEAIGLDKDKPNRVTKVAVKMLKSDATEKDLSDLISEMEMMKMIGKHKNIINLLGACTQDGPLYVIVEYASKGNLREYLQARRPPGLEYCYNPSHNPEEQLSSKDLVSCAYQVARGMEYLASKKVWNLKAPLVHTPRPGSQECPGDRGQCDEDSRLWPRTGHSPHRLL

SEQ ID NO: 24885 - protein, 731 aa, Homo sapiens
MWSWKCLLFWAVLVTATLCTARPSPTLPEQDALPSSEDDDDDDDSSSEEKETDNTKPNRMPVAPYWTSPEKMEKKLHAVPAAKTVKFKCPSSGTPNPTLRWLKNGKEFKPDHRIGGYKVRYATWSIIMDSVVPSDKGNYTCIVENEYGSINHTYQLDVVERSPHRPILQAGLPANKTVALGSNVEFMCKVYSDPQPHIQWLKHIEVNGSKIGPDNLPYVQILKTAGVNTTDKEMEVLHLRNVSFEDAGEYTCLAGNSIGLSHHSAWLTVLEALEERPAVMTSPLYLEIIIYCTGAFLISCMVGSVIVYKMKSGTKKSDFHSQMAVHKLAKSIPLRRQVSADSSASMNSGVLLVRPSRLSSSGTPMLAGVSEYELPEDPRWELPRDRLVLGKPLGEGCFGQVVLAEAIGLDKDKPNRVTKVAVKMLKSDATEKDLSDLISEMEMMKMIGKHKNIINLLGACTQDGPLYVIVEYASKGNLREYLQARRPPGLEYCYNPSHNPEEQLSSKDLVSCAYQVARGMEYLASKKCIHRDLAARNVLVTEDNVMKIADFGLARDIHHIDYYKKTTNGRLPVKWMAPEALFDRIYTHQSDVWSFGVLLWEIFTLGGSPYPGVPVEELFKLLKEGHRMDKPSNCTNELYMMMRDCWHAVPSQRPTFKQLVEDLDRIVALTSNQEYLDLSMPLDQYSPSFPDTRSSTCSSGEDSVFSHEPLPEEPCLPRHPAQLANGGLKRR

SEQ ID NO: 24886 - protein, 571 aa, Homo sapiens
MWSWKCLLFWAVLVTATLCTARPSPTLPEQDALPSSEDDDDDDDSSSEEKETDNTKPNRMPVAPYWTSPEKMEKKLHAVPAAKTVKFKCPSSGTPNPTLRWLKNGKEFKPDHRIGGYKVRYATWSIIMDSVVPSDKGNYTCIVENEYGSINHTYQLDVVERSPHRPILQAGLPANKTVALGSNVEFMCKVYSDPQPHIQWLKHIEVNGSKIGPDNLPYVQILKTAGVNTTDKEMEVLHLRNVSFEDAGEYTCLAGNSIGLSHHSAWLTVLEALEERPAVMTSPLYLEIIIYCTGAFLISCMVGSVIVYKMKSGTKKSDFHSQMAVHKLAKSIPLRRQVSADSSASMNSGVLLVRPSRLSSSGTPMLAGVSEYELPEDPRWELPRDRLVLGKPLGEGCFGQVVLAEAIGLDKDKPNRVTKVAVKMLKSDATEKDLSDLISEMEMMKMIGKHKNIINLLGACTQDGPLYVIVEYASKGNLREYLQARRPPGLEYCYNPSHNPEEQLSSKDLVSCAYQVARGMEYLASKKVWNLKAPLVHTPRPGSQECPGDRGQCDEDSRLWPRTGHSPHRLL

SEQ ID NO: 24887 - protein, 662 aa, Homo sapiens
MEKKLHAVPAAKTVKFKCPSSGTPNPTLRWLKNGKEFKPDHRIGGYKVRYATWSIIMDSVVPSDKGNYTCIVENEYGSINHTYQLDVVERSPHRPILQAGLPANKTVALGSNVEFMCKVYSDPQPHIQWLKHIEVNGSKIGPDNLPYVQILKTAGVNTTDKEMEVLHLRNVSFEDAGEYTCLAGNSIGLSHHSAWLTVLEALEERPAVMTSPLYLEIIIYCTGAFLISCMVGSVIVYKMKSGTKKSDFHSQMAVHKLAKSIPLRRQVTVSADSSASMNSGVLLVRPSRLSSSGTPMLAGVSEYELPEDPRWELPRDRLVLGKPLGEGCFGQVVLAEAIGLDKDKPNRVTKVAVKMLKSDATEKDLSDLISEMEMMKMIGKHKNIINLLGACTQDGPLYVIVEYASKGNLREYLQARRPPGLEYCYNPSHNPEEQLSSKDLVSCAYQVARGMEYLASKKCIHRDLAARNVLVTEDNVMKIADFGLARDIHHIDYYKKTTNGRLPVKWMAPEALFDRIYTHQSDVWSFGVLLWEIFTLGGSPYPGVPVEELFKLLKEGHRMDKPSNCTNELYMMMRDCWHAVPSQRPTFKQLVEDLDRIVALTSNQEYLDLSMPLDQYSPSFPDTRSSTCSSGEDSVFSHEPLPEEPCLPRHPAQLANGGLKRR

SEQ ID NO: 24888 - protein, 502 aa, Homo sapiens
MEKKLHAVPAAKTVKFKCPSSGTPNPTLRWLKNGKEFKPDHRIGGYKVRYATWSIIMDSVVPSDKGNYTCIVENEYGSINHTYQLDVVERSPHRPILQAGLPANKTVALGSNVEFMCKVYSDPQPHIQWLKHIEVNGSKIGPDNLPYVQILKTAGVNTTDKEMEVLHLRNVSFEDAGEYTCLAGNSIGLSHHSAWLTVLEALEERPAVMTSPLYLEIIIYCTGAFLISCMVGSVIVYKMKSGTKKSDFHSQMAVHKLAKSIPLRRQVTVSADSSASMNSGVLLVRPSRLSSSGTPMLAGVSEYELPEDPRWELPRDRLVLGKPLGEGCFGQVVLAEAIGLDKDKPNRVTKVAVKMLKSDATEKDLSDLISEMEMMKMIGKHKNIINLLGACTQDGPLYVIVEYASKGNLREYLQARRPPGLEYCYNPSHNPEEQLSSKDLVSCAYQVARGMEYLASKKVWNLKAPLVHTPRPGSQECPGDRGQCDEDSRLWPRTGHSPHRLL

SEQ ID NO: 24889 - protein, 660 aa, Homo sapiens
MEKKLHAVPAAKTVKFKCPSSGTPNPTLRWLKNGKEFKPDHRIGGYKVRYATWSIIMDSVVPSDKGNYTCIVENEYGSINHTYQLDVVERSPHRPILQAGLPANKTVALGSNVEFMCKVYSDPQPHIQWLKHIEVNGSKIGPDNLPYVQILKTAGVNTTDKEMEVLHLRNVSFEDAGEYTCLAGNSIGLSHHSAWLTVLEALEERPAVMTSPLYLEIIIYCTGAFLISCMVGSVIVYKMKSGTKKSDFHSQMAVHKLAKSIPLRRQVSADSSASMNSGVLLVRPSRLSSSGTPMLAGVSEYELPEDPRWELPRDRLVLGKPLGEGCFGQVVLAEAIGLDKDKPNRVTKVAVKMLKSDATEKDLSDLISEMEMMKMIGKHKNIINLLGACTQDGPLYVIVEYASKGNLREYLQARRPPGLEYCYNPSHNPEEQLSSKDLVSCAYQVARGMEYLASKKCIHRDLAARNVLVTEDNVMKIADFGLARDIHHIDYYKKTTNGRLPVKWMAPEALFDRIYTHQSDVWSFGVLLWEIFTLGGSPYPGVPVEELFKLLKEGHRMDKPSNCTNELYMMMRDCWHAVPSQRPTFKQLVEDLDRIVALTSNQEYLDLSMPLDQYSPSFPDTRSSTCSSGEDSVFSHEPLPEEPCLPRHPAQLANGGLKRR

SEQ ID NO: 24890 - protein, 500 aa, Homo sapiens
MEKKLHAVPAAKTVKFKCPSSGTPNPTLRWLKNGKEFKPDHRIGGYKVRYATWSIIMDSVVPSDKGNYTCIVENEYGSINHTYQLDVVERSPHRPILQAGLPANKTVALGSNVEFMCKVYSDPQPHIQWLKHIEVNGSKIGPDNLPYVQILKTAGVNTTDKEMEVLHLRNVSFEDAGEYTCLAGNSIGLSHHSAWLTVLEALEERPAVMTSPLYLEIIIYCTGAFLISCMVGSVIVYKMKSGTKKSDFHSQMAVHKLAKSIPLRRQVSADSSASMNSGVLLVRPSRLSSSGTPMLAGVSEYELPEDPRWELPRDRLVLGKPLGEGCFGQVVLAEAIGLDKDKPNRVTKVAVKMLKSDATEKDLSDLISEMEMMKMIGKHKNIINLLGACTQDGPLYVIVEYASKGNLREYLQARRPPGLEYCYNPSHNPEEQLSSKDLVSCAYQVARGMEYLASKKVWNLKAPLVHTPRPGSQECPGDRGQCDEDSRLWPRTGHSPHRLL

SEQ ID NO: 24891 - protein, 820 aa, Homo sapiens
MWSWKCLLFWAVLVTATLCTARPSPTLPEQAQPWGAPVEVESFLVHPGDLLQLRCRLRDDVQSINWLRDGVQLAESNRTRITGEEVEVQDSVPADSGLYACVTSSPSGSDTTYFSVNVSDALPSSEDDDDDDDSSSEEKETDNTKPNPVAPYWTSPEKMEKKLHAVPAAKTVKFKCPSSGTPNPTLRWLKNGKEFKPDHRIGGYKVRYATWSIIMDSVVPSDKGNYTCIVENEYGSINHTYQLDVVERSPHRPILQAGLPANKTVALGSNVEFMCKVYSDPQPHIQWLKHIEVNGSKIGPDNLPYVQILKTAGVNTTDKEMEVLHLRNVSFEDAGEYTCLAGNSIGLSHHSAWLTVLEALEERPAVMTSPLYLEIIIYCTGAFLISCMVGSVIVYKMKSGTKKSDFHSQMAVHKLAKSIPLRRQVTVSADSSASMNSGVLLVRPSRLSSSGTPMLAGVSEYELPEDPRWELPRDRLVLGKPLGEGCFGQVVLAEAIGLDKDKPNRVTKVAVKMLKSDATEKDLSDLISEMEMMKMIGKHKNIINLLGACTQDGPLYVIVEYASKGNLREYLQARRPPGLEYCYNPSHNPEEQLSSKDLVSCAYQVARGMEYLASKKCIHRDLAARNVLVTEDNVMKIADFGLARDIHHIDYYKKTTNGRLPVKWMAPEALFDRIYTHQSDVWSFGVLLWEIFTLGGSPYPGVPVEELFKLLKEGHRMDKPSNCTNELYMMMRDCWHAVPSQRPTFKQLVEDLDRIVALTSNQEYLDLSMPLDQYSPSFPDTRSSTCSSGEDSVFSHEPLPEEPCLPRHPAQLANGGLKRR

SEQ ID NO: 24892 - protein, 731 aa, Homo sapiens
MWSWKCLLFWAVLVTATLCTARPSPTLPEQDALPSSEDDDDDDDSSSEEKETDNTKPNPVAPYWTSPEKMEKKLHAVPAAKTVKFKCPSSGTPNPTLRWLKNGKEFKPDHRIGGYKVRYATWSIIMDSVVPSDKGNYTCIVENEYGSINHTYQLDVVERSPHRPILQAGLPANKTVALGSNVEFMCKVYSDPQPHIQWLKHIEVNGSKIGPDNLPYVQILKTAGVNTTDKEMEVLHLRNVSFEDAGEYTCLAGNSIGLSHHSAWLTVLEALEERPAVMTSPLYLEIIIYCTGAFLISCMVGSVIVYKMKSGTKKSDFHSQMAVHKLAKSIPLRRQVTVSADSSASMNSGVLLVRPSRLSSSGTPMLAGVSEYELPEDPRWELPRDRLVLGKPLGEGCFGQVVLAEAIGLDKDKPNRVTKVAVKMLKSDATEKDLSDLISEMEMMKMIGKHKNIINLLGACTQDGPLYVIVEYASKGNLREYLQARRPPGLEYCYNPSHNPEEQLSSKDLVSCAYQVARGMEYLASKKCIHRDLAARNVLVTEDNVMKIADFGLARDIHHIDYYKKTTNGRLPVKWMAPEALFDRIYTHQSDVWSFGVLLWEIFTLGGSPYPGVPVEELFKLLKEGHRMDKPSNCTNELYMMMRDCWHAVPSQRPTFKQLVEDLDRIVALTSNQEYLDLSMPLDQYSPSFPDTRSSTCSSGEDSVFSHEPLPEEPCLPRHPAQLANGGLKRR

SEQ ID NO: 24893 - protein, 150 aa, Homo sapiens
MWSWKCLLFWAVLVTATLCTARPSPTLPEQAQPWGAPVEVESFLVHPGDLLQLRCRLRDDVQSINWLRDGVQLAESNRTRITGEEVEVQDSVPADSGLYACVTSSPSGSDTTYFSVNVSACPDLQEAKWCSASFHSITPLPFGLGTRLSD

SEQ ID NO: 24894 - protein, 302 aa, Homo sapiens
MWSWKCLLFWAVLVTATLCTARPSPTLPEQDALPSSEDDDDDDDSSSEEKETDNTKPNRMPVAPYWTSPEKMEKKLHAVPAAKTVKFKCPSSGTPNPTLRWLKNGKEFKPDHRIGGYKVRYATWSIIMDSVVPSDKGNYTCIVENEYGSINHTYQLDVVERSPHRPILQAGLPANKTVALGSNVEFMCKVYSDPQPHIQWLKHIEVNGSKIGPDNLPYVQILKVIMAPVFVGQSTGKETTVSGAQVPVGRLSCPRMGSFLTLQAHTLHLSRDLATSPRTSNRGHKVEVSWEQRAAGMGGAGL

SEQ ID NO: 24895 - protein, 300 aa, Homo sapiens
MWSWKCLLFWAVLVTATLCTARPSPTLPEQDALPSSEDDDDDDDSSSEEKETDNTKPNPVAPYWTSPEKMEKKLHAVPAAKTVKFKCPSSGTPNPTLRWLKNGKEFKPDHRIGGYKVRYATWSIIMDSVVPSDKGNYTCIVENEYGSINHTYQLDVVERSPHRPILQAGLPANKTVALGSNVEFMCKVYSDPQPHIQWLKHIEVNGSKIGPDNLPYVQILKVIMAPVFVGQSTGKETTVSGAQVPVGRLSCPRMGSFLTLQAHTLHLSRDLATSPRTSNRGHKVEVSWEQRAAGMGGAGL

SEQ ID NO: 24896 - protein, 822 aa, Homo sapiens
MWSWKCLLFWAVLVTATLCTARPSPTLPEQAQPWGAPVEVESFLVHPGDLLQLRCRLRDDVQSINWLRDGVQLAESNRTRITGEEVEVQDSVPADSGLYACVTSSPSGSDTTYFSVNVSVPIDALPSSEDDDDDDDSSSEEKETDNTKPNPVAPYWTSPEKMEKKLHAVPAAKTVKFKCPSSGTPNPTLRWLKNGKEFKPDHRIGGYKVRYATWSIIMDSVVPSDKGNYTCIVENEYGSINHTYQLDVVERSPHRPILQAGLPANKTVALGSNVEFMCKVYSDPQPHIQWLKHIEVNGSKIGPDNLPYVQILKHSGINSSDAEVLTLFNVTEAQSGEYVCKVSNYIGEANQSAWLTVTRPALEERPAVMTSPLYLEIIIYCTGAFLISCMVGSVIVYKMKSGTKKSDFHSQMAVHKLAKSIPLRRQVTVSADSSASMNSGVLLVRPSRLSSSGTPMLAGVSEYELPEDPRWELPRDRLVLGKPLGEGCFGQVVLAEAIGLDKDKPNRVTKVAVKMLKSDATEKDLSDLISEMEMMKMIGKHKNIINLLGACTQDGPLYVIVEYASKGNLREYLQARRPPGLEYCYNPSHNPEEQLSSKDLVSCAYQVARGMEYLASKKCIHRDLAARNVLVTEDNVMKIADFGLARDIHHIDYYKKTTNGRLPVKWMAPEALFDRIYTHQSDVWSFGVLLWEIFTLGGSPYPGVPVEELFKLLKEGHRMDKPSNCTNELYMMMRDCWHAVPSQRPTFKQLVEDLDRIVALTSNQEYLDLSMPLDQYSPSFPDTRSSTCSSGEDSVFSHEPLPEEPCLPRHPAQLANGGLKRR

SEQ ID NO: 24897 - protein, 812 aa, Homo sapiens
MAAVTRDFGEMLLHSGRVLPAEAQPWGAPVEVESFLVHPGDLLQLRCRLRDDVQSINWLRDGVQLAESNRTRITGEEVEVQDSVPADSGLYACVTSSPSGSDTTYFSVNVSDALPSSEDDDDDDDSSSEEKETDNTKPNRMPVAPYWTSPEKMEKKLHAVPAAKTVKFKCPSSGTPNPTLRWLKNGKEFKPDHRIGGYKVRYATWSIIMDSVVPSDKGNYTCIVENEYGSINHTYQLDVVERSPHRPILQAGLPANKTVALGSNVEFMCKVYSDPQPHIQWLKHIEVNGSKIGPDNLPYVQILKTAGVNTTDKEMEVLHLRNVSFEDAGEYTCLAGNSIGLSHHSAWLTVLEALEERPAVMTSPLYLEIIIYCTGAFLISCMVGSVIVYKMKSGTKKSDFHSQMAVHKLAKSIPLRRQVSADSSASMNSGVLLVRPSRLSSSGTPMLAGVSEYELPEDPRWELPRDRLVLGKPLGEGCFGQVVLAEAIGLDKDKPNRVTKVAVKMLKSDATEKDLSDLISEMEMMKMIGKHKNIINLLGACTQDGPLYVIVEYASKGNLREYLQARRPPGLEYCYNPSHNPEEQLSSKDLVSCAYQVARGMEYLASKKCIHRDLAARNVLVTEDNVMKIADFGLARDIHHIDYYKKTTNGRLPVKWMAPEALFDRIYTHQSDVWSFGVLLWEIFTLGGSPYPGVPVEELFKLLKEGHRMDKPSNCTNELYMMMRDCWHAVPSQRPTFKQLVEDLDRIVALTSNQEYLDLSMPLDQYSPSFPDTRSSTCSSGEDSVFSHEPLPEEPCLPRHPAQLANGGLKRR

SEQ ID NO: 24898 - protein, 853 aa, Homo sapiens
MEARVSLKRRIELTVEYPWRCGALSPTSNCRTGMWSWKCLLFWAVLVTATLCTARPSPTLPEQAQPWGAPVEVESFLVHPGDLLQLRCRLRDDVQSINWLRDGVQLAESNRTRITGEEVEVQDSVPADSGLYACVTSSPSGSDTTYFSVNVSDALPSSEDDDDDDDSSSEEKETDNTKPNPVAPYWTSPEKMEKKLHAVPAAKTVKFKCPSSGTPNPTLRWLKNGKEFKPDHRIGGYKVRYATWSIIMDSVVPSDKGNYTCIVENEYGSINHTYQLDVVERSPHRPILQAGLPANKTVALGSNVEFMCKVYSDPQPHIQWLKHIEVNGSKIGPDNLPYVQILKTAGVNTTDKEMEVLHLRNVSFEDAGEYTCLAGNSIGLSHHSAWLTVLEALEERPAVMTSPLYLEIIIYCTGAFLISCMVGSVIVYKMKSGTKKSDFHSQMAVHKLAKSIPLRRQVTVSADSSASMNSGVLLVRPSRLSSSGTPMLAGVSEYELPEDPRWELPRDRLVLGKPLGEGCFGQVVLAEAIGLDKDKPNRVTKVAVKMLKSDATEKDLSDLISEMEMMKMIGKHKNIINLLGACTQDGPLYVIVEYASKGNLREYLQARRPPGLEYCYNPSHNPEEQLSSKDLVSCAYQVARGMEYLASKKCIHRDLAARNVLVTEDNVMKIADFGLARDIHHIDYYKKTTNGRLPVKWMAPEALFDRIYTHQSDVWSFGVLLWEIFTLGGSPYPGVPVEELFKLLKEGHRMDKPSNCTNELYMMMRDCWHAVPSQRPTFKQLVEDLDRIVALTSNQEYLDLSMPLDQYSPSFPDTRSSTCSSGEDSVFSHEPLPEEPCLPRHPAQLANGGLKRR

SEQ ID NO: 24899 - protein, 108 aa, Homo sapiens
MGVEIETISPGDGRTFPKKGQTCVVHYTGMLQNGKKFDSSRDRNKPFKFRIGKQEVIKGFEEGAAQMSLGQRAKLTCTPDVAYGATGHPGVIPPNATLIFDVELLNLE

SEQ ID NO: 24900 - protein, 80 aa, Homo sapiens
MGVEIETISPGDGRTFPKKGQTCVVHYTGMLQNGKKFDSSRDRNKPFKFRIGKQEVIKGFEEGAAQLGPLSPLPICPHPC

SEQ ID NO: 24901 - protein, 367 aa, Homo sapiens
MPFLGQDWRSPGWSWIKTEDGWKRCESCSQKLERENNRCNISHSIILNSEDGEIFNNEEHEYASKKRKKDHFRNDTNTQSFYREKWIYVHKESTKERHGYCTLGEAFNRLDFSSAIQDIRRFNYVVKLLQLIAKSQLTSLSGVAQKNYFNILDKIVQKVLDDHHNPRLIKDLLQDLSSTLCILIRGVGKSVLVGNINIWICRLETILAWQQQLQDLQMTKQVNNGLTLSDLPLHMLNNILYRFSDGWDIITLGQVTPTLYMLSEDRQLWKKLCQYHFAEKQFCRHLILSEKGHIEWKLMYFALQKHYPAKEQYGDTLHFCRHCSILFWKDYHLALLFKDSGHPCTAADPDSCFTPVSPQHFIDLFKF

SEQ ID NO: 24902 - protein, 358 aa, Homo sapiens
MPFLGQDWRSPGWSWIKTEDGWKRCESCSQKLERENNRCNISHSIILNSEDGEIFNNEEHEYASKKRKKDHFRNDTNTQSFYREKWIYVHKESTKERHGYCTLGEAFNRLDFSSAIQDIRRFNYVVKLLQLIAKSQLTSLSGVAQKNYFNILDKIVQKVLDDHHNPRLIKDLLQDLSSTLCILIRGVGKSVLVGNINIWICRLETILAWQQQLQDLQMTKQVNNGLTLSDLPLHMLNNILYRFSDGWDIITLGQVTPTLYMLSEDRQLWKKLCQYHFAEKQFCRHLILSEKGHIEWKLMYFALQKHYPAKEQYGDTLHFCRHCSILFWKDSGHPCTAADPDSCFTPVSPQHFIDLFKF

SEQ ID NO: 24903 - protein, 291 aa, Homo sapiens
MEKYSIMKSMNMHRKKGKRTILEMTQILKRHGYCTLGEAFNRLDFSSAIQDIRRFNYVVKLLQLIAKSQLTSLSGVAQKNYFNILDKIVQKVLDDHHNPRLIKDLLQDLSSTLCILIRGVGKSVLVGNINIWICRLETILAWQQQLQDLQMTKQVNNGLTLSDLPLHMLNNILYRFSDGWDIITLGQVTPTLYMLSEDRQLWKKLCQYHFAEKQFCRHLILSEKGHIEWKLMYFALQKHYPAKEQYGDTLHFCRHCSILFWKDSGHPCTAADPDSCFTPVSPQHFIDLFKF

SEQ ID NO: 24904 - protein, 89 aa, Homo sapiens; identical to SEQ ID NO: 21365

SEQ ID NO: 24905 - protein, 539 aa, Homo sapiens
MAVCARLCGVGPSRGCRRRQQRRGPAETAAADSEPDTDPEEERIEASAGVGGGLCAGPSPPPPRCSLLELPPELLVEIFASLPGTDLPSLAQVCTKFRRILHTDTIWRRRCREEYGVCENLRKLEITGVSCRDVYAKLLHRYRHILGLWQPDIGPYGGLLNVVVDGLFIIGWMYLPPHDPHVDDPMRFKPLFRIHLMERKAATVECMYGHKGPHHGHIQIVKKDEFSTKCNQTDHHRMSGGRQEEFRTWLREEWGRTLEDIFHEHMQELILMKFIYTSQYDNCLTYRRIYLPPSRPDDLIKPGLFKGTYGSHGLEIVMLSFHGRRARGTKITGDPNIPAGQQTVEIDLRHRIQLPDLENQRNFNELSRIVLEVRERVRQEQQEGGHEAGEGRGRQGPRESQPSPAQPRAEAPSKGPDGTPGEDGGEPGDAVAAAEQPAQCGQGQPFVLPVGVSSRNEDYPRTCRMCFYGTGLIAGHGFTSPERTPGVFILFDEDRFGFVWLELKSFSLYSRVQATFRNADAPSPQAFDEMLKNIQSLTS

SEQ ID NO: 24906 - protein, 431 aa, Homo sapiens
MFLVTEYGVCENLRKLEITGVSCRDVYAKLLHRYRHILGLWQPDIGPYGGLLNVVVDGLFIIGWMYLPPHDPHVDDPMRFKPLFRIHLMERKAATVECMYGHKGPHHGHIQIVKKDEFSTKCNQTDHHRMSGGRQEEFRTWLREEWGRTLEDIFHEHMQELILMKFIYTSQYDNCLTYRRIYLPPSRPDDLIKPGLFKGTYGSHGLEIVMLSFHGRRARGTKITGDPNIPAGQQTVEIDLRHRIQLPDLENQRNFNELSRIVLEVRERVRQEQQEGGHEAGEGRGRQGPRESQPSPAQPRAEAPSKGPDGTPGEDGGEPGDAVAAAEQPAQCGQGQPFVLPVGVSSRNEDYPRTCRMCFYGTGLIAGHGFTSPERTPGVFILFDEDRFGFVWLELKSFSLYSRVQATFRNADAPSPQAFDEMLKNIQSLTS

SEQ ID NO: 24907 - protein, 711 aa, Homo sapiens
MHLKPYWKLQKKEHPPEVSRETQRTPMNHQKAVNDETCKASHITSSVFPSASLGKASSRKPFGILSPNVLCSMSGKSPVESSLNVKTKKNAPSATIHQGEEEGPLDIWAVVKPGNTKEKIAFFASHQCSNRIGSMKIKSSWDIDGRATKRRKKSGDLKKAKVQVERMREVNSRCYQPEPFACGIEHCSVHYVSDSGDGVYAGRPLSVIQMVAFLEQRASALLASCSKNCTNSPAIVRFSGQSRGVPAVSESYSAPGACEEPTERGNLEVGEPQSEPVRVLDMVAKLESECLKRQGQREPGSLSRNNSFRRNVGRVLLANSTQADEGKTKKGVLEAPDTQVNPVGSVSVDCGPSRADRCSPKEDQAWDGASQDCPPLPAGVSFHIDSAELEPGSQTAVKNSNRYDVEMTDELVGLPFSSHTYSQASELPTDAVDCMSRELVSLTSRNPDQRKESLCISITVSKVDKDQPSILNSCEDPVPGMLFFLPPGQHLSDYSQLNESTTKESSEASQLEDAAGGDSASEEKSGSAEPFVLPASSVESTLPVLEASSWKKQVSHDFLETRFKIQQLLEPQQYMAFLPHHIMVKIFRLLPTKSLVALKCTCCYFKFIIEYYNIRPADSRWVRDPRYREDPCKQCKKKYVKGDVSLCRWHPKPYCQALPYGPGYWMCCHRSQKGFPGCKLGLHDNHWVPACHSFNRAIHKKAKGTEAEEEY

SEQ ID NO: 24908 - protein, 717 aa, Homo sapiens
MASSSDSEDDSFMAVDQEETVLEGTMDQDEEPHPVLEAEETRHNRSMSELPEEVLEYILSFLSPYQEHKTAALVCKQWYRLIKGVAHQCYHGFMKAVQEGNIQWESRTYPYPGTPITQRFSHSACYYDANQSMYVFGGCTQSSCNAAFNDLWRLDLNSKEWIRPLASGSYPSPKAGATLVVYKDLLVLFGGWTRPSPYPLHQPERFFDEIHTYSPSKNWWNCIVTTHGPPPMAGHSSCVIDDKMIVFGGSLGSRQMSNDVWVLDLEQWAWSKPNISGPSPHPRGGQSQIVIDDATILILGGCGGPNALFKDAWLLHMHSGPWAWQPLKVENEEHGAPELWCHPACRVGQCVVVFSQAPSGRAPLSPSLNSRPSPISATPPALVPETREYRSQSPVRSMDEAPCVNGRWGTLRPRAQRQTPSGSREGSLSPARGDGSPILNGGSLSPGTAAVGGSSLDSPVQAISPSTPSAPEGYDLKIGLSLAPRRGSLPDQKDLRLGSIDLNWDLKPASSSNPMDGMDNRTVGGSMRHPPEQTNGVHTPPHVASALAGAVSPGALRRSLEAIKAMSSKGPSASAALSPPLGSSPGSPGSQSLSSGETVPIPRPGPAQGDGHSLPPIARRLGHHPPQSLNVGKPLYQSMNCKPMQMYVLDIKDTKEKGRVKWKVFNSSSVVGPPETSLHTVVQGRGELIIFGGLMDKKQNVKYYPKTNALYFVRAKR

SEQ ID NO: 24909 - protein, 875 aa, Homo sapiens
MASLDLPYRCPRCGEHKRFRSLSSLRAHLEYSHTYETLYILSKTNSICDGAAAAAAAAAAASGFPLAPEPAALLAVPGARREVFESTSFQGKEQAAGPSPAAPHLLHHHHHHAPLAHFPGDLVPASLPCEELAEPGLVPAAAARYALREIEIPLGELFARKSVASSACSTPPPGPGPGPCPGPASASPASPSPADVAYEEGLARLKIRALEKLEVDRRLERLSEEVEQKIAGQVGRLQAELERKAAELETARQESARLGREKEELEERASELSRQVDVSVELLASLKQDLVHKEQELSRKQQEVVQIDQFLKETAAREASAKLRLQQFIEELLERADRAERQLQVISSSCGSTPSASLGRGGGGGGAGPNARGPGRMREHHVGPAVPNTYAVSRHGSSPSTGASSRVPAASQSSGCYDSDSLELPRPEEGAPEDSGPGGLGTRAQAANGGSERSQPPRSSGLRRQAIQNWQRRPRRHSTEGEEGDVSDVGSRTTESEAEGPLDAPRPGPAMAGPLSSCRLSARPEGGSGRGRRAERVSPSRSNEVISPEILKMRAALFCIFTYLDTRTLLHAAEVCRDWRFVARHPAVWTRVLLENARVCSKFLAMLAQWCTQAHSLTLQNLKPRQRGKKESKEEYARSTRGCLEAGLESLLKAAGGNLLILRISHCPNILTDRSLWLASCYCRALQAVTYRSATDPVGHEVIWALGAGCREIVSLQVAPLHPCQQPTRFSNRCLQMIGRCWPHLRALGVGGAGCGVQGLASLARNCMRLQVLELDHVSEITQEVAAEVCREGLKGLEMLVLTATPVTPKALLHFNSICRNLKSIVVQIGIADYFKEPSSPEAQKLFEDMVTKLQALRRRPGFSKILHIKVEGGC

SEQ ID NO: 24910 - protein, 275 aa, Homo sapiens
MEEVREGHALGGGMEADGPASLQELPPSPRSPSPPPSPPPLPSPPSLPSPAAPEAPELPEPAQPSEAHARQLLLEEWGPLSGGLELPQRLTWKLLLLRRPLYRNLLRSPNPEGINIYEPAPPTGPTQRPLETLGNFRGWYIRTEKLQQNQSWTVKQQCVDLLAEGLWEELLDDEQPAITVMDWFEDSRLDACVYELHVWLLAADRRTVIAQHHVAPRTSGRGPPGRWVQVSHVFRHYGPGVRFIHFLHKAKNRMEPGGLRRTRVTDSSVSVQLRE

SEQ ID NO: 24911 - protein, 428 aa, Homo sapiens
MKRGGRDSDRNSSEEGTAEKSKKLRTTNEHSQTCDWGNLLQDIILQVFKYLPLLDRAHASQVCRNWNQVFHMPDLWRCFEFELNQPATSYLKATHPELIKQIIKRHSNHLQYVSFKVDSSKESAEAACDILSQLVNCSLKTLGLISTARPSFMDLPKSHFISALTVVFVNSKSLSSLKIDDTPVDDPSLKVLVANNSDTLKLLKMSSCPHVSPAGILCVADQCHGLRELALNYHLLSDELLLALSSEKHVRLEHLRIDVVSENPGQTHFHTIQKSSWDAFIRHSPKVNLVMYFFLYEEEFDPFFRYEIPATHLYFGRSVSKDVLGRVGMTCPRLVELVVCANGLRPLDEELIRIAERCKNLSAIGLGECEVSCSAFVEFVKMCGGRLSQLSIMEEVLIPDQKYSLEQIHWEVSKHLGRVWFPDMMPTW

SEQ ID NO: 24912 - protein, 759 aa, Homo sapiens
MISSTSVYGLKMQWTPEHAQWPEQHFDITSTTRSPAHKVEAYRGHLQRTYQYAWANDDISALTASNLLKKYAEKYSGILEGPVDRPVLSNYSDTPSGLVNGRKNESEPWQPSLNSEAVYPMNCVPDVITASKAGVSSALPPADVSASIGSSPGVASNLTEPSYSSSTCGSHTVPSLHAGLPSQEYAPGYNGSYLHSTYSSQPAPALPSPHPSPLHSSGLLQPPPPPPPPPALVPGYNGTSNLSSYSYPSASYPPQTAVGSGYSPGGAPPPPSAYLPSGIPAPTPLPPTTVPGYTYQGHGLTPIAPSALTNSSASSLKRKAFYMAGQGDMDSSYGNYSYGQQRSTQSPMYRMPDNSISNTNRGNGFDRSAETSSLAFKPTKQLMSSEQQRKFSSQSSRALTPPSYSTAKNSLGSRSSESFGKYTSPVMSEHGDEHRQLLSHPMQGPGLRAATSSNHSVDEQLKNTDTHLIDLVTNEIITQGPPVDWNDIAGLDLVKAVIKEEVLWPVLRSDAFSGLTALPRSILLFGPRGTGKTLLGRCIASQLGATFFKIAGSGLVAKWLGEAEKIIHASFLVARCRQPSVIFVSDIDMLLSSQVNEEHSPVSRMRTEFLMQLDTVLTSAEDQIVVICATSKPEEIDESLRRYFMKRLLIPLPDSTARHQIIVQLLSQHNYCLNDKEFALLVQRTEGFSGLDVAHLCQEAVVGPLHAMPATDLSAIMPSQLRPVTYQDFENAFCKIQPSISQKELDMYVEWNKMFGCSQ

SEQ ID NO: 24913 - protein, 423 aa, Homo sapiens
MVFSNNDEGLINKKLPKELLLRIFSFLDIVTLCRCAQISKAWNILALDGSNWQRIDLFNFQTDVEGRVVENISKRCGGFLRKLSLRGCIGVGDSSLKTFAQNCRNIEHLNLNGCTKITDSTCYSLSRFCSKLKHLDLTSCVSITNSSLKGISEGCRNLEYLNLSWCDQITKDGIEALVRGCRGLKALLLRGCTQLEDEALKHIQNYCHELVSLNLQSCSRITDEGVVQICRGCHRLQALCLSGCSNLTDASLTALGLNCPRLQILEAARCSHLTDAGFTLLARNCHELEKMDLEECILITDSTLIQLSIHCPKLQALSLSHCELITDDGILHLSNSTCGHERLRVLELDNCLLITDVALEHLENCRGLERLELYDCQQVTRAGIKRMRAQLPHVKVHAYFAPVTPPTAVAGSGQRLCRCCVIL

SEQ ID NO: 24914 - protein, 355 aa, Homo sapiens
MVFSNNDEGLINKKLPKELLLRIFSFLDIVTLCRCAQISKAWNILALDGSNWQRIDLFNFQTDVEGRVVENISKRCGGFLRKLSLRGCIGVGDSSLKTFAQNCRNIEHLNLNGCTKITDSTCYSLSRFCSKLKHIQNYCHELVSLNLQSCSRITDEGVVQICRGCHRLQALCLSGCSNLTDASLTALGLNCPRLQILEAARCSHLTDAGFTLLARNCHELEKMDLEECILITDSTLIQLSIHCPKLQALSLSHCELITDDGILHLSNSTCGHERLRVLELDNCLLITDVALEHLENCRGLERLELYDCQQVTRAGIKRMRAQLPHVKVHAYFAPVTPPTAVAGSGQRLCRCCVIL

SEQ ID NO: 24915 - protein, 1166 aa, Homo sapiens
MAPTLFQKLFSKRTGLGAPGRDARDPDCGFSWPLPEFDPSQIRLIVYQDCERRGRNVLFDSSVKRRNEDISVSKLGSDAQVKVFGKCCQLKPGGDSSSSLDSSVTSSSDIKDQCLKYQGSRCSSDANMLGEMMFGSVAMSYKGSTLKIHQIRSPPQLMLSKVFTARTGSSICGSLNTLQDSLEFINQDNNTLKADNNTVINGLLGNIGLSQFCSPRRAFSEQGPLRLIRSASFFAVHSNPMDMPGRELNEDRDSGIARSASLSSLLITPFPSPNSSLTRSCASSYQRRWRRSQTTSLENGVFPRWSIEESFNLSDESCGPNPGIVRKKKIAIGVIFSLSKDEDENNKFNEFFFSHFPLFESHMNKLKSAIEQAMKMSRRSADASQRSLAYNRIVDALNEFRTTICNLYTMPRIGEPVWLTMMSGTPEKNHLCYRFMKEFTFLMENASKNQFLPALITAVLTNHLAWVPTVMPNGQPPIKIFLEKHSSQSVDMLAKTHPYNPLWAQLGDLYGAIGSPVRLARTVVVGKRQDMVQRLLYFLTYFIRCSELQETHLLENGEDEAIVMPGTVITTTLEKGEIEESEYVLVTMHRNKSSLLFKESEEIRTPNCNCKYCSHPLLGQNVENISQQEREDIQNSSKELLGISDECQMISPSDCQEENAVDVKQYRDKLRTCFDAKLETVVCTGSVPVDKCALSESGLESTEETWQSEKLLDSDSHTGKAMRSTGMVVEKKPPDKIVPASFSCEAAQTKVTFLIGDSMSPDSDTELRSQAVVDQITRHHTKPLKEERGAIDQHQETKQTTKDQSGESDTQNMVSEEPCELPCWNHSDPESMSLFDEYFNDDSIETRTIDDVPFKTSTDSKDHCCMLEFSKILCTKNNKQNNEFCKCIETVPQDSCKTCFPQQDQRDTLSILVPHGDKESSDKKIAVGTEWDIPRNESSDSALGDSESEDTGHDMTRQVSSYYGGEQEDWAEEDEIPFPGSKLIEVSAVQPNIANFGRSLLGGYCSSYVPDFVLQGIGSDERFRQCLMSDLSHAVQHPVLDEPIAEAVCIIADMDKWTVQVASSQRRVTDNKLGKEVLVSSLVSNLLHSTLQLYKHNLSPNFCVMHLEDRLQELYFKSKMLSEYLRGQMRVHVKELGVVLGIESSDLPLLAAVASTHSPYVAQILL

SEQ ID NO: 24916 - protein, 508 aa, Homo sapiens
MAPTLFQKLFSKRTGLGAPGRDARDPDCGFSWPLPEFDPSQIRLIVYQDCERRGRNVLFDSSVKRRNEDISVSKLGSDAQVKVFGKCCQLKPGGDSSSSLDSSVTSSSDIKDQCLKYQGSRCSSDANMLGEMMFGSVAMSYKGSTLKIHQIRSPPQLMLSKVFTARTGSSICGSLNTLQDSLEFINQDNNTLKADNNTVINGLLGNIGLSQFCSPRRAFSEQGPLRLIRSASFFAVHSNPMDMPGRELNEDRDSGIARSASLSSLLITPFPSPNSSLTRSCASSYQRRWRRSQTTSLENGVFPRWSIEESFNLSDESCGPNPGIVRKKKIAIGVIFSLSKDEDENNKFNEFFFSHFPLFESHMNKLKSAIEQAMKMSRRSADASQRSLAYNRIVDALNEFRTTICNLYTMPRIGEPVWLTMMSGTPEKNHLCYRFMKEFTFLMENASKNQFLPALITAVLTNHLAWVPTVMPNGQPPIKIFLEKHSSQSVDMLAKTHPYNPLWAQLGM

SEQ ID NO: 24917 - protein, 1138 aa, Homo sapiens
MAPTLFQKLFSKRTGLGAPGRDARDPDCGFSWPLPEFDPSQIRLIVYQDCERRGRNVLFDSSVKRRNEDISVSKLGSDAQVKVFGKCCQLKPGGDSSSSLDSSVTSSSDIKDQCLKYQGSRCSSDANMLGEMMFGSVAMSYKGSTLKIHQIRSPPQLMLSKVFTARTGSSICGSLNTLQDSLEFINQDNNTLKADNNTVINGLLGNIVHSNPMDMPGRELNEDRDSGIARSASLSSLLITPFPSPNSSLTRSCASSYQRRWRRSQTTSLENGVFPRWSIEESFNLSDESCGPNPGIVRKKKIAIGVIFSLSKDEDENNKFNEFFFSHFPLFESHMNKLKSAIEQAMKMSRRSADASQRSLAYNRIVDALNEFRTTICNLYTMPRIGEPVWLTMMSGTPEKNHLCYRFMKEFTFLMENASKNQFLPALITAVLTNHLAWVPTVMPNGQPPIKIFLEKHSSQSVDMLAKTHPYNPLWAQLGDLYGAIGSPVRLARTVVVGKRQDMVQRLLYFLTYFIRCSELQETHLLENGEDEAIVMPGTVITTTLEKGEIEESEYVLVTMHRNKSSLLFKESEEIRTPNCNCKYCSHPLLGQNVENISQQEREDIQNSSKELLGISDECQMISPSDCQEENAVDVKQYRDKLRTCFDAKLETVVCTGSVPVDKCALSESGLESTEETWQSEKLLDSDSHTGKAMRSTGMVVEKKPPDKIVPASFSCEAAQTKVTFLIGDSMSPDSDTELRSQAVVDQITRHHTKPLKEERGAIDQHQETKQTTKDQSGESDTQNMVSEEPCELPCWNHSDPESMSLFDEYFNDDSIETRTIDDVPFKTSTDSKDHCCMLEFSKILCTKNNKQNNEFCKCIETVPQDSCKTCFPQQDQRDTLSILVPHGDKESSDKKIAVGTEWDIPRNESSDSALGDSESEDTGHDMTRQVSSYYGGEQEDWAEEDEIPFPGSKLIEVSAVQPNIANFGRSLLGGYCSSYVPDFVLQGIGSDERFRQCLMSDLSHAVQHPVLDEPIAEAVCIIADMDKWTVQVASSQRRVTDNKLGKEVLVSSLVSNLLHSTLQLYKHNLSPNFCVMHLEDRLQELYFKSKMLSEYLRGQMRVHVKELGVVLGIESSDLPLLAAVASTHSPYVAQILL

SEQ ID NO: 24918 - protein, 491 aa, Homo sapiens
MGANNGKQYGSEGKGSSSISSDVSSSTDHTPTKAQKNVATSEDSDLSMRTLSTPSPALICPPNLPGFQNGRGSSTSSSSITGETVAMVHSPPPTRLTHPLIRLASRPQKEQASIDRLPDHSMVQIFSFLPTNQLCRCARVCRRWYNLAWDPRLWRTIRLTGETINVDRALKVLTRRLCQDTPNVCLMLETVTVSGCRRLTDRGLYTIAQCCPELRRLEVSGCYNISNEAVFDVVSLCPNLEHLDVSGCSKVTCISLTREASIKLSPLHGKQISIRYLDMTDCFVLEDEGLHTIAAHCTQLTHLYLRRCVRLTDEGLRYLVIYCASIKELSVSDCRFVSDFGLREIAKLESRLRYLSIAHCGRVTDVGIRYVAKYCSKLRYLNARGCEGITDHGVEYLAKNCTKLKSLDIGKCPLVSDTGLECLALNCFNLKRLSLKSCESITGQGLQIVAANCFDLQTLNVQDCEVSVEALRFVKRHCKRCVIEHTNPAFF

SEQ ID NO: 24919 - protein, 444 aa, Homo sapiens
MRTLSTPSPALICPPNLPGFQNGRGSSTSSSSITGETVAMVHSPPPTRLTHPLIRLASRPQKEQASIDRLPDHSMVQIFSFLPTNQLCRCARVCRRWYNLAWDPRLWRTIRLTGETINVDRALKVLTRRLCQDTPNVCLMLETVTVSGCRRLTDRGLYTIAQCCPELRRLEVSGCYNISNEAVFDVVSLCPNLEHLDVSGCSKVTCISLTREASIKLSPLHGKQISIRYLDMTDCFVLEDEGLHTIAAHCTQLTHLYLRRCVRLTDEGLRYLVIYCASIKELSVSDCRFVSDFGLREIAKLESRLRYLSIAHCGRVTDVGIRYVAKYCSKLRYLNARGCEGITDHGVEYLAKNCTKLKSLDIGKCPLVSDTGLECLALNCFNLKRLSLKSCESITGQGLQIVAANCFDLQTLNVQDCEVSVEALRFVKRHCKRCVIEHTNPAFF

SEQ ID NO: 24920 - protein, 454 aa, Homo sapiens
MERKDFETWLDNISVTFLSLTDLQKNETLDHLISLSGAVQLRHLSNNLETLLKRDFLKLLPLELSFYLLKWLDPQTLLTCCLVSKQWNKVISACTEVWQTACKNLGWQIDDSVQDALHWKKVYLKAILRMKQLEDHEAFETSSLIGHSARVYALYYKDGLLCTGSDDLSAKLWDVSTGQCVYGIQTHTCAAVKFDEQKLVTGSFDNTVACWEWSSGARTQHFRGHTGAVFSVDYNDELDILVSGSADFTVKVWALSAGTCLNTLTGHTEWVTKVVLQKCKVKSLLHSPGDYILLSADKYEIKIWPIGREINCKCLKTLSVSEDRSICLQPRLHFDGKYIVCSSALGLYQWDFASYDILRVIKTPEIANLALLGFGDIFALLFDNRYLYIMDLRTESLISRWPLPEYRKSKRGSSFLAGEASWLNGLDGHNDTGLVFATSMPDHSIHLVLWKEHG

SEQ ID NO: 24921 - protein, 389 aa, Homo sapiens
MERKDFETWLDNISVTFLSLTDLQKNETLDHLISLSGAVQLRHLSNNLETLLKRDFLKLLPLELSFYLLKWLDPQTLLTCCLVSKQWNKVISACTEVWQTACKNLGWQIDDSVQDALHWKKVYLKAILRMKQLEDHEAFETSSLIGHSARVYALYYKDGLLCTVFSVDYNDELDILVSGSADFTVKVWALSAGTCLNTLTGHTEWVTKVVLQKCKVKSLLHSPGDYILLSADKYEIKIWPIGREINCKCLKTLSVSEDRSICLQPRLHFDGKYIVCSSALGLYQWDFASYDILRVIKTPEIANLALLGFGDIFALLFDNRYLYIMDLRTESLISRWPLPEYRKSKRGSSFLAGEASWLNGLDGHNDTGLVFATSMPDHSIHLVLWKEHG

SEQ ID NO: 24922 - protein, 452 aa, Homo sapiens
MDGTIKEALSVVSDDQSLFDSAYGAAAHLPKADMTASGSPDYGQPHKINPLPPQQEWINQPVRVNVKREYDHMNGSRESPVDCSVSKCSKLVGGGESNPMNYNSYMDEKNGPPPPNMTTNERRVIVPADPTLWTQEHVRQWLEWAIKEYSLMEIDTSFFQNMDGKELCKMNKEDFLRATTLYNTEVLLSHLSYLRESSLLAYNTTSHTDQSSRLSVKEDPSYDSVRRGAWGNNMNSGLNKSPPLGGAQTISKNTEQRPQPDPYQILGPTSSRLANPGSGQIQLWQFLLELLSDSANASCITWEGTNGEFKMTDPDEVARRWGERKSKPNMNYDKLSRALRYYYDKNIMTKVHGKRYAYKFDFHGIAQALQPHPTESSMYKYPSDISYMPSYHAHQQKVNFVPPHPSSMPVTSSSFFGAASQYWTSPTGGIYPNPNVPRHPNTHVPSHLGSYY

SEQ ID NO: 24923 - protein, 386 aa, Homo sapiens
MEGGLAGERARESPVDCSVSKCSKLVGGGESNPMNYNSYMDEKNGPPPPNMTTNERRVIVPADPTLWTQEHVRQWLEWAIKEYSLMEIDTSFFQNMDGKELCKMNKEDFLRATTLYNTEVLLSHLSYLRESSLLAYNTTSHTDQSSRLSVKEDPSYDSVRRGAWGNNMNSGLNKSPPLGGAQTISKNTEQRPQPDPYQILGPTSSRLANPGSGQIQLWQFLLELLSDSANASCITWEGTNGEFKMTDPDEVARRWGERKSKPNMNYDKLSRALRYYYDKNIMTKVHGKRYAYKFDFHGIAQALQPHPTESSMYKYPSDISYMPSYHAHQQKVNFVPPHPSSMPVTSSSFFGAASQYWTSPTGGIYPNPNVPRHPNTHVPSHLGSYY

SEQ ID NO: 24924 - protein, 419 aa, Homo sapiens
MTASGSPDYGQPHKINPLPPQQEWINQPVRVNVKREYDHMNGSRESPVDCSVSKCSKLVGGGESNPMNYNSYMDEKNGPPPPNMTTNERRVIVPADPTLWTQEHVRQWLEWAIKEYSLMEIDTSFFQNMDGKELCKMNKEDFLRATTLYNTEVLLSHLSYLRESSLLAYNTTSHTDQSSRLSVKEDPSYDSVRRGAWGNNMNSGLNKSPPLGGAQTISKNTEQRPQPDPYQILGPTSSRLANPGSGQIQLWQFLLELLSDSANASCITWEGTNGEFKMTDPDEVARRWGERKSKPNMNYDKLSRALRYYYDKNIMTKVHGKRYAYKFDFHGIAQALQPHPTESSMYKYPSDISYMPSYHAHQQKVNFVPPHPSSMPVTSSSFFGAASQYWTSPTGGIYPNPNVPRHPNTHVPSHLGSYY

SEQ ID NO: 24925 - protein, 259 aa, Homo sapiens
MDPGSLLAYNTTSHTDQSSRLSVKEDPSYDSVRRGAWGNNMNSGLNKSPPLGGAQTISKNTEQRPQPDPYQILGPTSSRLANPGSGQIQLWQFLLELLSDSANASCITWEGTNGEFKMTDPDEVARRWGERKSKPNMNYDKLSRALRYYYDKNIMTKVHGKRYAYKFDFHGIAQALQPHPTESSMYKYPSDISYMPSYHAHQQKVNFVPPHPSSMPVTSSSFFGAASQYWTSPTGGIYPNPNVPRHPNTHVPSHLGSYY

SEQ ID NO: 24926 - protein, 416 aa, Homo sapiens
MKRERGALSRASRALRLAPFVYLLLIQTDPLEGVNITSPVRLIHGTVGKSALLSVQYSSTSSDRPVVKWQLKRDKPVTVVQSIGTEVIGTLRPDYRDRIRLFENGSLLLSDLQLADEGTYEVEISITDDTFTGEKTINLTVDVPISRPQVLVASTTVLELSEAFTLNCSHENGTKPSYTWLKDGKPLLNDSRMLLSPDQKVLTITRVLMEDDDLYSCMVENPISQGRSLPVKITVYRRSSLYIILSTGGIFLLVTLVTVCACWKPSKRKQKKLEKQNSLEYMDQNDDRLKPEADTLPRSGEQERKNPMALYILKDKDSPETEENPAPEPRSATEPGPPGYSVSPAVPGRSPGLPIRSARRYPRSPARSPATGRTHSSPPRAPSSPGRSRSASRTLRTAGVHIIREQDEAGPVEISA

SEQ ID NO: 24927 - protein, 367 aa, Homo sapiens
MKRERGALSRASRALRLAPFVYLLLIQTDPLEGVNITSPVRLIHGTVGKSALLSVQYSSTSSDRPVVKWQLKRDKPVTVVQSIGTEVIGTLRPDYRDRIRLFENGSLLLSDLQLADEGTYEVEISITDDTFTGEKTINLTVDVPISRPQVLVASTTVLELSEAFTLNCSHENGTKPSYTWLKDGKPLLNDSRMLLSPDQKVLTITRVLMEDDDLYSCMVENPISQGRSLPVKITVYRRSSLYIILSTGGIFLLVTLVTVCACWKPSKRKQKKLEKQNSLEYMDQNDDRLKPEGELPATQSPIPSTIRSVGCWEKAELGDKENSSAGTLPSDLGASKGKEPEPASLASSHSLPRRHAMPSTLSVSVHE

SEQ ID NO: 24928 - protein, 314 aa, Homo sapiens
MLVSGRRRLLTVLLQAQKWPFQPSRDMRLVQFRAPHLVGPHLGLETGNGGGVINLNAFDPTLPKTMTQFLEQGEATLSVARRALAAQLPVLPRSEVTFLAPVTRPDKVVCVGMNYVDHCKEQNVPVPKEPIIFSKFASSIVGPYDEVVLPPQSQEVDWEVELAVVIGKKGKHIKATDAMAHVAGFTVAHDVSARDWQMRRNGKQWLLGKTFDTFCPLGPALVTKDSVADPHNLKICCRVNGEVVQSGNTNQMVFKTEDLIAWVSQFVTFYPGDVILTGTPPGVGVFRKPPVFLKKGDEVQCEIEELGVIINKVV

SEQ ID NO: 24929 - protein, 270 aa, Homo sapiens
MWLLVSVILISRISSVGGEAMFCDFPKINHGILYDEEKYKPFSQVPTGEVFYYSCEYNFVSPSKSFWTRITCAEEGWSPTPKCLRLCFFPFVENGHSESSGQTHLEGDTVQIICNTGYRLQNNENNISCVERGWSTPPKCRSTISAEKCGPPPPIDNGDITSFLLSVYAPGSSVEYQCQNLYQLEGNNQITCRNGQWSEPPKCLDPCVISQEIMEKYNIKLKWTNQQKLYSRTGDIVEFVCKSGYHPTKSHSFRAMCQNGKLVYPSCEEK

SEQ ID NO: 24930 - protein, 243 aa, Homo sapiens
MWLLVSVILISRISSVGGEAMFCDFPKINHGILYDEEKYKPFSQVPTGEVFYYSCEYNFVSPSKSFWTRITCAEEGWSPTPKCLRLCFFPFVENGHSESSGQTHLEGDTVQIICNTGYRLQNNENNISCVERGWSTPPKCRSTSSSVEYQCQNLYQLEGNNQITCRNGQWSEPPKCLDPCVISQEIMEKYNIKLKWTNQQKLYSRTGDIVEFVCKSGYHPTKSHSFRAMCQNGKLVYPSCEEK

SEQ ID NO: 24931 - protein, 662 aa, Homo sapiens
MALITLRKNLYRLSDFQMHRALAALKNKPLNHVHKVVKERLCPWLCSRQPEPFGVKFHHAHCKKFHSKNGNDLHPLGGPVFSQVSDCDRLEQNVKNEESQMFYRRLSNLTSSEEVLSFISTMETLPDTMAAGALQRICEVEKKDGDQGLPKEILENSIFQALCFQFEKEPSQLSNTSLVTALQALILLHVDPQSSLLLNLVAECQNRLRKGGMEVRNLCILGESLITLHSSGCVTLELIINQLQGEKLETFTPEDIVALYRILQACTEKVDEHQTFLNKINNFSLSIVSNLSPKLISQMLTALVVLDQSQAFPLIIKLGKYVVRHVPHFTNEELRRVLEAFIYFGHHDTFFTKALEHRVAAVCLTLDPEVVCRVMEYCSRELILSKPILNAVAETFVCQTEKFSPRQISALMEPFGKLNYLPPNASALFRKLENVLFTHFNYFPPKSLLKLLHSCSLNECHPVNFLAKIFKPLFLQRLQGKESHLDTLSRAQLTQLFLASVLECPFYKGPKLLPKYQVKSFLTPCCSLETPVDSQLYRYVKIGLTNLLGARLYFAPKVLTPYCYTIDVEIKLDEEGFVLPSTANEDIHKRIALCIDGPKRFCSNSKHLLGKEAIKQRHLQLLGYQVVQIPYHEIGMLKSRRELVEYLQRKLFSQNTVHWLQE

SEQ ID NO: 24932 - protein, 4557 aa, Homo sapiens
MDIIMGHCVGTRPPACCLILLLFKLLATVSQGLPGTGPLGFHFTHSIYNATVYENSAARTYVNSQSRMGITLIDLSWDIKYRIVSGDEEGFFKAEEVIIADFCFLRIRTKGGNSAILNREIQDNYLLIVKGSVRGEDLEAWTKVNIQVLDMNDLRPLFSPTTYSVTIAESTPLRTSVAQVTATDADIGSNGEFYYYFKNKVDLFSVHPTSGVISLSGRLNYDEKNRYDLEILAVDRGMKLYGNNGVSSTAKLYVHIERINEHAPTIHVVTHVPFSLEKEPTYAVVTVDDLDDGANGEIESVSIVAGDPLDQFFLAKEGKWLNEYKIKERKQIDWESFPYGYNLTLQAKDKGSPQKCSALKAVYIGNPTRDTVPIRFEKEVYDVSISEFSPPGVVVAIVKLSPEPIDVEYKLSPGEDAVYFKINPRSGLIVTARPLNTVKKEVYKLEVTNKEGDLKAQVTISIEDANDHTPEFQQPLYDAYVNESVPVGTSVLTVSASDKDKGENGYITYSIASLNLLPFVINQFTGVISTTEELDFESSPEIYRFIVRASDWGSPYRHESEVNVTIRIGNVNDNSPLFEKVACQGVISYDFPVGGHITAVSAIDIDELELVKYKIISGNELGFFYLNPDSGVLQLKKSLTNSGIKNGNFALRITATDGENLADPMSINISVLHGKVSSKSFSCRETRVAQKLAEKLLIKAKANGKLNLEDGFLDFYSINRQGPYFDKSFPSDVAVKEDLPVGANILKIKAYDADSGFNGKVLFTISDGNTDSCFNIDMETGQLKVLMPMDREHTDLYLLNITIYDLGNPQKSSWRLLTINVEDANDNSPVFIQDSYSVNILESSGIGTEIIQVEARDKDLGSNGEVTYSVLTDTQQFAINSSTGIVYVADQLDRESKANYSLKIEARDKAESGQQLFSVVTLKVFLDDVNDCSPAFIPSSYSVKVLEDLPVGTVIAWLETHDPDLGLGGQVRYSLVNDYNGRFEIDKASGAIRLSKELDYEKQQFYNLTVRAKDKGRPVSLSSVSFVEVEVVDVNENLHTPYFPDFAVVGSVKENSRIGTSVLQVTARDEDSGRDGEIQYSIRDGSGLGRFSIDDESGVITAADILDRETMGSYWLTVYATDRGVVPLYSTIEVYIEVEDVNDNAPLTSEPIYYPVVMENSPKDVSVIQIQAEDPDSSSNEKLTYRITSGNPQNFFAINIKTGLITTTSRKLDREQQAEHFLEVTVTDGGPSPKQSTIWVVVQVLDENDNKPQFPEKVYQIKLPERDRKKRGEPIYRAFAFDRDEGPNAEISYSIVDGNDDGKFFIDPKTGMVSSRKQFTAGSYDILTIKAVDNGRPQKSSTARLHIEWIKKPPPSPIPLTFDEPFYNFTVMESDRVTEIVGVVSVQPANTPLWFDIVGGNFDSAFDAEKGVGTIVIAKPLDAEQRSIYNMSVEVTDGTNVAVTQVFIKVLDNNDNGPEFSQPNYDVTISEDVLPDTEILQIEATDRDEKHKLSYTVHSSIDSISMRKFRIDPSTGVLYTAERLDHEAQDKHILNIMVRDQEFPYRRNLARVIVNVEDANDHSPYFTNPLYEASVFESAALGSAVLQVTALDKDKGENAELIYTIEAGNTGNMFKIEPVLGIITICKEPDMTTMGQFVLSIKVTDQGSPPMSATAIVRISVTMSDNSHPKFIHKDYQAEVNENVDIGTSVILISAISQSTLIYEVKDGDINGIFTINPYSGVITTQKALDYERTSSYQLIIQATNMAGMASNATVNIQIVDENDNAPVFLFSQYSGSLSEAAPINSIVRSLDNSPLVIRATDADSNRNALLVYQIVESTAKKFFTVDSSTGAIRTIANLDHETIAHFHFHVHVRDSGSPQLTAESPVEVNIEVTDVNDNPPVFTQAVFETILLLPTYVGVEVLKVSATDPDSEVPPELTYSLMEGSLDHFLIDSNSGVLTIKNNNLSKDHYMLIVKVSDGKFYSTSMVTIMVKEAMDSGLHFTQSFYSTSISENNTNITKVAIVNAVGNRLNEPLKYSILNPGNKFKIKSTSGVIQTTGVPFDREEQELYELVVEASRELDHLRVARVVVRVNIEDINDNSPVFVGLPYYAAVQVDAEPGTLIYQVTAIDKDKGPNGEVTYVLQDDYGHFEINPNSGNVILKEAFNSDLSNIEYGVTILAKDGGKPSLSTSVELPITIVNKAMPVFDKPFYTASVNEDIRMNTPILSINATSPEGQGIIYIIIDGDPFKQFNIDFDTGVLKVVSPLDYEVTSAYKLTIRASDALTGARAEVTVDLLVNDVNDNPPIFDQPTYNTTLSEASLIGTPVLQVVSIDADSENNKMVHYQIVQDTYNSTDYFHIDSSSGLILTARMLDHELVQHCTLKVRSIDSGFPSLSSEVLVHIYISDVNDNPPVFNQLIYESYVSELAPRGHFVTCVQASDADSSDFDRLEYSILSGNDRTSFLMDSKSGVITLSNHRKQRMEPLYSLNVSVSDGLFTSTAQVHIRVLGANLYSPAFSQSTYVAEVRENVAAGTKVIHVRATDGDPGTYGQISYAIINDFAKDRFLIDSNGQVITTERLDRENPLEGDVSIFVRALDGGGRTTFCTVRVIVVDENDNAPQFMTVEYRASVRADVGRGHLVTQVQAIDPDDGANSRITYSLYSEASVSVADLLEIDPDNGWMVTKGNFNQLKNTVLSFFVKAVDGGIPVKHSLIPVYIHVLPPETFLPSFTQSQYSFTIAEDTAIGSTVDTLRILPSQNVWFSTVNGERPENNKGGIFVIEQETGTIKLDKRLDRETSPAFHFKVAATIPLDKVDIVFTVDVDIKVLDLNDNKPVFETSSYDTIIMEGMPVGTKLTQVRAIDMDWGANGQVTYSLHSDSQPEKVMEAFNIDSNTGWISTLKDLDHETDPTFTFSVVASDLGEAFSLSSTALVSVRVTDINDNAPVFAQEVYRGNVKESDPPGEVVAVLSTWDRDTSDVNRQVSYHITGGNPRGRFALGLVQSEWKVYVKRPLDREEQDIYFLNITATDGLFVTQAMVEVSVSDVNDNSPVCDQVAYTALLPEDIPSNKIILKVSAKDADIGSNGYIRYSLYGSGNSEFFLDPESGELKTLALLDRERIPVYSLMAKATDGGGRFCQSNIHLILEDVNDNPPVFSSDHYNTCVYENTATKALLTRVQAVDPDIGINRKVVYSLADSAGGVFSIDSSSGIIILEQPLDREQQSSYNISVRATDQSPGQSLSSLTTVTITVLDINDNPPVFERRDYLVTVPEDTSPGTQVLAVFATSKDIGTNAEITYLIRSGNEQGKFKINPKTGGISVSEVLDYELCKRFYLVVEAKDGGTPALSAVATVNINLTDVNDNPPKFSQDVYSAVISEDALVGDSVILLIAEDVDSQPNGQIHFSIVNGDRDNEFTVDPVLGLVKVKKKLDRERVSGYSLLVQAVDSGIPAMSSTATVNIDISDVNDNSPVFTPANYTAVIQENKPVGTSILQLVVTDRDSFHNGPPFSFSILSGNEEEEFVLDPHGILRSAVVFQHTESLEYVLCVQAKDSGKPQQVSHTYIRVRVIEESTHKPTAIPLEIFIVTMEDDFPGGVIGKIHATDQDMYDVLTFALKSEQKSLFKVNSHDGKIIALGGLDSGKYVLNVSVSDGRFQVPIDVVVHVEQLVHEMLQNTVTIRFENVSPEDFVGLHMHGFRRTLRNAVLTQKQDSLRIISIQPVAGTNQLDMLFAVEMHSSEFYKPAYLIQKLSNARRHLENIMRISAILEKNCSGLDCQEQHCEQGLSLDSHALMTYSTARISFVCPRFYRNVRCTCNGGLCPGSNDPCVEKPCPGDMQCVSYEASRRPFLCQCPPGKLGECSGHTSLSFAGNSYIKYRLSENSKEEDFKLALRLRTLQSNGIIMYTRANPCIILKIVDGKLWFQLDCGSGPGILGISGRAVNDGSWHSVFLELNRNFTSLSLDDSYVERRRAPLYFQTLSTESSIYFGALVQADNIRSLTDTRVTQVLSGFQGCLDSVILNNNELPLQNKRSSFAEVVGLTELKLGCVLYPDACKRSPCQHGGSCTGLPSGGYQCTCLSQFTGRNCESEITACFPNPCRNGGSCDPIGNTFICNCKAGLTGVTCEEDINECEREECENGGSCVNVFGSFLCNCTPGYVGQYCGLRPVVVPNIQAGHSYVGKEELIGIAVVLFVIFILVVLFIVFRKKVFRKNYSRNNITLVQDPATAALLNKSNGIPFRNLRGSGDGRNVYQEVGPPQVPVRPMAYTPCFQSDSRSNLDKIVDGLGGEHQEMTTFHPESPRILTARRGVVVCSVAPNLPAVSPCRSDCDSIRKNGWDAGTENKGVDDPGEVTCFAGSNKGSNSEVQSLSSFQSDSGDDNAYHWDTSDWMPGARLSDIEEVPNYENQDGGSAHQGSTRELESDYYLGGYDIDSEYPPPHEEEFLSQDQLPPPLPEDFPDQYEALPPSQPVSLASTLSPDCRRRPQFHPSQYLPPHPFPNETDLVGPPASCEFSTFAVSMNQGTEPTGPADSVSLSLHNSRGTSSSDVSANCGFDDSEVAMSDYESVGELSLASLHIPFVETQHQTQV

SEQ ID NO: 24933 - protein, 4589 aa, Homo sapiens
MDIIMGHCVGTRPPACCLILLLFKLLATVSQGLPGTGPLGFHFTHSIYNATVYENSAARTYVNSQSRMGITLIDLSWDIKYRIVSGDEEGFFKAEEVIIADFCFLRIRTKGGNSAILNREIQDNYLLIVKGSVRGEDLEAWTKVNIQVLDMNDLRPLFSPTTYSVTIAESTPLRTSVAQVTATDADIGSNGEFYYYFKNKVDLFSVHPTSGVISLSGRLNYDEKNRYDLEILAVDRGMKLYGNNGVSSTAKLYVHIERINEHAPTIHVVTHVPFSLEKEPTYAVVTVDDLDDGANGEIESVSIVAGDPLDQFFLAKEGKWLNEYKIKERKQIDWESFPYGYNLTLQAKDKGSPQKCSALKAVYIGNPTRDTVPIRFEKEVYDVSISEFSPPGVVVAIVKLSPEPIDVEYKLSPGEDAVYFKINPRSGLIVTARPLNTVKKEVYKLEVTNKEGDLKAQVTISIEDANDHTPEFQQPLYDAYVNESVPVGTSVLTVSASDKDKGENGYITYSIASLNLLPFVINQFTGVISTTEELDFESSPEIYRFIVRASDWGSPYRHESEVNVTIRIGNVNDNSPLFEKVACQGVISYDFPVGGHITAVSAIDIDELELVKYKIISGNELGFFYLNPDSGVLQLKKSLTNSGIKNGNFALRITATDGENLADPMSINISVLHGKVSSKSFSCRETRVAQKLAEKLLIKAKANGKLNLEDGFLDFYSINRQGPYFDKSFPSDVAVKEDLPVGANILKIKAYDADSGFNGKVLFTISDGNTDSCFNIDMETGQLKVLMPMDREHTDLYLLNITIYDLGNPQKSSWRLLTINVEDANDNSPVFIQDSYSVNILESSGIGTEIIQVEARDKDLGSNGEVTYSVLTDTQQFAINSSTGIVYVADQLDRESKANYSLKIEARDKAESGQQLFSVVTLKVFLDDVNDCSPAFIPSSYSVKVLEDLPVGTVIAWLETHDPDLGLGGQVRYSLVNDYNGRFEIDKASGAIRLSKELDYEKQQFYNLTVRAKDKGRPVSLSSVSFVEVEVVDVNENLHTPYFPDFAVVGSVKENSRIGTSVLQVTARDEDSGRDGEIQYSIRDGSGLGRFSIDDESGVITAADILDRETMGSYWLTVYATDRGVVPLYSTIEVYIEVEDVNDNAPLTSEPIYYPVVMENSPKDVSVIQIQAEDPDSSSNEKLTYRITSGNPQNFFAINIKTGLITTTSRKLDREQQAEHFLEVTVTDGGPSPKQSTIWVVVQVLDENDNKPQFPEKVYQIKLPERDRKKRGEPIYRAFAFDRDEGPNAEISYSIVDGNDDGKFFIDPKTGMVSSRKQFTAGSYDILTIKAVDNGRPQKSSTARLHIEWIKKPPPSPIPLTFDEPFYNFTVMESDRVTEIVGVVSVQPANTPLWFDIVGGNFDSAFDAEKGVGTIVIAKPLDAEQRSIYNMSVEVTDGTNVAVTQVFIKVLDNNDNGPEFSQPNYDVTISEDVLPDTEILQIEATDRDEKHKLSYTVHSSIDSISMRKFRIDPSTGVLYTAERLDHEAQDKHILNIMVRDQEFPYRRNLARVIVNVEDANDHSPYFTNPLYEASVFESAALGSAVLQVTALDKDKGENAELIYTIEAGNTGNMFKIEPVLGIITICKEPDMTTMGQFVLSIKVTDQGSPPMSATAIVRISVTMSDNSHPKFIHKDYQAEVNENVDIGTSVILISAISQSTLIYEVKDGDINGIFTINPYSGVITTQKALDYERTSSYQLIIQATNMAGMASNATVNIQIVDENDNAPVFLFSQYSGSLSEAAPINSIVRSLDNSPLVIRATDADSNRNALLVYQIVESTAKKFFTVDSSTGAIRTIANLDHETIAHFHFHVHVRDSGSPQLTAESPVEVNIEVTDVNDNPPVFTQAVFETILLLPTYVGVEVLKVSATDPDSEVPPELTYSLMEGSLDHFLIDSNSGVLTIKNNNLSKDHYMLIVKVSDGKFYSTSMVTIMVKEAMDSGLHFTQSFYSTSISENNTNITKVAIVNAVGNRLNEPLKYSILNPGNKFKIKSTSGVIQTTGVPFDREEQELYELVVEASRELDHLRVARVVVRVNIEDINDNSPVFVGLPYYAAVQVDAEPGTLIYQVTAIDKDKGPNGEVTYVLQDDYGHFEINPNSGNVILKEAFNSDLSNIEYGVTILAKDGGKPSLSTSVELPITIVNKAMPVFDKPFYTASVNEDIRMNTPILSINATSPEGQGIIYIIIDGDPFKQFNIDFDTGVLKVVSPLDYEVTSAYKLTIRASDALTGARAEVTVDLLVNDVNDNPPIFDQPTYNTTLSEASLIGTPVLQVVSIDADSENNKMVHYQIVQDTYNSTDYFHIDSSSGLILTARMLDHELVQHCTLKVRSIDSGFPSLSSEVLVHIYISDVNDNPPVFNQLIYESYVSELAPRGHFVTCVQASDADSSDFDRLEYSILSGNDRTSFLMDSKSGVITLSNHRKQRMEPLYSLNVSVSDGLFTSTAQVHIRVLGANLYSPAFSQSTYVAEVRENVAAGTKVIHVRATDGDPGTYGQISYAIINDFAKDRFLIDSNGQVITTERLDRENPLEGDVSIFVRALDGGGRTTFCTVRVIVVDENDNAPQFMTVEYRASVRADVGRGHLVTQVQAIDPDDGANSRITYSLYSEASVSVADLLEIDPDNGWMVTKGNFNQLKNTVLSFFVKAVDGGIPVKHSLIPVYIHVLPPETFLPSFTQSQYSFTIAEDTAIGSTVDTLRILPSQNVWFSTVNGERPENNKGGIFVIEQETGTIKLDKRLDRETSPAFHFKVAATIPLDKVDIVFTVDVDIKVLDLNDNKPVFETSSYDTIIMEGMPVGTKLTQVRAIDMDWGANGQVTYSLHSDSQPEKVMEAFNIDSNTGWISTLKDLDHETDPTFTFSVVASDLGEAFSLSSTALVSVRVTDINDNAPVFAQEVYRGNVKESDPPGEVVAVLSTWDRDTSDVNRQVSYHITGGNPRGRFALGLVQSEWKVYVKRPLDREEQDIYFLNITATDGLFVTQAMVEVSVSDVNDNSPVCDQVAYTALLPEDIPSNKIILKVSAKDADIGSNGYIRYSLYGSGNSEFFLDPESGELKTLALLDRERIPVYSLMAKATDGGGRFCQSNIHLILEDVNDNPPVFSSDHYNTCVYENTATKALLTRVQAVDPDIGINRKVVYSLADSAGGVFSIDSSSGIIILEQPLDREQQSSYNISVRATDQSPGQSLSSLTTVTITVLDINDNPPVFERRDYLVTVPEDTSPGTQVLAVFATSKDIGTNAEITYLIRSGNEQGKFKINPKTGGISVSEVLDYELCKRFYLVVEAKDGGTPALSAVATVNINLTDVNDNPPKFSQDVYSAVISEDALVGDSVILLIAEDVDSQPNGQIHFSIVNGDRDNEFTVDPVLGLVKVKKKLDRERVSGYSLLVQAVDSGIPAMSSTATVNIDISDVNDNSPVFTPANYTAVIQENKPVGTSILQLVVTDRDSFHNGPPFSFSILSGNEEEEFVLDPHGILRSAVVFQHTESLEYVLCVQAKDSGKPQQVSHTYIRVRVIEESTHKPTAIPLEIFIVTMEDDFPGGVIGKIHATDQDMYDVLTFALKSEQKSLFKVNSHDGKIIALGGLDSGKYVLNVSVSDGRFQVPIDVVVHVEQLVHEMLQNTVTIRFENVSPEDFVGLHMHGFRRTLRNAVLTQKQDSLRIISIQPVAGTNQLDMLFAVEMHSSEFYKPAYLIQKLSNARRHLENIMRISAILEKNCSGLDCQEQHCEQGLSLDSHALMTYSTARISFVCPRFYRNVRCTCNGGLCPGSNDPCVEKPCPGDMQCVSYEASRRPFLCQCPPGKLGECSGHTSLSFAGNSYIKYRLSENSKEEDFKLALRLRTLQSNGIIMYTRANPCIILKIVDGKLWFQLDCGSGPGILGISGRAVNDGSWHSVFLELNRNFTSLSLDDSYVERRRAPLYFQTLSTESSIYFGALVQADNIRSLTDTRVTQVLSGFQGCLDSVILNNNELPLQNKRSSFAEVVGLTELKLGCVLYPDACKRSPCQHGGSCTGLPSGGYQCTCLSQFTGRNCESEITACFPNPCRNGGSCDPIGNTFICNCKAGLTGVTCEEDINECEREECENGGSCVNVFGSFLCNCTPGYVGQYCGLRPVVVPNIQAGHSYVGKEELIGIAVVLFVIFILVVLFIVFRKKVFRKNYSRNNITLVQDPATAALLNKSNGIPFRNLRGSGDGRNVYQEVGPPQVPVRPMAYTPCFQSDSRSNLDKIVDGLGGEHQEMTTFHPESPRILTARRGVVVCSVAPNLPAVSPCRSDCDSIRKNGWDAGTENKGVDDPGEVTCFAGSNKGSNSEVQSLSSFQSDSGDDNASIVTVIQLVNNVVDTIENEVSVMDQGQNYNRAYHWDTSDWMPGARLSDIEEVPNYENQDGGSAHQGSTRELESDYYLGGYDIDSEYPPPHEEEFLSQDQLPPPLPEDFPDQYEALPPSQPVSLASTLSPDCRRRPQFHPSQYLPPHPFPNETDLVGPPASCEFSTFAVSMNQGTEPTGPADSVSLSLHNSRGTSSSDVSANCGFDDSEVAMSDYESVGELSLASLHIPFVETQHQTQV

SEQ ID NO: 24934 - protein, 1254 aa, Homo sapiens
MDIIMGHCVGTRPPACCLILLLFKLLATVSQGLPGTGPLGFHFTHSIYNATVYENSAARTYVNSQSRMGITLIDLSWDIKYRIVSGDEEGFFKAEEVIIADFCFLRIRTKGGNSAILNREIQDNYLLIVKGSVRGEDLEAWTKVNIQVLDMNDLRPLFSPTTYSVTIAESTPLRTSVAQVTATDADIGSNGEFYYYFKNKVDLFSVHPTSGVISLSGRLNYDEKNRYDLEILAVDRGMKLYGNNGVSSTAKLYVHIERINEHAPTIHVVTHVPFSLEKEPTYAVVTVDDLDDGANGEIESVSIVAGDPLDQFFLAKEGKWLNEYKIKERKQIDWESFPYGYNLTLQAKDKGSPQKCSALKAVYIGNPTRDTVPIRFEKEVYDVSISEFSPPGVVVAIVKLSPEPIDVEYKLSPGEDAVYFKINPRSGLIVTARPLNTVKKEVYKLEVTNKEGDLKAQVTISIEDANDHTPEFQQPLYDAYVNESVPVGTSVLTVSASDKDKGENGYITYSIASLNLLPFVINQFTGVISTTEELDFESSPEIYRFIVRASDWGSPYRHESEVNVTIRIGNVNDNSPLFEKVACQGVISYDFPVGGHITAVSAIDIDELELVKYKIISGNELGFFYLNPDSGVLQLKKSLTNSGIKNGNFALRITATDGENLADPMSINISVLHGKVSSKSFSCRETRVAQKLAEKLLIKAKANGKLNLEDGFLDFYSINRQGPYFDKSFPSDVAVKEDLPVGANILKIKAYDADSGFNGKVLFTISDGNTDSCFNIDMETGQLKVLMPMDREHTDLYLLNITIYDLGNPQKSSWRLLTINVEDANDNSPVFIQDSYSVNILESSGIGTEIIQVEARDKDLGSNGEVTYSVLTDTQQFAINSSTGIVYVADQLDRESKANYSLKIEARDKAESGQQLFSVVTLKVFLDDVNDCSPAFIPSSYSVKVLEDLPVGTVIAWLETHDPDLGLGGQVRYSLVNDYNGRFEIDKASGAIRLSKELDYEKQQFYNLTVRAKDKGRPVSLSSVSFVEVEVVDVNENLHTPYFPDFAVVGSVKENSRIGTSVLQVTARDEDSGRDGEIQYSIRDGSGLGRFSIDDESGVITAADILDRETMGSYWLTVYATDRGVVPLYSTIEVYIEVEDVNDNAPLTSEPIYYPVVMENSPKDVSVIQIQAEDPDSSSNEKLTYRITSGNPQNFFAINIKTGSCSVAQAGMQWHDRSSLQSRTPGFKGYPCLSLLSSWDYRHAPPCPATFLNS

SEQ ID NO: 24935 - protein, 603 aa, Homo sapiens
MRRRAARGPGPPPPGPGLSRLPLPLLLLLALGTRGGCAAPAPAPRAEDLSLGVEWLSRFGYLPPADPTTGQLQTQEELSKAITAMQQFGGLEATGILDEATLALMKTPRCSLPDLPVLTQARRRRQAPAPTKWNKRNLSWRVRTFPRDSPLGHDTVRALMYYALKVWSDIAPLNFHEVAGSAADIQIDFSKADHNDGYPFDGPGGTVAHAFFPGHHHTAGDTHFDDDEAWTFRSSDAHGMDLFAVAVHEFGHAIGLSHVAAAHSIMRPYYQGPVGDPLRYGLPYEDKVRVWQLYGVRESVSPTAQPEEPPLLPEPPDNRSSAPPRKDVPHRCSTHFDAVAQIRGEAFFFKGKYFWRLTRDRHLVSLQPAQMHRFWRGLPLHLDSVDAVYERTSDHKIVFFKGDRYWVFKDNNVEEGYPRPVSDFSLPPGGIDAAFSWAHNDRTYFFKDQLYWRYDDHTRHMDPGYPAQSPLWRGVPSTLDDAMRWSDGASYFFRGQEYWKVLDGELEVAPGYPQSTARDWLVCGDSQADGSVAAGVDAAEGPRAPPGQHDQSRSEDGYEVCSCTSGASSPPGAPGPLVAATMLLLLPPLSPGALWTAAQALTL

SEQ ID NO: 24936 - protein, 519 aa, Homo sapiens
MQQFGGLEATGILDEATLALMKTPRCSLPDLPVLTQARRRRQAPAPTKWNKRNLSWRVRTFPRDSPLGHDTVRALMYYALKVWSDIAPLNFHEVAGSAADIQIDFSKADHNDGYPFDGPGGTVAHAFFPGHHHTAGDTHFDDDEAWTFRSSDAHGMDLFAVAVHEFGHAIGLSHVAAAHSIMRPYYQGPVGDPLRYGLPYEDKVRVWQLYGVRESVSPTAQPEEPPLLPEPPDNRSSAPPRKDVPHRCSTHFDAVAQIRGEAFFFKGKYFWRLTRDRHLVSLQPAQMHRFWRGLPLHLDSVDAVYERTSDHKIVFFKGDRYWVFKDNNVEEGYPRPVSDFSLPPGGIDAAFSWAHNDRTYFFKDQLYWRYDDHTRHMDPGYPAQSPLWRGVPSTLDDAMRWSDGASYFFRGQEYWKVLDGELEVAPGYPQSTARDWLVCGDSQADGSVAAGVDAAEGPRAPPGQHDQSRSEDGYEVCSCTSGASSPPGAPGPLVAATMLLLLPPLSPGALWTAAQALTL

SEQ ID NO: 24937 - protein, 483 aa, Homo sapiens
MKVLPASGLAVFLIMALKFSTAAPSLVAASPRTWRNNYRLAQAYLDKYYTNKEGHQIGEMVARGSNSMIRKIKELQAFFGLQVTGKLDQTTMNVIKKPRCGVPDVANYRLFPGEPKWKKNTLTYRISKYTPSMSSVEVDKAVEMALQAWSSAVPLSFVRINSGEADIMISFENGDHGDSYPFDGPRGTLAHAFAPGEGLGGDTHFDNAEKWTMGTNGFNLFTVAAHEFGHALGLAHSTDPSALMYPTYKYKNPYGFHLPKDDVKGIQALYGPRKVFLGKPTLPHAPHHKPSIPDLCDSSSSFDAVTMLGKELLLFKDRIFWRRQVHLRTGIRPSTITSSFPQLMSNVDAAYEVAERGTAYFFKGPHYWITRGFQMQGPPRTIYDFGFPRHVQQIDAAVYLREPQKTLFFVGDEYYSYDERKRKMEKDYPKNTEEEFSGVNGQIDAAVELNGYIYFFSGPKTYKYDTEKEDVVSVVKSSSWIGC

SEQ ID NO: 24938 - protein, 585 aa, Homo sapiens
MPVLSEDSGLHETLALLTSQLRPDSNHKEEMGFLRDVFSEKSLSYLMKIHEKLRYYERQSPTPVLHSAVALAEDVMEELQAASVHSDERELLQLLSTPHLRAVLMVHDTVAQKNFDPVLPPLPDNIDEDFDEESVKIVRLVKNKEPLGATIRRDEHSGAVVVARIMRGGAADRSGLVHVGDELREVNGIAVLHKRPDEISQILAQSQGSITLKIIPATQEEDRLKESKVFMRALFHYNPREDRAIPCQEAGLPFQRRQVLEVVSQDDPTWWQAKRVGDTNLRAGLIPSKGFQERRLSYRRAAGTLPSPQSLRKPPYDQPCDKETCDCEGYLKGHYVAGLRRSFRLGCRERLGGSQEGKMSSGAESPELLTYEEVARYQHQPGERPRLVVLIGSLGARLHELKQKVVAENPQHFGVAVPHTTRPRKSHEKEGVEYHFVSKQAFEADLHHNKFLEHGEYKENLYGTSLEAIQAVMAKNKVCLVDVEPEALKQLRTSEFKPYIIFVKPAIQEKRKTPPMSPACEDTAAPFDEQQQEMAASAAFIDRHYGHLVDAVLVKEDLQGAYSQLKVVLEKLSKDTHWVPVSWVR

SEQ ID NO: 24939 - protein, 458 aa, Homo sapiens
MELEKREKRSLLNKNLEEKLTVSAGGSEAKPLIFTFVPTVRRLPTHTQLADTSKFLVKIPEESSDKSPETVNRSKSNDYLTLNAGSQQERDQAKLTCPSEVSGTILQEREFEANKLQGMQQSDLFKAEYVLIVDSEGEDEAASRKVEQGPPGGIGTAAVRPKSLAISSSLVSDVVRPKTQGTDLKTSSHPEMLHGMAPQQKHGQQYKTKSSYKAFAAIPTNTLLLEQKALDEPAKTESVSKDNTLEPPVELYFPAQLRQQTEELCATIDKVLQDSLSMHSSDSPSRSPKTLLGSDTVKTPTTLPRAAGRETKYANLSSPSSTVSESQLTKPGVIRPVPVKSRILLKKEEEVYEPNPFSKYLEDNSDLFSEQDVTVPPKPVSLHPLYQTKLYPPAKSLLHPQTLSHADCLAPGPFSHLSFSLSDEQENSHTLLSHNACNKLSHPMVAIPEHEALDSKEQ

SEQ ID NO: 24940 - protein, 234 aa, Homo sapiens
MCSWYLGFECSSKSNDYLTLNAGSQQERDQAKLTCPSEVSGTILQEREFEANKLQGMQQSDLFKAEYVLIVDSEGEDEAASRKVEQGPPGGIGTAAVRPKSLAISSSLVSDVVRPKTQGTDLKTSSHPEMLHGMAPQQKHGQTPTTLPRAAGRETKYANLSSPSSTVSESQLTKPGVIRPVPVKSRILLKKEEEVYEPNPFSKYLEDNSDLFSEQLSHPMVAIPEHEALDSKEQ

SEQ ID NO: 24941 - protein, 993 aa, Homo sapiens
MLSEQGLLSDCGNNYFQMTSCILSGSIQTTPQVSAGGSEAKPLIFTFVPTVRRLPTHTQLADTSKFLVKIPEESSDKSPETVNRSKSNDYLTLNAGSQQERDQAKLTCPSEVSGTILQEREFEANKLQGMQQSDLFKAEYVLIVDSEGEDEAASRKVEQGPPGGIGTAAVRPKSLAISSSLVSDVVRPKTQGTDLKTSSHPEMLHGMAPQQKHGQLTSSPTTSEQLACKPPAFSFVSPTNPNTPPDPVNLEGASVLEEFHTRRLDVGGAVVEESATYFQTTAHSTPFSASKGTSSTLLFPHSTQLSGSNLPSSTAADPKPGLTSEVLKKTTLTSHVLSHGESPRTSSSPPSSSASLKSNSASYIPVRIVTHSLSPSPKPFTSSFHGSSSTICSQMSSSGNLSKSGVKSPVPSRLALLTAILKSNPSHQRPFSPASCPTFSLNSPASSTLTLDQKEKQTPPTPKKSLSSCSLRAGSPDQGELQVSELTQQSFHLPVFTKSTPLSQAPSLSPTKQASSSLASMNVERTPSPTLKSNTMLSLLQTSTSSSVGLPPVPPSSSLSSLKSKQDGDLRGPENPRNIHTYPSTLASSALSSLSPPINQRATFSSSEKCFHPSPALSSLINRSKRASSQLSGQELNPSALPSLPVSSADFASLPNLRSSSLPHANLPTLVPQLSPSALHPHCGSGTLPSRLGKSESTTPNHRSPVSTPSLPISLTRTEELISPCALSMSTGPENKKSKQYKTKSSYKAFAAIPTNTLLLEQKALDEPAKTESVSKDNTLEPPVELYFPAQLRQQTEELCATIDKVLQDSLSMHSSDSPSRSPKTLLGSDTVKTPTTLPRAAGRETKYANLSSPSSTVSESQLTKPGVIRPVPVKSRILLKKEEEVYEPNPFSKYLEDNSDLFSEQDVTVPPKPVSLHPLYQTKLYPPAKSLLHPQTLSHADCLAPGPFSHLSFSLSDEQENSHTLLSHNACNKLSHPMVAIPEHEALDSKEQ

SEQ ID NO: 24942 - protein, 915 aa, Homo sapiens
MELEKREKRSLLNKNLEEKLTVSAGGSEAKPLIFTFVPTVRRLPTHTQLADTSKFLVKIPEESSDKSPETVNRSKSNDYLTLNAGSQQERDQAKLTCPSEVSGTILQEREFEANKLQGMQQSDLFKAEYVLIVDSEGEDEAASRKVEQGPPGGIGTAAVRPKSLAISSSLVSDVVRPKTQGTDLKTSSHPEMLHGMAPQQKHGQLTSSPTTSEQLACKPPAFSFVSPTNPNTPPDPVNLEGASVLEEFHTRRLDVGGAVVEESATYFQTTAHSTPFSASKGTSSTLLFPHSTQLSGSNLPSSTAADPKPGLTSEVLKKTTLTSHVLSHGESPRTSSSPPSSSASLKSNSASYIPVRIVTHSLSPSPKPFTSSFHGSSSTICSQMSSSGNLSKSGVKSPVPSRLALLTAILKSNPSHQRPFSPASCPTFSLNSPASSTLTLDQKEKQTPPTPKKSLSSCSLRAGSPDQGELQVSELTQQSFHLPVFTKSTPLSQAPSLSPTKQASSSLASMNVERTPSPTLKSNTMLSLLQTSTSSSVGLPPVPPSSSLSSLKSKQDGDLRGPENPRNIHTYPSTLASSALSSLSPPINQRATFSSSEKCFHPSPALSSLINRSKRASSQLSGQELNPSALPSLPVSSADFASLPNLRSSSLPHANLPTLVPQLSPSALHPHCGSGTLPSRLGKSESTTPNHRSPVSTPSLPISLTRTEELISPCALSMSTGPENKKSKQYKTKSSYKAFAAIPTNTLLLEQKALDEPAKTESVSKDNTLEPPVELYFPAQLRQQTEELCATIDKVLQDSLSMHSSDSPSRSPKTLLGSDTVKTPTTLPRAAGRETKYANLSSPSSTVSESQLTKPGVIRPVPVKSRILLKKEEEVYEPNPFSKYLEDNSDLFSEQAAHSVDSYCNGSDTSGPWLL

SEQ ID NO: 24943 - protein, 5412 aa, Homo sapiens
MKGARWRRVPWVSLSCLCLCLLPHVVPGTTEDTLITGSKTAAPVTSTGSTTATLEGQSTAASSRTSNQDISASSQNHQTKSTETTSKAQTDTLTQMMTSTLFSSPSVHNVMETAPPDEMTTSFPSSVTNTLMMTSKTITMTTSTDSTLGNTEETSTAGTESSTPVTSAVSITAGQEGQSRTTSWRTSIQDTSASSQNHWTRSTQTTRESQTSTLTHRTTSTPSFSPSVHNVTGTVSQKTSPSGETATSSLCSVTNTSMMTSEKITVTTSTGSTLGNPGETSSVPVTGSLMPVTSAALVTFDPEGQSPATFSRTSTQDTTAFSKNHQTQSVETTRVSQINTLNTLTPVTTSTVLSSPSGFNPSGTVSQETFPSGETTTSSPSSVSNTFLVTSKVFRMPTSRDSTLGNTEETSLSVSGTISAITSKVSTIWWSDTLSTALSPSSLPPKISTAFHTQQSEGAETTGRPHERSSFSPGVSQEIFTLHETTTWPSSFSSKGHTTWSQTELPSTSTGAATRLVTGNPSTGTAGTIPRVPSKVSAIGEPGEPTTYSSHSTTLPKTTGAGAQTQWTQETGTTGEALLSSPSYSVTQMIKTATSPSSSPMLDRHTSQQITTAPSTNHSTIHSTSTSPQESPAVSQRGHTQAPQTTQESQTTRSVSPMTDTKTVTTPGSSFTASGHSPSEIVPQDAPTISAATTFAPAPTGDGHTTQAPTTALQAAPSSHDATLGPSGGTSLSKTGALTLANSVVSTPGGPEGQWTSASASTSPDTAAAMTHTHQAESTEASGQTQTSEPASSGSRTTSAGTATPSSSGASGTTPSGSEGISTSGETTRFSSNPSRDSHTTQSTTELLSASASHGAIPVSTGMASSIVPGTFHPTLSEASTAGRPTGQSSPTSPSASPQETAAISRMAQTQRTRTSRGSDTISLASQATDTFSTVPPTPPSITSTGLTSPQTETHTLSPSGSGKTFTTALISNATPLPVTYASSASTGHTTPLHVTDASSVSTGHATPLPVTSPSSVSTGHTTPLPVTDTSSESTGHVTPLPVTSFSSASTGDSTPLPVTDTSSASTGHVTPLPVTSLSSASTGDTTPLPVTDTSSASTGHATSLPVTDTSSVSTGHTTPLPVTDTSSASTGHATSLPVTDTSSVSTGHTTPLHVTDASSASTGQATPLPVTSLSSVSTGDTTPLPVTSPSSASTGHATPLLVTDTSSASTGHATPLPVTDASSVSTDHATSLPVTIPSAASTGHTTPLPVTDTSSASTGQATSLLVTDTSSVSTGDTTPLPVTSTSSASTGHVTPLHVTSPSSASTGHATPLPVTSLSSASTGDTMPLPVTSPSSASTGDTTPLPVTDASSVSTGHTTPLHVTDASSASTGQATPLPVTSLSSVSTGDTTPLPVTSPSSASTGHATPLLVTDTSSASTGHATPLPVTDASSVSTDHATSLPVTIPSAASTGHTTPLPVTDTSSASTGQATSLLVTDTSSVSTGDTTPLPVTSTSSASTGHVTPLHVTSPSSASTGHATPLPVTSLSSASTGDTMPLPVTSPSSASTGDTTPLPVTDASSVSTGHTTPLPVTSPSSASTGHTTPLPVTDTSSASKGDTTPLPVTSPSSASTGHTTPLPVTDTSSASTGDTTPLPVTNASSLSTGHATPLHVTSPSSASTGHATPLPVTSTSSASTGHATPLPVTGLSSATTDDTTRLPVTDVSSASTGQATPLPVTSLSSVSTGDTTPLPVTSPSSASTGHASPLLVTDASSASTGQATPLPVTDTSSVSTAHATPLPVTGLSSASTDDTTRLPVTDVSSASTGQAIPLPVTSPSSASTGDTTPLPVTDASSASTGDTTSLPVTIPSSASSGHTTSLPVTDASSVSTGHATSLLVTDASSVSTGDTTPLPVTDTNSASTGDTTPLHVTDASSVSTGHATSLPVTSLSSASTGDTTPLPVTSPSSASSGHTTPLPVTDASSVPTGHATSLPVTDASSVSTGHATPLPVTDASSVSTGHATPLPVTDTSSVSTGQATPLPVTSLSSASTGDTTPLPVTDTSSASTGQDTPLPVTSLSSVSTGDTTPLPVTNPSSASTGHATPLLVTDASSISTGHATSLLVTDASSVSTGHATALHDTDASSLSTGDTTPLPVTSPSSTSTGDTTPLPVTETSSVSTGHATSLPVTDTSSASTGHATSLPVTDTSSASTGHATPLPVTDTSSASTGQATPLPVTSPSSASTGHAIPLLVTDTSSASTGQATPLPVTSLSSASTGDTTPLPVTDASSVSTGHATSLPVTSLSSVSTGDTTPLPVTSPSSASTGHATPLHVTDASSASTGHATPLPVTSLSSASTGDTTPLPVTSPSSASTGHATPLHVTDASSVSTGDTTPLPVTSSSSASSGHTTPLPVTDASSASTGDTTPLPVTDTSSASTGHATHLPVTGLSSASTGDTTRLPVTNVSSASTGHATPLPVTSTSSASTGDTTPLPGTDTSSVSTGHTTPLLVTDASSVSTGDTTRLPVTSPSSASTGHTTPLPVTDTPSASTGDTTPLPVTNASSLSTRHATSLHVTSPSSASTGHATSLPVTDTSAASTGHATPLPVTSTSSASTGDTTPLPVTDTYSASTGQATPLPVTSLSSVSTGDTTPLPVTSPSSASTGHATPLLVTDASSASTGQATPLPVTSLSSVSTGDTTPLPVTSPSSASTGHATSLPVTDTSSASTGDTTSLPVTDTSSAYTGDTTSLPVTDTSSSSTGDTTPLLVTETSSVSTGDTTPLPVTDTSSASTGHATPLPVTNTSSVSTGHATPLHVTSPSSASTGHTTPLPVTDASSVSTGHATSLPVTDASSVFTGHATSLPVTIPSSASSGHTTPLPVTDASSVSTGHATSLPVTDASSVSTGHATPLPVTDASSVSTGHATPLPLTSLSSVSTGDTTPLPVTDTSSASTGQATPLPVTSLSSVSTGDTTPLPVTDTSSASTGHATSLPVTDTSSASTGHATPLPDTDTSSASTGHATLLPVTDTSSASIGHATSLPVTDTSSISTGHATPLHVTSPSSASTGHATPLPVTDTSSASTGHANPLHVTSPSSASTGHATPLPVTDTSSASTGHATPLPVTSLSSVSTGDTTPLPVTSPSSASTGHTTPLPVTDTSSASTGQATALPVTSTSSASTGDTTPLPVTDTSSASTGQATPLPVTSLSSVSTGDTTPLPVTSPSSASTGHATPLLVTDASSASTGQATPLPVTSLSSVSTGDTTPLPVTSPSSASTGHATSLPVTDTSSASTGDTTSLPVTDTSSAYTGDTTSLPVTDTSSSSTGDTTPLLVTETSSVSTGHATPLLVTDASSASTGHATPLHVTSPSSASTGDTTPVPVTDTSSVSTGHATPLPVTGLSSASTGDTTRLPVTDISSASTGQATPLPVTNTSSVSTGDTMPLPVTSPSSASTGHATPLPVTSTSSASTGHATPVPVTSTSSASTGHTTPLPVTDTSSASTGDTTPLPVTSPSSASTGHTTPLHVTIPSSASTGDTSTLPVTGASSASTGHATPLPVTDTSSVSTGHATPLPVTSLSSVSTGDTTPLPVTDASSASTGQATPLPVTSLSSVSTGDTTPLLVTDASSVSTGHATPLPVTDTSSASTGDTTRLPVTDTSSASTGQATPLPVTSLSSVSTGDTTPLLVTDASSVSTGHATPLPVTDTSSASTGDTTRLPVTDTSSASTGQATPLPVTIPSSSSSGHTTPLPVTSTSSVSTGHVTPLHVTSPSSASTGHVTPLPVTSTSSASTGHATPLLVTDASSVSTGHATPLPVTDASSASTGDTTPLPVTDTSSASTGQATPLPVTSLSSVSTGDTTPLPVTDASSASTGHATPLPVTIPSSVSTGDTMPLPVTSPSSASTGHATPLPVTGLSSASTGDTTPLPVTDTSSASTRHATPLPVTDTSSASTDDTTRLPVTDVSSASTGHATPLPVTSTSSASTGDTTPLPVTDTSSVSTGHATSLPVTSRSSASTGHATPLPVTDTSSVSTGHATPLPVTSTSSVSTGHATPLPVTSPSSASTGHATPVPVTSTSSASTGDTTPLPVTNASSLSTGHATPLHVTSPSSASRGDTSTLPVTDASSASTGHATPLPLTSLSSVSTGDTTPLPVTDTSSASTGQATPLPVTSLSSVSTGDTTPLPVTIPSSASSGHTTSLPVTDASSVSTGHGTPLPVTSTSSASTGDTTPLPVTDTSSASTGHATPLPVTDTSSASTGHATPLPVTSLSSVSTGHATPLAVSSATSASTVSSDSPLKMETPGMTTPSLKTDGGRRTATSPPPTTSQTIISTIPSTAMHTRSTAAPIPILPERGVSLFPYGAGAGDLEFVRRTVDFTSPLFKPATGFPLGSSLRDSLYFTDNGQIIFPESDYQIFSYPNPLPTGFTGRDPVALVAPFWDDADFSTGRGTTFYQEYETFYGEHSLLVQQAESWIRKMTNNGGYKARWALKVTWVNAHAYPAQWTLGSNTYQAILSTDGSRSYALFLYQSGGMQWDVAQRSGNPVLMGFSSGDGYFENSPLMSQPVWERYRPDRFLNSNSGLQGLQFYRLHREERPNYRLECLQWLKSQPRWPSWGWNQVSCPCSWQQGRRDLRFQPVSIGRWGLGSRQLCSFTSWRGGVCCSYGPWGEFREGWHVQRPWQLAQELEPQSWCCRWNDKPYLCALYQQRRPHVGCATYRPPQPAWMFGDPHITTLDGVSYTFNGLGDFLLVGAQDGNSSFLLQGRTAQTGSAQATNFIAFAAQYRSSSLGPVTVQWLLEPHDAIRVLLDNQTVTFQPDHEDGGGQETFNATGVLLSRNGSEVSASFDGWATVSVIALSNILHASASLPPEYQNRTEGLLGVWNNNPEDDFRMPNGSTIPPGSPEEMLFHFGMTWQINGTGLLGKRNDQLPSNFTPVFYSQLQKNSSWAEHLISNCDGDSSCIYDTLALRNASIGLHTREVSKNYEQANATLNQYPPSINGGRVIEAYKGQTTLIQYTSNAEDANFTLRDSCTDLELFENGTLLWTPKSLEPFTLEILARSAKIGLASALQPRTVVCHCNAESQCLYNQTSRVGNSSLEVAGCKCDGGTFGRYCEGSEDACEEPCFPSVHCVPGKGCEACPPNLTGDGRHCAALGSSFLCQNQSCPVNYCYNQGHCYISQTLGCQPMCTCPPAFTDSRCFLAGNNFSPTVNLELPLRVIQLLLSEEENASMAEVNASVAYRLGTLDMRAFLRNSQVERIDSAAPASGSPIQHWMVISEFQYRPRGPVIDFLNNQLLAAVVEAFLYHVPRRSEEPRNDVVFQPISGEDVRDVTALNVSTLKAYFRCDGYKGYDLVYSPQSGFTCVSPCSRGYCDHGGQCQHLPSGPRCSCVSFSIYTAWGEHCEHLSMKLDAFFGIFFGALGGLLLLGVGTFVVLRFWGCSGARFSYFLNSAEALP

SEQ ID NO: 24944 - protein, 4400 aa, Homo sapiens
MKGARWRRVPWVSLSCLCLCLLPHVVPGTTEDTLITGSKTAAPVTSTGSTTATLEGQSTAASSRTSNQDISASSQNHQTKSTETTSKAQTDTLTQMMTSTLFSSPSVHNVMETAPPDEMTTSFPSSVTNTLMMTSKTITMTTSTDSTLGNTEETSTAGTESSTPVTSAVSITAGQEGQSRTTSWRTSIQDTSASSQNHWTRSTQTTRESQTSTLTHRTTSTPSFSPSVHNVTGTVSQKTSPSGETATSSLCSVTNTSMMTSEKITVTTSTGSTLGNPGETSSVPVTGSLMPVTSAALVTFDPEGQSPATFSRTSTQDTTAFSKNHQTQSVETTRVSQINTLNTLTPVTTSTVLSSPSGFNPSGTVSQETFPSGETTTSSPSSVSNTFLVTSKVFRMPTSRDSTLGNTEETSLSVSGTISAITSKVSTIWWSDTLSTALSPSSLPPKISTAFHTQQSEGAETTGRPHERSSFSPGVSQEIFTLHETTTWPSSFSSKGHTTWSQTELPSTSTGAATRLVTGNPSTGTAGTIPRVPSKVSAIGEPGEPTTYSSHSTTLPKTTGAGAQTQWTQETGTTGEALLSSPSYSVTQMIKTATSPSSSPMLDRHTSQQITTAPSTNHSTIHSTSTSPQESPAVSQRGHTQAPQTTQESQTTRSVSPMTDTKTVTTPGSSFTASGHSPSEIVPQDAPTISAATTFAPAPTGDGHTTQAPTTALQAAPSSHDATLGPSGGTSLSKTGALTLANSVVSTPGGPEGQWTSASASTSPDTAAAMTHTHQAESTEASGQTQTSEPASSGSRTTSAGTATPSSSGASGTTPSGSEGISTSGETTRFSSNPSRDSHTTQSTTELLSASASHGAIPVSTGMASSIVPGTFHPTLSEASTAGRPTGQSSPTSPSASPQETAAISRMAQTQRTRTSRGSDTISLASQATDTFSTVPPTPPSITSTGLTSPQTETHTLSPSGSGKTFTTALISNATPLPVTYASSASTGHTTPLHVTDASSVSTGHATPLPVTSPSSVSTGHTTPLPVTDTSSESTGHVTPLPVTSFSSASTGDSTPLPVTDTSSASTGHVTPLPVTSLSSASTGDTTPLPVTDTSSASTGHATSLPVTDTSSVSTGHTTPLPVTDTSSASTGHATSLPVTDTSSVSTGHTTPLHVTDASSASTGQATPLPVTSLSSVSTGDTTPLPVTSPSSASTGHATPLLVTDTSSASTGHATPLPVTDASSVSTDHATSLPVTIPSAASTGHTTPLPVTDTSSASTGQATSLLVTDTSSVSTGDTTPLPVTSTSSASTGHVTPLHVTSPSSASTGHATPLPVTSLSSASTGDTMPLPVTSPSSASTGDTTPLPVTDASSVSTGHTTPLHVTDASSASTGQATPLPVTSLSSVSTGDTTPLPVTSPSSASTGHATPLLVTDTSSASTGHATPLPVTDASSVSTDHATSLPVTIPSAASTGHTTPLPVTDTSSASTGQATSLLVTDTSSVSTGDTTPLPVTSTSSASTGHVTPLHVTSPSSASTGHATPLPVTSLSSASTGDTMPLPVTSPSSASTGDTTPLPVTDASSVSTGHTTPLPVTSPSSASTGHTTPLPVTDTSSASKGDTTPLPVTSPSSASTGHTTPLPVTDTSSASTGDTTPLPVTNASSLSTGHATPLHVTSPSSASTGHATPLPVTSTSSASTGHATPLPVTGLSSATTDDTTRLPVTDVSSASTGQATPLPVTSLSSVSTGDTTPLPVTSPSSASTGHASPLLVTDASSASTGQATPLPVTDTSSVSTAHATPLPVTGLSSASTDDTTRLPVTDVSSASTGQAIPLPVTSPSSASTGDTTPLPVTDASSASTGDTTSLPVTIPSSASSGHTTSLPVTDASSVSTGHATSLLVTDASSVSTGDTTPLPVTDTNSASTGDTTPLHVTDASSVSTGHATSLPVTSLSSASTGDTTPLPVTSPSSASSGHTTPLPVTDASSVPTGHATSLPVTDASSVSTGHATPLPVTDASSVSTGHATPLPVTDTSSVSTGQATPLPVTSLSSASTGDTTPLPVTDTSSASTGQDTPLPVTSLSSVSTGDTTPLPVTNPSSASTGHATPLLVTDASSISTGHATSLLVTDASSVSTGHATALHDTDASSLSTGDTTPLPVTSPSSTSTGDTTPLPVTETSSVSTGHATSLPVTDTSSASTGHATSLPVTDTSSASTGHATPLPVTDTSSASTGQATPLPVTSPSSASTGHAIPLLVTDTSSASTGQATPLPVTSLSSASTGDTTPLPVTDASSVSTGHATSLPVTSLSSVSTGDTTPLPVTSPSSASTGHATPLHVTDASSASTGHATPLPVTSLSSASTGDTTPLPVTSPSSASTGHATPLHVTDASSVSTGDTTPLPVTSSSSASSGHTTPLPVTDASSASTGDTTPLPVTDTSSASTGHATHLPVTGLSSASTGDTTRLPVTNVSSASTGHATPLPVTSTSSASTGDTTPLPGTDTSSVSTGHTTPLLVTDASSVSTGDTTRLPVTSPSSASTGHTTPLPVTDTPSASTGDTTPLPVTNASSLSTRHATSLHVTSPSSASTGHATSLPVTDTSAASTGHATPLPVTSTSSASTGDTTPLPVTDTYSASTGQATPLPVTSLSSVSTGDTTPLPVTSPSSASTGHATPLLVTDASSASTGQATPLPVTSLSSVSTGDTTPLPVTSPSSASTGHATSLPVTDTSSASTGDTTSLPVTDTSSAYTGDTTSLPVTDTSSSSTGDTTPLLVTETSSVSTGDTTPLPVTDTSSASTGHATPLPVTNTSSVSTGHATPLHVTSPSSASTGHTTPLPVTDASSVSTGHATSLPVTDASSVFTGHATSLPVTIPSSASSGHTTPLPVTDASSVSTGHATSLPVTDASSVSTGHATPLPVTDASSVSTGHATPLPLTSLSSVSTGDTTPLPVTDTSSASTGQATPLPVTSLSSVSTGDTTPLPVTDTSSASTGHATSLPVTDTSSASTGHATPLPDTDTSSASTGHATLLPVTDTSSASIGHATSLPVTDTSSISTGHATPLHVTSPSSASTGHATPLPVTDTSSASTGHANPLHVTSPSSASTGHATPLPVTDTSSASTGHATPLPVTSLSSVSTGDTTPLPVTSPSSASTGHTTPLPVTDTSSASTGQATALPVTSTSSASTGDTTPLPVTDTSSASTGQATPLPVTSLSSVSTGDTTPLPVTSPSSASTGHATPLLVTDASSASTGQATPLPVTSLSSVSTGDTTPLPVTSPSSASTGHATSLPVTDTSSASTGDTTSLPVTDTSSAYTGDTTSLPVTDTSSSSTGDTTPLLVTETSSVSTGHATPLLVTDASSASTGHATPLHVTSPSSASTGDTTPVPVTDTSSVSTGHATPLPVTGLSSASTGDTTRLPVTDISSASTGQATPLPVTNTSSVSTGDTMPLPVTSPSSASTGHATPLPVTSTSSASTGHATPVPVTSTSSASTGHTTPLPVTDTSSASTGDTTPLPVTSPSSASTGHTTPLHVTIPSSASTGDTSTLPVTGASSASTGHATPLPVTDTSSVSTGHATPLPVTSLSSVSTGDTTPLPVTDASSASTGQATPLPVTSLSSVSTGDTTPLLVTDASSVSTGHATPLPVTDTSSASTGDTTRLPVTDTSSASTGQATPLPVTSLSSVSTGDTTPLLVTDASSVSTGHATPLPVTDTSSASTGDTTRLPVTDTSSASTGQATPLPVTIPSSSSSGHTTPLPVTSTSSVSTGHVTPLHVTSPSSASTGHVTPLPVTSTSSASTGHATPLLVTDASSVSTGHATPLPVTDASSASTGDTTPLPVTDTSSASTGQATPLPVTSLSSVSTGDTTPLPVTDASSASTGHATPLPVTIPSSVSTGDTMPLPVTSPSSASTGHATPLPVTGLSSASTGDTTPLPVTDTSSASTRHATPLPVTDTSSASTDDTTRLPVTDVSSASTGHATPLPVTSTSSASTGDTTPLPVTDTSSVSTGHATSLPVTSRSSASTGHATPLPVTDTSSVSTGHATPLPVTSTSSVSTGHATPLPVTSPSSASTGHATPVPVTSTSSASTGDTTPLPVTNASSLSTGHATPLHVTSPSSASRGDTSTLPVTDASSASTGHATPLPLTSLSSVSTGDTTPLPVTDTSSASTGQATPLPVTSLSSVSTGDTTPLPVTIPSSASSGHTTSLPVTDASSVSTGHGTPLPVTSTSSASTGDTTPLPVTDTSSASTGHATPLPVTDTSSASTGHATPLPVTSLSSVSTGHATPLAVSSATSASTVSSDSPLKMETPGMTTPSLKTDGGRRTATSPPPTTSQTIISTIPSTAMHTRSTAAPIPILPERGVSLFPYGAGAGDLEFVRRTVDFTSPLFKPATGFPLGSSLRDSLYASQAGTLWPWWLRSGTMLTSPLVGGPHFIRNTRRSMVNTAC

SEQ ID NO: 24945 - protein, 5070 aa, Homo sapiens
MKGARWRRVPWVSLSCLCLCLLPHVVPGTTEDTLITGSKTAAPVTSTGSTTATLEGQSTAASSRTSNQDISASSQNHQTKSTETTSKAQTDTLTQMMTSTLFSSPSVHNVMETAPPDEMTTSFPSSVTNTLMMTSKTITMTTSTDSTLGNTEETSTAGTESSTPVTSAVSITAGQEGQSRTTSWRTSIQDTSASSQNHWTRSTQTTRESQTSTLTHRTTSTPSFSPSVHNVTGTVSQKTSPSGETATSSLCSVTNTSMMTSEKITVTTSTGSTLGNPGETSSVPVTGSLMPVTSAALVTFDPEGQSPATFSRTSTQDTTAFSKNHQTQSVETTRVSQINTLNTLTPVTTSTVLSSPSGFNPSGTVSQETFPSGETTTSSPSSVSNTFLVTSKVFRMPTSRDSTLGNTEETSLSVSGTISAITSKVSTIWWSDTLSTALSPSSLPPKISTAFHTQQSEGAETTGRPHERSSFSPGVSQEIFTLHETTTWPSSFSSKGHTTWSQTELPSTSTGAATRLVTGNPSTGTAGTIPRVPSKVSAIGEPGEPTTYSSHSTTLPKTTGAGAQTQWTQETGTTGEALLSSPSYSVTQMIKTATSPSSSPMLDRHTSQQITTAPSTNHSTIHSTSTSPQESPAVSQRGHTQAPQTTQESQTTRSVSPMTDTKTVTTPGSSFTASGHSPSEIVPQDAPTISAATTFAPAPTGDGHTTQAPTTALQAAPSSHDATLGPSGGTSLSKTGALTLANSVVSTPGGPEGQWTSASASTSPDTAAAMTHTHQAESTEASGQTQTSEPASSGSRTTSAGTATPSSSGASGTTPSGSEGISTSGETTRFSSNPSRDSHTTQSTTELLSASASHGAIPVSTGMASSIVPGTFHPTLSEASTAGRPTGQSSPTSPSASPQETAAISRMAQTQRTRTSRGSDTISLASQATDTFSTVPPTPPSITSTGLTSPQTETHTLSPSGSGKTFTTALISNATPLPVTYASSASTGHTTPLHVTDASSVSTGHATPLPVTSPSSVSTGHTTPLPVTDTSSESTGHVTPLPVTSFSSASTGDSTPLPVTDTSSASTGHVTPLPVTSLSSASTGDTTPLPVTDTSSASTGHATSLPVTDTSSVSTGHTTPLPVTDTSSASTGHATSLPVTDTSSVSTGHTTPLHVTDASSASTGQATPLPVTSLSSVSTGDTTPLPVTSPSSASTGHATPLLVTDTSSASTGHATPLPVTDASSVSTDHATSLPVTIPSAASTGHTTPLPVTDTSSASTGQATSLLVTDTSSVSTGDTTPLPVTSTSSASTGHVTPLHVTSPSSASTGHATPLPVTSLSSASTGDTMPLPVTSPSSASTGDTTPLPVTDASSVSTGHTTPLHVTDASSASTGQATPLPVTSLSSVSTGDTTPLPVTSPSSASTGHATPLLVTDTSSASTGHATPLPVTDASSVSTDHATSLPVTIPSAASTGHTTPLPVTDTSSASTGQATSLLVTDTSSVSTGDTTPLPVTSTSSASTGHVTPLHVTSPSSASTGHATPLPVTSLSSASTGDTMPLPVTSPSSASTGDTTPLPVTDASSVSTGHTTPLPVTSPSSASTGHTTPLPVTDTSSASKGDTTPLPVTSPSSASTGHTTPLPVTDTSSASTGDTTPLPVTNASSLSTGHATPLHVTSPSSASTGHATPLPVTSTSSASTGHATPLPVTGLSSATTDDTTRLPVTDVSSASTGQATPLPVTSLSSVSTGDTTPLPVTSPSSASTGHASPLLVTDASSASTGQATPLPVTDTSSVSTAHATPLPVTGLSSASTDDTTRLPVTDVSSASTGQAIPLPVTSPSSASTGDTTPLPVTDASSASTGDTTSLPVTIPSSASSGHTTSLPVTDASSVSTGHATSLLVTDASSVSTGDTTPLPVTDTNSASTGDTTPLHVTDASSVSTGHATSLPVTSLSSASTGDTTPLPVTSPSSASSGHTTPLPVTDASSVPTGHATSLPVTDASSVSTGHATPLPVTDASSVSTGHATPLPVTDTSSVSTGQATPLPVTSLSSASTGDTTPLPVTDTSSASTGQDTPLPVTSLSSVSTGDTTPLPVTNPSSASTGHATPLLVTDASSISTGHATSLLVTDASSVSTGHATALHDTDASSLSTGDTTPLPVTSPSSTSTGDTTPLPVTETSSVSTGHATSLPVTDTSSASTGHATSLPVTDTSSASTGHATPLPVTDTSSASTGQATPLPVTSPSSASTGHAIPLLVTDTSSASTGQATPLPVTSLSSASTGDTTPLPVTDASSVSTGHATSLPVTSLSSVSTGDTTPLPVTSPSSASTGHATPLHVTDASSASTGHATPLPVTSLSSASTGDTTPLPVTSPSSASTGHATPLHVTDASSVSTGDTTPLPVTSSSSASSGHTTPLPVTDASSASTGDTTPLPVTDTSSASTGHATHLPVTGLSSASTGDTTRLPVTNVSSASTGHATPLPVTSTSSASTGDTTPLPGTDTSSVSTGHTTPLLVTDASSVSTGDTTRLPVTSPSSASTGHTTPLPVTDTPSASTGDTTPLPVTNASSLSTRHATSLHVTSPSSASTGHATSLPVTDTSAASTGHATPLPVTSTSSASTGDTTPLPVTDTYSASTGQATPLPVTSLSSVSTGDTTPLPVTSPSSASTGHATPLLVTDASSASTGQATPLPVTSLSSVSTGDTTPLPVTSPSSASTGHATSLPVTDTSSASTGDTTSLPVTDTSSAYTGDTTSLPVTDTSSSSTGDTTPLLVTETSSVSTGDTTPLPVTDTSSASTGHATPLPVTNTSSVSTGHATPLHVTSPSSASTGHTTPLPVTDASSVSTGHATSLPVTDASSVFTGHATSLPVTIPSSASSGHTTPLPVTDASSVSTGHATSLPVTDASSVSTGHATPLPVTDASSVSTGHATPLPLTSLSSVSTGDTTPLPVTDTSSASTGQATPLPVTSLSSVSTGDTTPLPVTDTSSASTGHATSLPVTDTSSASTGHATPLPDTDTSSASTGHATLLPVTDTSSASIGHATSLPVTDTSSISTGHATPLHVTSPSSASTGHATPLPVTDTSSASTGHANPLHVTSPSSASTGHATPLPVTDTSSASTGHATPLPVTSLSSVSTGDTTPLPVTSPSSASTGHTTPLPVTDTSSASTGQATALPVTSTSSASTGDTTPLPVTDTSSASTGQATPLPVTSLSSVSTGDTTPLPVTSPSSASTGHATPLLVTDASSASTGQATPLPVTSLSSVSTGDTTPLPVTSPSSASTGHATSLPVTDTSSASTGDTTSLPVTDTSSAYTGDTTSLPVTDTSSSSTGDTTPLLVTETSSVSTGHATPLLVTDASSASTGHATPLHVTSPSSASTGDTTPVPVTDTSSVSTGHATPLPVTGLSSASTGDTTRLPVTDISSASTGQATPLPVTNTSSVSTGDTMPLPVTSPSSASTGHATPLPVTSTSSASTGHATPVPVTSTSSASTGHTTPLPVTDTSSASTGDTTPLPVTSPSSASTGHTTPLHVTIPSSASTGDTSTLPVTGASSASTGHATPLPVTDTSSVSTGHATPLPVTSLSSVSTGDTTPLPVTDASSASTGQATPLPVTSLSSVSTGDTTPLLVTDASSVSTGHATPLPVTDTSSASTGDTTRLPVTDTSSASTGQATPLPVTSLSSVSTGDTTPLLVTDASSVSTGHATPLPVTDTSSASTGDTTRLPVTDTSSASTGQATPLPVTIPSSSSSGHTTPLPVTSTSSVSTGHVTPLHVTSPSSASTGHVTPLPVTSTSSASTGHATPLLVTDASSVSTGHATPLPVTDASSASTGDTTPLPVTDTSSASTGQATPLPVTSLSSVSTGDTTPLPVTDASSASTGHATPLPVTIPSSVSTGDTMPLPVTSPSSASTGHATPLPVTGLSSASTGDTTPLPVTDTSSASTRHATPLPVTDTSSASTDDTTRLPVTDVSSASTGHATPLPVTSTSSASTGDTTPLPVTDTSSVSTGHATSLPVTSRSSASTGHATPLPVTDTSSVSTGHATPLPVTSTSSVSTGHATPLPVTSPSSASTGHATPVPVTSTSSASTGDTTPLPVTNASSLSTGHATPLHVTSPSSASRGDTSTLPVTDASSASTGHATPLPLTSLSSVSTGDTTPLPVTDTSSASTGQATPLPVTSLSSVSTGDTTPLPVTIPSSASSGHTTSLPVTDASSVSTGHGTPLPVTSTSSASTGDTTPLPVTDTSSASTGHATPLPVTDTSSASTGHATPLPVTSLSSVSTGHATPLAVSSATSASTVSSDSPLKMETPGMTTPSLKTDGGRRTATSPPPTTSQTIISTIPSTAMHTRSTAAPIPILPERGVSLFPYGAGAGDLEFVRRTVDFTSPLFKPATGFPLGSSLRDSLYFTDNGQIIFPESDYQIFSYPNPLPTGFTGRDPVALVAPFWDDADFSTGRGTTFYQEYETFYGEHSLLVQQAESWIRKMTNNGGYKARWALKVTWVNAHAYPAQWTLGSNTYQAILSTDGSRSYALFLYQSGGMQWDVAQRSGNPVLMGFSSGDGYFENSPLMSQPVWERYRPDRFLNSNSGLQGLQFYRLHREERPNYRLECLQWLKSQPRWPSWGWNQVSCPCSWQQGRRDLRFQPVSIGRWGLGSRQLCSFTSWRGGVCCSYGPWGEFREGWHVQRPWQLAQELEPQSWCCRWNDKPYLCALYQQRRPHVGCATYRPPQPAWMFGDPHITTLDGVSYTFNGLGDFLLVGAQDGNSSFLLQGRTAQTGSAQATNFIAFAAQYRSSSLGPVTVQWLLEPHDAIRVLLDNQTVTFQPDHEDGGGQETFNATGVLLSRNGSEVSASFDGWATVSVIALSNILHASASLPPEYQNRTEGLLGVWNNNPEDDFRMPNGSTIPPGSPEEMLFHFGMTWQINGTGLLGKRNDQLPSNFTPVFYSQLQKNSSWAEHLISNCDGDSSCIYDTLALRNASIGLHTREVSKNYEQANATLNQYPPSINGGRVIEAYKGQTTLIQYTSNAEDANFTLRDSCTDLELFENGTLLWTPKSLEPFTLEILARSAKIGLASALQPRTVVCHCNAESQCLYNQTSRVGNSSLELWGALSCVRTSPAL

SEQ ID NO: 24946 - protein, 4458 aa, Homo sapiens
MKGARWRRVPWVSLSCLCLCLLPHVVPGTTEDTLITGSKTAAPVTSTGSTTATLEGQSTAASSRTSNQDISASSQNHQTKSTETTSKAQTDTLTQMMTSTLFSSPSVHNVMETAPPDEMTTSFPSSVTNTLMMTSKTITMTTSTDSTLGNTEETSTAGTESSTPVTSAVSITAGQEGQSRTTSWRTSIQDTSASSQNHWTRSTQTTRESQTSTLTHRTTSTPSFSPSVHNVTGTVSQKTSPSGETATSSLCSVTNTSMMTSEKITVTTSTGSTLGNPGETSSVPVTGSLMPVTSAALVTFDPEGQSPATFSRTSTQDTTAFSKNHQTQSVETTRVSQINTLNTLTPVTTSTVLSSPSGFNPSGTVSQETFPSGETTTSSPSSVSNTFLVTSKVFRMPTSRDSTLGNTEETSLSVSGTISAITSKVSTIWWSDTLSTALSPSSLPPKISTAFHTQQSEGAETTGRPHERSSFSPGVSQEIFTLHETTTWPSSFSSKGHTTWSQTELPSTSTGAATRLVTGNPSTGTAGTIPRVPSKVSAIGEPGEPTTYSSHSTTLPKTTGAGAQTQWTQETGTTGEALLSSPSYSVTQMIKTATSPSSSPMLDRHTSQQITTAPSTNHSTIHSTSTSPQESPAVSQRGHTQAPQTTQESQTTRSVSPMTDTKTVTTPGSSFTASGHSPSEIVPQDAPTISAATTFAPAPTGDGHTTQAPTTALQAAPSSHDATLGPSGGTSLSKTGALTLANSVVSTPGGPEGQWTSASASTSPDTAAAMTHTHQAESTEASGQTQTSEPASSGSRTTSAGTATPSSSGASGTTPSGSEGISTSGETTRFSSNPSRDSHTTQSTTELLSASASHGAIPVSTGMASSIVPGTFHPTLSEASTAGRPTGQSSPTSPSASPQETAAISRMAQTQRTRTSRGSDTISLASQATDTFSTVPPTPPSITSTGLTSPQTETHTLSPSGSGKTFTTALISNATPLPVTYASSASTGHTTPLHVTDASSVSTGHATPLPVTSPSSVSTGHTTPLPVTDTSSESTGHVTPLPVTSFSSASTGDSTPLPVTDTSSASTGHVTPLPVTSLSSASTGDTTPLPVTDTSSASTGHATSLPVTDTSSVSTGHTTPLPVTDTSSASTGHATSLPVTDTSSVSTGHTTPLHVTDASSASTGQATPLPVTSLSSVSTGDTTPLPVTSPSSASTGHATPLLVTDTSSASTGHATPLPVTDASSVSTDHATSLPVTIPSAASTGHTTPLPVTDTSSASTGQATSLLVTDTSSVSTGDTTPLPVTSTSSASTGHVTPLHVTSPSSASTGHATPLPVTSLSSASTGDTMPLPVTSPSSASTGDTTPLPVTDASSVSTGHTTPLHVTDASSASTGQATPLPVTSLSSVSTGDTTPLPVTSPSSASTGHATPLLVTDTSSASTGHATPLPVTDASSVSTDHATSLPVTIPSAASTGHTTPLPVTDTSSASTGQATSLLVTDTSSVSTGDTTPLPVTSTSSASTGHVTPLHVTSPSSASTGHATPLPVTSLSSASTGDTMPLPVTSPSSASTGDTTPLPVTDASSVSTGHTTPLPVTSPSSASTGHTTPLPVTDTSSASKGDTTPLPVTSPSSASTGHTTPLPVTDTSSASTGDTTPLPVTNASSLSTGHATPLHVTSPSSASTGHATPLPVTSTSSASTGHATPLPVTGLSSATTDDTTRLPVTDVSSASTGQATPLPVTSLSSVSTGDTTPLPVTSPSSASTGHASPLLVTDASSASTGQATPLPVTDTSSVSTAHATPLPVTGLSSASTDDTTRLPVTDVSSASTGQAIPLPVTSPSSASTGDTTPLPVTDASSASTGDTTSLPVTIPSSASSGHTTSLPVTDASSVSTGHATSLLVTDASSVSTGDTTPLPVTDTNSASTGDTTPLHVTDASSVSTGHATSLPVTSLSSASTGDTTPLPVTSPSSASSGHTTPLPVTDASSVPTGHATSLPVTDASSVSTGHATPLPVTDASSVSTGHATPLPVTDTSSVSTGQATPLPVTSLSSASTGDTTPLPVTDTSSASTGQDTPLPVTSLSSVSTGDTTPLPVTNPSSASTGHATPLLVTDASSISTGHATSLLVTDASSVSTGHATALHDTDASSLSTGDTTPLPVTSPSSTSTGDTTPLPVTETSSVSTGHATSLPVTDTSSASTGHATSLPVTDTSSASTGHATPLPVTDTSSASTGQATPLPVTSPSSASTGHAIPLLVTDTSSASTGQATPLPVTSLSSASTGDTTPLPVTDASSVSTGHATSLPVTSLSSVSTGDTTPLPVTSPSSASTGHATPLHVTDASSASTGHATPLPVTSLSSASTGDTTPLPVTSPSSASTGHATPLHVTDASSVSTGDTTPLPVTSSSSASSGHTTPLPVTDASSASTGDTTPLPVTDTSSASTGHATHLPVTGLSSASTGDTTRLPVTNVSSASTGHATPLPVTSTSSASTGDTTPLPGTDTSSVSTGHTTPLLVTDASSVSTGDTTRLPVTSPSSASTGHTTPLPVTDTPSASTGDTTPLPVTNASSLSTRHATSLHVTSPSSASTGHATSLPVTDTSAASTGHATPLPVTSTSSASTGDTTPLPVTDTYSASTGQATPLPVTSLSSVSTGDTTPLPVTSPSSASTGHATPLLVTDASSASTGQATPLPVTSLSSVSTGDTTPLPVTSPSSASTGHATSLPVTDTSSASTGDTTSLPVTDTSSAYTGDTTSLPVTDTSSSSTGDTTPLLVTETSSVSTGDTTPLPVTDTSSASTGHATPLPVTNTSSVSTGHATPLHVTSPSSASTGHTTPLPVTDASSVSTGHATSLPVTDASSVFTGHATSLPVTIPSSASSGHTTPLPVTDASSVSTGHATSLPVTDASSVSTGHATPLPVTDASSVSTGHATPLPLTSLSSVSTGDTTPLPVTDTSSASTGQATPLPVTSLSSVSTGDTTPLPVTDTSSASTGHATSLPVTDTSSASTGHATPLPDTDTSSASTGHATLLPVTDTSSASIGHATSLPVTDTSSISTGHATPLHVTSPSSASTGHATPLPVTDTSSASTGHANPLHVTSPSSASTGHATPLPVTDTSSASTGHATPLPVTSLSSVSTGDTTPLPVTSPSSASTGHTTPLPVTDTSSASTGQATALPVTSTSSASTGDTTPLPVTDTSSASTGQATPLPVTSLSSVSTGDTTPLPVTSPSSASTGHATPLLVTDASSASTGQATPLPVTSLSSVSTGDTTPLPVTSPSSASTGHATSLPVTDTSSASTGDTTSLPVTDTSSAYTGDTTSLPVTDTSSSSTGDTTPLLVTETSSVSTGHATPLLVTDASSASTGHATPLHVTSPSSASTGDTTPVPVTDTSSVSTGHATPLPVTGLSSASTGDTTRLPVTDISSASTGQATPLPVTNTSSVSTGDTMPLPVTSPSSASTGHATPLPVTSTSSASTGHATPVPVTSTSSASTGHTTPLPVTDTSSASTGDTTPLPVTSPSSASTGHTTPLHVTIPSSASTGDTSTLPVTGASSASTGHATPLPVTDTSSVSTGHATPLPVTSLSSVSTGDTTPLPVTDASSASTGQATPLPVTSLSSVSTGDTTPLLVTDASSVSTGHATPLPVTDTSSASTGDTTRLPVTDTSSASTGQATPLPVTSLSSVSTGDTTPLLVTDASSVSTGHATPLPVTDTSSASTGDTTRLPVTDTSSASTGQATPLPVTIPSSSSSGHTTPLPVTSTSSVSTGHVTPLHVTSPSSASTGHVTPLPVTSTSSASTGHATPLLVTDASSVSTGHATPLPVTDASSASTGDTTPLPVTDTSSASTGQATPLPVTSLSSVSTGDTTPLPVTDASSASTGHATPLPVTIPSSVSTGDTMPLPVTSPSSASTGHATPLPVTGLSSASTGDTTPLPVTDTSSASTRHATPLPVTDTSSASTDDTTRLPVTDVSSASTGHATPLPVTSTSSASTGDTTPLPVTDTSSVSTGHATSLPVTSRSSASTGHATPLPVTDTSSVSTGHATPLPVTSTSSVSTGHATPLPVTSPSSASTGHATPVPVTSTSSASTGDTTPLPVTNASSLSTGHATPLHVTSPSSASRGDTSTLPVTDASSASTGHATPLPLTSLSSVSTGDTTPLPVTDTSSASTGQATPLPVTSLSSVSTGDTTPLPVTIPSSASSGHTTSLPVTDASSVSTGHGTPLPVTSTSSASTGDTTPLPVTDTSSASTGHATPLPVTDTSSASTGHATPLPVTSLSSVSTGHATPLAVSSATSASTVSSDSPLKMETPGMTTPSLKTDGGRRTATSPPPTTSQTIISTIPSTAMHTRSTAAPIPILPERGVSLFPYGAGAGDLEFVRRTVDFTSPLFKPATGFPLGSSLRDSLYFTDNGQIIFPESDYQIFSYPNPLPTGFTGRDPVALVAPFWDDADFSTGRGTTFYQSNTYQAILSTDGSRSYALFLYQSGGMQWDVAQRSVEMAFSKTAH

SEQ ID NO: 24947 - protein, 4444 aa, Homo sapiens
MKGARWRRVPWVSLSCLCLCLLPHVVPGTTEDTLITGSKTAAPVTSTGSTTATLEGQSTAASSRTSNQDISASSQNHQTKSTETTSKAQTDTLTQMMTSTLFSSPSVHNVMETAPPDEMTTSFPSSVTNTLMMTSKTITMTTSTDSTLGNTEETSTAGTESSTPVTSAVSITAGQEGQSRTTSWRTSIQDTSASSQNHWTRSTQTTRESQTSTLTHRTTSTPSFSPSVHNVTGTVSQKTSPSGETATSSLCSVTNTSMMTSEKITVTTSTGSTLGNPGETSSVPVTGSLMPVTSAALVTFDPEGQSPATFSRTSTQDTTAFSKNHQTQSVETTRVSQINTLNTLTPVTTSTVLSSPSGFNPSGTVSQETFPSGETTTSSPSSVSNTFLVTSKVFRMPTSRDSTLGNTEETSLSVSGTISAITSKVSTIWWSDTLSTALSPSSLPPKISTAFHTQQSEGAETTGRPHERSSFSPGVSQEIFTLHETTTWPSSFSSKGHTTWSQTELPSTSTGAATRLVTGNPSTGTAGTIPRVPSKVSAIGEPGEPTTYSSHSTTLPKTTGAGAQTQWTQETGTTGEALLSSPSYSVTQMIKTATSPSSSPMLDRHTSQQITTAPSTNHSTIHSTSTSPQESPAVSQRGHTQAPQTTQESQTTRSVSPMTDTKTVTTPGSSFTASGHSPSEIVPQDAPTISAATTFAPAPTGDGHTTQAPTTALQAAPSSHDATLGPSGGTSLSKTGALTLANSVVSTPGGPEGQWTSASASTSPDTAAAMTHTHQAESTEASGQTQTSEPASSGSRTTSAGTATPSSSGASGTTPSGSEGISTSGETTRFSSNPSRDSHTTQSTTELLSASASHGAIPVSTGMASSIVPGTFHPTLSEASTAGRPTGQSSPTSPSASPQETAAISRMAQTQRTRTSRGSDTISLASQATDTFSTVPPTPPSITSTGLTSPQTETHTLSPSGSGKTFTTALISNATPLPVTYASSASTGHTTPLHVTDASSVSTGHATPLPVTSPSSVSTGHTTPLPVTDTSSESTGHVTPLPVTSFSSASTGDSTPLPVTDTSSASTGHVTPLPVTSLSSASTGDTTPLPVTDTSSASTGHATSLPVTDTSSVSTGHTTPLPVTDTSSASTGHATSLPVTDTSSVSTGHTTPLHVTDASSASTGQATPLPVTSLSSVSTGDTTPLPVTSPSSASTGHATPLLVTDTSSASTGHATPLPVTDASSVSTDHATSLPVTIPSAASTGHTTPLPVTDTSSASTGQATSLLVTDTSSVSTGDTTPLPVTSTSSASTGHVTPLHVTSPSSASTGHATPLPVTSLSSASTGDTMPLPVTSPSSASTGDTTPLPVTDASSVSTGHTTPLHVTDASSASTGQATPLPVTSLSSVSTGDTTPLPVTSPSSASTGHATPLLVTDTSSASTGHATPLPVTDASSVSTDHATSLPVTIPSAASTGHTTPLPVTDTSSASTGQATSLLVTDTSSVSTGDTTPLPVTSTSSASTGHVTPLHVTSPSSASTGHATPLPVTSLSSASTGDTMPLPVTSPSSASTGDTTPLPVTDASSVSTGHTTPLPVTSPSSASTGHTTPLPVTDTSSASKGDTTPLPVTSPSSASTGHTTPLPVTDTSSASTGDTTPLPVTNASSLSTGHATPLHVTSPSSASTGHATPLPVTSTSSASTGHATPLPVTGLSSATTDDTTRLPVTDVSSASTGQATPLPVTSLSSVSTGDTTPLPVTSPSSASTGHASPLLVTDASSASTGQATPLPVTDTSSVSTAHATPLPVTGLSSASTDDTTRLPVTDVSSASTGQAIPLPVTSPSSASTGDTTPLPVTDASSASTGDTTSLPVTIPSSASSGHTTSLPVTDASSVSTGHATSLLVTDASSVSTGDTTPLPVTDTNSASTGDTTPLHVTDASSVSTGHATSLPVTSLSSASTGDTTPLPVTSPSSASSGHTTPLPVTDASSVPTGHATSLPVTDASSVSTGHATPLPVTDASSVSTGHATPLPVTDTSSVSTGQATPLPVTSLSSASTGDTTPLPVTDTSSASTGQDTPLPVTSLSSVSTGDTTPLPVTNPSSASTGHATPLLVTDASSISTGHATSLLVTDASSVSTGHATALHDTDASSLSTGDTTPLPVTSPSSTSTGDTTPLPVTETSSVSTGHATSLPVTDTSSASTGHATSLPVTDTSSASTGHATPLPVTDTSSASTGQATPLPVTSPSSASTGHAIPLLVTDTSSASTGQATPLPVTSLSSASTGDTTPLPVTDASSVSTGHATSLPVTSLSSVSTGDTTPLPVTSPSSASTGHATPLHVTDASSASTGHATPLPVTSLSSASTGDTTPLPVTSPSSASTGHATPLHVTDASSVSTGDTTPLPVTSSSSASSGHTTPLPVTDASSASTGDTTPLPVTDTSSASTGHATHLPVTGLSSASTGDTTRLPVTNVSSASTGHATPLPVTSTSSASTGDTTPLPGTDTSSVSTGHTTPLLVTDASSVSTGDTTRLPVTSPSSASTGHTTPLPVTDTPSASTGDTTPLPVTNASSLSTRHATSLHVTSPSSASTGHATSLPVTDTSAASTGHATPLPVTSTSSASTGDTTPLPVTDTYSASTGQATPLPVTSLSSVSTGDTTPLPVTSPSSASTGHATPLLVTDASSASTGQATPLPVTSLSSVSTGDTTPLPVTSPSSASTGHATSLPVTDTSSASTGDTTSLPVTDTSSAYTGDTTSLPVTDTSSSSTGDTTPLLVTETSSVSTGDTTPLPVTDTSSASTGHATPLPVTNTSSVSTGHATPLHVTSPSSASTGHTTPLPVTDASSVSTGHATSLPVTDASSVFTGHATSLPVTIPSSASSGHTTPLPVTDASSVSTGHATSLPVTDASSVSTGHATPLPVTDASSVSTGHATPLPLTSLSSVSTGDTTPLPVTDTSSASTGQATPLPVTSLSSVSTGDTTPLPVTDTSSASTGHATSLPVTDTSSASTGHATPLPDTDTSSASTGHATLLPVTDTSSASIGHATSLPVTDTSSISTGHATPLHVTSPSSASTGHATPLPVTDTSSASTGHANPLHVTSPSSASTGHATPLPVTDTSSASTGHATPLPVTSLSSVSTGDTTPLPVTSPSSASTGHTTPLPVTDTSSASTGQATALPVTSTSSASTGDTTPLPVTDTSSASTGQATPLPVTSLSSVSTGDTTPLPVTSPSSASTGHATPLLVTDASSASTGQATPLPVTSLSSVSTGDTTPLPVTSPSSASTGHATSLPVTDTSSASTGDTTSLPVTDTSSAYTGDTTSLPVTDTSSSSTGDTTPLLVTETSSVSTGHATPLLVTDASSASTGHATPLHVTSPSSASTGDTTPVPVTDTSSVSTGHATPLPVTGLSSASTGDTTRLPVTDISSASTGQATPLPVTNTSSVSTGDTMPLPVTSPSSASTGHATPLPVTSTSSASTGHATPVPVTSTSSASTGHTTPLPVTDTSSASTGDTTPLPVTSPSSASTGHTTPLHVTIPSSASTGDTSTLPVTGASSASTGHATPLPVTDTSSVSTGHATPLPVTSLSSVSTGDTTPLPVTDASSASTGQATPLPVTSLSSVSTGDTTPLLVTDASSVSTGHATPLPVTDTSSASTGDTTRLPVTDTSSASTGQATPLPVTSLSSVSTGDTTPLLVTDASSVSTGHATPLPVTDTSSASTGDTTRLPVTDTSSASTGQATPLPVTIPSSSSSGHTTPLPVTSTSSVSTGHVTPLHVTSPSSASTGHVTPLPVTSTSSASTGHATPLLVTDASSVSTGHATPLPVTDASSASTGDTTPLPVTDTSSASTGQATPLPVTSLSSVSTGDTTPLPVTDASSASTGHATPLPVTIPSSVSTGDTMPLPVTSPSSASTGHATPLPVTGLSSASTGDTTPLPVTDTSSASTRHATPLPVTDTSSASTDDTTRLPVTDVSSASTGHATPLPVTSTSSASTGDTTPLPVTDTSSVSTGHATSLPVTSRSSASTGHATPLPVTDTSSVSTGHATPLPVTSTSSVSTGHATPLPVTSPSSASTGHATPVPVTSTSSASTGDTTPLPVTNASSLSTGHATPLHVTSPSSASRGDTSTLPVTDASSASTGHATPLPLTSLSSVSTGDTTPLPVTDTSSASTGQATPLPVTSLSSVSTGDTTPLPVTIPSSASSGHTTSLPVTDASSVSTGHGTPLPVTSTSSASTGDTTPLPVTDTSSASTGHATPLPVTDTSSASTGHATPLPVTSLSSVSTGHATPLAVSSATSASTVSSDSPLKMETPGMTTPSLKTDGGRRTATSPPPTTSQTIISTIPSTAMHTRSTAAPIPILPERGVSLFPYGAGAGDLEFVRRTVDFTSPLFKPATGFPLGSSLRDSLYASQAGTLWPWWLRSGTMLTSPLVGGPHFIRATPTKPSSPRTGAGPMPCFSTRAVGCSGTWPSAQWRWLFRKQPTDVPASVGEVSP

SEQ ID NO: 24948 - protein, 4442 aa, Homo sapiens
MKGARWRRVPWVSLSCLCLCLLPHVVPGTTEDTLITGSKTAAPVTSTGSTTATLEGQSTAASSRTSNQDISASSQNHQTKSTETTSKAQTDTLTQMMTSTLFSSPSVHNVMETAPPDEMTTSFPSSVTNTLMMTSKTITMTTSTDSTLGNTEETSTAGTESSTPVTSAVSITAGQEGQSRTTSWRTSIQDTSASSQNHWTRSTQTTRESQTSTLTHRTTSTPSFSPSVHNVTGTVSQKTSPSGETATSSLCSVTNTSMMTSEKITVTTSTGSTLGNPGETSSVPVTGSLMPVTSAALVTFDPEGQSPATFSRTSTQDTTAFSKNHQTQSVETTRVSQINTLNTLTPVTTSTVLSSPSGFNPSGTVSQETFPSGETTTSSPSSVSNTFLVTSKVFRMPTSRDSTLGNTEETSLSVSGTISAITSKVSTIWWSDTLSTALSPSSLPPKISTAFHTQQSEGAETTGRPHERSSFSPGVSQEIFTLHETTTWPSSFSSKGHTTWSQTELPSTSTGAATRLVTGNPSTGTAGTIPRVPSKVSAIGEPGEPTTYSSHSTTLPKTTGAGAQTQWTQETGTTGEALLSSPSYSVTQMIKTATSPSSSPMLDRHTSQQITTAPSTNHSTIHSTSTSPQESPAVSQRGHTQAPQTTQESQTTRSVSPMTDTKTVTTPGSSFTASGHSPSEIVPQDAPTISAATTFAPAPTGDGHTTQAPTTALQAAPSSHDATLGPSGGTSLSKTGALTLANSVVSTPGGPEGQWTSASASTSPDTAAAMTHTHQAESTEASGQTQTSEPASSGSRTTSAGTATPSSSGASGTTPSGSEGISTSGETTRFSSNPSRDSHTTQSTTELLSASASHGAIPVSTGMASSIVPGTFHPTLSEASTAGRPTGQSSPTSPSASPQETAAISRMAQTQRTRTSRGSDTISLASQATDTFSTVPPTPPSITSTGLTSPQTETHTLSPSGSGKTFTTALISNATPLPVTYASSASTGHTTPLHVTDASSVSTGHATPLPVTSPSSVSTGHTTPLPVTDTSSESTGHVTPLPVTSFSSASTGDSTPLPVTDTSSASTGHVTPLPVTSLSSASTGDTTPLPVTDTSSASTGHATSLPVTDTSSVSTGHTTPLPVTDTSSASTGHATSLPVTDTSSVSTGHTTPLHVTDASSASTGQATPLPVTSLSSVSTGDTTPLPVTSPSSASTGHATPLLVTDTSSASTGHATPLPVTDASSVSTDHATSLPVTIPSAASTGHTTPLPVTDTSSASTGQATSLLVTDTSSVSTGDTTPLPVTSTSSASTGHVTPLHVTSPSSASTGHATPLPVTSLSSASTGDTMPLPVTSPSSASTGDTTPLPVTDASSVSTGHTTPLHVTDASSASTGQATPLPVTSLSSVSTGDTTPLPVTSPSSASTGHATPLLVTDTSSASTGHATPLPVTDASSVSTDHATSLPVTIPSAASTGHTTPLPVTDTSSASTGQATSLLVTDTSSVSTGDTTPLPVTSTSSASTGHVTPLHVTSPSSASTGHATPLPVTSLSSASTGDTMPLPVTSPSSASTGDTTPLPVTDASSVSTGHTTPLPVTSPSSASTGHTTPLPVTDTSSASKGDTTPLPVTSPSSASTGHTTPLPVTDTSSASTGDTTPLPVTNASSLSTGHATPLHVTSPSSASTGHATPLPVTSTSSASTGHATPLPVTGLSSATTDDTTRLPVTDVSSASTGQATPLPVTSLSSVSTGDTTPLPVTSPSSASTGHASPLLVTDASSASTGQATPLPVTDTSSVSTAHATPLPVTGLSSASTDDTTRLPVTDVSSASTGQAIPLPVTSPSSASTGDTTPLPVTDASSASTGDTTSLPVTIPSSASSGHTTSLPVTDASSVSTGHATSLLVTDASSVSTGDTTPLPVTDTNSASTGDTTPLHVTDASSVSTGHATSLPVTSLSSASTGDTTPLPVTSPSSASSGHTTPLPVTDASSVPTGHATSLPVTDASSVSTGHATPLPVTDASSVSTGHATPLPVTDTSSVSTGQATPLPVTSLSSASTGDTTPLPVTDTSSASTGQDTPLPVTSLSSVSTGDTTPLPVTNPSSASTGHATPLLVTDASSISTGHATSLLVTDASSVSTGHATALHDTDASSLSTGDTTPLPVTSPSSTSTGDTTPLPVTETSSVSTGHATSLPVTDTSSASTGHATSLPVTDTSSASTGHATPLPVTDTSSASTGQATPLPVTSPSSASTGHAIPLLVTDTSSASTGQATPLPVTSLSSASTGDTTPLPVTDASSVSTGHATSLPVTSLSSVSTGDTTPLPVTSPSSASTGHATPLHVTDASSASTGHATPLPVTSLSSASTGDTTPLPVTSPSSASTGHATPLHVTDASSVSTGDTTPLPVTSSSSASSGHTTPLPVTDASSASTGDTTPLPVTDTSSASTGHATHLPVTGLSSASTGDTTRLPVTNVSSASTGHATPLPVTSTSSASTGDTTPLPGTDTSSVSTGHTTPLLVTDASSVSTGDTTRLPVTSPSSASTGHTTPLPVTDTPSASTGDTTPLPVTNASSLSTRHATSLHVTSPSSASTGHATSLPVTDTSAASTGHATPLPVTSTSSASTGDTTPLPVTDTYSASTGQATPLPVTSLSSVSTGDTTPLPVTSPSSASTGHATPLLVTDASSASTGQATPLPVTSLSSVSTGDTTPLPVTSPSSASTGHATSLPVTDTSSASTGDTTSLPVTDTSSAYTGDTTSLPVTDTSSSSTGDTTPLLVTETSSVSTGDTTPLPVTDTSSASTGHATPLPVTNTSSVSTGHATPLHVTSPSSASTGHTTPLPVTDASSVSTGHATSLPVTDASSVFTGHATSLPVTIPSSASSGHTTPLPVTDASSVSTGHATSLPVTDASSVSTGHATPLPVTDASSVSTGHATPLPLTSLSSVSTGDTTPLPVTDTSSASTGQATPLPVTSLSSVSTGDTTPLPVTDTSSASTGHATSLPVTDTSSASTGHATPLPDTDTSSASTGHATLLPVTDTSSASIGHATSLPVTDTSSISTGHATPLHVTSPSSASTGHATPLPVTDTSSASTGHANPLHVTSPSSASTGHATPLPVTDTSSASTGHATPLPVTSLSSVSTGDTTPLPVTSPSSASTGHTTPLPVTDTSSASTGQATALPVTSTSSASTGDTTPLPVTDTSSASTGQATPLPVTSLSSVSTGDTTPLPVTSPSSASTGHATPLLVTDASSASTGQATPLPVTSLSSVSTGDTTPLPVTSPSSASTGHATSLPVTDTSSASTGDTTSLPVTDTSSAYTGDTTSLPVTDTSSSSTGDTTPLLVTETSSVSTGHATPLLVTDASSASTGHATPLHVTSPSSASTGDTTPVPVTDTSSVSTGHATPLPVTGLSSASTGDTTRLPVTDISSASTGQATPLPVTNTSSVSTGDTMPLPVTSPSSASTGHATPLPVTSTSSASTGHATPVPVTSTSSASTGHTTPLPVTDTSSASTGDTTPLPVTSPSSASTGHTTPLHVTIPSSASTGDTSTLPVTGASSASTGHATPLPVTDTSSVSTGHATPLPVTSLSSVSTGDTTPLPVTDASSASTGQATPLPVTSLSSVSTGDTTPLLVTDASSVSTGHATPLPVTDTSSASTGDTTRLPVTDTSSASTGQATPLPVTSLSSVSTGDTTPLLVTDASSVSTGHATPLPVTDTSSASTGDTTRLPVTDTSSASTGQATPLPVTIPSSSSSGHTTPLPVTSTSSVSTGHVTPLHVTSPSSASTGHVTPLPVTSTSSASTGHATPLLVTDASSVSTGHATPLPVTDASSASTGDTTPLPVTDTSSASTGQATPLPVTSLSSVSTGDTTPLPVTDASSASTGHATPLPVTIPSSVSTGDTMPLPVTSPSSASTGHATPLPVTGLSSASTGDTTPLPVTDTSSASTRHATPLPVTDTSSASTDDTTRLPVTDVSSASTGHATPLPVTSTSSASTGDTTPLPVTDTSSVSTGHATSLPVTSRSSASTGHATPLPVTDTSSVSTGHATPLPVTSTSSVSTGHATPLPVTSPSSASTGHATPVPVTSTSSASTGDTTPLPVTNASSLSTGHATPLHVTSPSSASRGDTSTLPVTDASSASTGHATPLPLTSLSSVSTGDTTPLPVTDTSSASTGQATPLPVTSLSSVSTGDTTPLPVTIPSSASSGHTTSLPVTDASSVSTGHGTPLPVTSTSSASTGDTTPLPVTDTSSASTGHATPLPVTDTSSASTGHATPLPVTSLSSVSTGHATPLAVSSATSASTVSSDSPLKMETPGMTTPSLKTDGGRRTATSPPPTTSQTIISTIPSTAMHTRSTAAPIPILPERGVSLFPYGAGAGDLEFVRRTVDFTSPLFKPATGFPLGSSLRDSLYASQAGTLWPWWLRSGTMLTSPLVGGPHFIRATPTKPSSPRTGAGPMPCFSTRAVGCSGTWPSAQASRCSWASLVEMAFSKTAH

SEQ ID NO: 24949 - protein, 4350 aa, Homo sapiens
MKGARWRRVPWVSLSCLCLCLLPHVVPGTTEDTLITGSKTAAPVTSTGSTTATLEGQSTAASSRTSNQDISASSQNHQTKSTETTSKAQTDTLTQMMTSTLFSSPSVHNVMETAPPDEMTTSFPSSVTNTLMMTSKTITMTTSTDSTLGNTEETSTAGTESSTPVTSAVSITAGQEGQSRTTSWRTSIQDTSASSQNHWTRSTQTTRESQTSTLTHRTTSTPSFSPSVHNVTGTVSQKTSPSGETATSSLCSVTNTSMMTSEKITVTTSTGSTLGNPGETSSVPVTGSLMPVTSAALVTFDPEGQSPATFSRTSTQDTTAFSKNHQTQSVETTRVSQINTLNTLTPVTTSTVLSSPSGFNPSGTVSQETFPSGETTTSSPSSVSNTFLVTSKVFRMPTSRDSTLGNTEETSLSVSGTISAITSKVSTIWWSDTLSTALSPSSLPPKISTAFHTQQSEGAETTGRPHERSSFSPGVSQEIFTLHETTTWPSSFSSKGHTTWSQTELPSTSTGAATRLVTGNPSTGTAGTIPRVPSKVSAIGEPGEPTTYSSHSTTLPKTTGAGAQTQWTQETGTTGEALLSSPSYSVTQMIKTATSPSSSPMLDRHTSQQITTAPSTNHSTIHSTSTSPQESPAVSQRGHTQAPQTTQESQTTRSVSPMTDTKTVTTPGSSFTASGHSPSEIVPQDAPTISAATTFAPAPTGDGHTTQAPTTALQAAPSSHDATLGPSGGTSLSKTGALTLANSVVSTPGGPEGQWTSASASTSPDTAAAMTHTHQAESTEASGQTQTSEPASSGSRTTSAGTATPSSSGASGTTPSGSEGISTSGETTRFSSNPSRDSHTTQSTTELLSASASHGAIPVSTGMASSIVPGTFHPTLSEASTAGRPTGQSSPTSPSASPQETAAISRMAQTQRTRTSRGSDTISLASQATDTFSTVPPTPPSITSTGLTSPQTETHTLSPSGSGKTFTTALISNATPLPVTYASSASTGHTTPLHVTDASSVSTGHATPLPVTSPSSVSTGHTTPLPVTDTSSESTGHVTPLPVTSFSSASTGDSTPLPVTDTSSASTGHVTPLPVTSLSSASTGDTTPLPVTDTSSASTGHATSLPVTDTSSVSTGHTTPLPVTDTSSASTGHATSLPVTDTSSVSTGHTTPLHVTDASSASTGQATPLPVTSLSSVSTGDTTPLPVTSPSSASTGHATPLLVTDTSSASTGHATPLPVTDASSVSTDHATSLPVTIPSAASTGHTTPLPVTDTSSASTGQATSLLVTDTSSVSTGDTTPLPVTSTSSASTGHVTPLHVTSPSSASTGHATPLPVTSLSSASTGDTMPLPVTSPSSASTGDTTPLPVTDASSVSTGHTTPLHVTDASSASTGQATPLPVTSLSSVSTGDTTPLPVTSPSSASTGHATPLLVTDTSSASTGHATPLPVTDASSVSTDHATSLPVTIPSAASTGHTTPLPVTDTSSASTGQATSLLVTDTSSVSTGDTTPLPVTSTSSASTGHVTPLHVTSPSSASTGHATPLPVTSLSSASTGDTMPLPVTSPSSASTGDTTPLPVTDASSVSTGHTTPLPVTSPSSASTGHTTPLPVTDTSSASKGDTTPLPVTSPSSASTGHTTPLPVTDTSSASTGDTTPLPVTNASSLSTGHATPLHVTSPSSASTGHATPLPVTSTSSASTGHATPLPVTGLSSATTDDTTRLPVTDVSSASTGQATPLPVTSLSSVSTGDTTPLPVTSPSSASTGHASPLLVTDASSASTGQATPLPVTDTSSVSTAHATPLPVTGLSSASTDDTTRLPVTDVSSASTGQAIPLPVTSPSSASTGDTTPLPVTDASSASTGDTTSLPVTIPSSASSGHTTSLPVTDASSVSTGHATSLLVTDASSVSTGDTTPLPVTDTNSASTGDTTPLHVTDASSVSTGHATSLPVTSLSSASTGDTTPLPVTSPSSASSGHTTPLPVTDASSVPTGHATSLPVTDASSVSTGHATPLPVTDASSVSTGHATPLPVTDTSSVSTGQATPLPVTSLSSASTGDTTPLPVTDTSSASTGQDTPLPVTSLSSVSTGDTTPLPVTNPSSASTGHATPLLVTDASSISTGHATSLLVTDASSVSTGHATALHDTDASSLSTGDTTPLPVTSPSSTSTGDTTPLPVTETSSVSTGHATSLPVTDTSSASTGHATSLPVTDTSSASTGHATPLPVTDTSSASTGQATPLPVTSPSSASTGHAIPLLVTDTSSASTGQATPLPVTSLSSASTGDTTPLPVTDASSVSTGHATSLPVTSLSSVSTGDTTPLPVTSPSSASTGHATPLHVTDASSASTGHATPLPVTSLSSASTGDTTPLPVTSPSSASTGHATPLHVTDASSVSTGDTTPLPVTSSSSASSGHTTPLPVTDASSASTGDTTPLPVTDTSSASTGHATHLPVTGLSSASTGDTTRLPVTNVSSASTGHATPLPVTSTSSASTGDTTPLPGTDTSSVSTGHTTPLLVTDASSVSTGDTTRLPVTSPSSASTGHTTPLPVTDTPSASTGDTTPLPVTNASSLSTRHATSLHVTSPSSASTGHATSLPVTDTSAASTGHATPLPVTSTSSASTGDTTPLPVTDTYSASTGQATPLPVTSLSSVSTGDTTPLPVTSPSSASTGHATPLLVTDASSASTGQATPLPVTSLSSVSTGDTTPLPVTSPSSASTGHATSLPVTDTSSASTGDTTSLPVTDTSSAYTGDTTSLPVTDTSSSSTGDTTPLLVTETSSVSTGDTTPLPVTDTSSASTGHATPLPVTNTSSVSTGHATPLHVTSPSSASTGHTTPLPVTDASSVSTGHATSLPVTDASSVFTGHATSLPVTIPSSASSGHTTPLPVTDASSVSTGHATSLPVTDASSVSTGHATPLPVTDASSVSTGHATPLPLTSLSSVSTGDTTPLPVTDTSSASTGQATPLPVTSLSSVSTGDTTPLPVTDTSSASTGHATSLPVTDTSSASTGHATPLPDTDTSSASTGHATLLPVTDTSSASIGHATSLPVTDTSSISTGHATPLHVTSPSSASTGHATPLPVTDTSSASTGHANPLHVTSPSSASTGHATPLPVTDTSSASTGHATPLPVTSLSSVSTGDTTPLPVTSPSSASTGHTTPLPVTDTSSASTGQATALPVTSTSSASTGDTTPLPVTDTSSASTGQATPLPVTSLSSVSTGDTTPLPVTSPSSASTGHATPLLVTDASSASTGQATPLPVTSLSSVSTGDTTPLPVTSPSSASTGHATSLPVTDTSSASTGDTTSLPVTDTSSAYTGDTTSLPVTDTSSSSTGDTTPLLVTETSSVSTGHATPLLVTDASSASTGHATPLHVTSPSSASTGDTTPVPVTDTSSVSTGHATPLPVTGLSSASTGDTTRLPVTDISSASTGQATPLPVTNTSSVSTGDTMPLPVTSPSSASTGHATPLPVTSTSSASTGHATPVPVTSTSSASTGHTTPLPVTDTSSASTGDTTPLPVTSPSSASTGHTTPLHVTIPSSASTGDTSTLPVTGASSASTGHATPLPVTDTSSVSTGHATPLPVTSLSSVSTGDTTPLPVTDASSASTGQATPLPVTSLSSVSTGDTTPLLVTDASSVSTGHATPLPVTDTSSASTGDTTRLPVTDTSSASTGQATPLPVTSLSSVSTGDTTPLLVTDASSVSTGHATPLPVTDTSSASTGDTTRLPVTDTSSASTGQATPLPVTIPSSSSSGHTTPLPVTSTSSVSTGHVTPLHVTSPSSASTGHVTPLPVTSTSSASTGHATPLLVTDASSVSTGHATPLPVTDASSASTGDTTPLPVTDTSSASTGQATPLPVTSLSSVSTGDTTPLPVTDASSASTGHATPLPVTIPSSVSTGDTMPLPVTSPSSASTGHATPLPVTGLSSASTGDTTPLPVTDTSSASTRHATPLPVTDTSSASTDDTTRLPVTDVSSASTGHATPLPVTSTSSASTGDTTPLPVTDTSSVSTGHATSLPVTSRSSASTGHATPLPVTDTSSVSTGHATPLPVTSTSSVSTGHATPLPVTSPSSASTGHATPVPVTSTSSASTGDTTPLPVTNASSLSTGHATPLHVTSPSSASRGDTSTLPVTDASSASTGHATPLPLTSLSSVSTGDTTPLPVTDTSSASTGQATPLPVTSLSSVSTGDTTPLPVTIPSSASSGHTTSLPVTDASSVSTGHGTPLPVTSTSSASTGDTTPLPVTDTSSASTGHATPLPVTDTSSASTGHATPLPVTSLSSVSTGHATPLAVSSATSASTVSSDSPLKMETPGMTTPSLKTDGGRRTATSPPPTTSQTIISTIPSTAMHTRSTAAPIPILPESPLWGRRRGPGVRQEDRGLHLPTLQAGDWLPPWLLSP

SEQ ID NO: 24950 - protein, 5360 aa, Homo sapiens
MKGARWRRVPWVSLSCLCLCLLPHVVPGTTEDTLITGSKTAAPVTSTGSTTATLEGQSTAASSRTSNQDISASSQNHQTKSTETTSKAQTDTLTQMMTSTLFSSPSVHNVMETAPPDEMTTSFPSSVTNTLMMTSKTITMTTSTDSTLGNTEETSTAGTESSTPVTSAVSITAGQEGQSRTTSWRTSIQDTSASSQNHWTRSTQTTRESQTSTLTHRTTSTPSFSPSVHNVTGTVSQKTSPSGETATSSLCSVTNTSMMTSEKITVTTSTGSTLGNPGETSSVPVTGSLMPVTSAALVTFDPEGQSPATFSRTSTQDTTAFSKNHQTQSVETTRVSQINTLNTLTPVTTSTVLSSPSGFNPSGTVSQETFPSGETTTSSPSSVSNTFLVTSKVFRMPTSRDSTLGNTEETSLSVSGTISAITSKVSTIWWSDTLSTALSPSSLPPKISTAFHTQQSEGAETTGRPHERSSFSPGVSQEIFTLHETTTWPSSFSSKGHTTWSQTELPSTSTGAATRLVTGNPSTGTAGTIPRVPSKVSAIGEPGEPTTYSSHSTTLPKTTGAGAQTQWTQETGTTGEALLSSPSYSVTQMIKTATSPSSSPMLDRHTSQQITTAPSTNHSTIHSTSTSPQESPAVSQRGHTQAPQTTQESQTTRSVSPMTDTKTVTTPGSSFTASGHSPSEIVPQDAPTISAATTFAPAPTGDGHTTQAPTTALQAAPSSHDATLGPSGGTSLSKTGALTLANSVVSTPGGPEGQWTSASASTSPDTAAAMTHTHQAESTEASGQTQTSEPASSGSRTTSAGTATPSSSGASGTTPSGSEGISTSGETTRFSSNPSRDSHTTQSTTELLSASASHGAIPVSTGMASSIVPGTFHPTLSEASTAGRPTGQSSPTSPSASPQETAAISRMAQTQRTRTSRGSDTISLASQATDTFSTVPPTPPSITSTGLTSPQTETHTLSPSGSGKTFTTALISNATPLPVTYASSASTGHTTPLHVTDASSVSTGHATPLPVTSPSSVSTGHTTPLPVTDTSSESTGHVTPLPVTSFSSASTGDSTPLPVTDTSSASTGHVTPLPVTSLSSASTGDTTPLPVTDTSSASTGHATSLPVTDTSSVSTGHTTPLPVTDTSSASTGHATSLPVTDTSSVSTGHTTPLHVTDASSASTGQATPLPVTSLSSVSTGDTTPLPVTSPSSASTGHATPLLVTDTSSASTGHATPLPVTDASSVSTDHATSLPVTIPSAASTGHTTPLPVTDTSSASTGQATSLLVTDTSSVSTGDTTPLPVTSTSSASTGHVTPLHVTSPSSASTGHATPLPVTSLSSASTGDTMPLPVTSPSSASTGDTTPLPVTDASSVSTGHTTPLHVTDASSASTGQATPLPVTSLSSVSTGDTTPLPVTSPSSASTGHATPLLVTDTSSASTGHATPLPVTDASSVSTDHATSLPVTIPSAASTGHTTPLPVTDTSSASTGQATSLLVTDTSSVSTGDTTPLPVTSTSSASTGHVTPLHVTSPSSASTGHATPLPVTSLSSASTGDTMPLPVTSPSSASTGDTTPLPVTDASSVSTGHTTPLPVTSPSSASTGHTTPLPVTDTSSASKGDTTPLPVTSPSSASTGHTTPLPVTDTSSASTGDTTPLPVTNASSLSTGHATPLHVTSPSSASTGHATPLPVTSTSSASTGHATPLPVTGLSSATTDDTTRLPVTDVSSASTGQATPLPVTSLSSVSTGDTTPLPVTSPSSASTGHASPLLVTDASSASTGQATPLPVTDTSSVSTAHATPLPVTGLSSASTDDTTRLPVTDVSSASTGQAIPLPVTSPSSASTGDTTPLPVTDASSASTGDTTSLPVTIPSSASSGHTTSLPVTDASSVSTGHATSLLVTDASSVSTGDTTPLPVTDTNSASTGDTTPLHVTDASSVSTGHATSLPVTSLSSASTGDTTPLPVTSPSSASSGHTTPLPVTDASSVPTGHATSLPVTDASSVSTGHATPLPVTDASSVSTGHATPLPVTDTSSVSTGQATPLPVTSLSSASTGDTTPLPVTDTSSASTGQDTPLPVTSLSSVSTGDTTPLPVTNPSSASTGHATPLLVTDASSISTGHATSLLVTDASSVSTGHATALHDTDASSLSTGDTTPLPVTSPSSTSTGDTTPLPVTETSSVSTGHATSLPVTDTSSASTGHATSLPVTDTSSASTGHATPLPVTDTSSASTGQATPLPVTSPSSASTGHAIPLLVTDTSSASTGQATPLPVTSLSSASTGDTTPLPVTDASSVSTGHATSLPVTSLSSVSTGDTTPLPVTSPSSASTGHATPLHVTDASSASTGHATPLPVTSLSSASTGDTTPLPVTSPSSASTGHATPLHVTDASSVSTGDTTPLPVTSSSSASSGHTTPLPVTDASSASTGDTTPLPVTDTSSASTGHATHLPVTGLSSASTGDTTRLPVTNVSSASTGHATPLPVTSTSSASTGDTTPLPGTDTSSVSTGHTTPLLVTDASSVSTGDTTRLPVTSPSSASTGHTTPLPVTDTPSASTGDTTPLPVTNASSLSTRHATSLHVTSPSSASTGHATSLPVTDTSAASTGHATPLPVTSTSSASTGDTTPLPVTDTYSASTGQATPLPVTSLSSVSTGDTTPLPVTSPSSASTGHATPLLVTDASSASTGQATPLPVTSLSSVSTGDTTPLPVTSPSSASTGHATSLPVTDTSSASTGDTTSLPVTDTSSAYTGDTTSLPVTDTSSSSTGDTTPLLVTETSSVSTGDTTPLPVTDTSSASTGHATPLPVTNTSSVSTGHATPLHVTSPSSASTGHTTPLPVTDASSVSTGHATSLPVTDASSVFTGHATSLPVTIPSSASSGHTTPLPVTDASSVSTGHATSLPVTDASSVSTGHATPLPVTDASSVSTGHATPLPLTSLSSVSTGDTTPLPVTDTSSASTGQATPLPVTSLSSVSTGDTTPLPVTDTSSASTGHATSLPVTDTSSASTGHATPLPDTDTSSASTGHATLLPVTDTSSASIGHATSLPVTDTSSISTGHATPLHVTSPSSASTGHATPLPVTDTSSASTGHANPLHVTSPSSASTGHATPLPVTDTSSASTGHATPLPVTSLSSVSTGDTTPLPVTSPSSASTGHTTPLPVTDTSSASTGQATALPVTSTSSASTGDTTPLPVTDTSSASTGQATPLPVTSLSSVSTGDTTPLPVTSPSSASTGHATPLLVTDASSASTGQATPLPVTSLSSVSTGDTTPLPVTSPSSASTGHATSLPVTDTSSASTGDTTSLPVTDTSSAYTGDTTSLPVTDTSSSSTGDTTPLLVTETSSVSTGHATPLLVTDASSASTGHATPLHVTSPSSASTGDTTPVPVTDTSSVSTGHATPLPVTGLSSASTGDTTRLPVTDISSASTGQATPLPVTNTSSVSTGDTMPLPVTSPSSASTGHATPLPVTSTSSASTGHATPVPVTSTSSASTGHTTPLPVTDTSSASTGDTTPLPVTSPSSASTGHTTPLHVTIPSSASTGDTSTLPVTGASSASTGHATPLPVTDTSSVSTGHATPLPVTSLSSVSTGDTTPLPVTDASSASTGQATPLPVTSLSSVSTGDTTPLLVTDASSVSTGHATPLPVTDTSSASTGDTTRLPVTDTSSASTGQATPLPVTSLSSVSTGDTTPLLVTDASSVSTGHATPLPVTDTSSASTGDTTRLPVTDTSSASTGQATPLPVTIPSSSSSGHTTPLPVTSTSSVSTGHVTPLHVTSPSSASTGHVTPLPVTSTSSASTGHATPLLVTDASSVSTGHATPLPVTDASSASTGDTTPLPVTDTSSASTGQATPLPVTSLSSVSTGDTTPLPVTDASSASTGHATPLPVTIPSSVSTGDTMPLPVTSPSSASTGHATPLPVTGLSSASTGDTTPLPVTDTSSASTRHATPLPVTDTSSASTDDTTRLPVTDVSSASTGHATPLPVTSTSSASTGDTTPLPVTDTSSVSTGHATSLPVTSRSSASTGHATPLPVTDTSSVSTGHATPLPVTSTSSVSTGHATPLPVTSPSSASTGHATPVPVTSTSSASTGDTTPLPVTNASSLSTGHATPLHVTSPSSASRGDTSTLPVTDASSASTGHATPLPLTSLSSVSTGDTTPLPVTDTSSASTGQATPLPVTSLSSVSTGDTTPLPVTIPSSASSGHTTSLPVTDASSVSTGHGTPLPVTSTSSASTGDTTPLPVTDTSSASTGHATPLPVTDTSSASTGHATPLPVTSLSSVSTGHATPLAVSSATSASTVSSDSPLKMETPGMTTPSLKTDGGRRTATSPPPTTSQTIISTIPSTAMHTRSTAAPIPILPERGVSLFPYGAGAGDLEFVRRTVDFTSPLFKPATGFPLGSSLRDSLYFTDNGQIIFPESDYQIFSYPNPLPTGFTGRDPVALVAPFWDDADFSTGRGTTFYQSNTYQAILSTDGSRSYALFLYQSGGMQWDVAQRSGNPVLMGFSSGDGYFENSPLMSQPVWERYRPDRFLNSNSGLQGLQFYRLHREERPNYRLECLQWLKSQPRWPSWGWNQVSCPCSWQQGRRDLRFQPVSIGRWGLGSRQLCSFTSWRGGVCCSYGPWGEFREGWHVQRPWQLAQELEPQSWCCRWNDKPYLCALYQQRRPHVGCATYRPPQPAWMFGDPHITTLDGVSYTFNGLGDFLLVGAQDGNSSFLLQGRTAQTGSAQATNFIAFAAQYRSSSLGPVTVQWLLEPHDAIRVLLDNQTVTFQPDHEDGGGQETFNATGVLLSRNGSEVSASFDGWATVSVIALSNILHASASLPPEYQNRTEGLLGVWNNNPEDDFRMPNGSTIPPGSPEEMLFHFGMTWQINGTGLLGKRNDQLPSNFTPVFYSQLQKNSSWAEHLISNCDGDSSCIYDTLALRNASIGLHTREVSKNYEQANATLNQYPPSINGGRVIEAYKGQTTLIQYTSNAEDANFTLRDSCTDLELFENGTLLWTPKSLEPFTLEILARSAKIGLASALQPRTVVCHCNAESQCLYNQTSRVGNSSLEVAGCKCDGGTFGRYCEGSEDACEEPCFPSVHCVPGKGCEACPPNLTGDGRHCAALGSSFLCQNQSCPVNYCYNQGHCYISQTLGCQPMCTCPPAFTDSRCFLAGNNFSPTVNLELPLRVIQLLLSEEENASMAEVNASVAYRLGTLDMRAFLRNSQVERIDSAAPASGSPIQHWMVISEFQYRPRGPVIDFLNNQLLAAVVEAFLYHVPRRSEEPRNDVVFQPISGEDVRDVTALNVSTLKAYFRCDGYKGYDLVYSPQSGFTCVSPCSRGYCDHGGQCQHLPSGPRCSCVSFSIYTAWGEHCEHLSMKLDAFFGIFFGALGGLLLLGVGTFVVLRFWGCSGARFSYFLNSAEALP

SEQ ID NO: 24951 - protein, 4430 aa, Homo sapiens
MKGARWRRVPWVSLSCLCLCLLPHVVPGTTEDTLITGSKTAAPVTSTGSTTATLEGQSTAASSRTSNQDISASSQNHQTKSTETTSKAQTDTLTQMMTSTLFSSPSVHNVMETAPPDEMTTSFPSSVTNTLMMTSKTITMTTSTDSTLGNTEETSTAGTESSTPVTSAVSITAGQEGQSRTTSWRTSIQDTSASSQNHWTRSTQTTRESQTSTLTHRTTSTPSFSPSVHNVTGTVSQKTSPSGETATSSLCSVTNTSMMTSEKITVTTSTGSTLGNPGETSSVPVTGSLMPVTSAALVTFDPEGQSPATFSRTSTQDTTAFSKNHQTQSVETTRVSQINTLNTLTPVTTSTVLSSPSGFNPSGTVSQETFPSGETTTSSPSSVSNTFLVTSKVFRMPTSRDSTLGNTEETSLSVSGTISAITSKVSTIWWSDTLSTALSPSSLPPKISTAFHTQQSEGAETTGRPHERSSFSPGVSQEIFTLHETTTWPSSFSSKGHTTWSQTELPSTSTGAATRLVTGNPSTGTAGTIPRVPSKVSAIGEPGEPTTYSSHSTTLPKTTGAGAQTQWTQETGTTGEALLSSPSYSVTQMIKTATSPSSSPMLDRHTSQQITTAPSTNHSTIHSTSTSPQESPAVSQRGHTQAPQTTQESQTTRSVSPMTDTKTVTTPGSSFTASGHSPSEIVPQDAPTISAATTFAPAPTGDGHTTQAPTTALQAAPSSHDATLGPSGGTSLSKTGALTLANSVVSTPGGPEGQWTSASASTSPDTAAAMTHTHQAESTEASGQTQTSEPASSGSRTTSAGTATPSSSGASGTTPSGSEGISTSGETTRFSSNPSRDSHTTQSTTELLSASASHGAIPVSTGMASSIVPGTFHPTLSEASTAGRPTGQSSPTSPSASPQETAAISRMAQTQRTRTSRGSDTISLASQATDTFSTVPPTPPSITSTGLTSPQTETHTLSPSGSGKTFTTALISNATPLPVTYASSASTGHTTPLHVTDASSVSTGHATPLPVTSPSSVSTGHTTPLPVTDTSSESTGHVTPLPVTSFSSASTGDSTPLPVTDTSSASTGHVTPLPVTSLSSASTGDTTPLPVTDTSSASTGHATSLPVTDTSSVSTGHTTPLPVTDTSSASTGHATSLPVTDTSSVSTGHTTPLHVTDASSASTGQATPLPVTSLSSVSTGDTTPLPVTSPSSASTGHATPLLVTDTSSASTGHATPLPVTDASSVSTDHATSLPVTIPSAASTGHTTPLPVTDTSSASTGQATSLLVTDTSSVSTGDTTPLPVTSTSSASTGHVTPLHVTSPSSASTGHATPLPVTSLSSASTGDTMPLPVTSPSSASTGDTTPLPVTDASSVSTGHTTPLHVTDASSASTGQATPLPVTSLSSVSTGDTTPLPVTSPSSASTGHATPLLVTDTSSASTGHATPLPVTDASSVSTDHATSLPVTIPSAASTGHTTPLPVTDTSSASTGQATSLLVTDTSSVSTGDTTPLPVTSTSSASTGHVTPLHVTSPSSASTGHATPLPVTSLSSASTGDTMPLPVTSPSSASTGDTTPLPVTDASSVSTGHTTPLPVTSPSSASTGHTTPLPVTDTSSASKGDTTPLPVTSPSSASTGHTTPLPVTDTSSASTGDTTPLPVTNASSLSTGHATPLHVTSPSSASTGHATPLPVTSTSSASTGHATPLPVTGLSSATTDDTTRLPVTDVSSASTGQATPLPVTSLSSVSTGDTTPLPVTSPSSASTGHASPLLVTDASSASTGQATPLPVTDTSSVSTAHATPLPVTGLSSASTDDTTRLPVTDVSSASTGQAIPLPVTSPSSASTGDTTPLPVTDASSASTGDTTSLPVTIPSSASSGHTTSLPVTDASSVSTGHATSLLVTDASSVSTGDTTPLPVTDTNSASTGDTTPLHVTDASSVSTGHATSLPVTSLSSASTGDTTPLPVTSPSSASSGHTTPLPVTDASSVPTGHATSLPVTDASSVSTGHATPLPVTDASSVSTGHATPLPVTDTSSVSTGQATPLPVTSLSSASTGDTTPLPVTDTSSASTGQDTPLPVTSLSSVSTGDTTPLPVTNPSSASTGHATPLLVTDASSISTGHATSLLVTDASSVSTGHATALHDTDASSLSTGDTTPLPVTSPSSTSTGDTTPLPVTETSSVSTGHATSLPVTDTSSASTGHATSLPVTDTSSASTGHATPLPVTDTSSASTGQATPLPVTSPSSASTGHAIPLLVTDTSSASTGQATPLPVTSLSSASTGDTTPLPVTDASSVSTGHATSLPVTSLSSVSTGDTTPLPVTSPSSASTGHATPLHVTDASSASTGHATPLPVTSLSSASTGDTTPLPVTSPSSASTGHATPLHVTDASSVSTGDTTPLPVTSSSSASSGHTTPLPVTDASSASTGDTTPLPVTDTSSASTGHATHLPVTGLSSASTGDTTRLPVTNVSSASTGHATPLPVTSTSSASTGDTTPLPGTDTSSVSTGHTTPLLVTDASSVSTGDTTRLPVTSPSSASTGHTTPLPVTDTPSASTGDTTPLPVTNASSLSTRHATSLHVTSPSSASTGHATSLPVTDTSAASTGHATPLPVTSTSSASTGDTTPLPVTDTYSASTGQATPLPVTSLSSVSTGDTTPLPVTSPSSASTGHATPLLVTDASSASTGQATPLPVTSLSSVSTGDTTPLPVTSPSSASTGHATSLPVTDTSSASTGDTTSLPVTDTSSAYTGDTTSLPVTDTSSSSTGDTTPLLVTETSSVSTGDTTPLPVTDTSSASTGHATPLPVTNTSSVSTGHATPLHVTSPSSASTGHTTPLPVTDASSVSTGHATSLPVTDASSVFTGHATSLPVTIPSSASSGHTTPLPVTDASSVSTGHATSLPVTDASSVSTGHATPLPVTDASSVSTGHATPLPLTSLSSVSTGDTTPLPVTDTSSASTGQATPLPVTSLSSVSTGDTTPLPVTDTSSASTGHATSLPVTDTSSASTGHATPLPDTDTSSASTGHATLLPVTDTSSASIGHATSLPVTDTSSISTGHATPLHVTSPSSASTGHATPLPVTDTSSASTGHANPLHVTSPSSASTGHATPLPVTDTSSASTGHATPLPVTSLSSVSTGDTTPLPVTSPSSASTGHTTPLPVTDTSSASTGQATALPVTSTSSASTGDTTPLPVTDTSSASTGQATPLPVTSLSSVSTGDTTPLPVTSPSSASTGHATPLLVTDASSASTGQATPLPVTSLSSVSTGDTTPLPVTSPSSASTGHATSLPVTDTSSASTGDTTSLPVTDTSSAYTGDTTSLPVTDTSSSSTGDTTPLLVTETSSVSTGHATPLLVTDASSASTGHATPLHVTSPSSASTGDTTPVPVTDTSSVSTGHATPLPVTGLSSASTGDTTRLPVTDISSASTGQATPLPVTNTSSVSTGDTMPLPVTSPSSASTGHATPLPVTSTSSASTGHATPVPVTSTSSASTGHTTPLPVTDTSSASTGDTTPLPVTSPSSASTGHTTPLHVTIPSSASTGDTSTLPVTGASSASTGHATPLPVTDTSSVSTGHATPLPVTSLSSVSTGDTTPLPVTDASSASTGQATPLPVTSLSSVSTGDTTPLLVTDASSVSTGHATPLPVTDTSSASTGDTTRLPVTDTSSASTGQATPLPVTSLSSVSTGDTTPLLVTDASSVSTGHATPLPVTDTSSASTGDTTRLPVTDTSSASTGQATPLPVTIPSSSSSGHTTPLPVTSTSSVSTGHVTPLHVTSPSSASTGHVTPLPVTSTSSASTGHATPLLVTDASSVSTGHATPLPVTDASSASTGDTTPLPVTDTSSASTGQATPLPVTSLSSVSTGDTTPLPVTDASSASTGHATPLPVTIPSSVSTGDTMPLPVTSPSSASTGHATPLPVTGLSSASTGDTTPLPVTDTSSASTRHATPLPVTDTSSASTDDTTRLPVTDVSSASTGHATPLPVTSTSSASTGDTTPLPVTDTSSVSTGHATSLPVTSRSSASTGHATPLPVTDTSSVSTGHATPLPVTSTSSVSTGHATPLPVTSPSSASTGHATPVPVTSTSSASTGDTTPLPVTNASSLSTGHATPLHVTSPSSASRGDTSTLPVTDASSASTGHATPLPLTSLSSVSTGDTTPLPVTDTSSASTGQATPLPVTSLSSVSTGDTTPLPVTIPSSASSGHTTSLPVTDASSVSTGHGTPLPVTSTSSASTGDTTPLPVTDTSSASTGHATPLPVTDTSSASTGHATPLPVTSLSSVSTGHATPLAVSSATSASTVSSDSPLKMETPGMTTPSLKTDGGRRTATSPPPTTSQTIISTIPSTAMHTRSTAAPIPILPERGEAIQEFPSSPMGQTPGTWSSSGGPWTSPPHSSSRRLASPLAPLSVIPSTSQTMARSSSQSQTTRFSPTPTHSQQASQAGTLWPWWLRSGTMLTSPLVGGPHFIRNTRRSMVNTAC

SEQ ID NO: 24952 - protein, 1125 aa, Homo sapiens
MKGARWRRVPWVSLSCLCLCLLPHVVPGVSLFPYGAGAGDLEFVRRTVDFTSPLFKPATGFPLGSSLRDSLYFTDNGQIIFPESDYQIFSYPNPLPTGFTGRDPVALVAPFWDDADFSTGRGTTFYQEYETFYGEHSLLVQQAESWIRKMTNNGGYKARWALKVTWVNAHAYPAQWTLGSNTYQAILSTDGSRSYALFLYQSGGMQWDVAQRSGNPVLMGFSSGDGYFENSPLMSQPVWERYRPDRFLNSNSGLQGLQFYRLHREERPNYRLECLQWLKSQPRWPSWGWNQVSCPCSWQQGRRDLRFQPVSIGRWGLGSRQLCSFTSWRGGVCCSYGPWGEFREGWHVQRPWQLAQELEPQSWCCRWNDKPYLCALYQQRRPHVGCATYRPPQPAWMFGDPHITTLDGVSYTFNGLGDFLLVGAQDGNSSFLLQGRTAQTGSAQATNFIAFAAQYRSSSLGPVTVQWLLEPHDAIRVLLDNQTVTFQPDHEDGGGQETFNATGVLLSRNGSEVSASFDGWATVSVIALSNILHASASLPPEYQNRTEGLLGVWNNNPEDDFRMPNGSTIPPGSPEEMLFHFGMTWQINGTGLLGKRNDQLPSNFTPVFYSQLQKNSSWAEHLISNCDGDSSCIYDTLALRNASIGLHTREVSKNYEQANATLNQYPPSINGGRVIEAYKGQTTLIQYTSNAEDANFTLRDSCTDLELFENGTLLWTPKSLEPFTLEILARSAKIGLASALQPRTVVCHCNAESQCLYNQTSRVGNSSLEVAGCKCDGGTFGRYCEGSEDACEEPCFPSVHCVPGKGCEACPPNLTGDGRHCAALGSSFLCQNQSCPVNYCYNQGHCYISQTLGCQPMCTCPPAFTDSRCFLAGNNFSPTVNLELPLRVIQLLLSEEENASMAEVNASVAYRLGTLDMRAFLRNSQVERIDSAAPASGSPIQHWMVISEFQYRPRGPVIDFLNNQLLAAVVEAFLYHVPRRSEEPRNDVVFQPISGEDVRDVTALNVSTLKAYFRCDGYKGYDLVYSPQSGFTCVSPCSRGYCDHGGQCQHLPSGPRCSCVSFSIYTAWGEHCEHLSMKLDAFFGIFFGALGGLLLLGVGTFVVLRFWGCSGARFSYFLNSAEALP

SEQ ID NO: 24953 - protein, 1176 aa, Homo sapiens
MKGARWRRVPWVSLSCLCLCLLPHVVPGMTTPSLKTDGGRRTATSPPPTTSQTIISTIPSTAMHTRSTAAPIPILPERGVSLFPYGAGAGDLEFVRRTVDFTSPLFKPATGFPLGSSLRDSLYFTDNGQIIFPESDYQIFSYPNPLPTGFTGRDPVALVAPFWDDADFSTGRGTTFYQEYETFYGEHSLLVQQAESWIRKMTNNGGYKARWALKVTWVNAHAYPAQWTLGSNTYQAILSTDGSRSYALFLYQSGGMQWDVAQRSGNPVLMGFSSGDGYFENSPLMSQPVWERYRPDRFLNSNSGLQGLQFYRLHREERPNYRLECLQWLKSQPRWPSWGWNQVSCPCSWQQGRRDLRFQPVSIGRWGLGSRQLCSFTSWRGGVCCSYGPWGEFREGWHVQRPWQLAQELEPQSWCCRWNDKPYLCALYQQRRPHVGCATYRPPQPAWMFGDPHITTLDGVSYTFNGLGDFLLVGAQDGNSSFLLQGRTAQTGSAQATNFIAFAAQYRSSSLGPVTVQWLLEPHDAIRVLLDNQTVTFQPDHEDGGGQETFNATGVLLSRNGSEVSASFDGWATVSVIALSNILHASASLPPEYQNRTEGLLGVWNNNPEDDFRMPNGSTIPPGSPEEMLFHFGMTWQINGTGLLGKRNDQLPSNFTPVFYSQLQKNSSWAEHLISNCDGDSSCIYDTLALRNASIGLHTREVSKNYEQANATLNQYPPSINGGRVIEAYKGQTTLIQYTSNAEDANFTLRDSCTDLELFENGTLLWTPKSLEPFTLEILARSAKIGLASALQPRTVVCHCNAESQCLYNQTSRVGNSSLEVAGCKCDGGTFGRYCEGSEDACEEPCFPSVHCVPGKGCEACPPNLTGDGRHCAALGSSFLCQNQSCPVNYCYNQGHCYISQTLGCQPMCTCPPAFTDSRCFLAGNNFSPTVNLELPLRVIQLLLSEEENASMAEVNASVAYRLGTLDMRAFLRNSQVERIDSAAPASGSPIQHWMVISEFQYRPRGPVIDFLNNQLLAAVVEAFLYHVPRRSEEPRNDVVFQPISGEDVRDVTALNVSTLKAYFRCDGYKGYDLVYSPQSGFTCVSPCSRGYCDHGGQCQHLPSGPRCSCVSFSIYTAWGEHCEHLSMKLDAFFGIFFGALGGLLLLGVGTFVVLRFWGCSGARFSYFLNSAEALP

SEQ ID NO: 24954 - protein, 4419 aa, Homo sapiens
MKGARWRRVPWVSLSCLCLCLLPHVVPGTTEDTLITGSKTAAPVTSTGSTTATLEGQSTAASSRTSNQDISASSQNHQTKSTETTSKAQTDTLTQMMTSTLFSSPSVHNVMETAPPDEMTTSFPSSVTNTLMMTSKTITMTTSTDSTLGNTEETSTAGTESSTPVTSAVSITAGQEGQSRTTSWRTSIQDTSASSQNHWTRSTQTTRESQTSTLTHRTTSTPSFSPSVHNVTGTVSQKTSPSGETATSSLCSVTNTSMMTSEKITVTTSTGSTLGNPGETSSVPVTGSLMPVTSAALVTFDPEGQSPATFSRTSTQDTTAFSKNHQTQSVETTRVSQINTLNTLTPVTTSTVLSSPSGFNPSGTVSQETFPSGETTTSSPSSVSNTFLVTSKVFRMPTSRDSTLGNTEETSLSVSGTISAITSKVSTIWWSDTLSTALSPSSLPPKISTAFHTQQSEGAETTGRPHERSSFSPGVSQEIFTLHETTTWPSSFSSKGHTTWSQTELPSTSTGAATRLVTGNPSTGTAGTIPRVPSKVSAIGEPGEPTTYSSHSTTLPKTTGAGAQTQWTQETGTTGEALLSSPSYSVTQMIKTATSPSSSPMLDRHTSQQITTAPSTNHSTIHSTSTSPQESPAVSQRGHTQAPQTTQESQTTRSVSPMTDTKTVTTPGSSFTASGHSPSEIVPQDAPTISAATTFAPAPTGDGHTTQAPTTALQAAPSSHDATLGPSGGTSLSKTGALTLANSVVSTPGGPEGQWTSASASTSPDTAAAMTHTHQAESTEASGQTQTSEPASSGSRTTSAGTATPSSSGASGTTPSGSEGISTSGETTRFSSNPSRDSHTTQSTTELLSASASHGAIPVSTGMASSIVPGTFHPTLSEASTAGRPTGQSSPTSPSASPQETAAISRMAQTQRTRTSRGSDTISLASQATDTFSTVPPTPPSITSTGLTSPQTETHTLSPSGSGKTFTTALISNATPLPVTYASSASTGHTTPLHVTDASSVSTGHATPLPVTSPSSVSTGHTTPLPVTDTSSESTGHVTPLPVTSFSSASTGDSTPLPVTDTSSASTGHVTPLPVTSLSSASTGDTTPLPVTDTSSASTGHATSLPVTDTSSVSTGHTTPLPVTDTSSASTGHATSLPVTDTSSVSTGHTTPLHVTDASSASTGQATPLPVTSLSSVSTGDTTPLPVTSPSSASTGHATPLLVTDTSSASTGHATPLPVTDASSVSTDHATSLPVTIPSAASTGHTTPLPVTDTSSASTGQATSLLVTDTSSVSTGDTTPLPVTSTSSASTGHVTPLHVTSPSSASTGHATPLPVTSLSSASTGDTMPLPVTSPSSASTGDTTPLPVTDASSVSTGHTTPLHVTDASSASTGQATPLPVTSLSSVSTGDTTPLPVTSPSSASTGHATPLLVTDTSSASTGHATPLPVTDASSVSTDHATSLPVTIPSAASTGHTTPLPVTDTSSASTGQATSLLVTDTSSVSTGDTTPLPVTSTSSASTGHVTPLHVTSPSSASTGHATPLPVTSLSSASTGDTMPLPVTSPSSASTGDTTPLPVTDASSVSTGHTTPLPVTSPSSASTGHTTPLPVTDTSSASKGDTTPLPVTSPSSASTGHTTPLPVTDTSSASTGDTTPLPVTNASSLSTGHATPLHVTSPSSASTGHATPLPVTSTSSASTGHATPLPVTGLSSATTDDTTRLPVTDVSSASTGQATPLPVTSLSSVSTGDTTPLPVTSPSSASTGHASPLLVTDASSASTGQATPLPVTDTSSVSTAHATPLPVTGLSSASTDDTTRLPVTDVSSASTGQAIPLPVTSPSSASTGDTTPLPVTDASSASTGDTTSLPVTIPSSASSGHTTSLPVTDASSVSTGHATSLLVTDASSVSTGDTTPLPVTDTNSASTGDTTPLHVTDASSVSTGHATSLPVTSLSSASTGDTTPLPVTSPSSASSGHTTPLPVTDASSVPTGHATSLPVTDASSVSTGHATPLPVTDASSVSTGHATPLPVTDTSSVSTGQATPLPVTSLSSASTGDTTPLPVTDTSSASTGQDTPLPVTSLSSVSTGDTTPLPVTNPSSASTGHATPLLVTDASSISTGHATSLLVTDASSVSTGHATALHDTDASSLSTGDTTPLPVTSPSSTSTGDTTPLPVTETSSVSTGHATSLPVTDTSSASTGHATSLPVTDTSSASTGHATPLPVTDTSSASTGQATPLPVTSPSSASTGHAIPLLVTDTSSASTGQATPLPVTSLSSASTGDTTPLPVTDASSVSTGHATSLPVTSLSSVSTGDTTPLPVTSPSSASTGHATPLHVTDASSASTGHATPLPVTSLSSASTGDTTPLPVTSPSSASTGHATPLHVTDASSVSTGDTTPLPVTSSSSASSGHTTPLPVTDASSASTGDTTPLPVTDTSSASTGHATHLPVTGLSSASTGDTTRLPVTNVSSASTGHATPLPVTSTSSASTGDTTPLPGTDTSSVSTGHTTPLLVTDASSVSTGDTTRLPVTSPSSASTGHTTPLPVTDTPSASTGDTTPLPVTNASSLSTRHATSLHVTSPSSASTGHATSLPVTDTSAASTGHATPLPVTSTSSASTGDTTPLPVTDTYSASTGQATPLPVTSLSSVSTGDTTPLPVTSPSSASTGHATPLLVTDASSASTGQATPLPVTSLSSVSTGDTTPLPVTSPSSASTGHATSLPVTDTSSASTGDTTSLPVTDTSSAYTGDTTSLPVTDTSSSSTGDTTPLLVTETSSVSTGDTTPLPVTDTSSASTGHATPLPVTNTSSVSTGHATPLHVTSPSSASTGHTTPLPVTDASSVSTGHATSLPVTDASSVFTGHATSLPVTIPSSASSGHTTPLPVTDASSVSTGHATSLPVTDASSVSTGHATPLPVTDASSVSTGHATPLPLTSLSSVSTGDTTPLPVTDTSSASTGQATPLPVTSLSSVSTGDTTPLPVTDTSSASTGHATSLPVTDTSSASTGHATPLPDTDTSSASTGHATLLPVTDTSSASIGHATSLPVTDTSSISTGHATPLHVTSPSSASTGHATPLPVTDTSSASTGHANPLHVTSPSSASTGHATPLPVTDTSSASTGHATPLPVTSLSSVSTGDTTPLPVTSPSSASTGHTTPLPVTDTSSASTGQATALPVTSTSSASTGDTTPLPVTDTSSASTGQATPLPVTSLSSVSTGDTTPLPVTSPSSASTGHATPLLVTDASSASTGQATPLPVTSLSSVSTGDTTPLPVTSPSSASTGHATSLPVTDTSSASTGDTTSLPVTDTSSAYTGDTTSLPVTDTSSSSTGDTTPLLVTETSSVSTGHATPLLVTDASSASTGHATPLHVTSPSSASTGDTTPVPVTDTSSVSTGHATPLPVTGLSSASTGDTTRLPVTDISSASTGQATPLPVTNTSSVSTGDTMPLPVTSPSSASTGHATPLPVTSTSSASTGHATPVPVTSTSSASTGHTTPLPVTDTSSASTGDTTPLPVTSPSSASTGHTTPLHVTIPSSASTGDTSTLPVTGASSASTGHATPLPVTDTSSVSTGHATPLPVTSLSSVSTGDTTPLPVTDASSASTGQATPLPVTSLSSVSTGDTTPLLVTDASSVSTGHATPLPVTDTSSASTGDTTRLPVTDTSSASTGQATPLPVTSLSSVSTGDTTPLLVTDASSVSTGHATPLPVTDTSSASTGDTTRLPVTDTSSASTGQATPLPVTIPSSSSSGHTTPLPVTSTSSVSTGHVTPLHVTSPSSASTGHVTPLPVTSTSSASTGHATPLLVTDASSVSTGHATPLPVTDASSASTGDTTPLPVTDTSSASTGQATPLPVTSLSSVSTGDTTPLPVTDASSASTGHATPLPVTIPSSVSTGDTMPLPVTSPSSASTGHATPLPVTGLSSASTGDTTPLPVTDTSSASTRHATPLPVTDTSSASTDDTTRLPVTDVSSASTGHATPLPVTSTSSASTGDTTPLPVTDTSSVSTGHATSLPVTSRSSASTGHATPLPVTDTSSVSTGHATPLPVTSTSSVSTGHATPLPVTSPSSASTGHATPVPVTSTSSASTGDTTPLPVTNASSLSTGHATPLHVTSPSSASRGDTSTLPVTDASSASTGHATPLPLTSLSSVSTGDTTPLPVTDTSSASTGQATPLPVTSLSSVSTGDTTPLPVTIPSSASSGHTTSLPVTDASSVSTGHGTPLPVTSTSSASTGDTTPLPVTDTSSASTGHATPLPVTDTSSASTGHATPLPVTSLSSVSTGHATPLAVSSATSASTVSSDSPLKMETPGMTTPSLKTDGGRRTATSPPPTTSQTIISTIPSTAMHTRSTAAPIPILPERGAIQEFPSSPMGQTPGTWSSSGGPWTSPPHSSSRRLASPLAPLSVIPSTSQTMARSSSQSQTTRFSPTPTHSQQASQAGTLWPWWLRSGTMLTSPLVGGPHFIRL

SEQ ID NO: 24955 - protein, 4627 aa, Homo sapiens
MKGARWRRVPWVSLSCLCLCLLPHVVPGTTEDTLITGSKTAAPVTSTGSTTATLEGQSTAASSRTSNQDISASSQNHQTKSTETTSKAQTDTLTQMMTSTLFSSPSVHNVMETAPPDEMTTSFPSSVTNTLMMTSKTITMTTSTDSTLGNTEETSTAGTESSTPVTSAVSITAGQEGQSRTTSWRTSIQDTSASSQNHWTRSTQTTRESQTSTLTHRTTSTPSFSPSVHNVTGTVSQKTSPSGETATSSLCSVTNTSMMTSEKITVTTSTGSTLGNPGETSSVPVTGSLMPVTSAALVTFDPEGQSPATFSRTSTQDTTAFSKNHQTQSVETTRVSQINTLNTLTPVTTSTVLSSPSGFNPSGTVSQETFPSGETTTSSPSSVSNTFLVTSKVFRMPTSRDSTLGNTEETSLSVSGTISAITSKVSTIWWSDTLSTALSPSSLPPKISTAFHTQQSEGAETTGRPHERSSFSPGVSQEIFTLHETTTWPSSFSSKGHTTWSQTELPSTSTGAATRLVTGNPSTGTAGTIPRVPSKVSAIGEPGEPTTYSSHSTTLPKTTGAGAQTQWTQETGTTGEALLSSPSYSVTQMIKTATSPSSSPMLDRHTSQQITTAPSTNHSTIHSTSTSPQESPAVSQRGHTQAPQTTQESQTTRSVSPMTDTKTVTTPGSSFTASGHSPSEIVPQDAPTISAATTFAPAPTGDGHTTQAPTTALQAAPSSHDATLGPSGGTSLSKTGALTLANSVVSTPGGPEGQWTSASASTSPDTAAAMTHTHQAESTEASGQTQTSEPASSGSRTTSAGTATPSSSGASGTTPSGSEGISTSGETTRFSSNPSRDSHTTQSTTELLSASASHGAIPVSTGMASSIVPGTFHPTLSEASTAGRPTGQSSPTSPSASPQETAAISRMAQTQRTRTSRGSDTISLASQATDTFSTVPPTPPSITSTGLTSPQTETHTLSPSGSGKTFTTALISNATPLPVTYASSASTGHTTPLHVTDASSVSTGHATPLPVTSPSSVSTGHTTPLPVTDTSSESTGHVTPLPVTSFSSASTGDSTPLPVTDTSSASTGHVTPLPVTSLSSASTGDTTPLPVTDTSSASTGHATSLPVTDTSSVSTGHTTPLPVTDTSSASTGHATSLPVTDTSSVSTGHTTPLHVTDASSASTGQATPLPVTSLSSVSTGDTTPLPVTSPSSASTGHATPLLVTDTSSASTGHATPLPVTDASSVSTDHATSLPVTIPSAASTGHTTPLPVTDTSSASTGQATSLLVTDTSSVSTGDTTPLPVTSTSSASTGHVTPLHVTSPSSASTGHATPLPVTSLSSASTGDTMPLPVTSPSSASTGDTTPLPVTDASSVSTGHTTPLHVTDASSASTGQATPLPVTSLSSVSTGDTTPLPVTSPSSASTGHATPLLVTDTSSASTGHATPLPVTDASSVSTDHATSLPVTIPSAASTGHTTPLPVTDTSSASTGQATSLLVTDTSSVSTGDTTPLPVTSTSSASTGHVTPLHVTSPSSASTGHATPLPVTSLSSASTGDTMPLPVTSPSSASTGDTTPLPVTDASSVSTGHTTPLPVTSPSSASTGHTTPLPVTDTSSASKGDTTPLPVTSPSSASTGHTTPLPVTDTSSASTGDTTPLPVTNASSLSTGHATPLHVTSPSSASTGHATPLPVTSTSSASTGHATPLPVTGLSSATTDDTTRLPVTDVSSASTGQATPLPVTSLSSVSTGDTTPLPVTSPSSASTGHASPLLVTDASSASTGQATPLPVTDTSSVSTAHATPLPVTGLSSASTDDTTRLPVTDVSSASTGQAIPLPVTSPSSASTGDTTPLPVTDASSASTGDTTSLPVTIPSSASSGHTTSLPVTDASSVSTGHATSLLVTDASSVSTGDTTPLPVTDTNSASTGDTTPLHVTDASSVSTGHATSLPVTSLSSASTGDTTPLPVTSPSSASSGHTTPLPVTDASSVPTGHATSLPVTDASSVSTGHATPLPVTDASSVSTGHATPLPVTDTSSVSTGQATPLPVTSLSSASTGDTTPLPVTDTSSASTGQDTPLPVTSLSSVSTGDTTPLPVTNPSSASTGHATPLLVTDASSISTGHATSLLVTDASSVSTGHATALHDTDASSLSTGDTTPLPVTSPSSTSTGDTTPLPVTETSSVSTGHATSLPVTDTSSASTGHATSLPVTDTSSASTGHATPLPVTDTSSASTGQATPLPVTSPSSASTGHAIPLLVTDTSSASTGQATPLPVTSLSSASTGDTTPLPVTDASSVSTGHATSLPVTSLSSVSTGDTTPLPVTSPSSASTGHATPLHVTDASSASTGHATPLPVTSLSSASTGDTTPLPVTSPSSASTGHATPLHVTDASSVSTGDTTPLPVTSSSSASSGHTTPLPVTDASSASTGDTTPLPVTDTSSASTGHATHLPVTGLSSASTGDTTRLPVTNVSSASTGHATPLPVTSTSSASTGDTTPLPGTDTSSVSTGHTTPLLVTDASSVSTGDTTRLPVTSPSSASTGHTTPLPVTDTPSASTGDTTPLPVTNASSLSTRHATSLHVTSPSSASTGHATSLPVTDTSAASTGHATPLPVTSTSSASTGDTTPLPVTDTYSASTGQATPLPVTSLSSVSTGDTTPLPVTSPSSASTGHATPLLVTDASSASTGQATPLPVTSLSSVSTGDTTPLPVTSPSSASTGHATSLPVTDTSSASTGDTTSLPVTDTSSAYTGDTTSLPVTDTSSSSTGDTTPLLVTETSSVSTGDTTPLPVTDTSSASTGHATPLPVTNTSSVSTGHATPLHVTSPSSASTGHTTPLPVTDASSVSTGHATSLPVTDASSVFTGHATSLPVTIPSSASSGHTTPLPVTDASSVSTGHATSLPVTDASSVSTGHATPLPVTDASSVSTGHATPLPLTSLSSVSTGDTTPLPVTDTSSASTGQATPLPVTSLSSVSTGDTTPLPVTDTSSASTGHATSLPVTDTSSASTGHATPLPDTDTSSASTGHATLLPVTDTSSASIGHATSLPVTDTSSISTGHATPLHVTSPSSASTGHATPLPVTDTSSASTGHANPLHVTSPSSASTGHATPLPVTDTSSASTGHATPLPVTSLSSVSTGDTTPLPVTSPSSASTGHTTPLPVTDTSSASTGQATALPVTSTSSASTGDTTPLPVTDTSSASTGQATPLPVTSLSSVSTGDTTPLPVTSPSSASTGHATPLLVTDASSASTGQATPLPVTSLSSVSTGDTTPLPVTSPSSASTGHATSLPVTDTSSASTGDTTSLPVTDTSSAYTGDTTSLPVTDTSSSSTGDTTPLLVTETSSVSTGHATPLLVTDASSASTGHATPLHVTSPSSASTGDTTPVPVTDTSSVSTGHATPLPVTGLSSASTGDTTRLPVTDISSASTGQATPLPVTNTSSVSTGDTMPLPVTSPSSASTGHATPLPVTSTSSASTGHATPVPVTSTSSASTGHTTPLPVTDTSSASTGDTTPLPVTSPSSASTGHTTPLHVTIPSSASTGDTSTLPVTGASSASTGHATPLPVTDTSSVSTGHATPLPVTSLSSVSTGDTTPLPVTDASSASTGQATPLPVTSLSSVSTGDTTPLLVTDASSVSTGHATPLPVTDTSSASTGDTTRLPVTDTSSASTGQATPLPVTSLSSVSTGDTTPLLVTDASSVSTGHATPLPVTDTSSASTGDTTRLPVTDTSSASTGQATPLPVTIPSSSSSGHTTPLPVTSTSSVSTGHVTPLHVTSPSSASTGHVTPLPVTSTSSASTGHATPLLVTDASSVSTGHATPLPVTDASSASTGDTTPLPVTDTSSASTGQATPLPVTSLSSVSTGDTTPLPVTDASSASTGHATPLPVTIPSSVSTGDTMPLPVTSPSSASTGHATPLPVTGLSSASTGDTTPLPVTDTSSASTRHATPLPVTDTSSASTDDTTRLPVTDVSSASTGHATPLPVTSTSSASTGDTTPLPVTDTSSVSTGHATSLPVTSRSSASTGHATPLPVTDTSSVSTGHATPLPVTSTSSVSTGHATPLPVTSPSSASTGHATPVPVTSTSSASTGDTTPLPVTNASSLSTGHATPLHVTSPSSASRGDTSTLPVTDASSASTGHATPLPLTSLSSVSTGDTTPLPVTDTSSASTGQATPLPVTSLSSVSTGDTTPLPVTIPSSASSGHTTSLPVTDASSVSTGHGTPLPVTSTSSASTGDTTPLPVTDTSSASTGHATPLPVTDTSSASTGHATPLPVTSLSSVSTGHATPLAVSSATSASTVSSDSPLKMETPGMTTPSLKTDGGRRTATSPPPTTSQTIISTIPSTAMHTRSTAAPIPILPERGVSLFPYGAGAGDLEFVRRTVDFTSPLFKPATGFPLGSSLRDSLYFTDNGQIIFPESDYQIFSYPNPLPTGFTGRDPVALVAPFWDDADFSTGRGTTFYQEYETFYGEHSLLVQQAESWIRKMTNNGGYKARWALKVTWVNAHAYPAQWTLGSNTYQAILSTDGSRSYALFLYQSGGMQWDVAQRSGNPVLMGFSSGDGYFENSPLMSQPVWERYRPDRFLNSNSGLQGLQFYRLHREERPNYRLECLQWLKSQPRWPSWGWNQAAPPRLAQPRPPTSSPLRLSTAPAAWAPSRSNGSLSLTTQSVSCWITRL

SEQ ID NO: 24956 - protein, 5186 aa, Homo sapiens
MKGARWRRVPWVSLSCLCLCLLPHVVPGTTEDTLITGSKTAAPVTSTGSTTATLEGQSTAASSRTSNQDISASSQNHQTKSTETTSKAQTDTLTQMMTSTLFSSPSVHNVMETAPPDEMTTSFPSSVTNTLMMTSKTITMTTSTDSTLGNTEETSTAGTESSTPVTSAVSITAGQEGQSRTTSWRTSIQDTSASSQNHWTRSTQTTRESQTSTLTHRTTSTPSFSPSVHNVTGTVSQKTSPSGETATSSLCSVTNTSMMTSEKITVTTSTGSTLGNPGETSSVPVTGSLMPVTSAALVTFDPEGQSPATFSRTSTQDTTAFSKNHQTQSVETTRVSQINTLNTLTPVTTSTVLSSPSGFNPSGTVSQETFPSGETTTSSPSSVSNTFLVTSKVFRMPTSRDSTLGNTEETSLSVSGTISAITSKVSTIWWSDTLSTALSPSSLPPKISTAFHTQQSEGAETTGRPHERSSFSPGVSQEIFTLHETTTWPSSFSSKGHTTWSQTELPSTSTGAATRLVTGNPSTGTAGTIPRVPSKVSAIGEPGEPTTYSSHSTTLPKTTGAGAQTQWTQETGTTGEALLSSPSYSVTQMIKTATSPSSSPMLDRHTSQQITTAPSTNHSTIHSTSTSPQESPAVSQRGHTQAPQTTQESQTTRSVSPMTDTKTVTTPGSSFTASGHSPSEIVPQDAPTISAATTFAPAPTGDGHTTQAPTTALQAAPSSHDATLGPSGGTSLSKTGALTLANSVVSTPGGPEGQWTSASASTSPDTAAAMTHTHQAESTEASGQTQTSEPASSGSRTTSAGTATPSSSGASGTTPSGSEGISTSGETTRFSSNPSRDSHTTQSTTELLSASASHGAIPVSTGMASSIVPGTFHPTLSEASTAGRPTGQSSPTSPSASPQETAAISRMAQTQRTRTSRGSDTISLASQATDTFSTVPPTPPSITSTGLTSPQTETHTLSPSGSGKTFTTALISNATPLPVTYASSASTGHTTPLHVTDASSVSTGHATPLPVTSPSSVSTGHTTPLPVTDTSSESTGHVTPLPVTSFSSASTGDSTPLPVTDTSSASTGHVTPLPVTSLSSASTGDTTPLPVTDTSSASTGHATSLPVTDTSSVSTGHTTPLPVTDTSSASTGHATSLPVTDTSSVSTGHTTPLHVTDASSASTGQATPLPVTSLSSVSTGDTTPLPVTSPSSASTGHATPLLVTDTSSASTGHATPLPVTDASSVSTDHATSLPVTIPSAASTGHTTPLPVTDTSSASTGQATSLLVTDTSSVSTGDTTPLPVTSTSSASTGHVTPLHVTSPSSASTGHATPLPVTSLSSASTGDTMPLPVTSPSSASTGDTTPLPVTDASSVSTGHTTPLHVTDASSASTGQATPLPVTSLSSVSTGDTTPLPVTSPSSASTGHATPLLVTDTSSASTGHATPLPVTDASSVSTDHATSLPVTIPSAASTGHTTPLPVTDTSSASTGQATSLLVTDTSSVSTGDTTPLPVTSTSSASTGHVTPLHVTSPSSASTGHATPLPVTSLSSASTGDTMPLPVTSPSSASTGDTTPLPVTDASSVSTGHTTPLPVTSPSSASTGHTTPLPVTDTSSASKGDTTPLPVTSPSSASTGHTTPLPVTDTSSASTGDTTPLPVTNASSLSTGHATPLHVTSPSSASTGHATPLPVTSTSSASTGHATPLPVTGLSSATTDDTTRLPVTDVSSASTGQATPLPVTSLSSVSTGDTTPLPVTSPSSASTGHASPLLVTDASSASTGQATPLPVTDTSSVSTAHATPLPVTGLSSASTDDTTRLPVTDVSSASTGQAIPLPVTSPSSASTGDTTPLPVTDASSASTGDTTSLPVTIPSSASSGHTTSLPVTDASSVSTGHATSLLVTDASSVSTGDTTPLPVTDTNSASTGDTTPLHVTDASSVSTGHATSLPVTSLSSASTGDTTPLPVTSPSSASSGHTTPLPVTDASSVPTGHATSLPVTDASSVSTGHATPLPVTDASSVSTGHATPLPVTDTSSVSTGQATPLPVTSLSSASTGDTTPLPVTDTSSASTGQDTPLPVTSLSSVSTGDTTPLPVTNPSSASTGHATPLLVTDASSISTGHATSLLVTDASSVSTGHATALHDTDASSLSTGDTTPLPVTSPSSTSTGDTTPLPVTETSSVSTGHATSLPVTDTSSASTGHATSLPVTDTSSASTGHATPLPVTDTSSASTGQATPLPVTSPSSASTGHAIPLLVTDTSSASTGQATPLPVTSLSSASTGDTTPLPVTDASSVSTGHATSLPVTSLSSVSTGDTTPLPVTSPSSASTGHATPLHVTDASSASTGHATPLPVTSLSSASTGDTTPLPVTSPSSASTGHATPLHVTDASSVSTGDTTPLPVTSSSSASSGHTTPLPVTDASSASTGDTTPLPVTDTSSASTGHATHLPVTGLSSASTGDTTRLPVTNVSSASTGHATPLPVTSTSSASTGDTTPLPGTDTSSVSTGHTTPLLVTDASSVSTGDTTRLPVTSPSSASTGHTTPLPVTDTPSASTGDTTPLPVTNASSLSTRHATSLHVTSPSSASTGHATSLPVTDTSAASTGHATPLPVTSTSSASTGDTTPLPVTDTYSASTGQATPLPVTSLSSVSTGDTTPLPVTSPSSASTGHATPLLVTDASSASTGQATPLPVTSLSSVSTGDTTPLPVTSPSSASTGHATSLPVTDTSSASTGDTTSLPVTDTSSAYTGDTTSLPVTDTSSSSTGDTTPLLVTETSSVSTGDTTPLPVTDTSSASTGHATPLPVTNTSSVSTGHATPLHVTSPSSASTGHTTPLPVTDASSVSTGHATSLPVTDASSVFTGHATSLPVTIPSSASSGHTTPLPVTDASSVSTGHATSLPVTDASSVSTGHATPLPVTDASSVSTGHATPLPLTSLSSVSTGDTTPLPVTDTSSASTGQATPLPVTSLSSVSTGDTTPLPVTDTSSASTGHATSLPVTDTSSASTGHATPLPDTDTSSASTGHATLLPVTDTSSASIGHATSLPVTDTSSISTGHATPLHVTSPSSASTGHATPLPVTDTSSASTGHANPLHVTSPSSASTGHATPLPVTDTSSASTGHATPLPVTSLSSVSTGDTTPLPVTSPSSASTGHTTPLPVTDTSSASTGQATALPVTSTSSASTGDTTPLPVTDTSSASTGQATPLPVTSLSSVSTGDTTPLPVTSPSSASTGHATPLLVTDASSASTGQATPLPVTSLSSVSTGDTTPLPVTSPSSASTGHATSLPVTDTSSASTGDTTSLPVTDTSSAYTGDTTSLPVTDTSSSSTGDTTPLLVTETSSVSTGHATPLLVTDASSASTGHATPLHVTSPSSASTGDTTPVPVTDTSSVSTGHATPLPVTGLSSASTGDTTRLPVTDISSASTGQATPLPVTNTSSVSTGDTMPLPVTSPSSASTGHATPLPVTSTSSASTGHATPVPVTSTSSASTGHTTPLPVTDTSSASTGDTTPLPVTSPSSASTGHTTPLHVTIPSSASTGDTSTLPVTGASSASTGHATPLPVTDTSSVSTGHATPLPVTSLSSVSTGDTTPLPVTDASSASTGQATPLPVTSLSSVSTGDTTPLLVTDASSVSTGHATPLPVTDTSSASTGDTTRLPVTDTSSASTGQATPLPVTSLSSVSTGDTTPLLVTDASSVSTGHATPLPVTDTSSASTGDTTRLPVTDTSSASTGQATPLPVTIPSSSSSGHTTPLPVTSTSSVSTGHVTPLHVTSPSSASTGHVTPLPVTSTSSASTGHATPLLVTDASSVSTGHATPLPVTDASSASTGDTTPLPVTDTSSASTGQATPLPVTSLSSVSTGDTTPLPVTDASSASTGHATPLPVTIPSSVSTGDTMPLPVTSPSSASTGHATPLPVTGLSSASTGDTTPLPVTDTSSASTRHATPLPVTDTSSASTDDTTRLPVTDVSSASTGHATPLPVTSTSSASTGDTTPLPVTDTSSVSTGHATSLPVTSRSSASTGHATPLPVTDTSSVSTGHATPLPVTSTSSVSTGHATPLPVTSPSSASTGHATPVPVTSTSSASTGDTTPLPVTNASSLSTGHATPLHVTSPSSASRGDTSTLPVTDASSASTGHATPLPLTSLSSVSTGDTTPLPVTDTSSASTGQATPLPVTSLSSVSTGDTTPLPVTIPSSASSGHTTSLPVTDASSVSTGHGTPLPVTSTSSASTGDTTPLPVTDTSSASTGHATPLPVTDTSSASTGHATPLPVTSLSSVSTGHATPLAVSSATSASTVSSDSPLKMETPGMTTPSLKTDGGRRTATSPPPTTSQTIISTIPSTAMHTRSTAAPIPILPERGVSLFPYGAGAGDLEFVRRTVDFTSPLFKPATGFPLGSSLRDSLYFTDNGQIIFPESDYQIFSYPNPLPTGFTGRDPVALVAPFWDDADFSTGRGTTFYQEYETFYGEHSLLVQQAESWIRKMTNNGGYKARWALKVTWVNAHAYPAQWTLGSNTYQAILSTDGSRSYALFLYQSGGMQWDVAQRSGNPVLMGFSSGDGYFENSPLMSQPVWERYRPDRFLNSNSGLQGLQFYRLHREERPNYRLECLQWLKSQPRWPSWGWNQVSCPCSWQQGRRDLRFQPASLPPEYQNRTEGLLGVWNNNPEDDFRMPNGSTIPPGSPEEMLFHFGMTWQINGTGLLGKRNDQLPSNFTPVFYSQLQKNSSWAEHLISNCDGDSSCIYDTLALRNASIGLHTREVSKNYEQANATLNQYPPSINGGRVIEAYKGQTTLIQYTSNAEDANFTLRDSCTDLELFENGTLLWTPKSLEPFTLEILARSAKIGLASALQPRTVVCHCNAESQCLYNQTSRVGNSSLEVAGCKCDGGTFGRYCEGSEDACEEPCFPSVHCVPGKGCEACPPNLTGDGRHCAALGSSFLCQNQSCPVNYCYNQGHCYISQTLGCQPMCTCPPAFTDSRCFLAGNNFSPTVNLELPLRVIQLLLSEEENASMAEVNASVAYRLGTLDMRAFLRNSQVERIDSAAPASGSPIQHWMVISEFQYRPRGPVIDFLNNQLLAAVVEAFLYHVPRRSEEPRNDVVFQPISGEDVRDVTALNVSTLKAYFRCDGYKGYDLVYSPQSGFTCVSPCSRGYCDHGGQCQHLPSGPRCSCVSFSIYTAWGEHCEHLSMKLDAFFGIFFGALGGLLLLGVGTFVVLRFWGCSGARFSYFLNSAEALP

SEQ ID NO: 24957 - protein, 237 aa, Homo sapiens
MGRKSSKAKEKKQKRLEERAAMDAVCAKVDAANRLGDPLEAFPVFKKYDRNGLNVSIECKRVSGLEPATVDWAFDLTKTNMQTMYEQSEWGWKDREKREEMTDDRAWYLIAWENSSVPVAFSHFRFDVECGDEVLYCYEVQLESKVRRKGLGKFLIQILQLMANSTQMKKVMLTVFKHNHGAYQFFREALQFEIDDSSPSMSGCCGEDCSYEILSRRTKFGDSHHSHAGGHCGGCCH

SEQ ID NO: 24958 - protein, 216 aa, Homo sapiens
MDAVCAKVDAANRLGDPLEAFPVFKKYDRNGLNVSIECKRVSGLEPATVDWAFDLTKTNMQTMYEQSEWGWKDREKREEMTDDRAWYLIAWENSSVPVAFSHFRFDVECGDEVLYCYEVQLESKVRRKGLGKFLIQILQLMANSTQMKKVMLTVFKHNHGAYQFFREALQFEIDDSSPSMSGCCGEDCSYEILSRRTKFGDSHHSHAGGHCGGCCH

SEQ ID NO: 24959 - protein, 197 aa, Homo sapiens
MPFVPKWTLPTGLNVSIECKRVSGLEPATVDWAFDLTKTNMQTMYEQSEWGWKDREKREEMTDDRAWYLIAWENSSVPVAFSHFRFDVECGDEVLYCYEVQLESKVRRKGLGKFLIQILQLMANSTQMKKVMLTVFKHNHGAYQFFREALQFEIDDSSPSMSGCCGEDCSYEILSRRTKFGDSHHSHAGGHCGGCCH

SEQ ID NO: 24960 - protein, 409 aa, Homo sapiens
MRGEQGAAGARVLQFTNCRILRGGKLLREDLWVRGGRILDPEKLFFEERRVADERRDCGGRILAPGFIDVQINGGFGVDFSQATEDVGSGVALVARRILSHGVTSFCPTLVTSPPEVYHKVVPQIPVKSGGPHGAGVLGLHLEGPFISREKRGAHPEAHLRSFEADAFQDLLATYGPLDNVRIVTLAPELGRSHEVIRALTARGICVSLGHSVADLRAAEDAVWSGATFITHLFNAMLPFHHRDPGIVGLLTSDRLPAGRCIFYGMIADGTHTNPAALRIAHRAHPQGLVLVTDAIPALGLGNGRHTLGQQEVEVDGLTAYVAGTKTLSGSIAPMDVCVRHFLQATGCSMESALEAASLHPAQLLGLEKSKGTLDFGADADFVVLDDSLHVQATYISGELVWQADAARQ

SEQ ID NO: 24961 - protein, 439 aa, Homo sapiens
MRGEQGAAGARVLQFTNCRILRGGKLLREDLWVRGGRILDPEKLFFEERRVADERRDCGGRILAPGFIDVQINGGFGVDFSQATEDVGSGVALVARRILSHGVTSFCPTLVTSPPEVYHKVVPQIPVKSGGPHGAGVLGLHLEGPFISREKRGAHPEAHLRSFEADAFQDLLATYGPLDNVRIVTLAPELGRSHEVIRALTARGICVSLGHSVADLRAAEDAVWSGATFITHLFNAMLPFHHRDPGIVGLLTSDRLPAGRCIFYGMIADGTHTNPAALRIAHRAHPQGLVLVTDAIPALGLGNGRHTLGQQEVEVDGLTAYVAGERPDPLGPRSQPACQVAHDPPRACPLCSQGTKTLSGSIAPMDVCVRHFLQATGCSMESALEAASLHPAQLLGLEKSKGTLDFGADADFVVLDDSLHVQATYISGELVWQADAARQ

SEQ ID NO: 24962 - protein, 594 aa, Homo sapiens
MRGEQGAAGARVLQFTNCRILRGGKLLREDLWVRGGRILDPEKLFFEERRVADERRDCGGRILAPGFIDVQINGGFGVDFSQATEDVGSGVALVARRILSHGVTSFCPTLVTSPPEVYHKVVPQIPVKSGGPHGAGVLGLHLEGPFISREKRGAHPEAHLRSFEADAFQDLLATYGPLDNVRIVTLAPELGRSHEVIRALTARGICVSLGHSVADLRAAEDAVWSGATFITHLFNAMLPFHHRDPGIVGLLTSDRLPAGRCIFYGMIADGTHTNPAALRIAHRAHPQGLVLVTDAIPALGLGNGRHTLGQQEVEVDGLTAYVAGERPDPLGPRSQPACQVAHDPPRACPLCSQGTKTLSGSIAPMDVCVRHFLQATGCSMESALEAASLHPAQLLGLEKSKGTLDFGADADFVVLDDSLHVQATYISGPVLAGCGDPAWCWRAVWEAPVCPAHPISVILPSSVSPWPWHTPMWQTRAVRLPEQLRGGWASGALLALRTATVGSDVRDWCSPTSGVIVLTFSPFEFWGGWLPSPLLTGAVLGTGGTRLALPLFSSLCCKAQLRKCLQVQRDRMVWAPPVGREQPGKNHLPGQGLA

SEQ ID NO: 24963 - protein, 195 aa, Homo sapiens
MAPKKPEPKKDDAKAAPKAAPAPAPPPEPERPKEVEFDASKIKIEFTPEQIEEFKEAFMLFDRTPKCEMKITYGQCGDVLRALGQNPTQAEVLRVLGKPRQEELNTKMMDFETFLPMLQHISKNKDTGTYEDFVEGLRVFDKEGNGTVMGAELRHVLATLGERLTEDEVEKLMAGQEDSNGCINYEAFVKHIMSS

SEQ ID NO: 24964 - protein, 445 aa, Homo sapiens
MLCYVTRPDAVLMEVEVEAKANGEDCLNQVCRRLGIIEVDYFGLQFTGSKGESLWLNLRNRISQQMDGLAPYRLKLRVKFFVEPHLILQEQTRHIFFLHIKEALLAGHLLCSPEQAVELSALLAQTKFGDYNQNTAKYNYEELCAKELSSATLNSIVAKHKELEGTSQASAEYQVLQIVSAMENYGIEWHSVRDSEGQKLLIGVGPEGISICKDDFSPINRIAYPVVQMATQSGKNVYLTVTKESGNSIVLLFKMISTRAASGLYRAITETHAFYRCDTVTSAVMMQYSRDLKGHLASLFLNENINLGKKYVFDIKRTSKEVYDHARRALYNAGVVDLVSRNNQSPSHSPLKSSESSMNCSSCEGLSCQQTRVLQEKLRKLKEAMLCMVCCEEEINSTFCPCGHTVCCESCAAQLQSCPVCRSRVEHVQHVYLPTHTSLLNLTVI

SEQ ID NO: 24965 - protein, 134 aa, Homo sapiens
MENYGIEWHSVRDSEGQKLLIGVGPEGISICKDDFSPINRIAYPVVQMATQSGKNVYLTVTKESGNSIVLLFKMISTRAASGLYRAITETHAFYRCDTVTSAVMMQYSRDLKGHLASLFLNENINLGKKYVFDI

SEQ ID NO: 24966 - protein, 113 aa, Homo sapiens
MAHSAAAVPLGALEQGCPIRVEHDRRRRQFTVRLNGCHDRAVLLYEYVGKRIVDLQHTEVPDAYRGRGIAKHLAKAALDFVVEEDLKAHLTCWYIQKYVKENPLPQYLERLQP

SEQ ID NO: 24967 - protein, 973 aa, Homo sapiens
MYNMRRLSLSPTFSMGFHLLVTVSLLFSHVDHVIAETEMEGEGNETGECTGSYYCKKGVILPIWEPQDPSFGDKIARATVYFVAMVYMFLGVSIIADRFMSSIEVITSQEKEITIKKPNGETTKTTVRIWNETVSNLTLMALGSSAPEILLSVIEVCGHNFTAGDLGPSTIVGSAAFNMFIIIALCVYVVPDGETRKIKHLRVFFVTAAWSIFAYTWLYIILSVISPGVVEVWEGLLTFFFFPICVVFAWVADRRLLFYKYVYKRYRAGKQRGMIIEHEGDRPSSKTEIEMDGKVVNSHVENFLDGALVLEVDERDQDDEEARREMARILKELKQKHPDKEIEQLIELANYQVLSQQQKSRAFYRIQATRLMTGAGNILKRHAADQARKAVSMHEVNTEVTENDPVSKIFFEQGTYQCLENCGTVALTIIRRGGDLTNTVFVDFRTEDGTANAGSDYEFTEGTVVFKPGDTQKEIRVGIIDDDIFEEDENFLVHLSNVKVSSEASEDGILEANHVSTLACLGSPSTATVTIFDDDHAGIFTFEEPVTHVSESIGIMEVKVLRTSGARGNVIVPYKTIEGTARGGGEDFEDTCGELEFQNDEIVKTISVKVIDDEEYEKNKTFFLEIGEPRLVEMSEKKALLLNELGGFTITGKYLFGQPVFRKVHAREHPILSTVITIADEYDDKQPLTSKEEEERRIAEMGRPILGEHTKLEVIIEESYEFKSTVDKLIKKTNLALVVGTNSWREQFIEAITVSAGEDDDDDECGEEKLPSCFDYVMHFLTVFWKVLFAFVPPTEYWNGWACFIVSILMIGLLTAFIGDLASHFGCTIGLKDSVTAVVFVALGTSVPDTFASKVAATQDQYADASIGNVTGSNAVNVFLGIGVAWSIAAIYHAANGEQFKVSPGTLAFSVTLFTIFAFINVGVLLYRRRPEIGGELGGPRTAKLLTSCLFVLLWLLYIFFSSLEAYCHIKGF

SEQ ID NO: 24968 - protein, 937 aa, Homo sapiens
MYNMRRLSLSPTFSMGFHLLVTVSLLFSHVDHVIAETEMEGEGNETGECTGSYYCKKGVILPIWEPQDPSFGDKIARATVYFVAMVYMFLGVSIIADRFMSSIEVITSQEKEITIKKPNGETTKTTVRIWNETVSNLTLMALGSSAPEILLSVIEVCGHNFTAGDLGPSTIVGSAAFNMFIIIALCVYVVPDGETRKIKHLRVFFVTAAWSIFAYTWLYIILSVISPGVVEVWEGLLTFFFFPICVVFAWVADRRLLFYKYVYKRYRAGKQRGMIIEHEGDRPSSKTEIEMDGKVVNSHVENFLDGALVLEVDERDQDDEEARREMARILKELKQKHPDKEIEQLIELANYQVLSQQQKSRAFYRIQATRLMTGAGNILKRHAADQARKAVSMHEVNTEVTENDPVSKIFFEQGTYQCLENCGTVALTIIRRGGDLTNTVFVDFRTEDGTANAGSDYEFTEGTVVFKPGDTQKEIRVGIIDDDIFEEDENFLVHLSNVKVSSEASEDGILEANHVSTLACLGSPSTATVTIFDDDHAGIFTFEEPVTHVSESIGIMEVKVLRTSGARGNVIVPYKTIEGTARGGGEDFEDTCGELEFQNDEIVKIITIRIFDREEYEKECSFSLVLEEPKWIRRGMKGGFTITDEYDDKQPLTSKEEEERRIAEMGRPILGEHTKLEVIIEESYEFKSTVDKLIKKTNLALVVGTNSWREQFIEAITVSAGEDDDDDECGEEKLPSCFDYVMHFLTVFWKVLFAFVPPTEYWNGWACFIVSILMIGLLTAFIGDLASHFGCTIGLKDSVTAVVFVALGTSVPDTFASKVAATQDQYADASIGNVTGSNAVNVFLGIGVAWSIAAIYHAANGEQFKVSPGTLAFSVTLFTIFAFINVGVLLYRRRPEIGGELGGPRTAKLLTSCLFVLLWLLYIFFSSLEAYCHIKGF

SEQ ID NO: 24969 - protein, 960 aa, Homo sapiens
MYNMRRLSLSPTFSMGFHLLVTVSLLFSHVDHVIAETEMEGEGNETGECTGSYYCKKGVILPIWEPQDPSFGDKIARATVYFVAMVYMFLGVSIIADRFMSSIEVITSQEKEITIKKPNGETTKTTVRIWNETVSNLTLMALGSSAPEILLSVIEVCGHNFTAGDLGPSTIVGSAAFNMFIIIALCVYVVPDGETRKIKHLRVFFVTAAWSIFAYTWLYIILSVISPGVVEVWEGLLTFFFFPICVVFAWVADRRLLFYKYVYKRYRAGKQRGMIIEHEGDRPSSKTEIEMDGKVVNSHVENFLDGALVLEVDERDQDDEEARREMARILKELKQKHPDKEIEQLIELANYQVLSQQQKSRAFYRIQATRLMTGAGNILKRHAADQARKAVSMHEVNTEVTENDPVSKIFFEQGTYQCLENCGTVALTIIRRGGDLTNTVFVDFRTEDGTANAGSDYEFTEGTVVFKPGDTQKEIRVGIIDDDIFEEDENFLVHLSNVKVSSEASEDGILEANHVSTLACLGSPSTATVTIFDDDHAGIFTFEEPVTHVSESIGIMEVKVLRTSGARGNVIVPYKTIEGTARGGGEDFEDTCGELEFQNDEIVKIITIRIFDREEYEKECSFSLVLEEPKWIRRGMKGGFTITGQPVFRKVHAREHPILSTVITIADEYDDKQPLTSKEEEERRIAEMGRPILGEHTKLEVIIEESYEFKSTVDKLIKKTNLALVVGTNSWREQFIEAITVSAGEDDDDDECGEEKLPSCFDYVMHFLTVFWKVLFAFVPPTEYWNGWACFIVSILMIGLLTAFIGDLASHFGCTIGLKDSVTAVVFVALGTSVPDTFASKVAATQDQYADASIGNVTGSNAVNVFLGIGVAWSIAAIYHAANGEQFKVSPGTLAFSVTLFTIFAFINVGVLLYRRRPEIGGELGGPRTAKLLTSCLFVLLWLLYIFFSSLEAYCHIKGF

SEQ ID NO: 24970 - protein, 965 aa, Homo sapiens
MYNMRRLSLSPTFSMGFHLLVTVSLLFSHVDHVIAETEMEGEGNETGECTGSYYCKKGVILPIWEPQDPSFGDKIARATVYFVAMVYMFLGVSIIADRFMSSIEVITSQEKEITIKKPNGETTKTTVRIWNETVSNLTLMALGSSAPEILLSVIEVCGHNFTAGDLGPSTIVGSAAFNMFIIIALCVYVVPDGETRKIKHLRVFFVTAAWSIFAYTWLYIILSVISPGVVEVWEGLLTFFFFPICVVFAWVADRRLLFYKYVYKRYRAGKQRGMIIEHEGDRPSSKTEIEMDGKVVNSHVENFLDGALVLEVDERDQDDEEARREMARILKELKQKHPDKEIEQLIELANYQVLSQQQKSRAFYRIQATRLMTGAGNILKRHAADQARKAVSMHEVNTEVTENDPVSKIFFEQGTYQCLENCGTVALTIIRRGGDLTNTVFVDFRTEDGTANAGSDYEFTEGTVVFKPGDTQKEIRVGIIDDDIFEEDENFLVHLSNVKVSSEASEDGILEANHVSTLACLGSPSTATVTIFDDDHAGIFTFEEPVTHVSESIGIMEVKVLRTSGARGNVIVPYKTIEGTARGGGEDFEDTCGELEFQNDEIVKIITIRIFDREEYEKECSFSLVLEEPKWIRRGMKGGFTITGKYLFGQPVFRKVHAREHPILSTVITIADEYDDKQPLTSKEEEERRIAEMGRPILGEHTKLEVIIEESYEFKSTVDKLIKKTNLALVVGTNSWREQFIEAITVSAGEDDDDDECGEEKLPSCFDYVMHFLTVFWKVLFAFVPPTEYWNGWACFIVSILMIGLLTAFIGDLASHFGCTIGLKDSVTAVVFVALGTSVPDTFASKVAATQDQYADASIGNVTGSNAVNVFLGIGVAWSIAAIYHAANGEQFKVSPGTLAFSVTLFTIFAFINVGVLLYRRRPEIGGELGGPRTAKLLTSCLFVLLWLLYIFFSSLEAYCHIKGF

SEQ ID NO: 24971 - protein, 968 aa, Homo sapiens
MYNMRRLSLSPTFSMGFHLLVTVSLLFSHVDHVIAETEMEGEGNETGECTGSYYCKKGVILPIWEPQDPSFGDKIARATVYFVAMVYMFLGVSIIADRFMSSIEVITSQEKEITIKKPNGETTKTTVRIWNETVSNLTLMALGSSAPEILLSVIEVCGHNFTAGDLGPSTIVGSAAFNMFIIIALCVYVVPDGETRKIKHLRVFFVTAAWSIFAYTWLYIILSVISPGVVEVWEGLLTFFFFPICVVFAWVADRRLLFYKYVYKRYRAGKQRGMIIEHEGDRPSSKTEIEMDGKVVNSHVENFLDGALVLEVDERDQDDEEARREMARILKELKQKHPDKEIEQLIELANYQVLSQQQKSRAFYRIQATRLMTGAGNILKRHAADQARKAVSMHEVNTEVTENDPVSKIFFEQGTYQCLENCGTVALTIIRRGGDLTNTVFVDFRTEDGTANAGSDYEFTEGTVVFKPGDTQKEIRVGIIDDDIFEEDENFLVHLSNVKVSSEASEDGILEANHVSTLACLGSPSTATVTIFDDDHAGIFTFEEPVTHVSESIGIMEVKVLRTSGARGNVIVPYKTIEGTARGGGEDFEDTCGELEFQNDEIVKTISVKVIDDEEYEKNKTFFLEIGEPRLVEMSEKKALLLNELGGFTITGQPVFRKVHAREHPILSTVITIADEYDDKQPLTSKEEEERRIAEMGRPILGEHTKLEVIIEESYEFKSTVDKLIKKTNLALVVGTNSWREQFIEAITVSAGEDDDDDECGEEKLPSCFDYVMHFLTVFWKVLFAFVPPTEYWNGWACFIVSILMIGLLTAFIGDLASHFGCTIGLKDSVTAVVFVALGTSVPDTFASKVAATQDQYADASIGNVTGSNAVNVFLGIGVAWSIAAIYHAANGEQFKVSPGTLAFSVTLFTIFAFINVGVLLYRRRPEIGGELGGPRTAKLLTSCLFVLLWLLYIFFSSLEAYCHIKGF

SEQ ID NO: 24972 - protein, 2548 aa, Homo sapiens
MNINDGGRRRFEDNEHTLRIYPGAISEGTIYCPIPARKNSTAAEVIESLINKLHLDKTKCYVLAEVKEFGGEEWILNPTDCPVQRMMLWPRMALENRLSGEDYRFLLREKNLDGSIHYGSLQSWLRVTEERRRMMERGFLPQPQQKDFDDLCSLPDLNEKTLLENLRNRFKHEKIYTYVGSILIVINPFKFLPIYNPKYVKMYDNHQLGKLEPHIYAVADVAYHAMLQRKKNQCIVISGESGSGKTQSTNFLIHHLTALSQKGFASGVEQIILGAGPVLEAFGNAKTAHNNNSSRFGKFIQVNYQETGTVLGAYVEKYLLEKSRLVYQEHNERNYHVFYYLLAGASEDERSAFHLKQPEEYHYLNQITKKPLRQSWDDYCYDSEPDCFTVEGEDLRHDFERLQLAMEMVGFLPKTRRQIFSLLSAILHLGNICYKKKTYRDDSIDICNPEVLPIVSELLEVKEEMLFEALVTRKTVTVGEKLILPYKLAEAVTVRNSMAKSLYSALFDWIVFRINHALLNSKDLEHNTKTLSIGVLDIFGFEDYENNSFEQFCINFANERLQHYFNQHIFKLEQEEYRTEGISWHNIDYIDNTCCINLISKKPTGLLHLLDEESNFPQATNQTLLDKFKHQHEDNSYIEFPAVMEPAFIIKHYAGKVKYGVKDFREKNTDHMRPDIVALLRSSKNAFISGMIGIDPVAVFRWAILRAFFRAMVAFREAGKRNIHRKTGHDDTAPCAILKSMDSFSFLQHPVHQRSLEILQRCKEEKYSITRKNPRTPLSDLQGMNALNEKNQHDTFDIAWNGRTGIRQSRLSSGTSLLDKDGIFANSTSSKLLERAHGILTRNKNFKSKPALPKHLLEVNSLKHLTRLTLQDRITKSLLHLHKKKKPPSISAQFQASLSKLMETLGQAEPYFVKCIRSNAEKLPLRFSDVLVLRQLRYTGMLETVRIRQSGYSSKYSFQDFVSHFHVLLPRNIIPSKFNIQDFFRKINLNPDNYQVGKTMVFLKEQERQHLQDLLHQEVLRRIILLQRWFRVLLCRQHFLHLRQASVIIQRFWRNYLNQKQVRDAAVQKDAFVMASAAALLQASWRAHLERQRYLELRAAAIVIQQKWRDYYRRRHMAAICIQARWKAYRESKRYQEQRKKIILLQSTCRGFRARQRFKALKEQRLRETKPEVGLVNIKGYGSLEIQGSDPSGWEDCSFDNRIKAIEECKSVIESNRISRESSVDCLKESPNKQQERAQSQSGVDLQEDVLVRERPRSLEDLHQKKVGRAKRESRRMRELEQAIFSLELLKVRSLGGISPSEDRRWSTELVPEGLQSPRGTPDSESSQGSLELLSYEESQKSKLESVISDEGDLQFPSPKISSSPKFDSRDNALSASNETSSAEHLKDGTMKEMVVCSSESITCKPQLKDSFISNSLPTFFYIPQQDPLKTNSQLDTSIQRNKLLENEDTAGEALTLDINRETRRYHCSGKDQIVPSLNTESSNPVLKKLEKLNTEKEERQKQLQQQNEKEMMEQIRQQTDILEKERKAFKTIEKPRIGECLVAPSSYQSKQRVERPSSLLSLNTSNKGELNVLGSLSLKDAALAQKDSSSAHLPPKDRPVTVFFERKGSPCQSSTVKELSKTDRMGTQLNVACKLSNNRISKREHFRPTQSYSHNSDDLSREGNARPIFFTPKDNMSIPLVSKEALNSKNPQLHKEDEPAWKPVKLAGPGQRETSQRFSSVDEQAKLHKTMSQGEITKLAVRQKASDSDIRPQRAKMRFWAKGKQGEKKTTRVKPTTQSEVSPLFAGTDVIPAHQFPDELAAYHPTPPLSPELPGSCRKEFKENKEPSPKAKRKRSVKISNVALDSMHWQNDSVQIIASVSDLKSMDEFLLKKVNDLDNEDSKKDTLVDVVFKKALKEFRQNIFSFYSSALAMDDGKSIRYKDLYALFEQILEKTMRLEQRDSLGESPVRVWVNTFKVFLDEYMNEFKTSDCTATKVPKTERKKRRKKETDLVEEHNGHIFKATQYSIPTYCEYCSSLIWIMDRASVCKLCKYACHKKCCLKTTAKCSKKYDPELSSRQFGVELSRLTSEDRTVPLVVEKLINYIEMHGLYTEGIYRKSGSTNKIKELRQGLDTDAESVNLDDYNIHVIASVFKQWLRDLPNPLMTFELYEEFLRAMGLQERKETIRGVYSVIDQLSRTHLNTLERLIFHLVRIALQEDTNRMSANALAIVFAPCILRCPDTTDPLQSVQDISKTTTCVELIVVEQMNKYKARLKDISSLEFAENKAKTRLSLIRRSMGKGRIRRGNYPGPSSPVVVRLPSVSDVSEETLTSEAAMETDITEQQQAAMQQEERVLTEQIENLQKEKEELTFEMLVLEPRASDDETLESEASIGTADSSENLNMESEYAISEKSERSLALSSLKTAGKSEPSSKLRKQLKKQQDSLDVVDSSVSSLCLSNTASSHGTRKLFQIYSKSPFYRAASGNEALGMEGPLGQTKFLEDKPQFISRGTFNPEKGKQKLKNVKNSPQKTKETPEGTVMSGRRKTVDPDCTSNQQLALFGNNEFMV

SEQ ID NO: 24973 - protein, 2529 aa, Homo sapiens
MNINDGGRRRFEDNEHTLRIYPGAISEGTIYCPIPARKNSTAAEVIESLINKLHLDKTKCYVLAEVKEFGGEEWILNPTDCPVQRMMLWPRMALENRLSGEDYRFLLREKNLDGSIHYGSLQSWLRVTEERRRMMERGFLPQPQQKDFDDLCSLPDLNEKTLLENLRNRFKHEKIYTYVGSILIVINPFKFLPIYNPKYVKMYDNHQLGKLEPHIYAVADVAYHAMLQRKKNQCIVISGESGSGKTQSTNFLIHHLTALSQKGFASGVEQIILGAGPVLEAFGNAKTAHNNNSSRFGKFIQVNYQETGTVLGAYVEKYLLEKSRLVYQEHNERNYHVFYYLLAGASEDERSAFHLKQPEEYHYLNQDCFTVEGEDLRHDFERLQLAMEMVGFLPKTRRQIFSLLSAILHLGNICYKKKTYRDDSIDICNPEVLPIVSELLEVKEEMLFEALVTRKTVTVGEKLILPYKLAEAVTVRNSMAKSLYSALFDWIVFRINHALLNSKDLEHNTKTLSIGVLDIFGFEDYENNSFEQFCINFANERLQHYFNQHIFKLEQEEYRTEGISWHNIDYIDNTCCINLISKKPTGLLHLLDEESNFPQATNQTLLDKFKHQHEDNSYIEFPAVMEPAFIIKHYAGKVKYGVKDFREKNTDHMRPDIVALLRSSKNAFISGMIGIDPVAVFRWAILRAFFRAMVAFREAGKRNIHRKTGHDDTAPCAILKSMDSFSFLQHPVHQRSLEILQRCKEEKYSITRKNPRTPLSDLQGMNALNEKNQHDTFDIAWNGRTGIRQSRLSSGTSLLDKDGIFANSTSSKLLERAHGILTRNKNFKSKPALPKHLLEVNSLKHLTRLTLQDRITKSLLHLHKKKKPPSISAQFQASLSKLMETLGQAEPYFVKCIRSNAEKLPLRFSDVLVLRQLRYTGMLETVRIRQSGYSSKYSFQDFVSHFHVLLPRNIIPSKFNIQDFFRKINLNPDNYQVGKTMVFLKEQERQHLQDLLHQEVLRRIILLQRWFRVLLCRQHFLHLRQASVIIQRFWRNYLNQKQVRDAAVQKDAFVMASAAALLQASWRAHLERQRYLELRAAAIVIQQKWRDYYRRRHMAAICIQARWKAYRESKRYQEQRKKIILLQSTCRGFRARQRFKALKEQRLRETKPEVGLVNIKGYGSLEIQGSDPSGWEDCSFDNRIKAIEECKSVIESNRISRESSVDCLKESPNKQQERAQSQSGVDLQEDVLVRERPRSLEDLHQKKVGRAKRESRRMRELEQAIFSLELLKVRSLGGISPSEDRRWSTELVPEGLQSPRGTPDSESSQGSLELLSYEESQKSKLESVISDEGDLQFPSPKISSSPKFDSRDNALSASNETSSAEHLKDGTMKEMVVCSSESITCKPQLKDSFISNSLPTFFYIPQQDPLKTNSQLDTSIQRNKLLENEDTAGEALTLDINRETRRYHCSGKDQIVPSLNTESSNPVLKKLEKLNTEKEERQKQLQQQNEKEMMEQIRQQTDILEKERKAFKTIEKPRIGECLVAPSSYQSKQRVERPSSLLSLNTSNKGELNVLGSLSLKDAALAQKDSSSAHLPPKDRPVTVFFERKGSPCQSSTVKELSKTDRMGTQLNVACKLSNNRISKREHFRPTQSYSHNSDDLSREGNARPIFFTPKDNMSIPLVSKEALNSKNPQLHKEDEPAWKPVKLAGPGQRETSQRFSSVDEQAKLHKTMSQGEITKLAVRQKASDSDIRPQRAKMRFWAKGKQGEKKTTRVKPTTQSEVSPLFAGTDVIPAHQFPDELAAYHPTPPLSPELPGSCRKEFKENKEPSPKAKRKRSVKISNVALDSMHWQNDSVQIIASVSDLKSMDEFLLKKVNDLDNEDSKKDTLVDVVFKKALKEFRQNIFSFYSSALAMDDGKSIRYKDLYALFEQILEKTMRLEQRDSLGESPVRVWVNTFKVFLDEYMNEFKTSDCTATKVPKTERKKRRKKETDLVEEHNGHIFKATQYSIPTYCEYCSSLIWIMDRASVCKLCKYACHKKCCLKTTAKCSKKYDPELSSRQFGVELSRLTSEDRTVPLVVEKLINYIEMHGLYTEGIYRKSGSTNKIKELRQGLDTDAESVNLDDYNIHVIASVFKQWLRDLPNPLMTFELYEEFLRAMGLQERKETIRGVYSVIDQLSRTHLNTLERLIFHLVRIALQEDTNRMSANALAIVFAPCILRCPDTTDPLQSVQDISKTTTCVELIVVEQMNKYKARLKDISSLEFAENKAKTRLSLIRRSMGKGRIRRGNYPGPSSPVVVRLPSVSDVSEETLTSEAAMETDITEQQQAAMQQEERVLTEQIENLQKEKEELTFEMLVLEPRASDDETLESEASIGTADSSENLNMESEYAISEKSERSLALSSLKTAGKSEPSSKLRKQLKKQQDSLDVVDSSVSSLCLSNTASSHGTRKLFQIYSKSPFYRAASGNEALGMEGPLGQTKFLEDKPQFISRGTFNPEKGKQKLKNVKNSPQKTKETPEGTVMSGRRKTVDPDCTSNQQLALFGNNEFMV

SEQ ID NO: 24974 - protein, 729 aa, Homo sapiens
MNINDGGRRRFEDNEHTLRIYPGAISEGTIYCPIPARKNSTAAEVIESLINKLHLDKTKCYVLAEVKEFGGEEWILNPTDCPVQRMMLWPRMALENRLSGEDYRFLLREKNLDGSIHYGSLQSWLRVTEERRRMMERGFLPQPQQKDFDDLCSLPDLNEKTLLENLRNRFKHEKIYTYVGSILIVINPFKFLPIYNPKYVKMYDNHQLGKLEPHIYAVADVAYHAMLQRKKNQCIVISGESGSGKTQSTNFLIHHLTALSQKGFASGVEQIILGAGPVLEAFGNAKTAHNNNSSRFGKFIQVNYQETGTVLGAYVEKYLLEKSRLVYQEHNERNYHVFYYLLAGASEDERSAFHLKQPEEYHYLNQITKKPLRQSWDDYCYDSEPDCFTVEGEDLRHDFERLQLAMEMVGFLPKTRRQIFSLLSAILHLGNICYKKKTYRDDSIDICNPEVLPIVSELLEVKEEMLFEALVTRKTVTVGEKLILPYKLAEAVTVRNSMAKSLYSALFDWIVFRINHALLNSKDLEHNTKTLSIGVLDIFGFEDYENNSFEQFCINFANERLQHYFNQHIFKLEQEEYRTEGISWHNIDYIDNTCCINLISKKPTGLLHLLDEESNFPQATNQTLLDKFKHQHEDNSYIEFPAVMEPAFIIKHYAGKVKYGVKDFREKNTDHMRPDIVALLRSSKNAFISGMIGIDPVAVFRWAILRAFFRAMVAFREAGKRNIHRKTGK

SEQ ID NO: 24975 - protein, 2619 aa, Homo sapiens
MNINDGGRRRFEDNEHTLRIYPGAISEGTIYCPIPARKNSTAAEVIESLINKLHLDKTKCYVLAEVKEFGGEEWILNPTDCPVQRMMLWPRMALENRLSGEDYRFLLREKNLDGSIHYGSLQSWLRVTEERRRMMERGFLPQPQQKDFDDLCSLPDLNEKTLLENLRNRFKHEKIYTYVGSILIVINPFKFLPIYNPKYVKMYDNHQLGKLEPHIYAVADVAYHAMLQRKKNQCIVISGESGSGKTQSTNFLIHHLTALSQKGFASGVEQIILGAGPVLEAFGNAKTAHNNNSSRFGKFIQVNYQETGTVLGAYVEKYLLEKSRLVYQEHNERNYHVFYYLLAGASEDERSAFHLKQPEEYHYLNQITKKPLRQSWDDYCYDSEPDCFTVEGEDLRHDFERLQLAMEMVGFLPKTRRQIFSLLSAILHLGNICYKKKTYRDDSIDICNPEVLPIVSELLEVKEEMLFEALVTRKTVTVGEKLILPYKLAEAVTVRNSMAKSLYSALFDWIVFRINHALLNSKDLEHNTKTLSIGVLDIFGFEDYENNSFEQFCINFANERLQHYFNQHIFKLEQEEYRTEGISWHNIDYIDNTCCINLISKKPTGLLHLLDEESNFPQATNQTLLDKFKHQHEDNSYIEFPAVMEPAFIIKHYAGKVKYGVKDFREKNTDHMRPDIVALLRSSKNAFISGMIGIDPVAVFRWAILRAFFRAMVAFREAGKRNIHRKTGHDDTAPCAILKSMDSFSFLQHPVHQRSLEILQRCKEEKYSITRKNPRTPLSDLQGMNALNEKNQHDTFDIAWNGRTGIRQSRLSSGTSLLDKDGIFANSTSSKLLERAHGILTRNKNFKSKPALPKHLLEVNSLKHLTRLTLQDRITKSLLHLHKKKKPPSISAQFQASLSKLMETLGQAEPYFVKCIRSNAEKLPLRFSDVLVLRQLRYTGMLETVRIRQSGYSSKYSFQDFVSHFHVLLPRNIIPSKFNIQDFFRKINLNPDNYQVGKTMVFLKEQERQHLQDLLHQEVLRRIILLQRWFRVLLCRQHFLHLRQASVIIQRFWRNYLNQKQVRDAAVQKDAFVMASAAALLQASWRAHLERQRYLELRAAAIVIQQKWRDYYRRRHMAAICIQARWKAYRESKRYQEQRKKIILLQSTCRGFRARQRFKALKEQRLRETKPEVGLVNIKGYGSLEIQGSDPSGWEDCSFDNRIKAIEECKSVIESNRISRESSVDCLKESPNKQQERAQSQSGVDLQEDVLVRERPRSLEDLHQKKVGRAKRESRRMRELEQAIFSLELLKVRSLGGISPSEDRRWSTELVPEGLQSPRGTPDSESSQGSLELLSYEESQKSKLESVISDEGDLQFPSPKISSSPKFDSRDNALSASNETSSAEHLKDGTMKEMVVCSSESITCKPQLKDSFISNSLPTFFYIPQQDPLKTNSQLDTSIQRNKLLENEDTAGEALTLDINRETRRYHCSGKDQIVPSLNTESSNPVLKKLEKLNTEKEERQKQLQQQNEKEMMEQIRQQTDILEKERKAFKTIEKPRIGECLVAPSSYQSKQRVERPSSLLSLNTSNKGELNVLGSLSLKDAALAQKDSSSAHLPPKDRPVTVFFERKGSPCQSSTVKELSKTDRMGTQLNVACKLSNNRISKREHFRPTQSYSHNSDDLSREGNARPIFFTPKDNMSIPLVSKEALNSKNPQLHKEDEPAWKPVKLAGPGQREVARPAHKKKARMARTRSDFLTRGTFADGEGDTEEDDYDDIIEPLLSLDQASHCELGPAPSLGQASHSDSEMTSQRFSSVDEQAKLHKTMSQGEITKLAVRQKASDSDIRPQRAKMRFWAKGKQGEKKTTRVKPTTQSEVSPLFAGTDVIPAHQFPDELAAYHPTPPLSPELPGSCRKEFKENKEPSPKAKRKRSVKISNVALDSMHWQNDSVQIIASVSDLKSMDEFLLKKVNDLDNEDSKKDTLVDVVFKKALKEFRQNIFSFYSSALAMDDGKSIRYKDLYALFEQILEKTMRLEQRDSLGESPVRVWVNTFKVFLDEYMNEFKTSDCTATKVPKTERKKRRKKETDLVEEHNGHIFKATQYSIPTYCEYCSSLIWIMDRASVCKLCKYACHKKCCLKTTAKCSKKYDPELSSRQFGVELSRLTSEDRTVPLVVEKLINYIEMHGLYTEGIYRKSGSTNKIKELRQGLDTDAESVNLDDYNIHVIASVFKQWLRDLPNPLMTFELYEEFLRAMGLQERKETIRGVYSVIDQLSRTHLNTLERLIFHLVRIALQEDTNRMSANALAIVFAPCILRCPDTTDPLQSVQDISKTTTCVELIVVEQMNKYKARLKDISSLEFAENKAKTRLSLIRRSMGKGRIRRGNYPGPSSPVVVRLPSVSDVSEETLTSEAAMETDITEQQQAAMQQEERVLTEQIENLQKEKEELTFEMLVLEPRASDDETLESEASIGTADSSENLNMESEYAISEKSERSLALSSLKTAGKSEPSSKLRKQLKKQQDSLDVVDSSVSSLCLSNTASSHGTRKLFQIYSKSPFYRAASGNEALGMEGPLGQTKFLEDKPQFISRGTFNPEKGKQKLKNVKNSPQKTKETPEGTVMSGRRKTVDPDCTSNQQLALFGNNEFMV

SEQ ID NO: 24976 - protein, 2312 aa, Homo sapiens
MNINDGGRRRFEDNEHTLRIYPGAISEGTIYCPIPARKNSTAAEAFGNAKTAHNNNSSRFGKFIQVNYQETGTVLGAYVEKYLLEKSRLVYQEHNERNYHVFYYLLAGASEDERSAFHLKQPEEYHYLNQITKKPLRQSWDDYCYDSEPDCFTVEGEDLRHDFERLQLAMEMVGFLPKTRRQIFSLLSAILHLGNICYKKKTYRDDSIDICNPEVLPIVSELLEVKEEMLFEALVTRKTVTVGEKLILPYKLAEAVTVRNSMAKSLYSALFDWIVFRINHALLNSKDLEHNTKTLSIGVLDIFGFEDYENNSFEQFCINFANERLQHYFNQHIFKLEQEEYRTEGISWHNIDYIDNTCCINLISKKPTGLLHLLDEESNFPQATNQTLLDKFKHQHEDNSYIEFPAVMEPAFIIKHYAGKVKYGVKDFREKNTDHMRPDIVALLRSSKNAFISGMIGIDPVAVFRWAILRAFFRAMVAFREAGKRNIHRKTGHDDTAPCAILKSMDSFSFLQHPVHQRSLEILQRCKEEKYSITRKNPRTPLSDLQGMNALNEKNQHDTFDIAWNGRTGIRQSRLSSGTSLLDKDGIFANSTSSKLLERAHGILTRNKNFKSKPALPKHLLEVNSLKHLTRLTLQDRITKSLLHLHKKKKPPSISAQFQASLSKLMETLGQAEPYFVKCIRSNAEKLPLRFSDVLVLRQLRYTGMLETVRIRQSGYSSKYSFQDFVSHFHVLLPRNIIPSKFNIQDFFRKINLNPDNYQVGKTMVFLKEQERQHLQDLLHQEVLRRIILLQRWFRVLLCRQHFLHLRQASVIIQRFWRNYLNQKQVRDAAVQKDAFVMASAAALLQASWRAHLERQRYLELRAAAIVIQQKWRDYYRRRHMAAICIQARWKAYRESKRYQEQRKKIILLQSTCRGFRARQRFKALKEQRLRETKPEVGLVNIKGYGSLEIQGSDPSGWEDCSFDNRIKAIEECKSVIESNRISRESSVDCLKESPNKQQERAQSQSGVDLQEDVLVRERPRSLEDLHQKKVGRAKRESRRMRELEQAIFSLELLKVRSLGGISPSEDRRWSTELVPEGLQSPRGTPDSESSQGSLELLSYEESQKSKLESVISDEGDLQFPSPKISSSPKFDSRDNALSASNETSSAEHLKDGTMKEMVVCSSESITCKPQLKDSFISNSLPTFFYIPQQDPLKTNSQLDTSIQRNKLLENEDTAGEALTLDINRETRRYHCSGKDQIVPSLNTESSNPVLKKLEKLNTEKEERQKQLQQQNEKEMMEQIRQQTDILEKERKAFKTIEKPRIGECLVAPSSYQSKQRVERPSSLLSLNTSNKGELNVLGSLSLKDAALAQKDSSSAHLPPKDRPVTVFFERKGSPCQSSTVKELSKTDRMGTQLNVACKLSNNRISKREHFRPTQSYSHNSDDLSREGNARPIFFTPKDNMSIPLVSKEALNSKNPQLHKEDEPAWKPVKLAGPGQRETSQRFSSVDEQAKLHKTMSQGEITKLAVRQKASDSDIRPQRAKMRFWAKGKQGEKKTTRVKPTTQSEVSPLFAGTDVIPAHQFPDELAAYHPTPPLSPELPGSCRKEFKENKEPSPKAKRKRSVKISNVALDSMHWQNDSVQIIASVSDLKSMDEFLLKKVNDLDNEDSKKDTLVDVVFKKALKEFRQNIFSFYSSALAMDDGKSIRYKDLYALFEQILEKTMRLEQRDSLGESPVRVWVNTFKVFLDEYMNEFKTSDCTATKVPKTERKKRRKKETDLVEEHNGHIFKATQYSIPTYCEYCSSLIWIMDRASVCKLCKYACHKKCCLKTTAKCSKKYDPELSSRQFGVELSRLTSEDRTVPLVVEKLINYIEMHGLYTEGIYRKSGSTNKIKELRQGLDTDAESVNLDDYNIHVIASVFKQWLRDLPNPLMTFELYEEFLRAMGLQERKETIRGVYSVIDQLSRTHLNTLERLIFHLVRIALQEDTNRMSANALAIVFAPCILRCPDTTDPLQSVQDISKTTTCVELIVVEQMNKYKARLKDISSLEFAENKAKTRLSLIRRSMGKGRIRRGNYPGPSSPVVVRLPSVSDVSEETLTSEAAMETDITEQQQAAMQQEERVLTEQIENLQKEKEELTFEMLVLEPRASDDETLESEASIGTADSSENLNMESEYAISEKSERSLALSSLKTAGKSEPSSKLRKQLKKQQDSLDVVDSSVSSLCLSNTASSHGTRKLFQIYSKSPFYRAASGNEALGMEGPLGQTKFLEDKPQFISRGTFNPEKGKQKLKNVKNSPQKTKETPEGTVMSGRRKTVDPDCTSNQQLALFGNNEFMV

SEQ ID NO: 24977 - protein, 1437 aa, Homo sapiens
MTLPHSLGGAGDPRPPQAMEVHRLEHRQEEEQKEERQHSLRMGSSVRRRTFRSSEEEHEFSAADYALAAALALTASSELSWEAQLRRQTSAVELEERGQKRVGFGNDWERTEIAFLQTHRLLRQRRDWKTLRRRTEEKVQEAKELRELCYGRGPWFWIPLRSHAVWEHTTVLLTCTVQASPPPQVTWYKNDTRIDPRLFRAGKYRITNNYGLLSLEIRRCAIEDSATYTVRVKNAHGQASSFAKVLVRTYLGKDAGFDSEIFKRSTFGPSVEFTSVLKPVFAREKEPFSLSCLFSEDVLDAESIQWFRDGSLLRSSRRRKILYTDRQASLKVSCTYKEDEGLYMVRVPSPFGPREQSTYVLVRDAEAENPGAPGSPLNVRCLDVNRDCLILTWAPPSDTRGNPITAYTIERCQGESGEWIACHEAPGGTCRCPIQGLVEGQSYRFRVRAISRVGSSVPSKASELVVMGDHDAARRKTEIPFDLGNKITISTDAFEDTVTIPSPPTNVHASEIREAYVVLAWEEPSPRDRAPLTYSLEKSVIGSGTWEAISSESPVRSPRFAVLDLEKKKSYVFRVRAMNQYGLSDPSEPSEPIALRGPPATLPPPAQVQAFRDTQTSVSLTWDPVKDPELLGYYIYSRKVGTSEWQTVNNKPIQGTRFTVPGLRTGKEYEFCVRSVSEAGVGESSAATEPIRVKQALATPSAPYGFALLNCGKNEMVIGWKPPKRRGGGKILGYFLDQHDSEELDWHAVNQQPIPTRVCKVSDLHEGHFYEFRARAANWAGVGELSAPSSLFECKEWTMPQPGPPYDVRASEVRATSLVLQWEPPLYMGAGPVTGYHVSFQEEGSEQWKPVTPGPISGTHLRVSDLQPGKSYVFQVQAMNSAGLGQPSMPTDPVLLEDKPGAHEIEVGVDEEGFIYLAFEAPEAPDSSEFQWSKDYKGPLDPQRVKIEDKVNKSKVILKEPGLEDLGTYSVIVTDADEDISASHTLTEEELEKLKKLSHEIRNPVIKLISGWNIDILERGEVRLWLEVEKLSPAAELHLIFNNKEIFSSPNRKINFDREKGLVEVIIQNLSEEDKGSYTAQLQDGKAKNQITLTLVDDDFDKLLRKADAKRRDWKRKQGPYFERPLQWKVTEDCQVQLTCKVTNTKKETRFQWFFQRAEMPDGQYDPETGTGLLCIEELSKKDKGIYRAMVSDDRGEDDTILDLTGDALDAIFTELGRIGALSATPLKIQGTEEGIRIFSKVKYYNVEYMKTTWFHKDKRLESGDRIRTGTTLDEIWLHILDPKDSDKGKYTLEIAAGKEVRQLSTDLSGQAFEDAMAEHQRLKTLAIIEKNRAKVVRGLPDVATIMEDKTLCLTCIVSGDPTPEISWLKNDQPVTFLDRYRMEVRGTEVTITIEKVNSEDSGRYGVFVKNKYGSETGQVTISVFKHGDEPKELKSM

SEQ ID NO: 24978 - protein, 1212 aa, Homo sapiens
MTLPHSLGGAGDPRPPQAMEVHRLEHRQEEEQKEERQHSLRMGSSVRRRTFRSSEEEHEFSAADYALAAALALTASSELSWEAQLRRQTSAVELEERGQKRVGFGNDWERTEIAFLQTHRLLRQRRDWKTLRRRTEEKVQEAKELRELCYGRGPWFWIPLRSHAVWEHTTVLLTCTVQASPPPQVTWYKNDTRIDPRLFRAGKYRITNNYGLLSLEIRRCAIEDSATYTVRVKNAHGQASSFAKVLVRTYLGKDAGFDSEIFKRSTFGPSVEFTSVLKPVFAREKEPFSLSCLFSEDVLDAESIQWFRDGSLLRSSRRRKILYTDRQASLKVSCTYKEDEGLYMVRVPSPFGPREQSTYVLVRDAEAENPGAPGSPLNVRCLDVNRDCLILTWAPPSDTRGNPITAYTIERCQGESGEWIACHEAPGGTCRCPIQGLVEGQSYRFRVRAISRVGSSVPSKASELVVMGDHDAARRKTEIPFDLGNKITISTDAFEDTVTIPSPPTNVHASEIREAYVVLAWEEPSPRDRAPLTYSLEKSVIGSGTWEAISSESPVRSPRFAVLDLEKKKSYVFRVRAMNQYGLSDPSEPSEPIALRGPPATLPPPAQVQAFRDTQTSVSLTWDPVKDPELLGYYIYSRKVGTSEWQTVNNKPIQGTRFTVPGLRTGKEYEFCVRSVSEAGVGESSAATEPIRVKQALATPSAPYGFALLNCGKNEMVIGWKPPKRRGGGKILGYFLDQHDSEELDWHAVNQQPIPTRVCKVSDLHEGHFYEFRARAANWAGVGELSAPSSLFECKEWTMPQPGPPYDVRASEVRATSLVLQWEPPLYMGAGPVTGYHVSFQEEGSEQWKPVTPGPISGTHLRVSDLQPGKSYVFQVQAMNSAGLGQPSMPTDPVLLEDKPGAHEIEVGVDEEGFIYLAFEAPEAPDSSEFQWSKDYKGPLDPQRVKIEDKVNKSKVILKEPGLEDLGTYSVIVTDADEDISASHTLTEEELEKLKKLSHEIRNPVIKLISGWNIDILERGEVRLWLEVEKLSPAAELHLIFNNKEIFSSPNRKINFDREKGLVEVIIQNLSEEDKGSYTAQLQDGKAKNQITLTLVDDDFDKLLRKADAKRRDWKRKQGPYFERPLQWKVTEDCQVQLTCKVTNTKKETRFQWFFQRAEMPDGQYDPETGTGLLCIEEASVAPASGLTFSFGCKPGRAKSSGLGVRAGPRLG

SEQ ID NO: 24979 - protein, 330 aa, Homo sapiens
MDISKKNRVRQGSRGRGKTISKNSESRGQQRRHMVTNTKKETRFQWFFQRAEMPDGQYDPETGTGLLCIEELSKKDKGIYRAMVSDDRGEDDTILDLTGDALDAIFTELGRIGALSATPLKIQGTEEGIRIFSKVKYYNVEYMKTTWFHKDKRLESGDRIRTGTTLDEIWLHILDPKDSDKGKYTLEIAAGKEVRQLSTDLSGQAFEDAMAEHQRLKTLAIIEKNRAKVVRGLPDVATIMEDKTLCLTCIVSGDPTPEISWLKNDQPVTFLDRYRMEVRGTEVTITIEKVNSEDSGRYGVFVKNKYGSETGQVTISVFKHGDEPKELKSM

SEQ ID NO: 24980 - protein, 966 aa, Homo sapiens
MEPQVTLNVTFKNEIQSFLVSDPENTTWADIEAMVKVSFDLNTIQIKYLDEENEEVSINSQGEYEEALKMAVKQGNQLQMQVHEGHHVVDEAPPPVVGAKRLAARAGKKPLAHYSSLVRVLGSDMKTPEDPAVQSFPLVPCDTDQPQDKPPDWFTSYLETFREQVVNETVEKLEQKLHEKLVLQNPSLGSCPSEVSMPTSEETLFLPENQFSWHIACNNCQRRIVGVRYQCSLCPSYNICEDCEAGPYGHDTNHVLLKLRRPVVGSSEPFCHSKYSTPRLPAALEQVRLQKQVDKNFLKAEKQRLRAEKKQRKAEVKELKKQLKLHRKIHLWNSIHGLQSPKSPLGRPESLLQSNTLMLPLQPCTSVMPMLSAAFVDENLPDGTHLQPGTKFIKHWRMKNTGNVKWSADTKLKFMWGNLTLASTEKKDVLVPCLKAGHVGVVSVEFIAPALEGTYTSHWRLSHKGQQFGPRVWCSIIVDPFPSEESPDNIEKGMISSSKTDDLTCQQEETFLLAKEERQLGEVTEQTEGTAACIPQKAKNVASERELYIPSVDLLTAQDLLSFELLDINIVQELERVPHNTPVDVTPCMSPLPHDSPLIEKPGLGQIEEENEGAGFKALPDSMVSVKRKAENIASVEEAEEDLSGTQFVCETVIRSLTLDAAPDHNPPCRQKSLQMTFALPEGPLGNEKEEIIHIAEEEAVMEEEEDEEDEEEEDELKDEVQSQSSASSEDYIIILPECFDTSRPLGDSMYSSALSQPGLERGAEGKPGVEAGQEPAEAGERLPGGENQPQEHSISDILTTSQTLETVPLIPEVVELPPSLPRSSPCVHHHGSPGVDLPVTIPEVSSVPDQIRGEPRGSSGLVNSRQKSYDHSRHHHGSSIAGGLVKGALSVAASAYKALFAGPPVTAQPIISEDQTAALMAHLFEMGFCDRQLNLRLLKKHNYNILQVVTELLQLNNNDWYSQRY

SEQ ID NO: 24981 - protein, 937 aa, Homo sapiens
MEPQVTLNVTFKNEIQSFLVSDPENTTWADIEAMVKVSFDLNTIQIKYLDEENEEVSINSQGEYEEALKMAVKQGNQLQMQVHEGHHVVDEAPPPVVGAKRLAARAGKKPLAHYSSLVRVLGSDMKTPEDPAVQSFPLVPCDTDQPQDKPPDWFTSYLETFREQVVNETVEKLEQKLHEKLVLQNPSLGSCPSEVSMPTSEETLFLPENQFSWHIACNNCQRRIVGVRYQCSLCPSYNICEDCEAGPYGHDTNHVLLKLRRPVVGSSEPFCHSKYSTPRLPAALEQVRLQKQVDKNFLKAEKQRLRAEKKQRKAEVKELKKQLKLHRKIHLWNSIHGLQSPKSPLGRPESLLQSNTLMLPLQPCTSVMPMLSAAFVDENLPDGTHLQPGTKFIKHWRMKNTGNVKWSADTKLKFMWGNLTLASTEKKDVLVPCLKAGHVGVVSVEFIAPALEGTYTSHWRLSHKGQQFGPRVWCSIIVDPFPSEESPDNIEKGMISSSKTDDLTCQQEETFLLAKEERQLGEVTEQTEGTAACIPQKAKNVASERELYIPSVDLLTAQDLLSFELLDINIVQELERVPHNTPVDVTPCMSPLPHDSPLIEKPGLGQIEEENEGAGFKALPDSMVSVKRKAENIASVEEAEEDLSGTQFVCETVIRSLTLDAAPDHNPPCRQKSLQMTFALPEGPLGNEKEEIIHIAEEEAVMEEEEDEEDEEEEDELKDEVQSQSSASSEDYIIILPECFDTSRPLGDSMYSSALSQPGLERGAEGKPGVEAGQEPAEAGERLPGGENQPQEHSISDILTTSQTLETVPLIPEVVELPPSLPRSSPCVHHHGSPGVDLPVTIPEVSSVPDQIRGEPRGSSGLVNSRQKSYDHSRHHHGSSIAGGLVKGALSVAASAYKALFAGPPVTAQGLWGLLSFLHLAKKCFFLKAPSEAFSWF

SEQ ID NO: 24982 - protein, 1098 aa, Homo sapiens
MGSKERFHWQSHNVKQSGVDDMVLLPQITEDAIAANLRKRFMDDYIFTYIGSVLISVNPFKQMPYFTDREIDLYQGAAQYENPPHIYALTDNMYRNMLIDCENQCVIISGESGAGKTVAAKYIMGYISKVSGGGEKVQHVKDIILQSNPLLEAFGNAKTVRNNNSSRFGKYFEIQFSRGGEPDGGKISNFLLEKSRVVMQNENERNFHIYYQLLEGASQEQRQNLGLMTPDYYYYLNQSDTYQVDGTDDRSDFGETLSAMQVIGIPPSIQQLVLQLVAGILHLGNISFCEDGNYARVESVDLLAFPAYLLGIDSGRLQEKLTSRKMDSRWGGRSESINVTLNVEQAAYTRDALAKGLYARLFDFLVEAINRAMQKPQEEYSIGVLDIYGFEIFQKNGFEQFCINFVNEKLQQIFIELTLKAEQEEYVQEGIRWTPIQYFNNKVVCDLIENKLSPPGIMSVLDDVCATMHATGGGADQTLLQKLQAAVGTHEHFNSWSAGFVIHHYAGKVSYDVSGFCERNRDVLFSDLIELMQTSEQAFLRMLFPEKLDGDKKGRPSTAGSKIKKQANDLVATLMRCTPHYIRCIKPNETKRPRDWEENRVKHQVEYLGLKENIRVRRAGFAYRRQFAKFLQRYAILTPETWPRWRGDERQGVQHLLRAVNMEPDQYQMGSTKVFVKNPESLFLLEEVRERKFDGFARTIQKAWRRHVAVRKYEEMREEASNILLNKKERRRNSINRNFVGDYLGLEERPELRQFLGKRERVDFADSVTKYDRRFKPIKRDLILTPKCVYVIGREKVKKGPEKGQVCEVLKKKVDIQALRGVSLSTRQDDFFILQEDAADSFLESVFKTEFVSLLCKRFEEATRRPLPLTFSDTLQFRVKKEGWGGGGTRSVTFSRGFGDLAVLKVGGRTLTVSVGDGLPKSSKPTRKGMAKGKPRRSSQAPTRAAPAPPRGMDRNGVPPSARGGPLPLEIMSGGGTHRPPRGPPSTSLGASRRPRARPPSEHNTEFLNVPDQGMAGMQRKRSVGQRPVPGVGRPKPQPRTHGPRCRALYQYVGQDVDELSFNVNEVIEILMEDPSGWWKGRLHGQEGLFPGNYVEKI

SEQ ID NO: 24983 - protein, 1320 aa, Homo sapiens
MQDDSIEASTSISQLLRESYLAETRHRGNNERSRAEPSSNPCHFGSPSGAAEGGGGQDDLPDLSAFLSQEELDESVNLARLAINYDPLEKADETQARKRLSPDQMKHSPNLSFEPNFCQDNPRSPTSSKESPQEAKRPQYCSETQSKKVFLNKAADFIEELSSLFKSHSSKRIRPRACKNHKSKLESQNKVMQENSSSFSDLSERRERSSVPIPIPADTRDNEVNHALEQQEAKRREAEQAASEAAGGDTTPGSSPSSLYYEEPLGQPPRFTQKLRSREVPEGTRVQLDCIVVGIPPPQVRWYCEGKELENSPDIHIVQAGNLHSLTIAEAFEEDTGRYSCFASNIYGTDSTSAEIYIEGVSSSDSEGDPNKEEMNRIQKPNEVSSPPTTSAVIPPAVPQAQHLVAQPRVATIQQCQSPTNYLQGLDGKPIIAAPVFTKMLQNLSASEGQLVVFECRVKGAPSPKVEWYREGTLIEDSPDFRILQKKPRSMAEPEEICTLVIAEVFAEDSGCFTCTASNKYGTVSSIAQLHVRGNEDLSNNGSLHSANSTTNLAAIEPQPSPPHSEPPSVEQPPKPKLEGVLVNHNEPRSSSRIGLRVHFNLPEDDKGSEASSEAGVVTTRQTRPDSFQERFNGQATKTPEPSSPVKEPPPVLAKPKLDSTQLQQLHNQVLLEQHQLQNPPPSSPKEFPFSMTVLNSNAPPAVTTSSKQVKAPSSQTFSLARPKYFFPSTNTTAATVAPSSSPVFTLSSTPQTIQRTVSKESLLVSHPSVQTKSPGGLSIQNEPLPPGPTEPTPPPFTFSIPSGNQFQPRCVSPIPVSPTSRIQNPVAFLSSVLPSLPAIPPTNAMGLPRSAPSMPSQGLAKKNTKSPQPVNDDNIRETKNAVIRDLGKKITFSDVRPNQQEYKISSFEQRLMNEIEFRLERTPVDESDDEIQHDEIPTGKCIAPIFDKRLKHFRVTEGSPVTFTCKIVGIPVPKVYWFKDGKQISKRNEHCKMRREGDGTCSLHIESTTSDDDGNYTIMAANPQGRISCSGHLMVQSLPIRSRLTSAGQSHRGRSRVQERDKEPLQERFFRPHFLQAPGDMVAHEGRLCRLDCKVSGLPPPELTWLLNGQPVLPDASHKMLVRETGVHSLLIDPLTQRDAGTYKCIATNKTGQNSFSLELSVVAKEVKKAPVILEKLQNCGVPEGHPVRLECRVIGMPPPVFYWKKDNETIPCTRERISMHQDTTGYACLLIQPAKKSDAGWYTLSAKNEAGIVSCTARLDIYAQWHHQIPPPMSVRPSGSRYGSLTSKGLDIFSAFSSMESTMVYSCSSRSVVESDEL

SEQ ID NO: 24984 - protein, 1045 aa, Homo sapiens
MLTVQVKTSSAIELPDSLAFLWIIPMWYCEGKELENSPDIHIVQAGNLHSLTIAEAFEEDTGRYSCFASNIYGTDSTSAEIYIEGVSSSDSEGDPNKEEMNRIQKPNEVSSPPTTSAVIPPAVPQAQHLVAQPRVATIQQCQSPTNYLQGLDGKPIIAAPVFTKMLQNLSASEGQLVVFECRVKGAPSPKVEWYREGTLIEDSPDFRILQKKPRSMAEPEEICTLVIAEVFAEDSGCFTCTASNKYGTVSSIAQLHVRGNEDLSNNGSLHSANSTTNLAAIEPQPSPPHSEPPSVEQPPKPKLEGVLVNHNEPRSSSRIGLRVHFNLPEDDKGSEASSEAGVVTTRQTRPDSFQERFNGQATKTPEPSSPVKEPPPVLAKPKLDSTQLQQLHNQVLLEQHQLQNPPPSSPKEFPFSMTVLNSNAPPAVTTSSKQVKAPSSQTFSLARPKYFFPSTNTTAATVAPSSSPVFTLSSTPQTIQRTVSKESLLVSHPSVQTKSPGGLSIQNEPLPPGPTEPTPPPFTFSIPSGNQFQPRCVSPIPVSPTSRIQNPVAFLSSVLPSLPAIPPTNAMGLPRSAPSMPSQGLAKKNTKSPQPVNDDNIRETKNAVIRDLGKKITFSDVRPNQQEYKISSFEQRLMNEIEFRLERTPVDESDDEIQHDEIPTGKCIAPIFDKRLKHFRVTEGSPVTFTCKIVGIPVPKVYWFKDGKQISKRNEHCKMRREGDGTCSLHIESTTSDDDGNYTIMAANPQGRISCSGHLMVQSLPIRSRLTSAGQSHRGRSRVQERDKEPLQERFFRPHFLQAPGDMVAHEGRLCRLDCKVSGLPPPELTWLLNGQPVLPDASHKMLVRETGVHSLLIDPLTQRDAGTYKCIATNKTGQNSFSLELSVVAKEVKKAPVILEKLQNCGVPEGHPVRLECRVIGMPPPVFYWKKDNETIPCTRERISMHQDTTGYACLLIQPAKKSDAGWYTLSAKNEAGIVSCTARLDIYAQWHHQIPPPMSVRPSGSRYGSLTSKGLDIFSAFSSMESTMVYSCSSRSVVESDEL

SEQ ID NO: 24985 - protein, 399 aa, Homo sapiens
MASAAAGEAEETTRLRKPRFSFEENQILIREVRAHYPQLYGAQSRRVSVAERRRVWDGIAAKINGITSWKRTGQEVQKRWNDFKRRTKEKLARVPHSTQGAGPAAEDAFSAEEETIFAILGPGVAAPGAGAGAEEPPAAPSSQPPPPSACPQRYVLSEDRREDRRADTSAHSKAGSSSPEPWARPSCTPQEGGCPRPKERESPPPSALQPVQLPRLALSPPPPAPPLPPPPPLAQVAPSPPSPPPPPRPPPTLSASDPSLDFLRAQQETANAIRELAGTLRQGLAKLSEALSALLPLLPGTPVDSLPPPLPPPPPPPPPPRPVLPPPAPKVEITPEPVSVVAAVVDGAVVAARGVIIAPRSEEGAPRPPPAPLPPHDSPPHKRRKGFPTRKRRGRWKSP

SEQ ID NO: 24986 - protein, 232 aa, Homo sapiens
MDLPIQDSHDSSTSPKGKQPTTAEKSATKKEDKVPVKKQKTRTVFSSTQLCVLNDRFQRQKYLSLQQMQELSNILNLSYKQVKTWFQNQRMKSKRWQKNNWLKNSNGVTQGCLVNPTGNLPMWSNQTWNNSTWSNQTQNIQSWSNHSWNTQTWCTQSWNNQAWNSPFYNCGEESLQSCMQFQPNSPASDLQAALEAAGEGLNVIQQTTRYFNTPQTMDLFLNYSMNMQPEDV

SEQ ID NO: 24987 - protein, 859 aa, Homo sapiens
MGRKLDLSGLTDDETEHVLQVVQRDFNLRKKEEERLSELKQKLDEEGSKCSILSKHQQFVEHCCMRCCSPFTFLVNTKRQCGDCKFNVCKSCCSYQKHEKAWVCCVCQQARLLRAQSLEWFYNNVKSRFKRFGSAKVLKNLYRKHRLESGACFDILGGSLFESNLENEGSISGSDSTFYRQSEGHSVMDTLAVALRVAEEAIEEAISKAEAYGDSLDKQNEASYLRDHKEELTEELATTILQKIIRKQKSKSEQQVEEEPGWPHPQSCSTKVADEGTSASPGGYRAPAALWRSQSAFSITGEEALKTPPVEAPSRQPRDQGQHPRAESALPSWKSVDRLDETNLAPVLQSPDGNWVALKDGAPPPTRLLAKPKSGTFQALEVASSVASAYDEMGSDSEEDFDWSEALSKLCPRSRALPRNPQPQPTQAQSSDQGPIAASPSSALSPNPEAMCSDSETSSAGSSREVGHQARLSWLQRKAPRNPAAEKMRLHGELDVNFNPQLASRETSDSSEPEEAPHTTDRRARRWRRARLGSEEPSKEPSSPSAQLRDLDTHQVSDDLSETDISNEARDPQTLTDTTEEKRRNRLYELAMKMSEKETSSGEDQESEPKTESENQKESLSSEDNSQSVQEELKKKFSAVSLCNISTEVLKVINATEELIAGSTGPWESPQVPPDRQKGMFPRGTDQVRLDEQLTSLEENVYLAAGTVYGLETQLTELEDAARCIHSGTDETHLADLEDQVATAAAQVHHAELQISDIESRISALTIAGLNIAPCVRFTRRRDQKQRTQVQTIDTSRQQRRKLPAPPVKAEKIETSSVTTIKTFNHNFILQGSSTNRTKERKGTTKDLMEPALESAVMY

SEQ ID NO: 24988 - protein, 794 aa, Homo sapiens
MGRKLDLSGLTDDETEHVLQVVQRDFNLRKKEEERLSELKQKLDEEGSKCSILSKHQQFVEHCCMRCCSPFTFLVNTKRQCGDCKFNVCKSCCSYQKHEKAWVCCVCQQARLLRAQSLEWFYNNVKSRFKRFGSAKVLKNLYRKHRLESGACFDILGGSLFESNLENEGSISGSDSTFYRQSEGHSVMDTLAVALRVAEEAIEEAISKAEAYGDSLDKQNEASYLRDHKEELTEELATTILQKIIRKQKSKSEQQVEEEPGWPHPQSCSTKVADEGTSASPGGYRAPAALWRSQSAFSITGEEALKTPPVEAPSRQPRDQGQHPRAESALPSWKSVDRLDETNLAPVLQSPDGNWVALKDGAPPPTRLLAKPKSGTFQALEVASSVASAYDEMGSDSEEDFDWSEALSKLCPRSRALPRNPQPQPTQAQSSDQGPIAASPSSALSPNPEAMCSDSETSSAGSSREVGHQARLSWLQRKAPRNPAAEKMRLHGELDVNFNPQLASRETSDSSEPEEAPHTTDRRARRWRRARLGSEEPSKEPSSPSAQLRDLDTHQVSDDLSETDISNEARDPQTLTDTTEEKRRNRLYELAMKMSEKETSSGEDQESEPKTESENQKESLSSEDNSQSVQEELKKVYLAAGTVYGLETQLTELEDAARCIHSGTDETHLADLEDQVATAAAQVHHAELQISDIESRISALTIAGLNIAPCVRFTRRRDQKQRTQVQTIDTSRQQRRKLPAPPVKAEKIETSSVTTIKTFNHNFILQGSSTNRTKERKGTTKDLMEPALESAVMY

SEQ ID NO: 24989 - protein, 757 aa, Homo sapiens
MQKSLRPIGLLRAQSLEWFYNNVKSRFKRFGSAKVLKNLYRKHRLESGACFDILGGSLFESNLENEGSISGSDSTFYRQSEGHSVMDTLAVALRVAEEAIEEAISKAEAYGDSLDKQNEASYLRDHKEELTEELATTILQKIIRKQKSKSEQQVEEEPGWPHPQSCSTKVADEGTSASPGGYRAPAALWRSQSAFSITGEEALKTPPVEAPSRQPRDQGQHPRAESALPSWKSVDRLDETNLAPVLQSPDGNWVALKDGAPPPTRLLAKPKSGTFQALEVASSVASAYDEMGSDSEEDFDWSEALSKLCPRSRALPRNPQPQPTQAQSSDQGPIAASPSSALSPNPEAMCSDSETSSAGSSREVGHQARLSWLQRKAPRNPAAEKMRLHGELDVNFNPQLASRETSDSSEPEEAPHTTDRRARRWRRARLGSEEPSKEPSSPSAQLRDLDTHQVSDDLSETDISNEARDPQTLTDTTEEKRRNRLYELAMKMSEKETSSGEDQESEPKTESENQKESLSSEDNSQSVQEELKKKFSAVSLCNISTEVLKVINATEELIAGSTGPWESPQVPPDRQKGMFPRGTDQVRLDEQLTSLEENVYLAAGTVYGLETQLTELEDAARCIHSGTDETHLADLEDQVATAAAQVHHAELQISDIESRISALTIAGLNIAPCVRFTRRRDQKQRTQVQTIDTSRQQRRKLPAPPVKAEKIETSSVTTIKTFNHNFILQGSSTNRTKERKGTTKDLMEPALESAVMY

SEQ ID NO: 24990 - protein, 672 aa, Homo sapiens
MDTLAVALRVAEEAIEEAISKAEAYGDSLDKQNEASYLRDHKEELTEELATTILQKIIRKQKSKSEQQVEEEPGWPHPQSCSTKVADEGTSASPGGYRAPAALWRSQSAFSITGEEALKTPPVEAPSRQPRDQGQHPRAESALPSWKSVDRLDETNLAPVLQSPDGNWVALKDGAPPPTRLLAKPKSGTFQALEVASSVASAYDEMGSDSEEDFDWSEALSKLCPRSRALPRNPQPQPTQAQSSDQGPIAASPSSALSPNPEAMCSDSETSSAGSSREVGHQARLSWLQRKAPRNPAAEKMRLHGELDVNFNPQLASRETSDSSEPEEAPHTTDRRARRWRRARLGSEEPSKEPSSPSAQLRDLDTHQVSDDLSETDISNEARDPQTLTDTTEEKRRNRLYELAMKMSEKETSSGEDQESEPKTESENQKESLSSEDNSQSVQEELKKKFSAVSLCNISTEVLKVINATEELIAGSTGPWESPQVPPDRQKGMFPRGTDQVRLDEQLTSLEENVYLAAGTVYGLETQLTELEDAARCIHSGTDETHLADLEDQVATAAAQVHHAELQISDIESRISALTIAGLNIAPCVRFTRRRDQKQRTQVQTIDTSRQQRRKLPAPPVKAEKIETSSVTTIKTFNHNFILQGSSTNRTKERKGTTKDLMEPALESAVMY

SEQ ID NO: 24991 - protein, 637 aa, Homo sapiens
MGRKLDLSGLTDDETEHVLQVVQRDFNLRKKEEERLSELKQKLDEEGSKCSILSKHQQFVEHCCMRCCSPFTFLVNTKRQCGDCKFNVCKSCCSYQKHEKAWVCCVCQQARLLRAQSLEWFYNNVKSRFKRFGSAKVLKNLYRKHRLESGACFDILGGSLFESNLENEGSISGSDSTFYRQSEGHSVMDTLAVALRVAEEAIEEAISKAEAYGDSLDKQNEASYLRDHKEELTEELATTILQKIIRKQKSKSEQQVEEEPGWPHPQSCSTKVADEGTSASPGGYRAPAALWRSQSAFSITGEEALKTPPVEAPSRQPRDQGQHPRAESALPSWKSVDRLDETNLAPVLQSPDGNWVALKDGAPPPTRLLAKPKSGTFQALEVASSVASAYDEMGSDSEEDFDWSEALSKLCPRSRALPRNPQPQPTQAQSSDQGPIAASPSSALSPNPEAMCSDSETSSAGSSREVGHQARLSWLQRKAPRNPAAEKMRLHGELDVNFNPQLASRETSDSSEPEEAPHTTDRRARRWRRARLGSEEPSKEPSSPSAQLRDLDTHQVSDDLSETDISNEARDPQTLTDTTEEKRRNRLYELAMKMSEKETSSGEDQESEPKTESENQKESLSSEDNSQSVQEELKKKS

SEQ ID NO: 24992 - protein, 770 aa, Homo sapiens
MRKAASAASSRSTSSLWSTAACAAARPSPSSSTPSASVEIANSMSARAAAPTRSTKRPGSAASASKRGGSLFESNLENEGSISGSDSTFYRQSEGHSVMDTLAVALRVAEEAIEEAISKAEAYGDSLDKQNEASYLRDHKEELTEELATTILQKIIRKQKSKSEQQVEEEPGWPHPQSCSTKVADEGTSASPGGYRAPAALWRSQSAFSITGEEALKTPPVEAPSRQPRDQGQHPRAESALPSWKSVDRLDETNLAPVLQSPDGNWVALKDGAPPPTRLLAKPKSGTFQALEVASSVASAYDEMGSDSEEDFDWSEALSKLCPRSRALPRNPQPQPTQAQSSDQGPIAASPSSALSPNPEAMCSDSETSSAGSSREVGHQARLSWLQRKAPRNPAAEKMRLHGELDVNFNPQLASRETSDSSEPEEAPHTTDRRARRWRRARLGSEEPSKEPSSPSAQLRDLDTHQVSDDLSETDISNEARDPQTLTDTTEEKRRNRLYELAMKMSEKETSSGEDQESEPKTESENQKESLSSEDNSQSVQEELKKKFSAVSLCNISTEVLKVINATEELIAGSTGPWESPQVPPDRQKGMFPRGTDQVRLDEQLTSLEENVYLAAGTVYGLETQLTELEDAARCIHSGTDETHLADLEDQVATAAAQVHHAELQISDIESRISALTIAGLNIAPCVRFTRRRDQKQRTQVQTIDTSRQQRRKLPAPPVKAEKIETSSVTTIKTFNHNFILQGSSTNRTKERKGTTKDLMEPALESAVMY

SEQ ID NO: 24993 - protein, 297 aa, Homo sapiens
MDAEGLALLLPPVTLAALVDSWLREDCPGLNYAALVSGAGPSQAALWAKSPGVLAGQPFFDAIFTQLNCQVSWFLPEGSKLVPVARVAEVRGPAHCLLLGERVALNTLARCSGIASAAAAAVEAARGAGWTGHVAGTRKTTPGFRLVEKYGLLVGGAASHRYDLGGLVMVKDNHVVAAGGVEKAVRAARQAADFTLKVEVECSSLQEAVQAAEAGADLVLLDNFKPEELHPTATVLKAQFPSVAVEASGGITLDNLPQFCGPHIDVISMGMLTQAAPALDFSLKLFAKEVAPVPKIH

SEQ ID NO: 24994 - protein, 138 aa, Homo sapiens
MQLPPFDMWKDYFNLSQVVWALIASRGQRLETQEIEEPSPGPPLGQDQGLGAPGANGGLGTLCNFCKHNGESRHVYSSHQLKTPDGVVVCPILRHYVCPVCGATGDQAHTLKYCPLNGGQQSLYRRSGRNSAGRRVKR

SEQ ID NO: 24995 - protein, 391 aa, Homo sapiens
MGDTFIRHIALLGFEKRFVPSQHYVRYMFLVKWQDLSEKVVYRRFTEIYEFHKTLKEMFPIEAGAINPENRIIPHLPAPKWFDGQRAAENHQGTLTEYCGTLMSLPTKISRCPHLLDFFKVRPDDLKLPTDNQTKKPETYLMPKDGKSTATDITGPIILQTYRAIANYEKTSGSEMALSTGDVVEVVEKSESGWWFCQMKAKRGWIPASFLEPLDSPDETEDPEPNYAGEPYVAIKAYTAVEGDEVSLLEGEAVEVIHKLLDGWWVIRKDDVTGYFPSMYLQKSGQDVSQAQRQIKRGAPPRRSSIRNVHSIHQRSRKRLSQDAYRRNSVRFLQQRRRQARPGPQSPGSPLEEERQTQRSKPQPAVPPRPSADLILNRCSESTKRKLASAV

SEQ ID NO: 24996 - protein, 305 aa, Homo sapiens
MSVDPACPQSLPCFEESDCKESSPMPVICGPEENYPSLQMSSAEMPHTETVSPLPSSMDLLIQDSPDSSTSPKGKQPTSAENSVAKKEDKVPVKKQKTRTVFSSTQLCVLNDRFQRQKYLSLQQMQELSNILNLSYKQVKTWFQNQRMKSKRWQKNNWPKNSNGVTQKASAPTYPSLYSSYHQGCLVNPTGNLPMWSNQTWNNSTWSNQTQNIQSWSNHSWNTQTWCTQSWNNQAWNSPFYNCGEESLQSCMHFQPNSPASDLEAALEAAGEGLNVIQQTTRYFSTPQTMDLFLNYSMNMQPEDV

SEQ ID NO: 24997 - protein, 1061 aa, Homo sapiens
MLRTAGRDGLCRLSTYLEELEAVELKKFKLYLGTATELGEGKIPWGSMEKAGPLEMAQLLITHFGPEEAWRLALSTFERINRKDLWERGQREDLVRDTPPGGPSSLGNQSTCLLEVSLVTPRKDPQETYRDYVRRKFRLMEDRNARLGECVNLSHRYTRLLLVKEHSNPMQVQQQLLDTGRGHARTVGHQASPIKIETLFEPDEERPEPPRTVVMQGAAGIGKSMLAHKVMLDWADGKLFQGRFDYLFYINCREMNQSATECSMQDLIFSCWPEPSAPLQELIRVPERLLFIIDGFDELKPSFHDPQGPWCLCWEEKRPTELLLNSLIRKKLLPELSLLITTRPTALEKLHRLLEHPRHVEILGFSEAERKEYFYKYFHNAEQAGQVFNYVRDNEPLFTMCFVPLVCWVVCTCLQQQLEGGGLLRQTSRTTTAVYMLYLLSLMQPKPGAPRLQPPPNQRGLCSLAADGLWNQKILFEEQDLRKHGLDGEDVSAFLNMNIFQKDINCERYYSFIHLSFQEFFAAMYYILDEGEGGAGPDQDVTRLLTEYAFSERSFLALTSRFLFGLLNEETRSHLEKSLCWKVSPHIKMDLLQWIQSKAQSDGSTLQQGSLEFFSCLYEIQEEEFIQQALSHFQVIVVSNIASKMEHMVSSFCLKRCRSAQVLHLYGATYSADGEDRARCSAGAHTLLVQLPERTVLLDAYSEHLAAALCTNPNLIELSLYRNALGSRGVKLLCQGLRHPNCKLQNLRLKRCRISSSACEDLSAALIANKNLTRMDLSGNGVGFPGMMLLCEGLRHPQCRLQMIQLRKCQLESGACQEMASVLGTNPHLVELDLTGNALEDLGLRLLCQGLRHPVCRLRTLWLKICRLTAAACDELASTLSVNQSLRELDLSLNELGDLGVLLLCEGLRHPTCKLQTLRLGICRLGSAACEGLSVVLQANHNLRELDLSFNDLGDWGLWLLAEGLQHPACRLQKLWLDSCGLTAKACENLYFTLGINQTLTDLYLTNNALGDTGVRLLCKRLSHPGCKLRVLWLFGMDLNKMTHSRLAALRVTKPYLDIGC

SEQ ID NO: 24998 - protein, 1005 aa, Homo sapiens
MLRTAGRDGLCRLSTYLEELEAVELKKFKLYLGTATELGEGKIPWGSMEKAGPLEMAQLLITHFGPEEAWRLALSTFERINRKDLWERGQREDLVRDTPPGGPSSLGNQSTCLLEVSLVTPRKDPQETYRDYVRRKFRLMEDRNARLGECVNLSHRYTRLLLVKEHSNPMQVQQQLLDTGRGHARTVGHQASPIKIETLFEPDEERPEPPRTVVMQGAAGIGKSMLAHKVMLDWADGKLFQGRFDYLFYINCREMNQSATECSMQDLIFSCWPEPSAPLQELIRVPERLLFIIDGFDELKPSFHDPQGPWCLCWEEKRPTELLLNSLIRKKLLPELSLLITTRPTALEKLHRLLEHPRHVEILGFSEAERKEYFYKYFHNAEQAGQVFNYVRDNEPLFTMCFVPLVCWVVCTCLQQQLEGGGLLRQTSRTTTAVYMLYLLSLMQPKPGAPRLQPPPNQRGLCSLAADGLWNQKILFEEQDLRKHGLDGEDVSAFLNMNIFQKDINCERYYSFIHLSFQEFFAAMYYILDEGEGGAGPDQDVTRLLTEYAFSERSFLALTSRFLFGLLNEETRSHLEKSLCWKVSPHIKMDLLQWIQSKAQSDGSTLQQGSLEFFSCLYEIQEEEFIQQALSHFQVIVVSNIASKMEHMVSSFCLKRCRSAQVLHLYGATYSADGEDRARCSAGAHTLLVQLPERTVLLDAYSEHLAAALCTNPNLIELSLYRNALGSRGVKLLCQGLRHPNCKLQNLRLKRCRISSSACEDLSAALIANKNLTRMDLSGNGVGFPGMMLLCEGLRHPQCRLQMIQLRKCQLESGACQEMASVLGTNPHLVELDLTGNALEDLGLRLLCQGLRHPVCRLRTLWLKICRLTAAACDELASTLSVNQSLRELDLSLNELGDLGVLLLCEGLRHPTCKLQTLRLGICRLGSAACEGLSVVLQANHNLRELDLSFNDLGDWGLWLLAEGLQHPACRLQKLLWLFGMDLNKMTHSRLAALRVTKPYLDIGC

SEQ ID NO: 24999 - protein, 949 aa, Homo sapiens
MLRTAGRDGLCRLSTYLEELEAVELKKFKLYLGTATELGEGKIPWGSMEKAGPLEMAQLLITHFGPEEAWRLALSTFERINRKDLWERGQREDLVRDTPPGGPSSLGNQSTCLLEVSLVTPRKDPQETYRDYVRRKFRLMEDRNARLGECVNLSHRYTRLLLVKEHSNPMQVQQQLLDTGRGHARTVGHQASPIKIETLFEPDEERPEPPRTVVMQGAAGIGKSMLAHKVMLDWADGKLFQGRFDYLFYINCREMNQSATECSMQDLIFSCWPEPSAPLQELIRVPERLLFIIDGFDELKPSFHDPQGPWCLCWEEKRPTELLLNSLIRKKLLPELSLLITTRPTALEKLHRLLEHPRHVEILGFSEAERKEYFYKYFHNAEQAGQVFNYVRDNEPLFTMCFVPLVCWVVCTCLQQQLEGGGLLRQTSRTTTAVYMLYLLSLMQPKPGAPRLQPPPNQRGLCSLAADGLWNQKILFEEQDLRKHGLDGEDVSAFLNMNIFQKDINCERYYSFIHLSFQEFFAAMYYILDEGEGGAGPDQDVTRLLTEYAFSERSFLALTSRFLFGLLNEETRSHLEKSLCWKVSPHIKMDLLQWIQSKAQSDGSTLQQGSLEFFSCLYEIQEEEFIQQALSHFQVIVVSNIASKMEHMVSSFCLKRCRSAQVLHLYGATYSADGEDRARCSAGAHTLLVQLPERTVLLDAYSEHLAAALCTNPNLIELSLYRNALGSRGVKLLCQGLRHPNCKLQNLRLKRCRISSSACEDLSAALIANKNLTRMDLSGNGVGFPGMMLLCEGLRHPQCRLQMIQLRKCQLESGACQEMASVLGTNPHLVELDLTGNALEDLGLRLLCQGLRHPVCRLRTLKLWLDSCGLTAKACENLYFTLGINQTLTDLYLTNNALGDTGVRLLCKRLSHPGCKLRVLWLFGMDLNKMTHSRLAALRVTKPYLDIGC

SEQ ID NO: 25000 - protein, 891 aa, Homo sapiens
MLRTAGRDGLCRLSTYLEELEAVELKKFKLYLGTATELGEGKIPWGSMEKAGPLEMAQLLITHFGPEEAWRLALSTFERINRKDLWERGQREDLVRDTPPGGPSSLGNQSTCLLEVSLVTPRKDPQETYRDYVRRKFRLMEDRNARLGECVNLSHRYTRLLLVKEHSNPMQVQQQLLDTGRGHARTVGHQASPIKIETLFEPDEERPEPPRTVVMQGAAGIGKSMLAHKVMLDWADGKLFQGRFDYLFYINCREMNQSATECSMQDLIFSCWPEPSAPLQELIRVPERLLFIIDGFDELKPSFHDPQGPWCLCWEEKRPTELLLNSLIRKKLLPELSLLITTRPTALEKLHRLLEHPRHVEILGFSEAERKEYFYKYFHNAEQAGQVFNYVRDNEPLFTMCFVPLVCWVVCTCLQQQLEGGGLLRQTSRTTTAVYMLYLLSLMQPKPGAPRLQPPPNQRGLCSLAADGLWNQKILFEEQDLRKHGLDGEDVSAFLNMNIFQKDINCERYYSFIHLSFQEFFAAMYYILDEGEGGAGPDQDVTRLLTEYAFSERSFLALTSRFLFGLLNEETRSHLEKSLCWKVSPHIKMDLLQWIQSKAQSDGSTLQQGSLEFFSCLYEIQEEEFIQQALSHFQVIVVSNIASKMEHMVSSFCLKRCRSAQVLHLYGATYSADGEDRARCSAGAHTLLVQLPERTVLLDAYSEHLAAALCTNPNLIELSLYRNALGSRGVKLLCQGLRHPNCKLQNLRLKRCRISSSACEDLSAALIANKNLTRMDLSGNGVGFPGMMLLCEGLRHPQCRLQMIQLRKCQLESGACQEMASVLGTNPHLVELDLTGNALEDLGLRLLCQGLRHPVCRLRTLLWLFGMDLNKMTHSRLAALRVTKPYLDIGC

SEQ ID NO: 25001 - protein, 287 aa, Homo sapiens
MSQAWWHTSVSPATQEAKAGGLLQPRRQRLWLKRCRISSSACEDLSAALIANKNLTRMDLSGNGVGFPGMMLLCEGLRHPQCRLQMIQLRKCQLESGACQEMASVLGTNPHLVELDLTGNALEDLGLRLLCQGLRHPVCRLRTLWLKICRLTAAACDELASTLSVNQSLRELDLSLNELGDLGVLLLCEGLRHPTCKLQTLRLDSCGLTAKACENLYFTLGINQTLTDLYLTNNALGDTGVRLLCKRLSHPGCKLRVLWLFGMDLNKMTHSRLAALRVTKPYLDIGC

SEQ ID NO: 25002 - protein, 1004 aa, Homo sapiens
MLRTAGRDGLCRLSTYLEELEAVELKKFKLYLGTATELGEGKIPWGSMEKAGPLEMAQLLITHFGPEEAWRLALSTFERINRKDLWERGQREDLVRDTPPGGPSSLGNQSTCLLEVSLVTPRKDPQETYRDYVRRKFRLMEDRNARLGECVNLSHRYTRLLLVKEHSNPMQVQQQLLDTGRGHARTVGHQASPIKIETLFEPDEERPEPPRTVVMQGAAGIGKSMLAHKVMLDWADGKLFQGRFDYLFYINCREMNQSATECSMQDLIFSCWPEPSAPLQELIRVPERLLFIIDGFDELKPSFHDPQGPWCLCWEEKRPTELLLNSLIRKKLLPELSLLITTRPTALEKLHRLLEHPRHVEILGFSEAERKEYFYKYFHNAEQAGQVFNYVRDNEPLFTMCFVPLVCWVVCTCLQQQLEGGGLLRQTSRTTTAVYMLYLLSLMQPKPGAPRLQPPPNQRGLCSLAADGLWNQKILFEEQDLRKHGLDGEDVSAFLNMNIFQKDINCERYYSFIHLSFQEFFAAMYYILDEGEGGAGPDQDVTRLLTEYAFSERSFLALTSRFLFGLLNEETRSHLEKSLCWKVSPHIKMDLLQWIQSKAQSDGSTLQQGSLEFFSCLYEIQEEEFIQQALSHFQVIVVSNIASKMEHMVSSFCLKRCRSAQVLHLYGATYSADGEDRARCSAGAHTLLVQLPERTVLLDAYSEHLAAALCTNPNLIELSLYRNALGSRGVKLLCQGLRHPNCKLQNLRLKRCRISSSACEDLSAALIANKNLTRMDLSGNGVGFPGMMLLCEGLRHPQCRLQMIQLRKCQLESGACQEMASVLGTNPHLVELDLTGNALEDLGLRLLCQGLRHPVCRLRTLWLKICRLTAAACDELASTLSVNQSLRELDLSLNELGDLGVLLLCEGLRHPTCKLQTLRLDSCGLTAKACENLYFTLGINQTLTDLYLTNNALGDTGVRLLCKRLSHPGCKLRVLWLFGMDLNKMTHSRLAALRVTKPYLDIGC

SEQ ID NO: 25003 - protein, 1062 aa, Homo sapiens
MLRTAGRDGLCRLSTYLEELEAVELKKFKLYLGTATELGEGKIPWGSMEKAGPLEMAQLLITHFGPEEAWRLALSTFERINRKDLWERGQREDLVRDTPPGGPSSLGNQSTCLLEVSLVTPRKDPQETYRDYVRRKFRLMEDRNARLGECVNLSHRYTRLLLVKEHSNPMQVQQQLLDTGRGHARTVGHQASPIKIETLFEPDEERPEPPRTVVMQGAAGIGKSMLAHKVMLDWADGKLFQGRFDYLFYINCREMNQSATECSMQDLIFSCWPEPSAPLQELIRVPERLLFIIDGFDELKPSFHDPQGPWCLCWEEKRPTELLLNSLIRKKLLPELSLLITTRPTALEKLHRLLEHPRHVEILGFSEAERKEYFYKYFHNAEQAGQVFNYVRDNEPLFTMCFVPLVCWVVCTCLQQQLEGGGLLRQTSRTTTAVYMLYLLSLMQPKPGAPRLQPPPNQRGLCSLAADGLWNQKILFEEQDLRKHGLDGEDVSAFLNMNIFQKDINCERYYSFIHLSFQEFFAAMYYILDEGEGGAGPDQDVTRLLTEYAFSERSFLALTSRFLFGLLNEETRSHLEKSLCWKVSPHIKMDLLQWIQSKAQSDGSTLQQGSLEFFSCLYEIQEEEFIQQALSHFQVIVVSNIASKMEHMVSSFCLKRCRSAQVLHLYGATYSADGEDRARCSAGAHTLLVQLRPERTVLLDAYSEHLAAALCTNPNLIELSLYRNALGSRGVKLLCQGLRHPNCKLQNLRLKRCRISSSACEDLSAALIANKNLTRMDLSGNGVGFPGMMLLCEGLRHPQCRLQMIQLRKCQLESGACQEMASVLGTNPHLVELDLTGNALEDLGLRLLCQGLRHPVCRLRTLWLKICRLTAAACDELASTLSVNQSLRELDLSLNELGDLGVLLLCEGLRHPTCKLQTLRLGICRLGSAACEGLSVVLQANHNLRELDLSFNDLGDWGLWLLAEGLQHPACRLQKLWLDSCGLTAKACENLYFTLGINQTLTDLYLTNNALGDTGVRLLCKRLSHPGCKLRVLWLFGMDLNKMTHSRLAALRVTKPYLDIGC

SEQ ID NO: 25004 - protein, 1738 aa, Homo sapiens
MLKRKQSSRVEAQPVTDFGPDESLSDNADILWINKPWVHSLLRICAIISVISVCMNTPMTFEHYPPLQYVTFTLDTLLMFLYTAEMIAKMHIRGIVKGDSSYVKDRWCVFDGFMVFCLWVSLVLQVFEIADIVDQMSPWGMLRIPRPLIMIRAFRIYFRFELPRTRITNILKRSGEQIWSVSIFLLFFLLLYGILGVQMFGTFTYHCVVNDTKPGNVTWNSLAIPDTHCSPELEEGYQCPPGFKCMDLEDLGLSRQELGYSGFNEIGTSIFTVYEAASQEGWVFLMYRAIDSFPRWRSYFYFITLIFFLAWLVKNVFIAVIIETFAEIRVQFQQMWGSRSSTTSTATTQMFHEDAAGGWQLVAVDVNKPQGRAPACLQKMMRSSVFHMFILSMVTVDVIVAASNYYKGENFRRQYDEFYLAEVAFTVLFDLEALLKIWCLGFTGYISSSLHKFELLLVIGTTLHVYPDLYHSQFTYFQVLRVVRLIKISPALEDFVYKIFGPGKKLGSLVVFTASLLIVMSAISLQMFCFVEELDRFTTFPRAFMSMFQILTQEGWVDVMDQTLNAVGHMWAPVVAIYFILYHLFATLILLSLFVAVILDNLELDEDLKKLKQLKQSEANADTKEKLPLRLRIFEKFPNRPQMVKISKLPSDFTVPKIRESFMKQFIDRQQQDTCCLLRSLPTTSSSSCDHSKRSAIEDNKYIDQKLRKSVFSIRARNLLEKETAVTKILRACTRQRMLSGSFEGQPAKERSILSVQHHIRQERRSLRHGSNSQRISRGKSLETLTQDHSNTVRYRNAQREDSEIKMIQEKKEQAEMKRKVQEEELRENHPYFDKPLFIVGREHRFRNFCRVVVRARFNASKTDPVTGAVKNTKYHQLYDLLGLVTYLDWVMIIVTICSCISMMFESPFRRVMHAPTLQIAEYVFVIFMSIELNLKIMADGLFFTPTAVIRDFGGVMDIFIYLVSLIFLCWMPQNVPAESGAQLLMVLRCLRPLRIFKLVPQMRKVVRELFSGFKEIFLVSILLLTLMLVFASFGVQLFAGKLAKCNDPNIIRREDCNGIFRINVSVSKNLNLKLRPGEKKPGFWVPRVWANPRNFNFDNVGNAMLALFEVLSLKGWVEVRDVIIHRVGPIHGIYIHVFVFLGCMIGLTLFVGVVIANFNENKGTALLTVDQRRWEDLKSRLKIAQPLHLPPRPDNDGFRAKMYDITQHPFFKRTIALLVLAQSVLLSVKWDVEDPVTVPLATMSVVFTFIFVLEVTMKIIAMSPAGFWQSRRNRYDLLVTSLGVVWVVLHFALLNAYTYMMGACVIVFRFFSICGKHVTLKMLLLTVVVSMYKSFFIIVGMFLLLLCYAFAGVVLFGTVKYGENINRHANFSSAGKAITVLFRIVTGEDWNKIMHDCMVQPPFCTPDEFTYWATDCGNYAGALMYFCSFYVIIAYIMLNLLVAIIVENFSLFYSTEEDQLLSYNDLRHFQIIWNMVDDKREGVIPTFRVKFLLRLLRGRLEVDLDKDKLLFKHMCYEMERLHNGGDVTFHDVLSMLSYRSVDIRKSLQLEELLAREQLEYTIEEEVAKQTIRMWLKKCLKRIRAKQQQSCSIIHSLRESQQQELSRFLNPPSIETTQPSEDTNANSQDNSMQPETSSQQQLLSPTLSDRGGSRQDAADAGKPQRKFGQWRLPSAPKPISHSVSSVNLRFGGRTTMKSVVCKMNPMTDAASCGSEVKKWWTRQLTVESDESGDDLLDI

SEQ ID NO: 25005 - protein, 668 aa, Homo sapiens
MLKRKQSSRVEAQPVTDFGPDESLSDNADILWINKPWVHSLLRICAIISVISVCMNTPMTFEHYPPLQYVTFTLDTLLMFLYTAEMIAKMHIRGIVKGDSSYVKDRWCVFDGFMVFCLWVSLVLQVFEIADIVDQMSPWGMLRIPRPLIMIRAFRIYFRFELPRTRITNILKRSGEQIWSVSIFLLFFLLLYGILGVQMFGTFTYHCVVNDTKPGNVTWNSLAIPDTHCSPELEEGYQCPPGFKCMDLEDLGLSRQELGYSGFNEIGTSIFTVYEAASQEGWVFLMYRAIDSFPRWRSYFYFITLIFFLAWLVKNVFIAVIIETFAEIRVQFQQMWGSRSSTTSTATTQMFHEDAAGGWQLVAVDVNKPQGRAPACLQKMMRSSVFHMFILSMVTVDVIVAASNYYKGENFRRQYDEFYLAEVAFTVLFDLEALLKIWCLGFTGYISSSLHKFELLLVIGTTLHVYPDLYHSQFTYFQVLRVVRLIKISPALEDFVYKIFGPGKKLGSLVVFTASLLIVMSAISLQMFCFVEELDRFTTFPRAFMSMFQILTQEGWVDVMDQTLNAVGHMWAPVVAIYFILYHLFATLPPSLIRDLCGTQDACPSCLPLQPPNHLPGSQTLARLTHQALTTPPGMRSSQLFSKISLLLGICVAWESILGSLSLSHNLQ

SEQ ID NO: 25006 - protein, 218 aa, Homo sapiens
MLKRKQSSRVEAQPVTDFGPDESLSDNADILWINKPWVHSLLRICAIISVISVCMNTPMTFEHYPPLQYVTFTLDTLLMFLYTAEMIAKMHIRGIVKGDSSYVKDRWCVFDGFMVFCLWVSLVLQVFEIADIVDQMSPWGMLRIPRPLIMIRAFRIYFRFELPRTRITNILKRSGEQIWSVSIFLLFFLLLYGILGVQMFGTFTYHCVVNDTKPGLSL

SEQ ID NO: 25007 - protein, 1127 aa, Homo sapiens
MSLTSAYQHKLAEKLTILNDRGQGVLIRMYNIKKTCSDPKSKPPFLLEKSMEPSLKYINKKFPNIDVRNSTQHLGPVHREKAEIIRFLTNYYQSFVDVMEFRDHVYELLNTIDACQCHFDINLNFDFTRSYLDLIVTYTSVILLLSRIEDRRILIGMYNCAHEMLHGHGDPSFARLGQMVLEYDHPLKKLTEEFGPHTKAVSGALLSLHFLFVRRNQGAEQWRSAQLLSLISNPPAMINPANSDTMACEYLSVEVMERWIIIGFLLCHGCLNSNSQCQKLWKLCLQGSLYITLIREDVLQVHKVTEDLFSSLKGYGKRVADIKESKEHVIANSGQFHCQRRQFLRMAVKELETVLADEPGLLGPKALFAFMALSFIRDEVTWLVRHTENVTKTKTPEDYADSSIAELLFLLEGIRSLVRRHIKVIQQYHLQYLARFDALVLSDIIQNLSVCPEEESIIMSSFVSILSSLNLKQVDNGEKFEFSGLRLDWFRLQAYTSVAKAPLHLHENPDLAKVMNLIVFHSRMLDSVEKLLVETSDLSTFCFHLRIFEKMFAMTLEESAMLRYAIAFPLICAHFVHCTHEMCPEEYPHLKNHGLHHCNSFLEELAKQTSNCVLEICAEQRNLSEQLLPKHCATTISKAKNKKTRKQRQTPRKGEPERDKPGAESHRKNRSIVTNMDKLHLNLTELALTMNHVYSFSVFEHTIFPSEYLSSHLEARLNRAIVWLAGYNATTQEIVRPSELLAGVKAYIGFIQSLAQFLGADASRVIRNALLQQTQPLDSCGEQTITTLYTNWYLESLLRQASSGTIILSPAMQAFVSLPREGEQNFSAEEFSDISEMRALAELLGPYGMKFLSENLMWHVTSQIVELKKLVVENMDILVQIRSNFSKPDLMASLLPQLTGAENVLKRMTIIGVILSFRAMAQEGLREVFSSHCPFLMGPIECLKEFVTPDTDIKVTLSIFELASAAGVGCDIDPALVAAIANLKADTSSPEEEYKVACLLLIFLAVSLPLLATDPSSFYSIEKDGYNNNIHCLTKAIIQVSAALFTLYNKNIETHLKEFLVVASVSLLQLGQETDKLKTRNRESISLLMRLVVEESSFLTLDMLESCFPYVLLRNAYREVSRAFHLN

SEQ ID NO: 25008 - protein, 1077 aa, Homo sapiens
MEPSLKYINKKFPNIDVRNSTQHLGPVHREKAEIIRFLTNYYQSFVDVMEFRDHVYELLNTIDACQCHFDINLNFDFTRSYLDLIVTYTSVILLLSRIEDRRILIGMYNCAHEMLHGHGDPSFARLGQMVLEYDHPLKKLTEEFGPHTKAVSGALLSLHFLFVRRNQGAEQWRSAQLLSLISNPPAMINPANSDTMACEYLSVEVMERWIIIGFLLCHGCLNSNSQCQKLWKLCLQGSLYITLIREDVLQVHKVTEDLFSSLKGYGKRVADIKESKEHVIANSGQFHCQRRQFLRMAVKELETVLADEPGLLGPKALFAFMALSFIRDEVTWLVRHTENVTKTKTPEDYADSSIAELLFLLEGIRSLVRRHIKVIQQYHLQYLARFDALVLSDIIQNLSVCPEEESIIMSSFVSILSSLNLKQVDNGEKFEFSGLRLDWFRLQAYTSVAKAPLHLHENPDLAKVMNLIVFHSRMLDSVEKLLVETSDLSTFCFHLRIFEKMFAMTLEESAMLRYAIAFPLICAHFVHCTHEMCPEEYPHLKNHGLHHCNSFLEELAKQTSNCVLEICAEQRNLSEQLLPKHCATTISKAKNKKTRKQRQTPRKGEPERDKPGAESHRKNRSIVTNMDKLHLNLTELALTMNHVYSFSVFEHTIFPSEYLSSHLEARLNRAIVWLAGYNATTQEIVRPSELLAGVKAYIGFIQSLAQFLGADASRVIRNALLQQTQPLDSCGEQTITTLYTNWYLESLLRQASSGTIILSPAMQAFVSLPREGEQNFSAEEFSDISEMRALAELLGPYGMKFLSENLMWHVTSQIVELKKLVVENMDILVQIRSNFSKPDLMASLLPQLTGAENVLKRMTIIGVILSFRAMAQEGLREVFSSHCPFLMGPIECLKEFVTPDTDIKVTLSIFELASAAGVGCDIDPALVAAIANLKADTSSPEEEYKVACLLLIFLAVSLPLLATDPSSFYSIEKDGYNNNIHCLTKAIIQVSAALFTLYNKNIETHLKEFLVVASVSLLQLGQETDKLKTRNRESISLLMRLVVEESSFLTLDMLESCFPYVLLRNAYREVSRAFHLN

SEQ ID NO: 25009 - protein, 1099 aa, Homo sapiens
MGKLIRMGPQERWLLRTKRLHWSRLLFLLGMLIIGSTYQHLRRPRGLSSLWAAVSSHQPIKLASRDLSSEEMMMMSSSPSKPSSEMGGKMLVPQASVGSDEATLSMTVENIPSMPKRTAKMIPTTTKNNYSPTAAGTERRKEDTPTSSRTLTYYTSTSSRQIVKKYTPTPRGEMKSYSPTQVREKVKYTPSPRGRRVGTYVPSTFMTMETSHAITPRTTVKDSDITATYKILETNSLKRIMEETTPTTLKGMFDSTPTFLTHEVEANVLTSPRSVMEKNNLFPPRRVESNSSAHPWGLVGKSNPKTPQGTVLLHTPATSEGQVTISTMTGSSPAETKAFTAAWSLRNPSPRTSVSAIKTAPAIVWRLAKKPSTAPSTSTTPTVRAKLTMQVHHCVVVKPTPAMLTTPSPSLTTALLPEELSPSPSVLPPSLPDLHPKGEYPPDLFSVEERRQGWVVLHVFGMMYVFVALAIVCDEYFVPALGVITDKLQISEDVAGATFMAAGGSAPELFTSLIGVFISHSNVGIGTIVGSAVFNILFVIGTCSLFSREILNLTWWPLFRDVSFYILDLIMLILFFLDSLIAWWESLLLLLAYAFYVFTMKWNKHIEVWVKEQLSRRPVAKVMALEDLSKPGDGAIAVDELQDNKKLKLPSLLTRGSSSTSLHNSTIRSTIYQLMLHSLDPLREVRLAKEKEEESLNQGARAQPQAKAESKPEEEEPAKLPAVTVTPAPVPDIKGDQKENPGGQEDVAEAESTGEMPGEEGETAGEGETEEKSGGETQPEGEGETETQGKGEECEDENEAEGKGDNEGEDEGEIHAEDGEMKGNEGETESQELSAENHGEAKNDEKGVEDGGGSDGGDSEEEEEEEEEQEEEEEEEEQEEEEEEEEEEEEKGNEEPLSLDWPETRQKQAIYLFLLPIVFPLWLTVPDVRRQESRKFFVFTFLGSIMWIAMFSYLMVWWAHQVGETIGISEEIMGLTILAAGTSIPDLITSVIVARKGLGDMAVSSSVGSNIFDITVGLPVPWLLFSLINGLQPVPVSSNGLFCAIVLLFLMLLFVISSIASCKWRMNKILGFTMFLLYFVFLIISVMLEDRIISCPVSV

SEQ ID NO: 25010 - protein, 1081 aa, Homo sapiens
MGKLIRMGPQERWLLRTKRLHWSRLLFLLGMLIIGSTYQHLRRPRGLSSLWAAVSSHQPIKLASRDLSSEEMMMMSSSPSKPSSEMGGKMLVPQASVGSDEATLSMTVENIPSMPKRTAKMIPTTTKNNYSPTAAGTERRKEDTPTSSRTLTYYTSTSSRQIVKKYTPTPRGEMKSYSPTQVREKVKYTPSPRGRRVGTYVPSTFMTMETSHAITPRTTVKDSDITATYKILETNSLKRIMEETTPTTLKGMFDSTPTFLTHEVEANVLTSPRSVMEKNNLFPPRRVESNSSAHPWGLVGKSNPKTPQGTVLLHTPATSEGQVTISTMTGSSPAETKAFTAAWSLRNPSPRTSVSAIKTAPAIVWRLAKKPSTAPSTSTTPTVRAKLTMQVHHCVVVKPTPAMLTTPSPSLTTALLPEELSPSPSVLPPSLPDLHPKGEYPPDLFSVEERRQGWVVLHVFGMMYVFVALAIVCDEYFVPALGVITDKLQISEDVAGATFMAAGGSAPELFTSLIGVFISHSNVGIGTIVGSAVFNILFVIGTCSLFSREILNLTWWPLFRDVSFYILDLIMLILFFLDSLIAWWESLLLLLAYAFYVFTMKWNKHIEVWVKEQLSRRPVAKVMALEDLSKLPSLLTRGSSSTSLHNSTIRSTIYQLMLHSLDPLREVRLAKEKEEESLNQGARAQPQAKAESKPEEEEPAKLPAVTVTPAPVPDIKGDQKENPGGQEDVAEAESTGEMPGEEGETAGEGETEEKSGGETQPEGEGETETQGKGEECEDENEAEGKGDNEGEDEGEIHAEDGEMKGNEGETESQELSAENHGEAKNDEKGVEDGGGSDGGDSEEEEEEEEEQEEEEEEEEQEEEEEEEEEEEEKGNEEPLSLDWPETRQKQAIYLFLLPIVFPLWLTVPDVRRQESRKFFVFTFLGSIMWIAMFSYLMVWWAHQVGETIGISEEIMGLTILAAGTSIPDLITSVIVARKGLGDMAVSSSVGSNIFDITVGLPVPWLLFSLINGLQPVPVSSNGLFCAIVLLFLMLLFVISSIASCKWRMNKILGFTMFLLYFVFLIISVMLEDRIISCPVSV

SEQ ID NO: 25011 - protein, 1069 aa, Homo sapiens
MGKLIRMGPQERWLLRTKRLHWSRLLFLLGMLIIGSTYQHLRRPRGLSSLWAAVSSHQPIKLASRDLSSEEMMMMSSSPSKPSSEMGGKMLVPQASVGSDEATLSMTVENIPSMPKRTAKMIPTTTKNNYSPTAAGTERRKEDTPTSSRTLTYYTSTSSRQIVKKYTPTPRGEMKSYSPTQVREKVKYTPSPRGRRVGTYVPSTFMTMETSHAITPRTTVKDSDITATYKILETNSLKRIMEETTPTTLKGMFDSTPTFLTHEVEANVLTSPRSVMEKNNLFPPRRVESNSSAHPWGLVGKSNPKTPQGTVLLHTPATSEGQVTISTMTGSSPAETKAFTAAWSLRNPSPRTSVSAIKTAPAIVWRLAKKPSTAPSTSTTPTVRAKLTMQVHHCVVVKPTPAMLTTPSPSLTTALLPEELSPSPSVLPPSLPDLHPKGEYPPDLFSVEERRQGWVVLHVFGMMYVFVALAIVCDEYFVPALGVITDKLQISEDVAGATFMAAGGSAPELFTSLIGVFISHSNVGIGTIVGSAVFNILFVIGTCSLFSREILNLTWWPLFRDVSFYILDLIMLILFFLDSLIAWWESLLLLLAYAFYVFTMKWNKHIEVWVKEQLSRRPVAKVMALEDLSKPGDGAIAVDELQDNKKLKLPSLLTRGSSSTSLHNSTIRSTIYQLMLHSLDPLREVRLAKEKEEESLNQGARAQPQAKAESKPEEEEPAKLPAVTVTPAPVPDIKGDQKENPGGQEDVAEAESTGEMPGEEGETAGEGETEEKSGGETQPEGEGETETQGKGEECEDENEAEGKGDNEGEDEGEIHAEDGEMKGNEGETESQELSAENHGEAKNDEKGVEDGGGSDGGDSEEEEEEEEEQEEEEEEEEQEEEEEEEEEEEEKGNEEPLSLDWPETRQKQAIYLFLLPIVFPLWLTVPDVRRQVGETIGISEEIMGLTILAAGTSIPDLITSVIVARKGLGDMAVSSSVGSNIFDITVGLPVPWLLFSLINGLQPVPVSSNGLFCAIVLLFLMLLFVISSIASCKWRMNKILGFTMFLLYFVFLIISVMLEDRIISCPVSV

SEQ ID NO: 25012 - protein, 980 aa, Homo sapiens
MTSPQLEWTLQTLLEQLNEDELKSFKSLLWAFPLEDVLQKTPWSEVEEADGKKLAEILVNTSSENWIRNATVNILEEMNLTELCKMAKAEMMEDGQVQEIDNPELGDAEEDSELAKPGEKEGWRNSMEKQSLVWKNTFWQGDIDNFHDDVTLRNQRFIPFLNPRTPRKLTPYTVVLHGPAGVGKTTLAKKCMLDWTDCNLSPTLRYAFYLSCKELSRMGPCSFAELISKDWPELQDDIPSILAQAQRILFVVDGLDELKVPPGALIQDICGDWEKKKPVPVLLGSLLKRKMLPRAALLVTTRPRALRDLQLLAQQPIYVRVEGFLEEDRRAYFLRHFGDEDQAMRAFELMRSNAALFQLGSAPAVCWIVCTTLKLQMEKGEDPVPTCLTRTGLFLRFLCSRFPQGAQLRGALRTLSLLAAQGLWAQMSVFHREDLERLGVQESDLRLFLDGDILRQDRVSKGCYSFIHLSFQQFLTALFYALEKEEGEDRDGHAWDIGDVQKLLSGEERLKNPDLIQVGHFLFGLANEKRAKELEATFGCRMSPDIKQELLQCKAHLHANKPLSVTDLKEVLGCLYESQEEELAKVVVAPFKEISIHLTNTSEVMHCSFSLKHCQDLQKLSLQVAKGVFLENYMDFELDIEFERCTYLTIPNWARQDLRSLRLWTDFCSLFSSNSNLKFLEVKQSFLSDSSVRILCDHVTRSTCHLQKVEIKNVTPDTAYRDFCLAFIGKKTLTHLTLAGHIEWERTMMLMLCDLLRNHKCNLQYLRLGGHCATPEQWAEFFYVLKANQSLKHLRLSANVLLDEGAMLLYKTMTRPKHFLQMLSLENCRLTEASCKDLAAVLVVSKKLTHLCLAKNPIGDTGVKFLCEGLSYPDCKLQTLVLQQCSITKLGCRYLSEALQEACSLTNLDLSINQIARGLWILCQALENPNCNLKHLRLKTYETNLEIKKLLEEVKEKNPKLTIDCNASGATAPPCCDFFC

SEQ ID NO: 25013 - protein, 1009 aa, Homo sapiens
MTSPQLEWTLQTLLEQLNEDELKSFKSLLWAFPLEDVLQKTPWSEVEEADGKKLAEILVNTSSENWIRNATVNILEEMNLTELCKMAKAEMMEDGQVQEIDNPELGDAEEDSELAKPGEKEGWRNSMEKQSLVWKNTFWQGDIDNFHDDVTLRNQRFIPFLNPRTPRKLTPYTVVLHGPAGVGKTTLAKKCMLDWTDCNLSPTLRYAFYLSCKELSRMGPCSFAELISKDWPELQDDIPSILAQAQRILFVVDGLDELKVPPGALIQDICGDWEKKKPVPVLLGSLLKRKMLPRAALLVTTRPRALRDLQLLAQQPIYVRVEGFLEEDRRAYFLRHFGDEDQAMRAFELMRSNAALFQLGSAPAVCWIVCTTLKLQMEKGEDPVPTCLTRTGLFLRFLCSRFPQGAQLRGALRTLSLLAAQGLWAQMSVFHREDLERLGVQESDLRLFLDGDILRQDRVSKGCYSFIHLSFQQFLTALFYALEKEEGEDRDGHAWDIGDVQKLLSGEERLKNPDLIQVGHFLFGLANEKRAKELEATFGCRMSPDIKQELLQCKAHLHANKPLSVTDLKEVLGCLYESQEEELAKVVVAPFKEISIHLTNTSEVMHCSFSLKHCQDLQKLSLQVAKGVFLENYMDFELDIEFESSNSNLKFLEVKQSFLSDSSVRILCDHVTRSTCHLQKVEIKNVTPDTAYRDFCLAFIGKKTLTHLTLAGHIEWERTMMLMLCDLLRNHKCNLQYLRLGGHCATPEQWAEFFYVLKANQSLKHLRLSANVLLDEGAMLLYKTMTRPKHFLQMLSLENCRLTEASCKDLAAVLVVSKKLTHLCLAKNPIGDTGVKFLCEGLSYPDCKLQTLVLQQCSITKLGCRYLSEALQEACSLTNLDLSINQIARGLWILCQALENPNCNLKHLRLWSCSLMPFYCQHLGSALLSNQKLETLDLGQNHLWKSGIIKLFGVLRQRTGSLKILRLKTYETNLEIKKLLEEVKEKNPKLTIDCNASGATAPPCCDFFC

SEQ ID NO: 25014 - protein, 1037 aa, Homo sapiens
MTSPQLEWTLQTLLEQLNEDELKSFKSLLWAFPLEDVLQKTPWSEVEEADGKKLAEILVNTSSENWIRNATVNILEEMNLTELCKMAKAEMMEDGQVQEIDNPELGDAEEDSELAKPGEKEGWRNSMEKQSLVWKNTFWQGDIDNFHDDVTLRNQRFIPFLNPRTPRKLTPYTVVLHGPAGVGKTTLAKKCMLDWTDCNLSPTLRYAFYLSCKELSRMGPCSFAELISKDWPELQDDIPSILAQAQRILFVVDGLDELKVPPGALIQDICGDWEKKKPVPVLLGSLLKRKMLPRAALLVTTRPRALRDLQLLAQQPIYVRVEGFLEEDRRAYFLRHFGDEDQAMRAFELMRSNAALFQLGSAPAVCWIVCTTLKLQMEKGEDPVPTCLTRTGLFLRFLCSRFPQGAQLRGALRTLSLLAAQGLWAQMSVFHREDLERLGVQESDLRLFLDGDILRQDRVSKGCYSFIHLSFQQFLTALFYALEKEEGEDRDGHAWDIGDVQKLLSGEERLKNPDLIQVGHFLFGLANEKRAKELEATFGCRMSPDIKQELLQCKAHLHANKPLSVTDLKEVLGCLYESQEEELAKVVVAPFKEISIHLTNTSEVMHCSFSLKHCQDLQKLSLQVAKGVFLENYMDFELDIEFERCTYLTIPNWARQDLRSLRLWTDFCSLFSSNSNLKFLEVKQSFLSDSSVRILCDHVTRSTCHLQKVEIKNVTPDTAYRDFCLAFIGKKTLTHLTLAGHIEWERTMMLMLCDLLRNHKCNLQYLRLGGHCATPEQWAEFFYVLKANQSLKHLRLSANVLLDEGAMLLYKTMTRPKHFLQMLSLENCRLTEASCKDLAAVLVVSKKLTHLCLAKNPIGDTGVKFLCEGLSYPDCKLQTLVLQQCSITKLGCRYLSEALQEACSLTNLDLSINQIARGLWILCQALENPNCNLKHLRLWSCSLMPFYCQHLGSALLSNQKLETLDLGQNHLWKSGIIKLFGVLRQRTGSLKILRLKTYETNLEIKKLLEEVKEKNPKLTIDCNASGATAPPCCDFFC

SEQ ID NO: 25015 - protein, 740 aa, Homo sapiens
MAESRGRLYLWMCLAAALASFLMGFMVGWFIKPLKETTTSVRYHQSIRWKLVSEMKAENIKSFLRSFTKLPHLAGTEQNFLLAKKIQTQWKKFGLDSAKLVHYDVLLSYPNETNANYISIVDEHETEIFKTSYLEPPPDGYENVTNIVPPYNAFSAQGMPEGDLVYVNYARTEDFFKLEREMGINCTGKIVIARYGKIFRGNKVKNAMLAGAIGIILYSDPADYFAPEVQPYPKGWNLPGTAAQRGNVLNLNGAGDPLTPGYPAKEYTFRLDVEEGVGIPRIPVHPIGYNDAEILLRYLGGIAPPDKSWKGALNVSYSIGPGFTGSDSFRKVRMHVYNINKITRIYNVVGTIRGSVEPDRYVILGGHRDSWVFGAIDPTSGVAVLQEIARSFGKLMSKGWRPRRTIIFASWDAEEFGLLGSTEWAEENVKILQERSIAYINSDSSIEGNYTLRVDCTPLLYQLVYKLTKEIPSPDDGFESKSLYESWLEKDPSPENKNLPRINKLGSGSDFEAYFQRLGIASGRARYTKNKKTDKYSSYPVYHTIYETFELVEKFYDPTFKKQLSVAQLRGALVYELVDSKIIPFNIQDYAEALKNYAASIYNLSKKHDQQLTDHGVSFDSLFSAVKNFSEAASDFHKRLIQVDLNNPIAVRMMNDQLMLLERAFIDPLGLPGKLFYRHIIFAPSSHNKYAGESFPGIYDAIFDIENKANSRLAWKEVKKHISIAAFTIQAAAGTLKEVL

SEQ ID NO: 25016 - protein, 305 aa, Homo sapiens
MAESRGRLYLWMCLAAALASFLMGFMVGWFIKPLKETTTSVRYHQSIRWKLVSEMKAENIKSFLRSFTKLPHLAGTEQNFLLAKKIQTQWKKFGLDSAKLVHYDVLLSYPNETNANYISIVDEHETEIFKTSYLEPPPDGYENVTNIVPPYNAFSAQGMPEGDLVYVNYARTEDFFKLEREMGINCTGKIVIARYGKIFRGNKVKNAMLAGAIGIILYSDPADYFAPEVQPYPKGWNLPGTAAQRGNVLNLNGAGDPLTPGYPAKGTSYLLQVATTNMLENHFLESMMLSLILKIKPTLVWPGKK

SEQ ID NO: 25017 - protein, 1200 aa, Homo sapiens
MKVAGGLELGAAALLSASPRALVTLSTGPTCSILPKNPLFPQNLSSQPCIKMEGDKSLTFSSYGLQWCLYELDKEEFQTFKELLKKKSSESTTCSIPQFEIENANVECLALLLHEYYGASLAWATSISIFENMNLRTLSEKARDDMKRHSPEDPEATMTDQGPSKEKVPGISQAVQQDSATAAETKEQEISQAMEQEGATAAETEEQEISQAMEQEGATAAETEEQGHGGDTWDYKSHVMTKFAEEEDVRRSFENTAADWPEMQTLAGAFDSDRWGFRPRTVVLHGKSGIGKSALARRIVLCWAQGGLYQGMFSYVFFLPVREMQRKKESSVTEFISREWPDSQAPVTEIMSRPERLLFIIDGFDDLGSVLNNDTKLCKDWAEKQPPFTLIRSLLRKVLLPESFLIVTVRDVGTEKLKSEVVSPRYLLVRGISGEQRIHLLLERGIGEHQKTQGLRAIMNNRELLDQCQVPAVGSLICVALQLQDVVGESVAPFNQTLTGLHAAFVFHQLTPRGVVRRCLNLEERVVLKRFCRMAVEGVWNRKSVFDGDDLMVQGLGESELRALFHMNILLPDSHCEEYYTFFHLSLQDFCAALYYVLEGLEIEPALCPLYVEKTKRSMELKQAGFHIHSLWMKRFLFGLVSEDVRRPLEVLLGCPVPLGVKQKLLHWVSLLGQQPNATTPGDTLDAFHCLFETQDKEFVRLALNSFQEVWLPINQNLDLIASSFCLQHCPYLRKIRVDVKGIFPRDESAEACPVVPLWMRDKTLIEEQWEDFCSMLGTHPHLRQLDLGSSILTERAMKTLCAKLRHPTCKIQTLMFRNAQITPGVQHLWRIVMANRNLRSLNLGGTHLKEEDVRMACEALKHPKCLLESLRLDCCGLTHACYLKISQILTTSPSLKSLSLAGNKVTDQGVMPLSDALRVSQCALQKLILEDCGITATGCQSLASALVSNRSLTHLCLSNNSLGNEGVNLLCRSMRLPHCSLQRLMLNQCHLDTAGCGFLALALMGNSWLTHLSLSMNPVEDNGVKLLCEVMREPSCHLQDLELVKCHLTAACCESLSCVISRSRHLKSLDLTDNALGDGGVAALCEGLKQKNSVLARLGLKACGLTSDCCEALSLALSCNRHLTSLNLVQNNFSPKGMMKLCSAFACPTSNLQIIGLWKWQYPVQIRKLLEEVQLLKPRVVIDGSWHSFDEDDRYWWKN

SEQ ID NO: 25018 - protein, 551 aa, Homo sapiens
MAAPVRLGRKRPLPACPNPLFVRWLTEWRDEATRSRRRTRFVFQKALRSLRRYPLPLRSGKEAKILQHFGDGLCRMLDERLQRHRTSGGDHAPDSPSGENSPAPQGRLAEVQDSSMPVPAQPKAGGSGSYWPARHSGARVILLVLYREHLNPNGHHFLTKEELLQRCAQKSPRVAPGSARPWPALRSLLHRNLVLRTHQPARYSLTPEGLELAQKLAESEGLSLLNVGIGPKEPPGEETAVPGAASAELASEAGVQQQPLELRPGEYRVLLCVDIGETRGGGHRPELLRELQRLHVTHTVRKLHVGDFVWVAQETNPRDPANPGELVLDHIVERKRLDDLCSSIIDGRFREQKFRLKRCGLERRVYLVEEHGSVHNLSLPESTLLQAVTNTQVIDGFFVKRTADIKESAAYLALLTRGLQRLYQGHTLRSRPWGTPGNPESGAMTSPNPLCSLLTFSDFNAGAIKNKAQSVREVFARQLMQVRGVSGEKAAALVDRYSTPASLLAAYDACATPKEQETLLSTIKCGRLQRNLGPALSRTLSQLYCSYGPLT

SEQ ID NO: 25019 - protein, 393 aa, Homo sapiens
MDENESNQSLMTSSQYPKEAVRKRQNSARNSGASDSSRFSRKSFKLDYRLEEDVTKSKKGKDGRFVNPWPTWKNPSIPNVLRWLIMEKDHSSVPSSKEELDKELPVLKPYFITNPEEAGVREAGLRVTWLGHATVMVEMDELIFLTDPIFSSRASPSQYMGPKRFRRSPCTISELPPIDAVLISHNHYDHLDYNSVIALNERFGNELRWFVPLGLLDWMQKCGCENVIELDWWEENCVPGHDKVTFVFTPSQHWCKRTLMDDNKVLWGSWSVLGPWNRFFFAGDTGYCPAFEEIGKRFGPFDLAAIPIGAYEPRWFMKYQHVDPEEAVRIHTDVQTKKSMAIHWGTFALANEHYLEPPVKLNEALERYGLNAEDFFVLKHGESRYLNNDDENF

SEQ ID NO: 25020 - protein, 198 aa, Homo sapiens
MVGQPQPRDDVGSPRPRVIVGTIRPRVIVGTIRPRVIVGSARARPPPDGTPRPQLAAEESPRPRVIFGTPRARVILGSPRPRVIVSSPWPAVVVASPRPRTPVGSPWPRVVVGTPRPRVIVGSPRARVADADPASAPSQGALQGRRQDEHSGTRAEGSRPGGAAPVPEEGGRFARAQRLPPPRHLRLPGAPDRHRGQI

SEQ ID NO: 25021 - protein, 420 aa, Homo sapiens
MSPPPLLQPLLLLLPLLNVEPSGATLIRIPLHRVQPGRRILNLLRGWREPAELPKLGAPSPGDKPIFVPLSNYRDVQYFGEIGLGTPPQNFTVAFDTGSSNLWVPSRRCHFFSVPCWLHHRFDPKASSSFQANGTKFAIQYGTGRVDGILSEDKLTIGGIKGASVIFGEALWEPSLVFAFAHFDGILGLGFPILSVEGVRPPMDVLVEQGLLDKPVFSFYLNRDPEEPDGGELVLGGSDPAHYIPPLTFVPVTVPAYWQIHMERVKVGPGLTLCAKGCAAILDTGTSLITGPTEEIRALHAAIGGIPLLAGEYIILCSEIPKLPAVSFLLGGVWFNLTAHDYVIQTTRNGVRLCLSGFQALDVPPPAGPFWILGDVFLGTYVAVFDRGDMKSSARVGLARARTRGADLGWGETAQAQFPG

SEQ ID NO: 25022 - protein, 206 aa, Homo sapiens
MSTGSVSDPEEMELRGLQREYPVPASKRPPLRGVERSYASPSDNSSAEEEDPDGEEERCALGTAGSAEGCKRKRPRVAGGGGAGGSAGGGGKKPLPAKGSAAECKQSQRNAANARERARMRVLSKAFSRLKTSLPWVPPDTKLSKLDTLRLASSYIAHLRQLLQEDRYENGYVHPVNLTWPFVVSGRPDSDTKEVSAANRLCGTTA

SEQ ID NO: 25023 - protein, 1377 aa, Homo sapiens
MDALNRNQIGPGCQTQTMVQKGPLDLIETGKGLKVQTDKPHLVSLGSGRLSTAITLLPLEEGRTVIGSAARDISLQGPGLAPEHCYIENLRGTLTLYPCGNACTIDGLPVRQPTRLTQGCMLCLGQSTFLRFNHPAEAKWMKSMIPAGGRAPGPPYSPVPAESESLVNGNHTPQTATRGPSACASHSSLVSSIEKDLQEIMDSLVLEEPGAAGKKPAATSPLSPMANGGRYLLSPPTSPGAMSVGSSYENTSPAFSPLSSPASSGSCASHSPSGQEPGPSVPPLVPARSSSYHLALQPPQSRPSGARSESPRLSRKGGHERPPSPGLRGLLTDSPAATVLAEARRATESPRLGGQLPVVAISLSEYPASGALSQPTSIPGSPKFQPPVPAPRNKIGTLQDRPPSPFREPPGSERVLTTSPSRQLVGRTFSDGLATRTLQPPESPRLGRRGLDSMRELPPLSPSLSRRALSPLPTRTTPDPKLNREVAESPRPRRWAAHGASPEDFSLTLGARGRRTRSPSPTLGESLAPHKGSFSGRLSPAYSLGSLTGASPCQSPCVQRKLSSGDLRVPVTRERKNSITEISDNEDDLLEYHRRQRQERLREQEMERLERQRLETILNLCAEYSRADGGPEAGELPSIGEATAALALAGRRPSRGLAGASGRSSEEPGVATQRLWESMERSDEENLKEECSSTESTQQEHEDAPSTKLQGEVLALEEERAQVLGHVEQLKVRVKELEQQLQESAREAEMERALLQGEREAERALLQKEQKAVDQLQEKLVALETGIQKERDKEAEALETETKLFEDLEFQQLERESRVEEERELAGQGLLRSKAELLRSIAKRKERLAILDSQAGQIRAQAVQESERLARDKNASLQLLQKEKEKLTVLERRYHSLTGGRPFPKTTSTLKEMEKLLLPAVDLEQWYQELMAGLGTGPAAASPHSSPPPLPAKASRQLQVYRSKMDGEATSPLPRTRSGPLPSSSGSSSSSSQLSVATLGRSPSPKSALLTQNGTGSLPRNLAATLQDIETKRQLALQQKGQQVIEEQRRRLAELKQKAAAEAQCQWDALHGAAPFPAGPSGFPPLMHHSILHHLPAGRERGEEGEHAYDTLSLESSDSMETSISTGGNSACSPDNMSSASGLDMGKIEEMEKMLKEAHAEKNRLMESREREMELRRQALEEERRRREQVERRLQSESARRQQLVEKEVKMREKQFSQARPLTRYLPIRKEDFDLKTHIESSGHGVDTCLHVVLSSKVCRGYLVKMGGKIKSWKKRWFVFDRLKRTLSYYVDKHETKLKGVIYFQAIEEVYYDHLRSAAKKRFFRFTMVTESPNPALTFCVKTHDRLYYMVAPSAEAMRIWMDVIVTGAEGYTQFMN

SEQ ID NO: 25024 - protein, 1319 aa, Homo sapiens
MDALNRNQIGPGCQTQTMVQKGPLDLIETGKGLKVQTDKPHLVSLGSGRLSTAITLLPLEEGRTVIGSAARDISLQGPGLAPEHCYIENLRGTLTLYPCGNACTIDGLPVRQPTRLTQGCMLCLGQSTFLRFNHPAEAKWMKSMIPAGGRAPGPPYSPVPAESESLVNGNHTPQTATRGPSACASHSSLVSSIEKDLQEIMDSLVLEEPGAAGKKPAATSPLSPMANGGRYLLSPPTSPGAMSVGSSYENTSPAFSPLSSPASSGSCASHSPSGQEPGPSVPPLVPARSSSYHLALQPPQSRPSGARSESPRLSRKGGHERPPSPGLRGLLTDSPAATVLAEARRATESPRLGGQLPVVAISLSEYPASGALSQPTSIPGSPKFQPPVPAPRNKIGTLQDRPPSPFREPPGSERVLTTSPSRQLVGRTFSDGLATRTLQPPESPRLGRRGLDSMRELPPLSPSLSRRALSPLPTRTTPDPKLNREVAESPRPRRWAAHGASPEDFSLTLGARGRRTRSPSPTLGESLAPHKGSFSGRLSPAYSLGSLTGASPCQSPCVQRKLSSGDLRVPVTRERKNSITEISDNEDDLLEYHRRQRQERLREQEMERLERQRLETILNLCAEYSRADGGPEAGELPSIGEATAALALAGRRPSRGLAGASGRSSEEPGVATQRLWESMERSDEENLKEECSSTESTQQEHEDAPSTKLQGEVLALEEERAQVLGHVEQLKVRVKELEQQLQESAREAEMERALLQGEREAERALLQKEQKAVDQLQEKLVALETGIQKERDKEAEALETETKLFEDLEFQQLERESRVEEERELAGQGLLRSKAELLRSIAKRKERLAILDSQAGQIRAQAVQESERLARDKNASLQLLQKEKEKLTVLERRYHSLTGGRPFPKTTSTLKEVYRSKMDGEATSPLPRTRSGPLPSSSGSSSSSSQLSVATLGRSPSPKSALLTQNGTGSLPRNLAATLQDIETKRQLALQQKGQQVIEEQRRRLAELKQKAAAEAQCQWDALHGAAPFPAGPSGFPPLMHHSILHHLPAGRERGEEGEHAYDTLSLESSDSMETSISTGGNSACSPDNMSSASGLDMGKIEEMEKMLKEAHAEKNRLMESREREMELRRQALEEERRRREQVERRLQSESARRQQLVEKEVKMREKQFSQARPLTRYLPIRKEDFDLKTHIESSGHGVDTCLHVVLSSKVCRGYLVKMGGKIKSWKKRWFVFDRLKRTLSYYVDKHETKLKGVIYFQAIEEVYYDHLRSAAKSPNPALTFCVKTHDRLYYMVAPSAEAMRIWMDVIVTGAEGYTQFMN

SEQ ID NO: 25025 - protein, 995 aa, Homo sapiens
MDALNRNQIGPGCQTQTMVQKGPLDLIETGKGLKVQTDKPHLVSLGSGRLSTAITLLPLEEGRTVIGSAARDISLQGPGLAPEHCYIENLRGTLTLYPCGNACTIDGLPVRQPTRLTQGCMLCLGQSTFLRFNHPAEAKWMKSMIPAGGRAPGPPYSPVPAESESLVNGNHTPQTATRGPSACASHSSLVSSIEKDLQEIMDSLVLEEPGAAGKKPAATSPLSPMANGGRYLLSPPTSPGAMSVGSSYENTSPAFSPLSSPASSGSCASHSPSGQEPGPSVPPLVPARSSSYHLALQPPQSRPSGARSESPRLSRKGGHERPPSPGLRGLLTDSPAATVLAEARRATESPRLGGQLPVVAISLSEYPASGALSQPTSIPGSPKFQPPVPAPRNKIGTLQDRPPSPFREPPGSERVLTTSPSRQLVGRTFSDGLATRTLQPPESPRLGRRGLDSMRELPPLSPSLSRRALSPLPTRTTPDPKLNREVAESPRPRRWAAHGASPEDFSLTLGARGRRTRSPSPTLGESLAPHKGSFSGRLSPAYSLGSLTGASPCQSPCVQRKLSSGDLRVPVTRERKNSITEISDNEDDLLEYHRRQRQERLREQEMERLERQRLETILNLCAEYSRADGGPEAGELPSIGEATAALALAGRRPSRGLAGASGRSSEEPGVATQRLWESMERSDEENLKEECSSTESTQQEHEDAPSTKLQGEVLALEEERAQVLGHVEQLKVRVKELEQQLQESAREAEMERALLQGEREAERALLQKEQKAVDQLQEKLVALETGIQKERDKEAEALETETKLFEDLEFQQLERESRVEEERELAGQGLLRSKAELLRSIAKRKERLAILDSQAGQIRAQAVQESERLARDKNASLQLLQKEKEKLTVLERRYHSLTGGRPFPKTTSTLKEVYRSKMDGEATSPLPRTRSGPLPSSSGSSSSSSQLSVATLGRSPSPKSALLTQNGTGSLPRNLAATLQDIETKRQLALQQKGE

SEQ ID NO: 25026 - protein, 876 aa, Homo sapiens
MDPGDPAGDPAAGERHRMGRDPLLLLQALQTLWSTRERKQLREEAWRGFAALDDPLAGLLDMLESCRGQRGEGPSLAAWISHQLQCWLQAQPCPSLAQHSLRLKQLQARAVKVLTESPPSLAAPLASIFQLQDADRSCLLAHVHRLHHEGRFREAATLGATLKLQSELGVEKMSIPLLLQDKVALVERYVAGFPDLQRRLLVLMDSWCQPGFDIKDVARRYPEVTSLSLEKLSPKALSRQVLRLQERYGVAPALCPNAAIQQRLAALRHLCHKRFVEKSLSQENWTDHVQGLVGQSPWLQEQLSQLLVSHSDPVTAAQCAMELLLPEERLPAAVAVELRRFRLQGRATEADSRLEVKDMKDRYYQLPIPRENVHLLASWEDLTRHEGALLQCHQVVGVDVEWTPVFVAGGRPRPSLLQVAVEGHVFLLDVLALSQPPTGQGAQAFSRLVAQLLSDPSITKLGYGMVGDLQKLGTSCPALAHVEKQILGGMDLLLVHRQMRVASVPAPAVDRARELRGLSLLVQQVLGTALDKTQQLSNWDRRPLCEEQVIYAAADAYCLLEVHQALCREPARFHLSEDLAGSRRPRHRERPGARKPPGLQKASAPAAPRQVPVAVAVSEGAAPQIPARAFRVVCDNMLQGLARSLRCLGVDARMLGNGEDHRRAAEVARQEGRIILTSGQPFHKLRAQVGAGRCLSVDCSLKAQQQAKAVLKHFNVRVTHADIFSRCQACNCDQYLKVSRDMMKQLMWLSSHQEGPRSSGDEATQSQAVQEPGPAPDAAPEGCTYDRPCRWLQMADLRAETPDMLADGTRLQLAGVPVGVLRTPGLRCFYCCTGCGKVFWDGSHLGRVATHFRDMLESAPSPCEPSPAPSPASSPF

SEQ ID NO: 25027 - protein, 599 aa, Homo sapiens
MSPSPSSRPPSSQGLVGQSPWLQEQLSQLLVSHSDPVTAAQCAMELLLPEERLPAAVAVELRRFRLQGRATEADSRLEVKDMKDRYYQLPIPRENVHLLASWEDLTRHEGALLQCHQVVGVDVEWTPVFVAGGRPRPSLLQVAVEGHVFLLDVLALSQPPTGQGAQAFSRLVAQLLSDPSITKLGYGMVGDLQKLGTSCPALAHVEKQILGGMDLLLVHRQMRVASVPAPAVDRARELRGLSLLVQQVLGTALDKTQQLSNWDRRPLCEEQVIYAAADAYCLLEVHQALCREPARFHLSEDLAGSRRPRHRERPGARKPPGLQKASAPAAPRQVPVAVAVSEGAAPQIPARAFRVVCDNMLQGLARSLRCLGVDARMLGNGEDHRRAAEVARQEGRIILTSGQPFHKLRAQVGAGRCLSVDCSLKAQQQAKAVLKHFNVRVTHADIFSRCQACNCDQYLKVSRDMMKQLMWLSSHQEGPRSSGDEATQSQAVQEPGPAPDAAPEGCTYDRPCRWLQMADLRAETPDMLADGTRLQLAGVPVGVLRTPGLRCFYCCTGCGKVFWDGSHLGRVATHFRDMLESAPSPCEPSPAPSPASSPF

SEQ ID NO: 25028 - protein, 514 aa, Homo sapiens
MELLLPEERLPAAVAVELRRFRLQGRATEADSRLEVKDMKDRYYQLPIPRENVHLLASWEDLTRHEGALLQCHQVVGVDVEWTPVFVAGGRPRPSLLQVAVEGHVFLLDVLALSQPPTGQGAQAFSRLVAQLLSDPSITKLGYGMVGDLQKLGTSCPALAHVEKQILGGMDLLLVHRQMRVASVPAPAVDRARELRGLSLLVQQVLGTALDKTQQLSNWDRRPLCEEQVIYAAADAYCLLEVHQALCREPARFHLSEDLAGSRRPRHRERPGARKPPGLQKASAPAAPRQGLARSLRCLGVDARMLGNGEDHRRAAEVARQEGRIILTSGQPFHKLRAQVGAGRCLSVDCSLKAQQQAKAVLKHFNVRVTHADIFSRCQACNCDQYLKVSRDMMKQLMWLSSHQEGPRSSGPAPDAAPEGCTYDRPCRWLQMADLRAETPDMLADGTRLQLAGVPVGVLRTPGLRCFYCCTGCGKVFWDGSHLGRVATHFRDMLESAPSPCEPSPAPSPASSPF

SEQ ID NO: 25029 - protein, 246 aa, Homo sapiens
MDPGDPAGDPAAGERHRMGRDPLLLLQALQTLWSTRERKQLREEAWRGFAALDDPLAGLLDMLESCRGQRGEGPSLAAWISHQLQCWLQAQPCPSLAQHSLRLKQLQARAVKVLTESPPSLAAPLASIFQLQDADRSCLLAHVHRLHHEGRFREAATLGATLKLQSELGVEKMSIPLLLQDKVALVERYVAGFPDLQRRLLVLMDSWCQPGFDIKDVASCHVTAAGAAASGEERLGLAGAQPSSPE

SEQ ID NO: 25030 - protein, 56 aa, Homo sapiens
MDPGDPAGDPAAGERHRMGTHRLLQPLLHLSRVGCFQSATPQLAGPLEQPRRPLEH

SEQ ID NO: 25031 - protein, 2063 aa, Homo sapiens
MVLDDLPNLEDIYTSLCSSTMEDSEMDFDSGLEDDDTKSDSILEDSTIFVAFKGNIDDKDFKWKLDAILKNVPNLLHMESSKLKVQKVEPWNSVRVTFNIPREAAERLRILAQSNNQQLRDLGILSVQIEGEGAINLALAQNRSQDVRMNGPMGAGNSVRMEAGFPMASGPGIIRMNNPATVMIPPGGNVSSSMMAPGPNPELQPRTPRPASQSDAMDPLLSGLHIQQQSHPSGSLAPPHHPMQPVSVNRQMNPANFPQLQQQQQQQQQQQQQQQQQQQQQQQQQLQARPPQQHQQQQPQGIRPQFTAPTQVPVPPGWNQLPSGALQPPPAQGSLGTMTANQGWKKAPLPGPMQQQLQARPSLATVQTPSHPPPPYPFGSQQASQAHTNFPQMSNPGQFTAPQMKSLQGGPSRVPTPLQQPHLTNKSPASSPSSFQQGSPASSPTVNQTQQQMGPRPPQNNPLPQGFQQPVSSPGRNPMVQQGNVPPNFMVMQQQPPNQGPQSLHPGLGGMPKRLPPGFSAGQANPNFMQGQVPSTTATTPGNSGAPQLQANQNVQHAGGQGAGPPQNQMQVSHGPPNMMQPSLMGIHGNMNNQQAGTSGVPQVNLSNMQGQPQQGPPSQLMGMHQQIVPSQGQMVQQQGTLNPQNPMILSRAQLMPQGQMMVNPPSQNLGPSPQRMTPPKQMLSQQGPQMMAPHNQMMGPQGQVLLQQNPMIEQIMTNQMQGNKQQFNTQNQSNVMPGPAQIMRGPTPNMQGNMVQFTGQMSGQMLPQQGPVNNSPSQVMGIQGQVLRPPGPSPHMAQQHGDPATTANNDVSLSQMMPDVSIQQTNMVPPHVQAMQGNSASGNHFSGHGMSFNAPFSGAPNGNQMSCGQNPGFPVNKDVTLTSPLLVNLLQSDISAGHFGVNNKQNNTNANKPKKKKPPRKKKNSQQDLNTPDTRPAGLEEADQPPLPGEQGINLDNSGPKLPEFSNRPPGYPSQPVEQRPLQQMPPQLMQHVAPPPQPPQQQPQPQLPQQQQPPPPSQPQSQQQQQQQQQMMMMLMMQQDPKSVRLPVSQNVHPPRGPLNPDSQRMPMQQSGSVPVMVSLQGPASVPPSPDKQRMPMPVNTPLGSNSRKMVYQESPQNPSSSPLAEMASLPEASGSEAPSVPGGPNNMPSHVVLPQNQLMMTGPKPGPSPLSATQGATPQQPPVNSLPSSHGHHFPNVAAPTQTSRPKTPNRASPRPYYPQTPNNRPPSTEPSEISLSPERLNASIAGLFPPQINIPLPPRPNLNRGFDQQGLNPTTLKAIGQAPSNLTMNPSNFATPQTHKLDSVVVNSGKQSNSGATKRASPSNSRRSSPGSSRKTTPSPGRQNSKAPKLTLASQTNAALLQNVELPRNVLVSPTPLANPPVPGSFPNNSGLNPQNSTVSVAAVGGVVEDNKESLNVPQDSDCQNSQSRKEQVNIELKAVPAQEVKMVVPEDQSKKDGQPSDPNKLPSVEENKNLVSPAMREAPTSLSQLLDNSGAPNVTIKPPGLTDLEVTPPVVSGEDLKKASVIPTLQDLSSSKEPSNSLNLPHSNELCSSLVHPELSEVSSNVAPSIPPVMSRPVSSSSISTPLPPNQITVFVTSNPITTSANTSAALPTHLQSALMSTVVTMPNAGSKVMVSEGQSAAQSNARPQFITPVFINSSSIIQVMKGSQPSTIPAAPLTTNSGLMPPSVAVVGPLHIPQNIKFSSAPVPPNALSSSPAPNIQTGRPLVLSSRATPVQLPSPPCTSSPVVPSHPPVQQVKELNPDEASPQVNTSADQNTLPSSQSTTMVSPLLTNSPGSSGNRRSPVSSSKGKGKVDKIGQILLTKACKKVTGSLEKGEEQYGADGETEGQGLDTTAPGLMGTEQLSTELDSKTPTPPAPTLLKMTSSPVGPGTASAGPSLPGGALPTSVRSIVTTLVPSELISAVPTTKSNHGGIASESLAGGLVEEKVGSHPELLPSIAPSQNLVSKETSTTALQASVARPELEVNAAIVSGQSSEPKEIVEKSKIPGRRNSRTEEPTVASESVENGHRKRSSRPASASSSTKDITSAVQSKRRKSK

SEQ ID NO: 25032 - protein, 788 aa, Homo sapiens
MAMESTATAAVAAELVSADKIEDVPAPSTSADKVESLDVDSEAKKLLGLGQKHLVMGDIPAAVNAFQEAASLLGKKYGETANECGEAFFFYGKSLLELARMENGVLGNALEGVHVEEEEGEKTEDESLVENNDNIDEEAREELREQVYDAMGEKEEAKKTEDKSLAKPETDKEQDSEMEKGGREDMDISKSAEEPQEKVDLTLDWLTETSEEAKGGAAPEGPNEAEVTSGKPEQEVPDAEEEKSVSGTDVQEECREKGGQEKQGEVIVSIEEKPKEVSEEQPVVTLEKQGTAVEVEAESLDPTVKPVDVGGDEPEEKVVTSENEAGKAVLEQLVGQEVPPAEESPEVTTEAAEASAVEAGSEVSEKPGQEAPVLPKDGAVNGPSVVGDQTPIEPQTSIERLTETKDGSGLEEKVRAKLVPSQEETKLSVEESEAAGDGVDTKVAQGATEKSPEDKVQIAANEETQEREEQMKEGEETEGSEEDDKENDKTEEMPNDSVLENKSLQENEEEEIGNLELAWDMLDLAKIIFKRQETKEAQLYAAQAHLKLGEVSVESENYVQAVEEFQSCLNLQEQYLEAHDRLLAETHYQLGLAYGYNSQYDEAVAQFSKSIEVIENRMAVLNEQVKEAEGSSAEYKKEIEELKELLPEIREKIEDAKESQRSGNVAELALKATLVESSTSGFTPGGGGSSVSMIASRKPTDGASSSNCVTDISHLVRKKRKPEEESPRKDDAKKAKQEPEVNGGSGDAVPSGNEVSENMEEEAENQAESRAAVEGTVEAGATVESTAC

SEQ ID NO: 25033 - protein, 449 aa, Homo sapiens
MAMESTATAAVAAELVSADKIEDVPAPSTSADKVESLDVDSEAKKLLGLGQKHLVMGDIPAAVNAFQEAASLLGKKYGETANECGEAFFFYGKSLLELARMENGVLGNALEGVHVEEEEGEKTEDESLVENNDNIDETEGSEEDDKENDKTEEMPNDSVLENKSLQENEEEEIGNLELAWDMLDLAKIIFKRQETKEAQLYAAQAHLKLGEVSVESENYVQAVEEFQSCLNLQEQYLEAHDRLLAETHYQLGLAYGYNSQYDEAVAQFSKSIEVIENRMAVLNEQVKEAEGSSAEYKKEIEELKELLPEIREKIEDAKESQRSGNVAELALKATLVESSTSGFTPGGGGSSVSMIASRKPTDGASSSNCVTDISHLVRKKRKPEEESPRKDDAKKAKQEPEVNGGSGDAVPSGNEVSENMEEEAENQAESRAAVEGTVEAGATVESTAC

SEQ ID NO: 25034 - protein, 790 aa, Homo sapiens
MFLLLLHLQIKWRATINLLSVTEDGLHFVEYYLNRIIHLDVDSEAKKLLGLGQKHLVMGDIPAAVNAFQEAASLLGKKYGETANECGEAFFFYGKSLLELARMENGVLGNALEGVHVEEEEGEKTEDESLVENNDNIDEEAREELREQVYDAMGEKEEAKKTEDKSLAKPETDKEQDSEMEKGGREDMDISKSAEEPQEKVDLTLDWLTETSEEAKGGAAPEGPNEAEVTSGKPEQEVPDAEEEKSVSGTDVQEECREKGGQEKQGEVIVSIEEKPKEVSEEQPVVTLEKQGTAVEVEAESLDPTVKPVDVGGDEPEEKVVTSENEAGKAVLEQLVGQEVPPAEESPEVTTEAAEASAVEAGSEVSEKPGQEAPVLPKDGAVNGPSVVGDQTPIEPQTSIERLTETKDGSGLEEKVRAKLVPSQEETKLSVEESEAAGDGVDTKVAQGATEKSPEDKVQIAANEETQEREEQMKEGEETEGSEEDDKENDKTEEMPNDSVLENKSLQENEEEEIGNLELAWDMLDLAKIIFKRQETKEAQLYAAQAHLKLGEVSVESENYVQAVEEFQSCLNLQEQYLEAHDRLLAETHYQLGLAYGYNSQYDEAVAQFSKSIEVIENRMAVLNEQVKEAEGSSAEYKKEIEELKELLPEIREKIEDAKESQRSGNVAELALKATLVESSTSGFTPGGGGSSVSMIASRKPTDGASSSNCVTDISHLVRKKRKPEEESPRKDDAKKAKQEPEVNGGSGDAVPSGNEVSENMEEEAENQAESRAAVEGTVEAGATVESTAC

SEQ ID NO: 25035 - protein, 724 aa, Homo sapiens
MAMESTATAAVAAELVSADKIEDVPAPSTSADKVERMENGVLGNALEGVHVEEEEGEKTEDESLVENNDNIDEEAREELREQVYDAMGEKEEAKKTEDKSLAKPETDKEQDSEMEKGGREDMDISKSAEEPQEKVDLTLDWLTETSEEAKGGAAPEGPNEAEVTSGKPEQEVPDAEEEKSVSGTDVQEECREKGGQEKQGEVIVSIEEKPKEVSEEQPVVTLEKQGTAVEVEAESLDPTVKPVDVGGDEPEEKVVTSENEAGKAVLEQLVGQEVPPAEESPEVTTEAAEASAVEAGSEVSEKPGQEAPVLPKDGAVNGPSVVGDQTPIEPQTSIERLTETKDGSGLEEKVRAKLVPSQEETKLSVEESEAAGDGVDTKVAQGATEKSPEDKVQIAANEETQEREEQMKEGEETEGSEEDDKENDKTEEMPNDSVLENKSLQENEEEEIGNLELAWDMLDLAKIIFKRQETKEAQLYAAQAHLKLGEVSVESENYVQAVEEFQSCLNLQEQYLEAHDRLLAETHYQLGLAYGYNSQYDEAVAQFSKSIEVIENRMAVLNEQVKEAEGSSAEYKKEIEELKELLPEIREKIEDAKESQRSGNVAELALKATLVESSTSGFTPGGGGSSVSMIASRKPTDGASSSNCVTDISHLVRKKRKPEEESPRKDDAKKAKQEPEVNGGSGDAVPSGNEVSENMEEEAENQAESRAAVEGTVEAGATVESTAC

SEQ ID NO: 25036 - protein, 206 aa, Homo sapiens
MAPSHLSVREMREDEKPLVLEMLKAGVKDTENRVALHALTRPPALLLLAAASSGLRFVLASFALALLLPVFLAVAAVKLGLRARWGSLPPPGGLGGPWVAVRGSGDVCGVLALAPGTNAGDGARVTRLSVSRWHRRRGVGRRLLAFAEARARAWAGGMGEPRARLVVPVAVAAWGVGGMLEGCGYQAEGGWGCLGYTLVREFSKDL

SEQ ID NO: 25037 - protein, 128 aa, Homo sapiens
MTGYTPDEKLRLQQLRELRRRWLKDQELSPREPVLPPQKMGPMEKFWNKFLENKSPWRKMVHGVYKKSIFVFTHVLVPVWIIHYYMKYHVSEKPYGIVEKKSRIFPGDTILETGEVIPPMKEFPDQHH

SEQ ID NO: 25038 - protein, 113 aa, Homo sapiens
MTGYTPDEKLRLQQLRELRRRWLKDQELSPREPVLPPQKMGPMEKFWNKFLENKSPWRKMVHGVYKKSIFVFTHVLVPVWIIHYYMKYHVSGDTILETGEVIPPMKEFPDQHH

SEQ ID NO: 25039 - protein, 284 aa, Homo sapiens
MASYPYRQGCPGAAGQAPGAPPGSYYPGPPNSGGQYGSGLPPGGGYGGPAPGGPYGPPAGGGPYGHPNPGMFPSGTPGGPYGGAAPGGPYGQPPPSSYGAQQPGLYGQGGAPPNVDPEAYSWFQSVDSDHSGYISMKELKQALVNCNWSSFNDETCLMMINMFDKTKSGRIDVYGFSALWKFIQQWKNLFQQYDRDRSGSISYTELQQALSQMGYNLSPQFTQLLVSRYCPRSANPAMQLDRFIQVCTQLQVLTEAFREKDTAVQGNIRLSFEDFVTMTASRML

SEQ ID NO: 25040 - protein, 708 aa, Homo sapiens
MTERRRDELSEEINNLREKVMKQSEENNNLQSQVQKLTEENTTLREQVEPTPEDEDDDIELRGAAAAAAPPPPIEEECPEDLPEKFDGNPDMLAPFMAQCQIFMEKSTRDFSVDRVRVCFVTSMMTGRAARWASAKLERSHYLMHNYPAFMMEMKHVFEDPQRREVAKRKIRRLRQGMGSVIDYSNAFQMIAQDLDWNEPALIDQYHEGLSDHIQEELSHLEVAKSLSALIGQCIHIERRLARAAAARKPRSPPRALVLPHIASHHQVDPTEPVGGARMRLTQEEKERRRKLNLCLYCGTGGHYADNCPAKASKSSPAGKLPGPAVEGPSATGPEIIRSPQDDASSPHLQVMLQIHLPGRHTLFVRAMIDSGASGNFIDHEYVAQNGIPLRIKDWPILVEAIDGRPIASGPVVHETHDLIVDLGDHREVLSFDVTQSPFFPVVLGVRWLSTHDPNITWSTRSIVFDSEYCRYHCRMYSPIPPSLPPPAPQPPLYYPVDGYRVYQPVRYYYVQNVYTPVDEHVYPDHRLVDPHIEMIPGAHSIPSGHVYSLSEPEMAALRDFVARNVKDGLITPTIAPNGAQVLQVKRGWKLQVSYDCRAPNNFTIQNQYPRLSIPNLEDQAHLATYTEFVPQIPGYQTYPTYAAYPTYPVGFAWYPVGRDGQGRSLYVPVMITWNPHWYRQPPVPQYPPPQPPPPPPPPPPPPSYSTL

SEQ ID NO: 25041 - protein, 325 aa, Homo sapiens
MTERRRDELSEEINNLREKVMKQSEENNNLQSQVQKLTEENTTLREQVEPTPEDEDDDIELRGAAAAAAPPPPIEEECPEDLPEKFDGNPDMLAPFMAQCQIFMEKSTRDFSVDRVRVCFVTSMMTGRAARWASAKLERSHYLMHNYPAFMMEMKHVFEDPQRREVAKRKIRRLRQGMGSVIDYSNAFQMIAQDLDWNEPALIDQYHEGLSDHIQEELSHLEVAKSLSALIGQCIHIERRLARAAAARKPRSPPRALVLPHIASHHQVDPTEPVGGARMRLTQEEKERRRKLNLCLYCGTGGHYADNCPAKASKSSPAGNSPAPL

SEQ ID NO: 25042 - protein, 1588 aa, Homo sapiens
MLPPKHLSATKPKKSWAPNLYELDSDLTKEPDVIIGEGPTDSEFFHQRFRNLIYVEFVGPRKTLIKLRNLCLDWLQPETRTKEEIIELLVLEQYLTIIPEKLKPWVRAKKPENCEKLVTLLENYKEMYQPEDDNNSDVTSDDDMTRNRRESSPPHSVHSFSDRDWDRRGRSRDMEPRDRWSHTRNPRSRMPPRDLSLPVVAKTSFEMDREDDRDSRAYESRSQDAESYQNVVDLAEDRKPHNTIQDNMENYRKLLSLVQLAEDDGHSHMTQGHSSRSKRSAYPSTSRGLKTMPEAKKSTHRRGICEDESSHGVIMEKFIKDVSRSSKSGRARESSDRSQRFPRMSDDNWKDISLNKRESVIQQRVYEGNAFRGGFRFNSTLVSRKRVLERKRRYHFDTDGKGSIHDQKGCPRKKPFECGSEMRKAMSVSSLSSLSSPSFTESQPIDFGAMPYVCDECGRSFSVISEFVEHQIMHTRENLYEYGESFIHSVAVSEVQKSQVGGKRFECKDCGETFNKSAALAEHRKIHARGYLVECKNQECEEAFMPSPTFSELQKIYGKDKFYECRVCKETFLHSSALIEHQKIHFGDDKDNEREHERERERERGETFRPSPALNEFQKMYGKEKMYECKVCGETFLHSSSLKEHQKIHTRGNPFENKGKVCEETFIPGQSLKRRQKTYNKEKLCDFTDGRDAFMQSSELSEHQKIHSRKNLFEGRGYEKSVIHSGPFTESQKSHTITRPLESDEDEKAFTISSNPYENQKIPTKENVYEAKSYERSVIHSLASVEAQKSHSVAGPSKPKVMAESTIQSFDAINHQRVRAGGNTSEGREYSRSVIHSLVASKPPRSHNGNELVESNEKGESSIYISDLNDKRQKIPARENPCEGGSKNRNYEDSVIQSVFRAKPQKSVPGEGSGEFKKDGEFSVPSSNVREYQKARAKKKYIEHRSNETSVIHSLPFGEQTFRPRGMLYECQECGECFAHSSDLTEHQKIHDREKPSGSRNYEWSVIRSLAPTDPQTSYAQEQYAKEQARNKCKDFRQFFATSEDLNTNQKIYDQEKSHGEESQGENTDGEETHSEETHGQETIEDPVIQGSDMEDPQKDDPDDKIYECEDCGLGFVDLTDLTDHQKVHSRKCLVDSREYTHSVIHTHSISEYQRDYTGEQLYECPKCGESFIHSSFLFEHQRIHEQDQLYSMKGCDDGFIALLPMKPRRNRAAERNPALAGSAIRCLLCGQGFIHSSALNEHMRLHREDDLLEQSQMAEEAIIPGLALTEFQRSQTEERLFECAVCGESFVNPAELADHVTVHKNEPYEYGSSYTHTSFLTEPLKGAIPFYECKDCGKSFIHSTVLTKHKELHLEEEEEDEAAAAAAAAAQEVEANVHVPQVVLRIQGLNVEAAEPEVEAAEPEVEAAEPEVEAAEPNGEAEGPDGEAAEPIGEAGQPNGEAEQPNGDADEPDGAGIEDPEERAEEPEGKAEEPEGDADEPDGVGIEDPEEGEDQEIQVEEPYYDCHECTETFTSSTAFSEHLKTHASMIIFEPANAFGECSGYIERASTSTGGANQADEKYFKCDVCGQLFNDRLSLARHQNTHTG

SEQ ID NO: 25043 - protein, 1462 aa, Homo sapiens
MYQPEDDNNSDVTSDDDMTRNRRESSPPHSVHSFSDRDWDRRGRSRDMEPRDRWSHTRNPRSRMPPRDLSLPVVAKTSFEMDREDDRDSRAYESRSQDAESYQNVVDLAEDRKPHNTIQDNMENYRKLLSLVQLAEDDGHSHMTQGHSSRSKRSAYPSTSRGLKTMPEAKKSTHRRGICEDESSHGVIMEKFIKDVSRSSKSGRARESSDRSQRFPRMSDDNWKDISLNKRESVIQQRVYEGNAFRGGFRFNSTLVSRKRVLERKRRYHFDTDGKGSIHDQKGCPRKKPFECGSEMRKAMSVSSLSSLSSPSFTESQPIDFGAMPYVCDECGRSFSVISEFVEHQIMHTRENLYEYGESFIHSVAVSEVQKSQVGGKRFECKDCGETFNKSAALAEHRKIHARGYLVECKNQECEEAFMPSPTFSELQKIYGKDKFYECRVCKETFLHSSALIEHQKIHFGDDKDNEREHERERERERGETFRPSPALNEFQKMYGKEKMYECKVCGETFLHSSSLKEHQKIHTRGNPFENKGKVCEETFIPGQSLKRRQKTYNKEKLCDFTDGRDAFMQSSELSEHQKIHSRKNLFEGRGYEKSVIHSGPFTESQKSHTITRPLESDEDEKAFTISSNPYENQKIPTKENVYEAKSYERSVIHSLASVEAQKSHSVAGPSKPKVMAESTIQSFDAINHQRVRAGGNTSEGREYSRSVIHSLVASKPPRSHNGNELVESNEKGESSIYISDLNDKRQKIPARENPCEGGSKNRNYEDSVIQSVFRAKPQKSVPGEGSGEFKKDGEFSVPSSNVREYQKARAKKKYIEHRSNETSVIHSLPFGEQTFRPRGMLYECQECGECFAHSSDLTEHQKIHDREKPSGSRNYEWSVIRSLAPTDPQTSYAQEQYAKEQARNKCKDFRQFFATSEDLNTNQKIYDQEKSHGEESQGENTDGEETHSEETHGQETIEDPVIQGSDMEDPQKDDPDDKIYECEDCGLGFVDLTDLTDHQKVHSRKCLVDSREYTHSVIHTHSISEYQRDYTGEQLYECPKCGESFIHSSFLFEHQRIHEQDQLYSMKGCDDGFIALLPMKPRRNRAAERNPALAGSAIRCLLCGQGFIHSSALNEHMRLHREDDLLEQSQMAEEAIIPGLALTEFQRSQTEERLFECAVCGESFVNPAELADHVTVHKNEPYEYGSSYTHTSFLTEPLKGAIPFYECKDCGKSFIHSTVLTKHKELHLEEEEEDEAAAAAAAAAQEVEANVHVPQVVLRIQGLNVEAAEPEVEAAEPEVEAAEPEVEAAEPNGEAEGPDGEAAEPIGEAGQPNGEAEQPNGDADEPDGAGIEDPEERAEEPEGKAEEPEGDADEPDGVGIEDPEEGEDQEIQVEEPYYDCHECTETFTSSTAFSEHLKTHASMIIFEPANAFGECSGYIERASTSTGGANQADEKYFKCDVCGQLFNDRLSLARHQNTHTG

SEQ ID NO: 25044 - protein, 520 aa, Homo sapiens
MLPPKHLSATKPKKSWAPNLYELDSDLTKEPDVIIGEGPTDSEFFHQRFRNLIYVEFVGPRKTLIKLRNLCLDWLQPETRTKEEIIELLVLEQYLTIIPEKLKPWVRAKKPENCEKLVTLLENYKEMYQPEDDNNSDVTSDDDMTRNRRESSPPHSVHSFSDRDWDRRGRSRDMEPRDRWSHTRNPRSRMPPRDLSLPVVAKTSFEMDREDDRDSRAYESRSQDAESYQNVVDLAEDRKPHNTIQDNMENYRKLLSLGLKTMPEAKKSTHRRGICEDESSHGVIMEKFIKDVSRSSKSGRARESSDRSQRFPRMSDDNWKDISLNKRESVIQQRVYEGNAFRGGFRFNSTLVSRKRVLERKRRYHFDTDGKGSIHDQKGCPRKKPFECGSEMRKAMSVSSLSSLSSPSFTESQPIDFGAMPYVCDECGRSFSVISEFVEHQIMHTRENLYEYGESFIHSVAVSEVQKSQVGGKRFECKDCGETFNKSAALAEHRKIHARGYLVECKNQECEEAFMPNPCL

SEQ ID NO: 25045 - protein, 1464 aa, Homo sapiens
MYQPEDDNNSDVTSDDDMTRNRRESSPPHSVHSFSGDRDWDRRGRSRDMEPRDRWSHTRNPRSRMPPRDLSLPVVAKTSFEMDREDDRDSRAYESRSQDAESYQNVVDLAEDRKPHNTIQDNMENYRKLLSLGVQLAEDDGHSHMTQGHSSRSKRSAYPSTSRGLKTMPEAKKSTHRRGICEDESSHGVIMEKFIKDVSRSSKSGRARESSDRSQRFPRMSDDNWKDISLNKRESVIQQRVYEGNAFRGGFRFNSTLVSRKRVLERKRRYHFDTDGKGSIHDQKGCPRKKPFECGSEMRKAMSVSSLSSLSSPSFTESQPIDFGAMPYVCDECGRSFSVISEFVEHQIMHTRENLYEYGESFIHSVAVSEVQKSQVGGKRFECKDCGETFNKSAALAEHRKIHARGYLVECKNQECEEAFMPSPTFSELQKIYGKDKFYECRVCKETFLHSSALIEHQKIHFGDDKDNEREHERERERERGETFRPSPALNEFQKMYGKEKMYECKVCGETFLHSSSLKEHQKIHTRGNPFENKGKVCEETFIPGQSLKRRQKTYNKEKLCDFTDGRDAFMQSSELSEHQKIHSRKNLFEGRGYEKSVIHSGPFTESQKSHTITRPLESDEDEKAFTISSNPYENQKIPTKENVYEAKSYERSVIHSLASVEAQKSHSVAGPSKPKVMAESTIQSFDAINHQRVRAGGNTSEGREYSRSVIHSLVASKPPRSHNGNELVESNEKGESSIYISDLNDKRQKIPARENPCEGGSKNRNYEDSVIQSVFRAKPQKSVPGEGSGEFKKDGEFSVPSSNVREYQKARAKKKYIEHRSNETSVIHSLPFGEQTFRPRGMLYECQECGECFAHSSDLTEHQKIHDREKPSGSRNYEWSVIRSLAPTDPQTSYAQEQYAKEQARNKCKDFRQFFATSEDLNTNQKIYDQEKSHGEESQGENTDGEETHSEETHGQETIEDPVIQGSDMEDPQKDDPDDKIYECEDCGLGFVDLTDLTDHQKVHSRKCLVDSREYTHSVIHTHSISEYQRDYTGEQLYECPKCGESFIHSSFLFEHQRIHEQDQLYSMKGCDDGFIALLPMKPRRNRAAERNPALAGSAIRCLLCGQGFIHSSALNEHMRLHREDDLLEQSQMAEEAIIPGLALTEFQRSQTEERLFECAVCGESFVNPAELADHVTVHKNEPYEYGSSYTHTSFLTEPLKGAIPFYECKDCGKSFIHSTVLTKHKELHLEEEEEDEAAAAAAAAAQEVEANVHVPQVVLRIQGLNVEAAEPEVEAAEPEVEAAEPEVEAAEPNGEAEGPDGEAAEPIGEAGQPNGEAEQPNGDADEPDGAGIEDPEERAEEPEGKAEEPEGDADEPDGVGIEDPEEGEDQEIQVEEPYYDCHECTETFTSSTAFSEHLKTHASMIIFEPANAFGECSGYIERASTSTGGANQADEKYFKCDVCGQLFNDRLSLARHQNTHTG

SEQ ID NO: 25046 - protein, 840 aa, Homo sapiens
MSAFRLWPGLLIMLGSLCHRGSPCGLSTHVEIGHRALEFLQLHNGRVNYRELLLEHQDAYQAGIVFPDCFYPSICKGGKFHDVSESTHWTPFLNASVHYIRENYPLPWEKDTEKLVAFLFGITSHMAADVSWHSLGLEQGFLRTMGAIDFHGSYSEAHSAGDFGGDVLSQFEFNFNYLARRWYVPVKDLLGIYEKLYGRKVITENVIVDCSHIQFLEMYGEMLAVSKLYPTYSTKSPFLVEQFQEYFLGGLDDMAFWSTNIYHLTSFMLENGTSDCNLPENPLFIACGGQQNHTQGSKMQKNDFHRNLTTSLTESVDRNINYTERGVFFSVNSWTPDSMSFIYKALERNIRTMFIGGSQLSQKHVSSPLASYFLSFPYARLGWAMTSADLNQDGHGDLVVGAPGYSRPGHIHIGRVYLIYGNDLGLPPVDLDLDKEAHRILEGFQPSGRFGSALAVLDFNVDGVPDLAVGAPSVGSEQLTYKGAVYVYFGSKQGGMSSSPNITISCQDIYCNLGWTLLAADVNGDSEPDLVIGSPFAPGGGKQKGIVAAFYSGPSLSDKEKLNVEAANWTVRGEEDFSWFGYSLHGVTVDNRTLLLVGSPTWKNASRLGHLLHIRDEKKSLGRVYGYFPPNGQSWFTISGDKAMGKLGTSLSSGHVLMNGTLKQVLLVGAPTYDDVSKVAFLTVTLHQGGATRMYALTSDAQPLLLSTFSGDRRFSRFGGVLHLSDLDDDGLDEIIMAAPLRIADVTSGLIGGEDGRVYVYNGKETTLGDMTGKCKSWITPCPEEKAQYVLISPEASSRFGSSLITVRSKAKNQVVIAAGRSSLGARLSGALHVYSLGSD

SEQ ID NO: 25047 - protein, 176 aa, Homo sapiens
MSAFRLWPGLLIMLGSLCHRGSPCGLSTHVEIGHRALEFLQLHNGRVNYRELLLEHQDAYQAGIVFPDCFYPSICKGGKFHDVSESTHWTPFLNASVHYIRENYPLPWEKDTEKLVAFLFGITSHMAADVSWHSLGLEQGFLRTMGAIDFHGSYSEAHSAGDFGTVYLHLLNFLVV

SEQ ID NO: 25048 - protein, 326 aa, Homo sapiens
MAPAAASPPEVIRAAQKDEYYRGGLRSAAGGALHSLAGARKWLEWRKEVELLSDVAYFGLTTLAGYQTLGEEYVSIIQVDPSRIHVPSSLRRGVLVTLHAVLPYLLDKALLPLEQELQADPDSGRPLQGSLGPGGRGCSGARRWMRHHTATLTEQQRRALLRAVFVLRQGLACLQRLHVAWFYIHGVFYHLAKRLTGITYLRVRSLPGEDLRARVSYRLLGVISLLHLVLSMGLQLYGFRQRQRARKEWRLHRGLSHRRASLEERAVSRNPLCTLCLEERRHPTATPCGHLFCWECITAWCSSKAECPLCREKFPPQKLIYLRHYR

SEQ ID NO: 25049 - protein, 346 aa, Homo sapiens
MAPAAASPPEVIRAAQKDEYYRGGLRSAAGGALHSLAGARKWLEWRKEVELLSDVAYFGLTTLAGYQTLGEEYVSIIQVDPSRIHVPSSLRRGVLVTLHAVLPYLLDKALLPLEQELQADPDSGRPLQGSLGPGGRGCSGARRWMRHHTATLTEQQRRALLRAVFVLRQGLACLQRLHVAWFYIHGVFYHLAKRLTGITYQALRPDPLRVLMSVAPSALQLRVRSLPGEDLRARVSYRLLGVISLLHLVLSMGLQLYGFRQRQRARKEWRLHRGLSHRRASLEERAVSRNPLCTLCLEERRHPTATPCGHLFCWECITAWCSSKAECPLCREKFPPQKLIYLRHYR

SEQ ID NO: 25050 - protein, 1717 aa, Homo sapiens
MEPAAAATVQRLPELGREDRASAPAAAAAAAAAAAAAAAALAAAAGGGRSPEPALTPAAPSGGNGSGSGAREEAPGEAPPGPLPGRAGGAGRRRRRGAPQPIAGGAAPVPGAGGGANSLLLRRGRLKRNLSAAAAAASSSSSSSAAAASHSPGAAGLPASCSASASLCTRSLDRKTLLLKHRQTLQLQPSDRDWVRHQLQRGCVHVFDRHMASTYLRPVLCTLDTTAGEVAARLLQLGHKGGGVVKVLGQGPGAAAAREPAEPPPEAGPRLAPPEPRDSEVPPARSAPGAFGGPPRAPPADLPLPVGGPGGWSRRASPAPSDSSPGEPFVGGPVSSPRAPRPVVSDTESFSLSPSAESVSDRLDPYSSGGGSSSSSEELEADAASAPTGVPGQPRRPGHPAQPLPLPQTASSPQPQQKAPRAIDSPGGAVREGSCEEKAAAAVAPGGLQSTPGRSGVTAEKAPPPPPPPTLYVQLHGETTRRLEAEEKPLQIQNDYLFQLGFGELWRVQEEGMDSEIGCLIRFYAGKPHSTGSSERIQLSGMYNVRKGKMQLPVNRWTRRQVILCGTCLIVSSVKDSLTGKMHVLPLIGGKVEEVKKHQHCLAFSSSGPQSQTYYICFDTFTEYLRWLRQVSKVASQRISSVDLSCCSLEHLPANLFYSQDLTHLNLKQNFLRQNPSLPAARGLNELQRFTKLKSLNLSNNHLGDFPLAVCSIPTLAELNVSCNALRSVPAAVGVMHNLQTFLLDGNFLQSLPAELENMKQLSYLGLSFNEFTDIPEVLEKLTAVDKLCMSGNCVETLRLQALRKMPHIKHVDLRLNVIRKLIADEVDFLQHVTQLDLRDNKLGDLDAMIFNNIEVLHCERNQLVTLDICGYFLKALYASSNELVQLDVYPVPNYLSYMDVSRNRLENVPEWVCESRKLEVLDIGHNQICELPARLFCNSSLRKLLAGHNQLARLPERLERTSVEVLDVQHNQLLELPPNLLMKADSLRFLNASANKLESLPPATLSEETNSILQELYLTNNSLTDKCVPLLTGHPHLKILHMAYNRLQSFPASKMAKLEELEEIDLSGNKLKAIPTTIMNCRRMHTVIAHSNCIEVFPEVMQLPEIKCVDLSCNELSEVTLPENLPPKLQELDLTGNPRLVLDHKTLELLNNIRCFKIDQPSTGDASGAPAVWSHGYTEASGVKNKLCVAALSVNNFCDNREALYGVFDGDRNVEVPYLLQCTMSDILAEELQKTKNEEEYMVNTFIVMQRKLGTAGQKLGGAAVLCHIKHDPVDPGGSFTLTSANVGKCQTVLCRNGKPLPLSRSYIMSCEEELKRIKQHKAIITEDGKVNGVTESTRILGYTFLHPSVVPRPHVQSVLLTPQDEFFILGSKGLWDSLSVEEAVEAVRNVPDALAAAKKLCTLAQSYGCHDSISAVVVQLSVTEDSFCCCELSAGGAVPPPSPGIFPPSVNMVIKDRPSDGLGVPSSSSGMASEISSELSTSEMSSEVGSTASDEPPPGALSENSPAYPSEQRCMLHPICLSNSFQRQLSSATFSSAFSDNGLDSDDEEPIEGVFTNGSRVEVEVDIHCSRAKEKEKQQHLLQVPAEASDEGIVISANEDEPGLPRKADFSAVGTIGRRRANGSVAPQERSHNVIEVATDAPLRKPGGYFAAPAQPDPDDQFIIPPELEEEVKEIMKHHQEQQQQQQPPPPPQLQPQLPRHYQLDQLPDYYDTPL

SEQ ID NO: 25051 - protein, 1205 aa, Homo sapiens
MDSEIGCLIRFYAGKPHSTGSSERIQLSGMYNVRKGKMQLPVNRWTRRQVILCGTCLIVSSVKDSLTGKMHVLPLIGGKVEEVKKHQHCLAFSSSGPQSQTYYICFDTFTEYLRWLRQVSKVASQRISSVDLSCCSLEHLPANLFYSQDLTHLNLKQNFLRQNPSLPAARGLNELQRFTKLKSLNLSNNHLGDFPLAVCSIPTLAELNVSCNALRSVPAAVGVMHNLQTFLLDGNFLQSLPAELENMKQLSYLGLSFNEFTDIPEVLEKLTAVDKLCMSGNCVETLRLQALRKMPHIKHVDLRLNVIRKLIADEVDFLQHVTQLDLRDNKLGDLDAMIFNNIEVLHCERNQLVTLDICGYFLKALYASSNELVQLDVYPVPNYLSYMDVSRNRLENVPEWVCESRKLEVLDIGHNQICELPARLFCNSSLRKLLAGHNQLARLPERLERTSVEVLDVQHNQLLELPPNLLMKADSLRFLNASANKLESLPPATLSEETNSILQELYLTNNSLTDKCVPLLTGHPHLKILHMAYNRLQSFPASKMAKLEELEEIDLSGNKLKAIPTTIMNCRRMHTVIAHSNCIEVFPEVMQLPEIKCVDLSCNELSEVTLPENLPPKLQELDLTGNPRLVLDHKTLELLNNIRCFKIDQPSTGDASGAPAVWSHGYTEASGVKNKLCVAALSVNNFCDNREALYGVFDGDRNVEVPYLLQCTMSDILAEELQKTKNEEEYMVNTFIVMQRKLGTAGQKLGGAAVLCHIKHDPVDPGGSFTLTSANVGKCQTVLCRNGKPLPLSRSYIMSCEEELKRIKQHKAIITEDGKVNGVTESTRILGYTFLHPSVVPRPHVQSVLLTPQDEFFILGSKGLWDSLSVEEAVEAVRNVPDALAAAKKLCTLAQSYGCHDSISAVVVQLSVTEDSFCCCELSAGGAVPPPSPGIFPPSVNMVIKDRPSDGLGVPSSSSGMASEISSELSTSEMSSEVGSTASDEPPPGALSENSPAYPSEQRCMLHPICLSNSFQRQLSSATFSSAFSDNGLDSDDEEPIEGVFTNGSRVEVEVDIHCSRAKEKEKQQHLLQVPAEASDEGIVISANEDEPGLPRKADFSAVGTIGRRRANGSVAPQERSHNVIEVATDAPLRKPGGYFAAPAQPDPDDQFIIPPELEEEVKEIMKHHQEQQQQQQPPPPPQLQPQLPRHYQLDQLPDYYDTPL

SEQ ID NO: 25052 - protein, 359 aa, Homo sapiens
MAEHGAHFTAASVADDQPSIFEVVAQDSLMTAVRPALQHVVKVLAESNPTHYGFLWRWFDEIFTLLDLLLQQHYLSRTSASFSENFYGLKRIVMGDTHKSQRLASAGLPKQQLWKSIMFLVLLPYLKVKLEKLVSSLREEDEYSIHPPSSRWKRFYRAFLAAYPFVNMAWEGWFLVQQLRYILGKAQHHSPLLRLAGVQLGRLTVQDIQALEHKPAKASMMQQPARSVSEKINSALKKAVGGVALSLSTGLSVGVFFLQFLDWWYSSENQETIKSLTALPTPPPPVHLDYNSDSPLLPKMKTVCPLCRKTRVNDTVLATSGYVFCYRCVFHYVRSHQACPITGYPTEVQHLIKLYSPEN

SEQ ID NO: 25053 - protein, 267 aa, Homo sapiens
MSGCFPVSGLRCLSRDGRMAAQGAPRFLLTFDFDETIVDENSDDSIVRAAPGQRLPESLRATYREGFYNEYMQRVFKYLGEQGVRPRDLSAIYEAIPLSPGMSDLLQFVAKQGACFEVILISDANTFGVESSLRAAGHHSLFRRILSNPSGPDARGLLALRPFHTHSCARCPANMCKHKVLSDYLRERAHDGVHFERLFYVGDGANDFCPMGLLAGGDVAFPRRGYPMHRLIQEAQKAEPSSFRASVVPWETAADVRLHLQQVLKSC

SEQ ID NO: 25054 - protein, 290 aa, Homo sapiens
MCQRLWPANQPLPGGLLPRPLSLAPSSSSSCCSPPCSQDGRMAAQGAPRFLLTFDFDETIVDENSDDSIVRAAPGQRLPESLRATYREGFYNEYMQRVFKYLGEQGVRPRDLSAIYEAIPLSPGMSDLLQFVAKQGACFEVILISDANTFGVESSLRAAGHHSLFRRILSNPSGPDARGLLALRPFHTHSCARCPANMCKHKVLSDYLRERAHDGVHFERLFYVGDGANDFCPMGLLAGGDVAFPRRGYPMHRLIQEAQKAEPSSFRASVVPWETAADVRLHLQQVLKSC

SEQ ID NO: 25055 - protein, 292 aa, Homo sapiens
MCQRLWPWPANQPLPGGLLPRPLSLAPSSSSSCCSPPCSQDGRMAAQGAPRFLLTFDFDETIVDENSDDSIVRAAPGQRLPESLRATYREGFYNEYMQRVFKYLGEQGVRPRDLSAIYEAIPLSPGMSDLLQFVAKQGACFEVILISDANTFGVESSLRAAGHHSLFRRILSNPSGPDARGLLALRPFHTHSCARCPANMCKHKVLSDYLRERAHDGVHFERLFYVGDGANDFCPMGLLAGGDVAFPRRGYPMHRLIQEAQKAEPSSFRASVVPWETAADVRLHLQQVLKSC

SEQ ID NO: 25056 - protein, 241 aa, Homo sapiens
MKILLVFDFDNTIIDDNSDTWIVQCAPNKKLPIELRDSYRKGFWTEFMGRVFKYLGDKGVREHEMKRAVTSLPFTPGMVELFNFIRKNKDKFDCIIISDSNSVFIDWVLEAASFHDIFDKVFTNPAAFNSNGHLTVENYHTHSCNRCPKNLCKKVVLIEFVDKQLQQGVNYTQIVYIGDGGNDVCPVTFLKNDDVAMPRKGYTLQKTLSRMSQNLEPMEYSVVVWSSGVDIISHLQFLIKD

SEQ ID NO: 25057 - protein, 403 aa, Homo sapiens
MASQPPPPPKPWETRRIPGAGPGPGPGPTFQSADLGPTLMTRPGQPALTRVPPPILPRPSQQTGSSSVNTFRPAYSSFSSGYGAYGNSFYGGYSPYSYGYNGLGYNRLRVDDLPPSRFVQQAEESSRGAFQSIESIVHAFASVSMMMDATFSAVYNSFRAVLDVANHFSRLKIHFTKVFSAFALVRTIRYLYRRLQRMLGLRRGSENEDLWAESEGTVACLGAEDRAATSAKSWPIFLFFAVILGGPYLIWKLLSTHSDEVTDSINWASGEDDHVVARAEYDFAAVSEEEISFRAGDMLNLALKEQQPKVRGWLLASLDGQTTGLIPANYVKILGKRKGRKTVESSKVSKQQQSFTNPTLTKGATVADSLDEQEAAFESVFVETNKVPVAPDSIGKDGEKQDL

SEQ ID NO: 25058 - protein, 267 aa, Homo sapiens
MAAGVIRPLCDFQLPLLRHHPFLPSDPEPPETSEEEEEEEEEEEEEEGEGEGLGGCGRILPSSGRAEATEEAAPEGPGSPETPLQLLRFSELISDDIRRYFGRKDKGQDPDACDVYADSRPPRSTARELYYADLVRLARGGSLEDEDTPEPRVPQGQVCRPGLSGDRAQPLGPLAELFDYGLQQYWGSRAAAGWSLTLERKYGHITPMAQRKLPPSFWKEPTPSPLGLLHPGTPDFSDLLASWSTEACPELPGRGTPALEGARPAEA

SEQ ID NO: 25059 - protein, 377 aa, Homo sapiens
MASSEQAEQPSQPSSTPGSENVLPREPLIATAVKFLQNSRVRQSPLATRRAFLKKKGLTDEEIDMAFQQSGTAADEPSSLGPATQVVPVQPPHLISQPYSPAGSRWRDYGALAIIMAGIAFGFHQLYKKYLLPLILGGREDRKQLERMEAGLSELSGSVAQTVTQLQTTLASVQELLIQQQQKIQELAHELAAAKATTSTNWILESQNINELKSEINSLKGLLLNRRQFPPSPSAPKIPSWQIPVKSPSPSSPAAVNHHSSSDISPVSNESTSSSPGKEGHSPEGSTVTYHLLGPQEEGEGVVDVKGQVRMEVQGEEEKREDKEDEEDEEDDDVSHVDEEDCLGVQREDRRGGDGQINEQVEKLRRPEGASNESERD

SEQ ID NO: 25060 - protein, 334 aa, Homo sapiens
MASSEQAEQPSQPSSTPGSENVLPREPLIATAVKFLQNSRVRQSPLATRRAFLKKKGPAGSRWRDYGALAIIMAGIAFGFHQLYKKYLLPLILGGREDRKQLERMEAGLSELSGSVAQTVTQLQTTLASVQELLIQQQQKIQELAHELAAAKATTSTNWILESQNINELKSEINSLKGLLLNRRQFPPSPSAPKIPSWQIPVKSPSPSSPAAVNHHSSSDISPVSNESTSSSPGKEGHSPEGSTVTYHLLGPQEEGEGVVDVKGQVRMEVQGEEEKREDKEDEEDEEDDDVSHVDEEDCLGVQREDRRGGDGQINEQVEKLRRPEGASNESERD

SEQ ID NO: 25061 - protein, 418 aa, Homo sapiens
MFSPDQENHPSKAPVKYGELIVLGYNGSLPNGDRGRRKSRFALFKRPKANGVKPSTVHIACTPQAAKAISNKDQHSISYTLSRAQTVVVEYTHDSNTDMFQIGRSTESPIDFVVTDTVPGSQSNSDTQSVQSTISRFACRIICERNPPFTARIYAAGFDSSKNIFLGEKAAKWKTSDGQMDGLTTNGVLVMHPRNGFTEDSKPGIWREISVCGNVFSLRETRSAQQRGKMVEIETNQLQDGSLIDLCGATLLWRTAEGLSHTPTVKHLEALRQEINAARPQCPVGFNTLAFPSMKRKDVVDEKQPWVYLNCGHVHGYHNWGNKEERDGKDRECPMCRSVGPYVPLWLGCEAGFYVDAGPPTHAFSPCGHVCSEKTTAYWSQIPLPHGTHTFHAACPFCAHQLAGEQGYIRLIFQGPLD

SEQ ID NO: 25062 - protein, 715 aa, Homo sapiens
MHLLPALAGVLATLVLAQPCEGTDPASPGAVETSVLRDCIAEAKLLVDAAYNWTQKSIKQRLRSGSASPMDLLSYFKQPVAATRTVVRAADYMHVALGLLEEKLQPQRSGPFNVTDVLTEPQLRLLSQASGCALRDQAERCSDKYRTITGRCNNKRRPLLGASNQALARWLPAEYEDGLSLPFGWTPSRRRNGFLLPLVRAVSNQIVRFPNERLTSDRGRALMFMQWGQFIDHDLDFSPESPARVAFTAGVDCERTCAQLPPCFPIKIPPNDPRIKNQRDCIPFFRSAPSCPQNKNRVRNQINALTSFVDASMVYGSEVSLSLRLRNRTNYLGLLAINQRFQDNGRALLPFDNLHDDPCLLTNRSARIPCFLAGDTRSTETPKLAAMHTLFMREHNRLATELRRLNPRWNGDKLYNEARKIMGAMVQIITYRDFLPLVLGKARARRTLGHYRGYCSNVDPRVANVFTLAFRFGHTMLQPFMFRLDSQYRASAPNSHVPLSSAFFASWRIVYEGGIDPILRGLMATPAKLNRQDAMLVDELRDRLFRQVRRIGLDLAALNMQRSRDHGLPGYNAWRRFCGLSQPRNLAQLSRVLKNQDLARKFLNLYGTPDNIDIWIGAIAEPLLPGARVGPLLACLFENQFRRARDGDRFWWQKRGVFTKRQRKALSRISLSRIICDNTGITTVSRDIFRANIYPRGFVNCSRIPRLNLSAWRGT

SEQ ID NO: 25063 - protein, 420 aa, Homo sapiens
MFSPGQEEHCAPNKEPVKYGELVVLGYNGALPNGDRGRRKSRFALYKRPKANGVKPSTVHVISTPQASKAISCKGQHSISYTLSRNQTVVVEYTHDKDTDMFQVGRSTESPIDFVVTDTISGSQNTDEAQITQSTISRFACRIVCDRNEPYTARIFAAGFDSSKNIFLGEKAAKWKNPDGHMDGLTTNGVLVMHPRGGFTEESQPGVWREISVCGDVYTLRETRSAQQRGKLVESETNVLQDGSLIDLCGATLLWRTADGLFHTPTQKHIEALRQEINAARPQCPVGLNTLAFPSINRKEVVEEKQPWAYLSCGHVHGYHNWGHRSDTEANERECPMCRTVGPYVPLWLGCEAGFYVDAGPPTHAFTPCGHVCSEKSAKYWSQIPLPHGTHAFHAACPFCATQLVGEQNCIKLIFQGPID

SEQ ID NO: 25064 - protein, 469 aa, Homo sapiens
MVLEGNPEVGSPRTSDLQHRGNKGSCVLSSPGEDAQPGEEPIKYGELIVLGCCEEGGEETEAQRGEVTGPRAHSCYNGCLASGDKGRRRSRLALSRRSHANGVKPDVMHHISTPLVSKALSNRGQHSISYTLSRSHSVIVEYTHDSDTDMFQIGRSTENMIDFVVTDTSPGGGAAEGPSAQSTISRYACRILCDRRPPYTARIYAAGFDASSNIFLGERAAKWRTPDGLMDGLTTNGVLVMHPAGGFSEDSAPGVWREISVCGNVYTLRDSRSAQQRGKLVENESNVLQDGSLIDLCGATLLWRTPAGLLRAPTLKQLEAQRQEANAARPQCPVGLSTLAFPSPARGRTAPDKQQPWVYVRCGHVHGYHGWGCRRERGPQERECPLCRLVGPYVPLWLGQEAGLCLDPGPPSHAFAPCGHVCSEKTARYWAQTPLPHGTHAFHAACPFCGAWLTGEHGCVRLIFQGPLD

SEQ ID NO: 25065 - protein, 445 aa, Homo sapiens
MVLEGNPEVGSPRTSDLQHRGNKGSCVLSSPGEDAQPGEEPIKYGELIVLGYNGCLASGDKGRRRSRLALSRRSHANGVKPDVMHHISTPLVSKALSNRGQHSISYTLSRSHSVIVEYTHDSDTDMFQIGRSTENMIDFVVTDTSPGGGAAEGPSAQSTISRYACRILCDRRPPYTARIYAAGFDASSNIFLGERAAKWRTPDGLMDGLTTNGVLVMHPAGGFSEDSAPGVWREISVCGNVYTLRDSRSAQQRGKLVENESNVLQDGSLIDLCGATLLWRTPAGLLRAPTLKQLEAQRQEANAARPQCPVGLSTLAFPSPARGRTAPDKQQPWVYVRCGHVHGYHGWGCRRERGPQERECPLCRLVGPYVPLWLGQEAGLCLDPGPPSHAFAPCGHVCSEKTARYWAQTPLPHGTHAFHAACPFCGAWLTGEHGCVRLIFQGPLD

SEQ ID NO: 25066 - protein, 406 aa, Homo sapiens
MVLEGNPEVGSPRTSDLQHRGNKGSCVLSSPGEDAQPGEEPIKYGELISTPLVSKALSNRGQHSISYTLSRSHSVIVEYTHDSDTDMFQIGRSTENMIDFVVTDTSPGGGAAEGPSAQSTISRYACRILCDRRPPYTARIYAAGFDASSNIFLGERAAKWRTPDGLMDGLTTNGVLVMHPAGGFSEDSAPGVWREISVCGNVYTLRDSRSAQQRGKLVENESNVLQDGSLIDLCGATLLWRTPAGLLRAPTLKQLEAQRQEANAARPQCPVGLSTLAFPSPARGRTAPDKQQPWVYVRCGHVHGYHGWGCRRERGPQERECPLCRLVGPYVPLWLGQEAGLCLDPGPPSHAFAPCGHVCSEKTARYWAQTPLPHGTHAFHAACPFCGAWLTGEHGCVRLIFQGPLD

SEQ ID NO: 25067 - protein, 331 aa, Homo sapiens
MVLEGNPEVGSPRTSDLQHRGNKGSCVLSSPGEDAQPGEEPIKYGELIVLGCCEEGGEETEAQRGEVTGPRAHSCYNGCLASGDKGRRRSRLALSRRSHANGVKPDVMHHISTPLVSKALSNRGQHSISYTLSRSHSVIVEYTHDSDTDMFQIGRSTENMIDFVVTDTSPGGGAAEGPSAQSTISRYACRILCDRRPPYTARIYAAGFDASSNIFLGERAAKWRTPDGLMDGLTTNGVLVMHPAGGFSEDSAPGVWREISVCGNVYTLRDSRSAQQRGKLVGGPLHSPPLSLPGPHKLPIPLPKPGDDLQSFCPREPQQAPYQGIPGPGGS

SEQ ID NO: 25068 - protein, 555 aa, Homo sapiens
MAARLLLLGILLLLLPLPVPAPCHTAARSECKRSHKFVPGAWLAGEGVDVTSLRRSGSFPVDTQRFLRPDGTCTLCENALQEGTLQRLPLALTNWRAQGSGCQRHVTRAKVSSTEAVARDAARSIRNDWKVGLDVTPKPTSNVHVSVAGSHSQAANFAAQKTHQDQYSFSTDTVECRFYSFHVVHTPPLHPDFKRALGDLPHHFNASTQPAYLRLISNYGTHFIRAVELGGRISALTALRTCELALEGLTDNEVEDCLTVEAQVNIGIHGSISAEAKACEEKKKKHKMTASFHQTYRERHSEVVGGHHTSINDLLFGIQAGPEQYSAWVNSLPGSPGLVDYTLEPLHVLLDSQDPRREALRRALSQYLTDRARWRDCSRPCPPGRQKSPRDPCQCVCHGSAVTTQDCCPRQRGLAQLEVTFIQAWGLWGDWFTATDAYVKLFFGGQELRTSTVWDNNNPIWSVRLDFGDVLLATGGPLRLQVWDQDSGRDDDLLGTCDQAPKSGSHEVRCNLNHGHLKFRYHARCLPHLGGGTCLDYVPQMLLGEPPGNRSGAVW

SEQ ID NO: 25069 - protein, 392 aa, Homo sapiens
MEWWASSPLRLWLLLFLLPSAQGRQKESGSKWKVFIDQINRSLENYEPCSSQNCSCYHGVIEEDLTPFRGGISRKMMAEVVRRKLGTHYQITKNRLYRENDCMFPSRCSGVEHFILEVIGRLPDMEMVINVRDYPQVPKWMEPAIPVFSFSKTSEYHDIMYPAWTFWEGGPAVWPIYPTGLGRWDLFREDLVRSAAQWPWKKKNSTAYFRGSRTSPERDPLILLSRKNPKLVDAEYTKNQAWKSMKDTLGKPAAKDVHLVDHCKYKYLFNFRGVAASFRFKHLFLCGSLVFHVGDEWLEFFYPQLKPWVHYIPVKTDLSNVQELLQFVKANDDVAQEIAERGSQFIRNHLQMDDITCYWENLLSEYSKFLSYNVTRRKGYDQIIPKMLKTEL

SEQ ID NO: 25070 - protein, 470 aa, Homo sapiens
MSHHPSGLRAGFSSTSYRRTFGPPPSLSPGAFSYSSSSRFSSSRLLGSASPSSSVRLGSFRSPRAGAGALLRLPSERLDFSMAEALNQEFLATRSNEKQELQELNDRFANFIEKVRFLEQQNAALRGELSQARGQEPARADQLCQQELRELRRELELLGRERDRVQVERDGLAEDLAALKQRLEEETRKREDAEHNLVLFRKDVDDATLSRLELERKIESLMDEIEFLKKLHEEELRDLQVSVESQQVQQVEVEATVKPELTAALRDIRAQYESIAAKNLQEAEEWYKSKYADLSDAANRNHEALRQAKQEMNESRRQIQSLTCEVDGLRGTNEALLRQLRELEEQFALEAGGYQAGAARLEEELRQLKEEMARHLREYQELLNVKMALDIEIATYRKLLEGEESRISVPVHSFASLNIKTTVPEVEPPQDSHSRKTVLIKTIETRNGEVVTESQKEQRSELDKSSAHSY

SEQ ID NO: 25071 - protein, 471 aa, Homo sapiens
MSHHPSGLRAGFSSTSYRRTFGPPPSLSPGAFSYSSSSRFSSSRLLGSASPSSSVRLGSFRSPRAGAGALLRLPSERLDFSMAEALNQEFLATRSNEKQELQELNDRFANFIEKVRFLEQQNAALRGELSQARGQEPARADQLCQQELRELRRELELLGRERDRVQVERDGLAEDLAALKQRLEEETRKREDAEHNLVLFRKDVDDATLSRLELERKIESLMDEIEFLKKLHEEELRDLQVSVESQQVQQVEVEATVKPELTAALRDIRAQYESIAAKNLQEAEEWYKSKYADLSDAANRNHEALRQAKQEMNESRRQIQSLTCEVDGLRGTNEALLRQLRELEEQFALEAGGYQAGAARLEEELRQLKEEMARHLREYQELLNVKMALDIEIATYRKLLEGEESRISVPVHSFASLNIKTTVPEVEPPQDSHSRKTVLIKTIETRNGEQVVTESQKEQRSELDKSSAHSY

SEQ ID NO: 25072 - protein, 336 aa, Homo sapiens
MEKLRLLGLRYQEYVTRHPAATAQLETAVRGFSYLLAGRFADSHELSELVYSASNLLVLLNDGILRKELRKKLPVSLSQQKLLTWLSVLECVEVFMEMGAAKVWGEVGRWLVIALVQLAKAVLRMLLLLWFKAGLQTSPPIVPLDRETQAQPPDGDHSPGNHEQSYVGKRSNRVVRTLQNTPSLHSRHWGAPQQREGRQQQHHEELSATPTPLGLQETIAEFLYIARPLLHLLSLGLWGQRSWKPWLLAGVVDVTSLSLLSDRKGLTRRERRELRRRTILLLYYLLRSPFYDRFSEARILFLLQLLADHVPGVGLVTRPLMDYLPTWQKIYFYSWG

SEQ ID NO: 25073 - protein, 346 aa, Homo sapiens
MEKLRLLGLRYQEYVTRHPAATAQLETAVRGFSYLLAGRFADSHELSELVYSASNLLVLLNDGILRKELRKKLPVSLSQQKLLTWLSVLECVEVFMEMGAAKVWGEVGRWLVIALVQLAKAVLRMLLLLWFKAGLQTSPPIVPLDRETQAQPPDGDHSPGNHEQSYVGKRSNRVVRTLQNTPSLHSRHWGAPQQREGRQQQHHEELSATPTPLGLQETIAEFLYIARPLLHLLSLGLWGQRSWKPWLLAGVVDVTSLSLLSDRKGLTRRERRELRRRTILLLYYLLRSPFYDRFSEARILFLLQLLADHVPGVGLVTTSQRAASPCLPARPHTQPWSPPAFLPGHP

SEQ ID NO: 25074 - protein, 385 aa, Homo sapiens
MKLVRKNIEKDNAGQVTLVPEEPEDMWHTYNLVQVGDSLRASTIRKVQTESSTGSVGSNRVRTTLTLCVEAIDFDSQACQLRVKGTNIQENEYVKMGAYHTIELEPNRQFTLAKKQWDSVVLERIEQACDPAWSADVAAVVMQEGLAHICLVTPSMTLTRAKVEVNIPRKRKGNCSQHDRALERFYEQVVQAIQRHIHFDVVKCILVASPGFVREQFCDYLFQQAVKTDNKLLLENRSKFLQVHASSGHKYSLKEALCDPTVASRLSDTKAAGEVKALDDFYKMLQHEPDRAFYGLKQVEKANEAMAIDTLLISDELFRHQDVATRSRYVRLVDSVKENAGTVRIFSSLHVSGEQLSQLTGVAAILRFPVPELSDQEGDSSSEED

SEQ ID NO: 25075 - protein, 562 aa, Homo sapiens
MVKIVTVKTQAYQDQKPGTSGLRKRVKVFQSSANYAENFIQSIISTVEPAQRQEATLVVGGDGRFYMKEAIQLIARIAAANGIGRLVIGQNGILSTPAVSCIIRKIKAIGGIILTASHNPGGPNGDFGIKFNISNGGPAPEAITDKIFQISKTIEEYAVCPDLKVDLGVLGKQQFDLENKFKPFTVEIVDSVEAYATMLRSIFDFSALKELLSGPNRLKIRIDAMHGVVGPYVKKILCEELGAPANSAVNCVPLEDFGGHHPDPNLTYAADLVETMKSGEHDFGAAFDGDGDRNMILGKHGFFVNPSDSVAVIAANIFSIPYFQQTGVRGFARSMPTSGALDRVASATKIALYETPTGWKFFGNLMDASKLSLCGEESFGTGSDHIREKDGLWAVLAWLSILATRKQSVEDILKDHWQKYGRNFFTRYDYEEVEAEGANKMMKDLEALMFDRSFVGKQFSANDKVYTVEKADNFEYSDPVDGSISRNQGLRLIFTDGSRIVFRLSGTGSAGATIRLYIDSYEKDVAKINQDPQVMLAPLISIALKVSQLQERTGRTAPTVIT

SEQ ID NO: 25076 - protein, 580 aa, Homo sapiens
MSDFEEWISGTYRKMEEGPLPLLTFATAPYHDQKPGTSGLRKKTYYFEEKPCYLENFIQSIFFSIDLKDRQGSSLVVGGDGRYFNKSAIETIVQMAAANGIGRLVIGQNGILSTPAVSCIIRKIKAIGGIILTASHNPGGPNGDFGIKFNISNGGPAPEAITDKIFQISKTIEEYAVCPDLKVDLGVLGKQQFDLENKFKPFTVEIVDSVEAYATMLRSIFDFSALKELLSGPNRLKIRIDAMHGVVGPYVKKILCEELGAPANSAVNCVPLEDFGGHHPDPNLTYAADLVETMKSGEHDFGAAFDGDGDRNMILGKHGFFVNPSDSVAVIAANIFSIPYFQQTGVRGFARSMPTSGALDRVASATKIALYETPTGWKFFGNLMDASKLSLCGEESFGTGSDHIREKDGLWAVLAWLSILATRKQSVEDILKDHWQKYGRNFFTRYDYEEVEAEGANKMMKDLEALMFDRSFVGKQFSANDKVYTVEKADNFEYSDPVDGSISRNQGLRLIFTDGSRIVFRLSGTGSAGATIRLYIDSYEKDVAKINQDPQVMLAPLISIALKVSQLQERTGRTAPTVIT

SEQ ID NO: 25077 - protein, 365 aa, Homo sapiens
MLRSIFDFSALKELLSGPNRLKIRIDAMHGVVGPYVKKILCEELGAPANSAVNCVPLEDFGGHHPDPNLTYAADLVETMKSGEHDFGAAFDGDGDRNMILGKHGFFVNPSDSVAVIAANIFSIPYFQQTGVRGFARSMPTSGALDRVASATKIALYETPTGWKFFGNLMDASKLSLCGEESFGTGSDHIREKDGLWAVLAWLSILATRKQSVEDILKDHWQKYGRNFFTRYDYEEVEAEGANKMMKDLEALMFDRSFVGKQFSANDKVYTVEKADNFEYSDPVDGSISRNQGLRLIFTDGSRIVFRLSGTGSAGATIRLYIDSYEKDVAKINQDPQVMLAPLISIALKVSQLQERTGRTAPTVIT

SEQ ID NO: 25078 - protein, 299 aa, Homo sapiens
MAAAEEGCSVGAEADRELEELLESALDDFDKAKPSPAPPSTTTAPDASGPQKRSPGDTAKDALFASQEKFFQELFDSELASQATAEFEKAMKELAEEEPHLVEQFQKLSEAAGRVGSDMTSQQEFTSCLKETLSGLAKNATDLQNSSMSEEELTKAMEGLGMDEGDGEGNILPIMQSIMQNLLSKDVLYPSLKEITEKYPEWLQSHRESLPPEQFEKYQEQHSVMCKICEQFEAETPTDSETTQKARFEMVLDLMQQLQDLGHPPKELAGEMPPGLNFDLDALNLSGPPGASGEQCLIM

SEQ ID NO: 25079 - protein, 261 aa, Homo sapiens
PPLRKAVVSGPKRTGNWRSFWKDALFASQEKFFQELFDSELASQATAEFEKAMKELAEEEPHLVEQFQKLSEAAGRVGSDMTSQQEFTSCLKETLSGLAKNATDLQNSSMSEEELTKAMEGLGMDEGDGEGNILPIMQSIMQNLLSKDVLYPSLKEITEKYPEWLQSHRESLPPEQFEKYQEQHSVMCKICEQFEAETPTDSETTQKARFEMVLDLMQQLQDLGHPPKELAGEMPPGLNFDLDALNLSGPPGASGEQCLIM

SEQ ID NO: 25080 - protein, 712 aa, Homo sapiens
MRVLLHLPALLASLILLQAAASTTRAQTTRTSAISDTVSQAKVQVNKAFLDSRTRLKTAMSSETPTSRQLSEYLKHAKGRTRTAIRNGQVWEESLKRLRQKASLTNVTDPSLDLTSLSLEVGCGAPAPVVRCDPCSPYRTITGDCNNRRKPALGAANRALARWLPAEYEDGLSLPFGWTPGKTRNGFPLPLAREVSNKIVGYLNEEGVLDQNRSLLFMQWGQIVDHDLDFAPDTELGSSEYSKAQCDEYCIQGDNCFPIMFPPNDPKAGTQGKCMPFFRAGFVCPTPPYKSLAREQINALTSFLDASFVYSSEPSLASRLRNLSSPLGLMAVNQEVSDHGLPYLPYDSKKPSPCEFINTTARVPCFLAGDSRASEHILLATSHTLFLREHNRLARELKRLNPQWDGEKLYQEARKILGAFVQIITFRDYLPILLGDHMQKWIPPYQGYSESVDPRISNVFTFAFRFGHLEVPSSMFRLDENYQPWGPEPELPLHTLFFNTWRMVKDGGIDPLVRGLLAKKSKLMKQNKMMTGELRNKLFQPTHRIHGFDLAAINTQRCRDHGQPGYNSWRAFCDLSQPQTLEELNTVLKSKMLAKKLLGLYGTPDNIDIWIGAIAEPLVERGRVGPLLACLLGKQFQQIRDGDRFWWENPGVFTNEQKDSLQKMSFSRLVCDNTRITKVPRDPFWANSYPYDFVDCSAIDKLDLSPWASVKN

SEQ ID NO: 25081 - protein, 629 aa, Homo sapiens
MRVLLHLPALLASLILLQAAASTTRDPSLDLTSLSLEVGCGAPAPVVRCDPCSPYRTITGDCNNRRKPALGAANRALARWLPAEYEDGLSLPFGWTPGKTRNGFPLPLAREVSNKIVGYLNEEGVLDQNRSLLFMQWGQIVDHDLDFAPDTELGSSEYSKAQCDEYCIQGDNCFPIMFPPNDPKAGTQGKCMPFFRAGFVCPTPPYKSLAREQINALTSFLDASFVYSSEPSLASRLRNLSSPLGLMAVNQEVSDHGLPYLPYDSKKPSPCEFINTTARVPCFLAGDSRASEHILLATSHTLFLREHNRLARELKRLNPQWDGEKLYQEARKILGAFVQIITFRDYLPILLGDHMQKWIPPYQGYSESVDPRISNVFTFAFRFGHLEVPSSMFRLDENYQPWGPEPELPLHTLFFNTWRMVKDGGIDPLVRGLLAKKSKLMKQNKMMTGELRNKLFQPTHRIHGFDLAAINTQRCRDHGQPGYNSWRAFCDLSQPQTLEELNTVLKSKMLAKKLLGLYGTPDNIDIWIGAIAEPLVERGRVGPLLACLLGKQFQQIRDGDRFWWENPGVFTNEQKDSLQKMSFSRLVCDNTRITKVPRDPFWANSYPYDFVDCSAIDKLDLSPWASVKN

SEQ ID NO: 25082 - protein, 622 aa, Homo sapiens
MAENTEGDLNSNLLHAPYHTGDPQLDTAIGQWLRWDKNPKTKEQIENLLRNGMNKELRDRLCCRMTFGTAGLRSAMGAGFCYINDLTVIQSTQGMYKYLERCFSDFKQRGFVVGYDTRGQVTSSCSSQRLAKLTAAVLLAKDVPVYLFSRYVPTPFVPYAVQKLKAVAGVMITASHNRKEDNGYKVYWETGAQITSPHDKEILKCIEECVEPWNGSWNDNLVDTSPLKRDPLQDICRRYMEDLKKICFYRELNSKTTLKFVHTSFHGVGHDYVQLAFKVFGFKPPIPVPEQKDPDPDFSTVKCPNPEEGESVLELSLRLAEKENARVVLATDPDADRLAAAELQENGCWKVFTGNELAALFGWWMFDCWKKNKSRNADVKNVYMLATTVSSKILKAIALKEGFHFEETLPGFKWIGSRIIDLLENGKEVLFAFEESIGFLCGTSVLDKDGVSAAVVVAEMASYLETMNITLKQQLVKVYEKYGYHISKTSYFLCYEPPTIKSIFERLRNFDSPKEYPKFCGTFAILHVRDVTTGYDSSQPNKKSVLPVSKNSQMITFTFQNGCVATLRTSGTEPKIKYYAEMCASPDQSDTALLEEELKKLIDALIENFLQPSKNGLIWRSV

SEQ ID NO: 25083 - protein, 790 aa, Homo sapiens
MENFQYSVQLSDQDWAEFSATADECGLLQAGLASGDELLSSDIDQGDSSGSSPPRAPPLPTGQLAAGGRSRRGCEEEDVATQQPVSRSQGEPVLALGTGQQTPSTSARAEAPPSLGPGASPPSQFSSCPGPASSGDQMQRLLQGPAPRPPGEPPGSPKSPGHSTGSQRPPDSPGAPPRSPSRKKRRAVGAKGGGHTGASASAQTGSPLLPAASPETAKLMAKAGQEELGPGPAGAPEPGPRSPVQEDRPGPGLGLSTPVPVTEQGTDQIRTPRRAKLHTVSTTVWEALPDVSRAKSDMAVSTPASEPQPDRDMAVSTPASEPQSDRDMAVSTPASEPQPDTDMAVSTPASEPQPDRDMAVSIPASKPQSDTAVSTPASEPQSSVALSTPISKPQLDTDVAVSTPASKHGLDVALPTAGPVAKLEVASSPPVSEAVPRMTESSGLVSTPVPRADAAGLAWPPTRRAGPDVVEMEAVVSEPSAGAPGCCSGAPALGLTQVPRKKKVRFSVAGPSPNKPGSGQASARPSAPQTATGAHGGPGAWEAVAVGPRPHQPRILKHLPRPPPSAVTRVGPGSSFAVTLPEAYEFFFCDTIEENEEAEAAAAGQDPAGVQWPDMCEFFFPDVGAQRSRRRGSPEPLPRADPVPAPIPGDPVPISIPEVYEHFFFGEDRLEGVLGPAVPLPLQALEPPRSASEGAGPGTPLKPAVVERLHLALRRAGELRGPVPSFAFSQNDMCLVFVAFATWAVRTSDPHTPDAWKTALLANVGTISAIRYFRRQVGQGRRSHSPSPSS

SEQ ID NO: 25084 - protein, 58 aa, Homo sapiens
MCLVFVAFATWAVRTSDPHTPDAWKTALLANVGTISAIRYFRRQVGQGRRSHSPSPSS

SEQ ID NO: 25085 - protein, 676 aa, Homo sapiens
MEPRGGGSSQFSSCPGPASSGDQMQRLLQGPAPRPPGEPPGSPKSPGHSTGSQRPPDSPGAPPRSPSRKKRRAVGAKGGGHTGASASAQTGSPLLPAASPETAKLMAKAGQEELGPGPAGAPEPGPRSPVQEDRPGPGLGLSTPVPVTEQGTDQIRTPRRAKLHTVSTTVWEALPDVSRAKSDMAVSTPASEPQPDRDMAVSTPASEPQSDRDMAVSTPASEPQPDTDMAVSTPASEPQPDRDMAVSIPASKPQSDTAVSTPASEPQSSVALSTPISKPQLDTDVAVSTPASKHGLDVALPTAGPVAKLEVASSPPVSEAVPRMTESSGLVSTPVPRADAAGLAWPPTRRAGPDVVEMEAVVSEPSAGAPGCCSGAPALGLTQVPRKKKVRFSVAGPSPNKPGSGQASARPSAPQTATGAHGGPGAWEAVAVGPRPHQPRILKHLPRPPPSAVTRVGPGSSFAVTLPEAYEFFFCDTIEENEEAEAAAAGQDPAGVQWPDMCEFFFPDVGAQRSRRRGSPEPLPRADPVPAPIPGDPVPISIPEVYEHFFFGEDRLEGVLGPAVPLPLQALEPPRSASEGAGPGTPLKPAVVERLHLALRRAGELRGPVPSFAFSQNDMCLVFVAFATWAVRTSDPHTPDAWKTALLANVGTISAIRYFRRQVGQGRRSHSPSPSS

SEQ ID NO: 25086 - protein, 612 aa, Homo sapiens
MAAPEGSGLGEDARLDQETAQWLRWDKNSLTLEAVKRLIAEGNKEELRKCFGARMEFGTAGLRAAMGPGISRMNDLTIIQTTQGFCRYLEKQFSDLKQKGIVISFDARAHPSSGGSSRRFARLAATTFISQGIPVYLFSDITPTPFVPFTVSHLKLCAGIMITASHNPKQDNGYKVYWDNGAQIISPHDKGISQAIEENLEPWPQAWDDSLIDSSPLLHNPSASINNDYFEDLKKYCFHRSVNRETKVKFVHTSVHGVGHSFVQSAFKAFDLVPPEAVPEQKDPDPEFPTVKYPNPEEGKGVLTLSFALADKTKARIVLANDPDADRLAVAEKQDSGEWRVFSGNELGALLGWWLFTSWKEKNQDRSALKDTYMLSSTVSSKILRAIALKEGFHFEETLTGFKWMGNRAKQLIDQGKTVLFAFEEAIGYMCCPFVLDKDGVSAAVISAELASFLATKNLSLSQQLKAIYVEYGYHITKASYFICHDQETIKKLFENLRNYDGKNNYPKACGKFEISAIRDLTTGYDDSQPDKKAVLPTSKSSQMITFTFANGGVATMRTSGTEPKIKYYAELCAPPGNSDPEQLKKELNELVSAIEEHFFQPQKYNLQPKAD

SEQ ID NO: 25087 - protein, 291 aa, Homo sapiens
MSSQLILRPFTVSHLKLCAGIMITASHNPKQDNGYKVYWDNGAQIISPHDKGISQAIEENLEPWPQAWDDSLIDSSPLLHNPSASINNDYFEDLKKYCFHRSVNRETKVKFVHTSVHGVGHSFVQSAFKAFDLVPPEAVPEQKDPDPEFPTVKYPNPEEGKGVLTLSFALADKTKARIVLANDPDADRLAVAEKQDSGEWRVFSGNELGALLGWWLFTSWKEKNQDRSALKDTYMLSSTVSSKILRAIALKEGFHFEETLTGFKWMGNRAKQLIDQGKTVLFAFEEAIGKK

SEQ ID NO: 25088 - protein, 745 aa, Homo sapiens
MGVPFFSSLRCMVDLGPCWAGGLTAEMKLLLALAGLLAILATPQPSEGAAPAVLGEVDTSLVLSSMEEAKQLVDKAYKERRESIKQRLRSGSASPMELLSYFKQPVAATRTAVRAADYLHVALDLLERKLRSLWRRPFNVTDVLTPAQLNVLSKSSGCAYQDVGVTCPEQDKYRTITGMCNNRRSPTLGASNRAFVRWLPAEYEDGFSLPYGWTPGVKRNGFPVALARAVSNEIVRFPTDQLTPDQERSLMFMQWGQLLDHDLDFTPEPAARASFVTGVNCETSCVQQPPCFPLKIPPNDPRIKNQADCIPFFRSCPACPGSNITIRNQINALTSFVDASMVYGSEEPLARNLRNMSNQLGLLAVNQRFQDNGRALLPFDNLHDDPCLLTNRSARIPCFLAGDTRSSEMPELTSMHTLLLREHNRLATELKSLNPRWDGERLYQEARKIVGAMVQIITYRDYLPLVLGPTAMRKYLPTYRSYNDSVDPRIANVFTNAFRYGHTLIQPFMFRLDNRYQPMEPNPRVPLSRVFFASWRVVLEGGIDPILRGLMATPAKLNRQNQIAVDEIRERLFEQVMRIGLDLPALNMQRSRDHGLPGYNAWRRFCGLPQPETVGQLGTVLRNLKLARKLMEQYGTPNNIDIWMGGVSEPLKRKGRVGPLLACIIGTQFRKLRDGDRFWWENEGVFSMQQRQALAQISLPRIICDNTGITTVSKNNIFMSNSYPRDFVNCSTLPALNLASWREAS

SEQ ID NO: 25089 - protein, 650 aa, Homo sapiens
MELLSYFKQPVAATRTAVRAADYLHVALDLLERKLRSLWRRPFNVTDVLTPAQLNVLSKSSGCAYQDVGVTCPEQDKYRTITGMCNNRRSPTLGASNRAFVRWLPAEYEDGFSLPYGWTPGVKRNGFPVALARAVSNEIVRFPTDQLTPDQERSLMFMQWGQLLDHDLDFTPEPAARASFVTGVNCETSCVQQPPCFPLKIPPNDPRIKNQADCIPFFRSCPACPGSNITIRNQINALTSFVDASMVYGSEEPLARNLRNMSNQLGLLAVNQRFQDNGRALLPFDNLHDDPCLLTNRSARIPCFLAGDTRSSEMPELTSMHTLLLREHNRLATELKSLNPRWDGERLYQEARKIVGAMVQIITYRDYLPLVLGPTAMRKYLPTYRSYNDSVDPRIANVFTNAFRYGHTLIQPFMFRLDNRYQPMEPNPRVPLSRVFFASWRVVLEGGIDPILRGLMATPAKLNRQNQIAVDEIRERLFEQVMRIGLDLPALNMQRSRDHGLPGYNAWRRFCGLPQPETVGQLGTVLRNLKLARKLMEQYGTPNNIDIWMGGVSEPLKRKGRVGPLLACIIGTQFRKLRDGDRFWWENEGVFSMQQRQALAQISLPRIICDNTGITTVSKNNIFMSNSYPRDFVNCSTLPALNLASWREAS

SEQ ID NO: 25090 - protein, 777 aa, Homo sapiens
MGVPFFSSLRCMVDLGPCWAGGLTAEMKLLLALAGLLAILATPQPSEGAAPAVLGEVDTSLVLSSMEEAKQLVDKAYKERRESIKQRLRSGSASPMELLSYFKQPVAATRTAVRAADYLHVALDLLERKLRSLWRRPFNVTDVLTPAQLNVLSKSSGCAYQDVGVTCPEQDKYRTITGMCNNRCGWLGVAAGTGLREASRTPQASRCQRPVLPCRRSPTLGASNRAFVRWLPAEYEDGFSLPYGWTPGVKRNGFPVALARAVSNEIVRFPTDQLTPDQERSLMFMQWGQLLDHDLDFTPEPAARASFVTGVNCETSCVQQPPCFPLKIPPNDPRIKNQADCIPFFRSCPACPGSNITIRNQINALTSFVDASMVYGSEEPLARNLRNMSNQLGLLAVNQRFQDNGRALLPFDNLHDDPCLLTNRSARIPCFLAGDTRSSEMPELTSMHTLLLREHNRLATELKSLNPRWDGERLYQEARKIVGAMVQIITYRDYLPLVLGPTAMRKYLPTYRSYNDSVDPRIANVFTNAFRYGHTLIQPFMFRLDNRYQPMEPNPRVPLSRVFFASWRVVLEGGIDPILRGLMATPAKLNRQNQIAVDEIRERLFEQVMRIGLDLPALNMQRSRDHGLPGYNAWRRFCGLPQPETVGQLGTVLRNLKLARKLMEQYGTPNNIDIWMGGVSEPLKRKGRVGPLLACIIGTQFRKLRDGDRFWWENEGVFSMQQRQALAQISLPRIICDNTGITTVSKNNIFMSNSYPRDFVNCSTLPALNLASWREAS

SEQ ID NO: 25091 - protein, 1283 aa, Homo sapiens
MWGSDRLAGAGGGGAAVTVAFTNARDCFLHLPRRLVAQLHLLQNQAIEVVWSHQPAFLSWVEGRHFSDQGENVAEINRQVGQKLGLSNGGQVFLKPCSHVVSCQQVEVEPLSADDWEILELHAVSLEQHLLDQIRIVFPKAIFPVWVDQQTYIFIQIVALIPAASYGRLETDTKLLIQPKTRRAKENTFSKADAEYKKLHSYGRDQKGMMKELQTKQLQSNTVGITESNENESEIPVDSSSVASLWTMIGSIFSFQSEKKQETSWGLTEINAFKNMQSKVVPLDNIFRVCKSQPPSIYNASATSVFHKHCAIHVFPWDQEYFDVEPSFTVTYGKLVKLLSPKQQQSKTKQNVLSPEKEKQMSEPLDQKKIRSDHNEEDEKACVLQVVWNGLEELNNAIKYTKNVEVLHLGKVWIPDDLRKRLNIEMHAVVRITPVEVTPKIPRSLKLQPRENLPKDISEEDIKTVFYSWLQQSTTTMLPLVISEEEFIKLETKDGLKEFSLSIVHSWEKEKDKNIFLLSPNLLQKTTIQVLLDPMVKEENSEEIDFILPFLKLSSLGGVNSLGVSSLEHITHSLLGRPLSRQLMSLVAGLRNGALLLTGGKGSGKSTLAKAICKEAFDKLDAHVERVDCKALRGKRLENIQKTLEVAFSEAVWMQPSVVLLDDLDLIAGLPAVPEHEHSPDAVQSQRLAHALNDMIKEFISMGSLVALIATSQSQQSLHPLLVSAQGVHIFQCVQHIQPPNQEQRCEILCNVIKNKLDCDINKFTDLDLQHVAKETGGFVARDFTVLVDRAIHSRLSRQSISTREKLVLTTLDFQKALRGFLPASLRSVNLHKPRDLGWDKIGGLHEVRQILMDTIQLPAKYPELFANLPIRQRTGILLYGPPGTGKTLLAGVIARESRMNFISVKGPELLSKYIGASEQAVRDIFIRAQAAKPCILFFDEFESIAPRRGHDNTGVTDRVVNQLLTQLDGVEGLQGVYVLAATSRPDLIDPALLRPGRLDKCVYCPPPDQVSRLEILNVLSDSLPLADDVDLQHVASVTDSFTGADLKALLYNAQLEALHGMLLSSGLQDGSSSSDSDLSLSSMVFLNHSSGSDDSAGDGECGLDQSLVSLEMSEILPDESKFNMYRLYFGSSYESELGNGTSSDLSSQCLSAPSSMTQDLPGVPGKDQLFSQPPVLRTASQEGCQELTQEQRDQLRADISIIKGRYRSQSGEDESMNQPGPIKTRLAISQSHLMTALGHTRPSISEDDWKNFAELYESFQNPKRRKNQSGTMFRPGQKVTLA

SEQ ID NO: 25092 - protein, 961 aa, Homo sapiens
MWGSDRLAGAGGGGAAVTVAFTNARDCFLHLPRRLVAQLHLLQNQAIEVVWSHQPAFLSWVEGRHFSDQGENVAEINRQVGQKLGLSNGGQIPDDLRKRLNIEMHAVVRITPVEVTPKIPRSLKLQPRENLPKDISEEDIKTVFYSWLQQSTTTMLPLVISEEEFIKLETKDGLKEFSLSIVHSWEKEKDKNIFLLSPNLLQKTTIQVLLDPMVKEENSEEIDFILPFLKLSSLGGVNSLGVSSLEHITHSLLGRPLSRQLMSLVAGLRNGALLLTGGKGSGKSTLAKAICKEAFDKLDAHVERVDCKALRGKRLENIQKTLEVAFSEAVWMQPSVVLLDDLDLIAGLPAVPEHEHSPDAVQSQRLAHALNDMIKEFISMGSLVALIATSQSQQSLHPLLVSAQGVHIFQCVQHIQPPNQEQRCEILCNVIKNKLDCDINKFTDLDLQHVAKETGGFVARDFTVLVDRAIHSRLSRQSISTREKLVLTTLDFQKALRGFLPASLRSVNLHKPRDLGWDKIGGLHEVRQILMDTIQLPAKYPELFANLPIRQRTGILLYGPPGTGKTLLAGVIARESRMNFISVKGPELLSKYIGASEQAVRDIFIRAQAAKPCILFFDEFESIAPRRGHDNTGVTDRVVNQLLTQLDGVEGLQGVYVLAATSRPDLIDPALLRPGRLDKCVYCPPPDQVSRLEILNVLSDSLPLADDVDLQHVASVTDSFTGADLKALLYNAQLEALHGMLLSSGLQDGSSSSDSDLSLSSMVFLNHSSGSDDSAGDGECGLDQSLVSLEMSEILPDESKFNMYRLYFGSSYESELGNGTSSDLSSQCLSAPSSMTQDLPGVPGKDQLFSQPPVLRTASQEGCQELTQEQRDQLRADISIIKGRYRSQSGEDESMNQPGPIKTRLAISQSHLMTALGHTRPSISEDDWKNFAELYESFQNPKRRKNQSGTMFRPGQKVTLA

SEQ ID NO: 25093 - protein, 567 aa, Homo sapiens
MEGSPIPVLTVPTAPYEDQRPAGGGGLRRPTGLFEGQRNYLPNFIQSVLSSIDLRDRQGCTMVVGSDGRYFSRTAIEIVVQMAAANGIGRLIIGQNGILSTPAVSCIIRKIKAAGGIILTASHCPGGPGGEFGVKFNVANGGPAPDVVSDKIYQISKTIEEYAICPDLRIDLSRLGRQEFDLENKFKPFRVEIVDPVDIYLNLLRTIFDFHAIKGLLTGPSQLKIRIDAMHGVMGPYVRKVLCDELGAPANSAINCVPLEDFGGQHPDPNLTYATTLLEAMKGGEYGFGAAFDADGDRYMILGQNGFFVSPSDSLAIIAANLSCIPYFRQMGVRGFGRSMPTSMALDRVAKSMKVPVYETPAGWRFFSNLMDSGRCNLCGEESFGTGSDHLREKDGLWAVLVWLSIIAARKQSVEEIVRDHWAKFGRHYYCRFDYEGLDPKTTYYIMRDLEALVTDKSFIGQQFAVGSHVYSVAKTDSFEYVDPVDGTVTKKQGLRIIFSDASRLIFRLSSSSGVRATLRLYAESYERDPSGHDQEPQAVLSPLIAIALKISQIHERTGRRGPTVIT

SEQ ID NO: 25094 - protein, 387 aa, Homo sapiens
MEGSPIPVLTVPTAPYEDQRPAGGGGLRRPTGLFEGQRNYLPNFIQSVLSSIDLRDRQGCTMVVGSDGRYFSRTAIEIVVQMAAANGIGRLIIGQNGILSTPAVSCIIRKIKAAGGIILTASHCPGGPGGEFGVKFNVANGGPAPDVVSDKIYQISKTIEEYAICPDLRIDLSRLGRQEFDLENKFKPFRVEIVDPVDIYLNLLRTIFDFHAIKGLLTGPSQLKIRIDAMHGVMGPYVRKVLCDELGAPANSAINCVPLEDFGGQHPDPNLTYATTLLEAMKGGEYGFGAAFDADGDRYMILGQNGFFVSPSDSLAIIAANLSCIPYFRQMGVRGFGRSMPTSMALDRVAKSMKVPVYETPAGWRFFSNLMDSGRCNLCGEESFGTV

SEQ ID NO: 25095 - protein, 193 aa, Homo sapiens
MIRCGLACERCRWILPLLLLSAIAFDIIALAGRGWLQSSDHGQTSSLWWKCSQEGGGSGSYEEGCQSLMEYAWGRAAAAMLFCGFIILVICFILSFFALCGPQMLVFLRVIGGLLALAAVFQIISLVIYPVKYTQTFTLHANPAVTYIYNWAYGFGWAATIILIGCAFFFCCLPNYEDDLLGNAKPRYFYTSA

SEQ ID NO: 25096 - protein, 1130 aa, Homo sapiens
MAAAVLSGPSAGSAAGVPGGTGGLSAVSSGPRLRLLLLESVSGLLQPRTGSAVAPVHPPNRSAPHLPGLMCLLRLHGSVGGAQNLSALGALVSLSNARLSSIKTRFEGLCLLSLLVGESPTELFQQHCVSWLRSIQQVLQTQDPPATMELAVAVLRDLLRYAAQLPALFRDISMNHLPGLLTSLLGLRPECEQSALEGMKACMTYFPRACGSLKGKLASFFLSRVDALSPQLQQLACECYSRLPSLGAGFSQGLKHTESWEQELHSLLASLHTLLGALYEGAETAPVQNEGPGVEMLLSSEDGDAHVLLQLRQRFSGLARCLGLMLSSEFGAPVSVPVQEILDFICRTLSVSSKNISLHGDGPLRLLLLPSIHLEALDLLSALILACGSRLLRFGILIGRLLPQVLNSWSIGRDSLSPGQERPYSTVRTKVYAILELWVQVCGASAGMLQGGASGEALLTHLLSDISPPADALKLRSPRGSPDGSLQTGKPSAPKKLKLDVGEAMAPPSHRKGDSNANSDVCAAALRGLSRTILMCGPLIKEETHRRLHDLVLPLVMGVQQGEVLGSSPYTSSRCRRELYCLLLALLLAPSPRCPPPLACALQAFSLGQREDSLEVSSFCSEALVTCAALTHPRVPPLQPMGPTCPTPAPVPPPEAPSPFRAPPFHPPGPMPSVGSMPSAGPMPSAGPMPSAGPVPSARPGPPTTANHLGLSVPGLVSVPPRLLPGPENHRAGSNEDPILAPSGTPPPTIPPDETFGGRVPRPAFVHYDKEEASDVEISLESDSDDSVVIVPEGLPPLPPPPPSGATPPPIAPTGPPTASPPVPAKEEPEELPAAPGPLPPPPPPPPPVPGPVTLPPPQLVPEGTPGGGGPPALEEDLTVININSSDEEEEEEEEEEEEEEEEEEEEEDFEEEEEDEEEYFEEEEEEEEEFEEEFEEEEGELEEEEEEEDEEEEEELEEVEDLEFGTAGGEVEEGAPPPPTLPPALPPPESPPKVQPEPEPEPGLLLEVEEPGTEEERGADTAPTLAPEALPSQGEVEREGESPAAGPPPQELVEEEPSAPPTLLEEETEDGSDKVQPPPETPAEEEMETETEAEALQEKEQDDTAAMLADFIDCPPDDEKPPPPTEPDS

SEQ ID NO: 25097 - protein, 305 aa, Homo sapiens
MKSDSSTSAAPLRGLGGPLRSSEPVRAVPARAPAVDLLEEAADLLVVHLDFRAALETCERAWQSLANHAVAEEPAGTSLEVKCSLCVVGIQALAEMDRWQEVLSWVLQYYQVPEKLPPKVLELCILLYSKMQEPGAVLDVVGAWLQDPANQNLPEYGALAEFHVQRVLLPLGCLSEAEELVVGSAAFGEERRLDVLQAIHTARQQQKQEHSGSEEAQKPNLEGSVSHKFLSLPMLVRQLWDSAVSHFFSLPFKKSLLAALILCLLVVRFDPASPSSLHFLYKLAQLFRWIRKAAFSRLYQLRIRD

SEQ ID NO: 25098 - protein, 256 aa, Homo sapiens
MKSDSSTSAAPLRGLGGPLRSSEPVRAVPARAPAVDLLEEAADLLVVHLDFRAALETCERAWQSLANHAVAEEPAGTSLEVKCSLCVVGIQALAEMDRWQEVLSWVLQYYQVPEKLPPKVLELCILLYSKMQEPGAVLDVVGAWLQDPANQNLPEYGALAEFHVQRVLLPLGCLSEAEELVVGSAAFGEERRLDVLQAIHTARQQQKQEHSGSEEAQKPNLEASPSSLHFLYKLAQLFRWIRKAAFSRLYQLRIRD

SEQ ID NO: 25099 - protein, 312 aa, Homo sapiens
MEEECRVLSIQSHVIRGYVGNRAATFPLQVLGFEIDAVNSVQFSNHTGYAHWKGQVLNSDELQELYEGLRLNNMNKYDYVLTGYTRDKSFLAMVVDIVQELKQQNPRLVYVCDPVLGDKWDGEGSMYVPEDLLPVYKEKVVPLADIITPNQFEAELLSGRKIHSQEEALRVMDMLHSMGPDTVVITSSDLPSPQGSNYLIVLGSQRRRNPAGSVVMERIRMDIRKVDAVFVGTGDLFAAMLLAWTHKHPNNLKVACEKTVSTLHHVLQRTIQCAKAQAGEGVRPSPMQLELRMVQSKRDIEDPEIVVQATVL

SEQ ID NO: 25100 - protein, 284 aa, Homo sapiens
MEEECRVLSIQSHVIRGYVGNRAATFPLQVLGFEIDAVNSVQFSNHTGYAHWKGQVLNSDELQELYEGLRLNNMNKYDYVLTVCDPVLGDKWDGEGSMYVPEDLLPVYKEKVVPLADIITPNQFEAELLSGRKIHSQEEALRVMDMLHSMGPDTVVITSSDLPSPQGSNYLIVLGSQRRRNPAGSVVMERIRMDIRKVDAVFVGTGDLFAAMLLAWTHKHPNNLKVACEKTVSTLHHVLQRTIQCAKAQAGEGVRPSPMQLELRMVQSKRDIEDPEIVVQATVL

SEQ ID NO: 25101 - protein, 239 aa, Homo sapiens
MNKYDYVLTGYTRDKSFLAMVVDIVQELKQQNPRLVYVCDPVLGDKWDGEGSMYVPEDLLPVYKEKVVPLADIITPNQFEAELLSGRKIHSQEEALRVMDMLHSMGPDTVVITSSDLPSPQGSNYLIVLGSQRRRNPAGSVVMERIRMDIRKVDAVFVGTGDLFAAMLLAWTHKHPNNLKVACEKTVSTLHHVLQRTIQCAKAQAGEGVRPSPMQLELRMVQSKRDIEDPEIVVQATVL

SEQ ID NO: 25102 - protein, 305 aa, Homo sapiens
MASRKENAKSANRVLRISQLDALELNKALEQLVWSQFTQCFHGFKPGLLARFEPEVKACLWVFLWRFTIYSKNATVGQSVLNIKYKNDFSPNLRYQPPSKNQKIWYAVCTIGGRWLEERCYDLFRNHHLASFGKVKQCVNFVIGLLKLGGLINFLIFLQRGKFATLTERLLGIHSVFCKPQNICEVGFEYMNRELLWHGFAEFLIFLLPLINVQKLKAKLSSWCIPLTGAPNSDNTLATSGKECALCGEWPTMPHTIGCEHIFCYFCAKSSFLFDVYFTCPKCGTEVHSLQPLKSGIEMSEVNAL

SEQ ID NO: 25103 - protein, 605 aa, Homo sapiens
MGRLLRAARLPPLLSPLLLLLVGGAFLGACVAGSDEPGPEGLTSTSLLDLLLPTGLEPLDSEEPSETMGLGAGLGAPGSGFPSEENEESRILQPPQYFWEEEEELNDSSLDLGPTADYVFPDLTEKAGSIEDTSQAQELPNLPSPLPKMNLVEPPWHMPPREEEEEEEEEEEREKEEVEKQEEEEEEELLPVNGSQEEAKPQVRDFSLTSSSQTPGATKSRHEDSGDQASSGVEVESSMGPSLLLPSVTPTTVTPGDQDSTSQEAEATVLPAAGLGVEFEAPQEASEEATAGAAGLSGQHEEVPALPSFPQTTAPSGAEHPDEDPLGSRTSASSPLAPGDMELTPSSATLGQEDLNQQLLEGQAAEAQSRIPWDSTQVICKDWSNLAGKNYIILNMTENIDCEVFRQHRGPQLLALVEEVLPRHGSGHHGAWHISLSKPSEKEQHLLMTLVGEQGVVPTQDVLSMLGDIRRSLEEIGIQNYSTTSSCQARASQVRSDYGTLFVVLVVIGAICIIIIALGLLYNCWQRRLPKLKHVSHGEELRFVENGCHDNPTLDVASDSQSEMQEKHPSLNGGGALNGPGSWGALMGGKRDPEDSDVFEEDTHL

SEQ ID NO: 25104 - protein, 529 aa, Homo sapiens
MGRLLRAARLPPLLSPLLLLLVGGAFLGACVAGSDEPGPEGLTSTSLLDLLLPTGLEPLDSEEPSETMGLGAGLGAPGSGFPSEENEESRILQPPQYFWEEEEELNDSSLDLGPTADYVFPDLTEKAGSIEDTSQAQELPNLPSPLPKMNLVEPPWHMPPREEEEEEEEEEEREKEEVEKQEEEEEEELLPVNGSQEEAKPQVRDFSLTSSSQTPGATKSRHEDSGDQASSGVEVESSMGPSLLLPSVTPTTVTPGDQDSTSQEAEATVLPAAGLGVEFEAPQEASEEATAGAAGLSGQHEEVPALPSFPQTTAPSGAEHPDEDPLGSRTSASSPQLLALVEEVLPRHGSGHHGAWHISLSKPSEKEQHLLMTLVGEQGVVPTQDVLSMLGDIRRSLEEIGIQNYSTTSSCQARASQVRSDYGTLFVVLVVIGAICIIIIALGLLYNCWQRRLPKLKHVSHGEELRFVENGCHDNPTLDVASDSQSEMQEKHPSLNGGGALNGPGSWGALMGGKRDPEDSDVFEEDTHL

SEQ ID NO: 25105 - protein, 246 aa, Homo sapiens
MEEAKSQSLEEDFEGQATHTGPKGVINDWRKFKLESQDSDSIPPSKKEILRQMSSPQSRNGKDSKERVSRKMSIQEYELIHKEKEDENCLRKYRRQCMQDMHQKLSFGPRYGFVYELETGKQFLETIEKELKITTIVVHIYEDGIKGCDALNSSLTCLAAEYPIVKFCKIKASNTGAGDRFSLDVLPTLLIYKGGELISNFISVAEQFAEEFFAGDVESFLNEYGLLPEREVHVLEHTKIEEEDVE

SEQ ID NO: 25106 - protein, 194 aa, Homo sapiens
MSSPQSRNGKDSKERVSRKMSIQEYELIHKEKEDENCLRKYRRQCMQDMHQKLSFGPRYGFVYELETGKQFLETIEKELKITTIVVHIYEDGIKGCDALNSSLTCLAAEYPIVKFCKIKASNTGAGDRFSLDVLPTLLIYKGGELISNFISVAEQFAEEFFAGDVESFLNEYGLLPEREVHVLEHTKIEEEDVE

SEQ ID NO: 25107 - protein, 283 aa, Homo sapiens
MPESLDSPTSGRPGVTTHSTRTPGTEIQTIISNPVPKMEEAKSQSLEEDFEGQATHTGPKGVINDWRKFKLESQDSDSIPPSKKEILRQMSSPQSRNGKDSKERVSRKMSIQEYELIHKEKEDENCLRKYRRQCMQDMHQKLSFGPRYGFVYELETGKQFLETIEKELKITTIVVHIYEDGIKGCDALNSSLTCLAAEYPIVKFCKIKASNTGAGDRFSLDVLPTLLIYKGGELISNFISVAEQFAEEFFAGDVESFLNEYGLLPEREVHVLEHTKIEEEDVE

SEQ ID NO: 25108 - protein, 373 aa, Homo sapiens
MLRSVWNFLKRHKKKCIFLGTVLGGVYILGKYGQKKIREIQEREAAEYIAQARRQYHFESNQRTCNMTVLSMLPTLREALMQQLNSESLTALLKNRPSNKLEIWEDLKIISFTRSTVAVYSTCMLVVLLRVQLNIIGGYIYLDNAAVGKNGTTILAPPDVQQQYLSSIQHLLGDGLTELITVIKQAVQKVLGSVSLKHSLSLLDLEQKLKEIRNLVEQHKSSSWINKDGSKPLLCHYMMPDEETPLAVQACGLSPRDITTIKLLNETRDMLESPDFSTVLNTCLNRGFSRLLDNMAEFFRPTEQDLQHGNSMNSLSSVSLPLAKIIPIVNGQIHSVCSETPSHFVQDLLTMEQVKDFAANVYEAFSTPQQLEK

SEQ ID NO: 25109 - protein, 196 aa, Homo sapiens
MKPRTLVELSKLGLGNETVVQLRTLELPVDYREAKRRVTGIWEDHQPQLVVHVGMDTAAKAIILEQSGKNQGYRDADIRSFWPEGGVCLPGSPDVLESGVCMKAVCKRVAVEGVDVIFSRDAGRYVCDYTYYLSLHHGKGCAALIHVPPLSRGLPASLLGRALRVIIQEMLEEVGKPKHRAQFEENSTMVLPAKGN

SEQ ID NO: 25110 - protein, 142 aa, Homo sapiens
MDTAAKAIILEQSGKNQGYRDADIRSFWPEGGVCLPGSPDVLESGVCMKAVCKRVAVEGVDVIFSRDAGRYVCDYTYYLSLHHGKGCAALIHVPPLSRGLPASLLGRALRVIIQEMLEEVGKPKHRAQFEENSTMVLPAKGN

SEQ ID NO: 25111 - protein, 209 aa, Homo sapiens
MEQPRKAVVVTGFGPFGEHTVNASWIAVQELEKLGLGDSVDLHVYEIPVEYQTVQRLIPALWEKHSPQLVVHVGVSGMATTVTLEKCGHNKGYKGLDNCRFCPGSQCCVEDGPESIDSIIDMDAVCKRVTTLGLDVSVTISQDAGRYLCDFTYYTSLYQSHGRSAFVHVPPLGKPYNADQLGRALRAIIEEMLDLLEQSEGKINYCHKH

SEQ ID NO: 25112 - protein, 132 aa, Homo sapiens
MATTVTLEKCGHNKGYKGLDNCRFCPGSQCCVEDGPESIDSIIDMDAVCKRVTTLGLDVSVTISQDAGRYLCDFTYYTSLYQSHGRSAFVHVPPLGKPYNADQLGRALRAIIEEMLDLLEQSEGKINYCHKH

SEQ ID NO: 25113 - protein, 626 aa, Homo sapiens
MYQGHMQKSKEQGYGKLSSDEDLEIIVDQKQGKGSRAADKAVAMVMKEIPREESAEEKPLLTMTSQLVNEQQESRPLLSPSIDDFLCETKSEAIARPVTSNTAVLTTGLDLLDLSEPVSQTQTKAKKSEPSSKTSSLKKKADGSDLISTDAEQRGQPLRVPETSSLDLDIQTQLEKWDDVKFHGDRNTKGHPMAERKSSSSRTGSKELLWSSEHRSQPELSGGKSALNSESASELELVAPTQARLTKEHRWGSALLSRNHSLEEEFERAKAAVESDTEFWDKMQAEWEEMARRNWISENQEAQNQVTISASEKGYYFHTENPFKDWPGAFEEGLKRLKEGDLPVTILFMEAAILQDPGDAEAWQFLGITQAENENEQAAIVALQRCLELQPNNLKALMALAVSYTNTGHQQDACDALKNWIKQNPKYKYLVKSKKGSPGLTRRMSKSPVDSSVLEGVKELYLEAAHQNGDMIDPDLQTGLGVLFHLSGEFNRAIDAFNAALTVRPEDYSLWNRLGATLANGDRSEEAVEAYTRALEIQPGFIRSRYNLGISCINLGAYREAVSNFLTALSLQRKSRNQQQVPHPAISGNIWAALRIALSLMDQPELFQAANLGDLDVLLRAFNLDP

SEQ ID NO: 25114 - protein, 624 aa, Homo sapiens
MYQGHMQVVGVTLKKKWHCLQKSDLTLALGKGSRAADKAVAMVMKEIPREESAEEKPLLTMTSQLVNEQQESRPLLSPSIDDFLCETKSEAIARPVTSNTAVLTTGLDLLDLSEPVSQTQTKAKKSEPSSKTSSLKKKADGSDLISTDAEQRGQPLRVPETSSLDLDIQTQLEKWDDVKFHGDRNTKGHPMAERKSSSSRTGSKELLWSSEHRSQPELSGGKSALNSESASELELVAPTQARLTKEHRWGSALLSRNHSLEEEFERAKAAVESDTEFWDKMQAEWEEMARRNWISENQEAQNQVTISASEKGYYFHTENPFKDWPGAFEEGLKRLKEGDLPVTILFMEAAILQDPGDAEAWQFLGITQAENENEQAAIVALQRCLELQPNNLKALMALAVSYTNTGHQQDACDALKNWIKQNPKYKYLVKSKKGSPGLTRRMSKSPVDSSVLEGVKELYLEAAHQNGDMIDPDLQTGLGVLFHLSGEFNRAIDAFNAALTVRPEDYSLWNRLGATLANGDRSEEAVEAYTRALEIQPGFIRSRYNLGISCINLGAYREAVSNFLTALSLQRKSRNQQQVPHPAISGNIWAALRIALSLMDQPELFQAANLGDLDVLLRAFNLDP

SEQ ID NO: 25115 - protein, 591 aa, Homo sapiens
MYQGHMQKSKEQGYGKLSSDEDLEIIVDQKQLVNEQQESRPLLSPSIDDFLCETKSEAIARPVTSNTAVLTTGLDLLDLSEPVSQTQTKAKKSEPSSKTSSLKKKADGSDLISTDAEQRGQPLRVPETSSLDLDIQTQLEKWDDVKFHGDRNTKGHPMAERKSSSSRTGSKELLWSSEHRSQPELSGGKSALNSESASELELVAPTQARLTKEHRWGSALLSRNHSLEEEFERAKAAVESDTEFWDKMQAEWEEMARRNWISENQEAQNQVTISASEKGYYFHTENPFKDWPGAFEEGLKRLKEGDLPVTILFMEAAILQDPGDAEAWQFLGITQAENENEQAAIVALQRCLELQPNNLKALMALAVSYTNTGHQQDACDALKNWIKQNPKYKYLVKSKKGSPGLTRRMSKSPVDSSVLEGVKELYLEAAHQNGDMIDPDLQTGLGVLFHLSGEFNRAIDAFNAALTVRPEDYSLWNRLGATLANGDRSEEAVEAYTRALEIQPGFIRSRYNLGISCINLGAYREAVSNFLTALSLQRKSRNQQQVPHPAISGNIWAALRIALSLMDQPELFQAANLGDLDVLLRAFNLDP

SEQ ID NO: 25116 - protein, 567 aa, Homo sapiens
MYQGHMQLVNEQQESRPLLSPSIDDFLCETKSEAIARPVTSNTAVLTTGLDLLDLSEPVSQTQTKAKKSEPSSKTSSLKKKADGSDLISTDAEQRGQPLRVPETSSLDLDIQTQLEKWDDVKFHGDRNTKGHPMAERKSSSSRTGSKELLWSSEHRSQPELSGGKSALNSESASELELVAPTQARLTKEHRWGSALLSRNHSLEEEFERAKAAVESDTEFWDKMQAEWEEMARRNWISENQEAQNQVTISASEKGYYFHTENPFKDWPGAFEEGLKRLKEGDLPVTILFMEAAILQDPGDAEAWQFLGITQAENENEQAAIVALQRCLELQPNNLKALMALAVSYTNTGHQQDACDALKNWIKQNPKYKYLVKSKKGSPGLTRRMSKSPVDSSVLEGVKELYLEAAHQNGDMIDPDLQTGLGVLFHLSGEFNRAIDAFNAALTVRPEDYSLWNRLGATLANGDRSEEAVEAYTRALEIQPGFIRSRYNLGISCINLGAYREAVSNFLTALSLQRKSRNQQQVPHPAISGNIWAALRIALSLMDQPELFQAANLGDLDVLLRAFNLDP

SEQ ID NO: 25117 - protein, 583 aa, Homo sapiens
MVMKEIPREESAEEKPLLTMTSQLVNEQQESRPLLSPSIDDFLCETKSEAIARPVTSNTAVLTTGLDLLDLSEPVSQTQTKAKKSEPSSKTSSLKKKADGSDLISTDAEQRGQPLRVPETSSLDLDIQTQLEKWDDVKFHGDRNTKGHPMAERKSSSSRTGSKELLWSSEHRSQPELSGGKSALNSESASELELVAPTQARLTKEHRWGSALLSRNHSLEEEFERAKAAVESDTEFWDKMQAEWEEMARRNWISENQEAQNQVTISASEKGYYFHTENPFKDWPGAFEEGLKRLKEGDLPVTILFMEAAILQDPGDAEAWQFLGITQAENENEQAAIVALQRCLELQPNNLKALMALAVSYTNTGHQQDACDALKNWIKQNPKYKYLVKSKKGSPGLTRRMSKSPVDSSVLEGVKELYLEAAHQNGDMIDPDLQTGLGVLFHLSGEFNRAIDAFNAALTVRPEDYSLWNRLGATLANGDRSEEAVEAYTRALEIQPGFIRSRYNLGISCINLGAYREAVSNFLTALSLQRKSRNQQQVPHPAISGNIWAALRIALSLMDQPELFQAANLGDLDVLLRAFNLDP

SEQ ID NO: 25118 - protein, 602 aa, Homo sapiens
MYQGHMQGKGSRAADKAVAMVMKEIPREESAEEKPLLTMTSQLVNEQQESRPLLSPSIDDFLCETKSEAIARPVTSNTAVLTTGLDLLDLSEPVSQTQTKAKKSEPSSKTSSLKKKADGSDLISTDAEQRGQPLRVPETSSLDLDIQTQLEKWDDVKFHGDRNTKGHPMAERKSSSSRTGSKELLWSSEHRSQPELSGGKSALNSESASELELVAPTQARLTKEHRWGSALLSRNHSLEEEFERAKAAVESDTEFWDKMQAEWEEMARRNWISENQEAQNQVTISASEKGYYFHTENPFKDWPGAFEEGLKRLKEGDLPVTILFMEAAILQDPGDAEAWQFLGITQAENENEQAAIVALQRCLELQPNNLKALMALAVSYTNTGHQQDACDALKNWIKQNPKYKYLVKSKKGSPGLTRRMSKSPVDSSVLEGVKELYLEAAHQNGDMIDPDLQTGLGVLFHLSGEFNRAIDAFNAALTVRPEDYSLWNRLGATLANGDRSEEAVEAYTRALEIQPGFIRSRYNLGISCINLGAYREAVSNFLTALSLQRKSRNQQQVPHPAISGNIWAALRIALSLMDQPELFQAANLGDLDVLLRAFNLDP

SEQ ID NO: 25119 - protein, 518 aa, Homo sapiens
MVMKEIPREESAEEKPLLTMTSQLVNEQQESRPLLSPSIDDFLCETKSEAIARPVTSNTADIQTQLEKWDDVKFHGDRNTKGHPMAERKSSSSRTGSKELLWSSEHRSQPELSGGKSALNSESASELELVAPTQARLTKEHRWGSALLSRNHSLEEEFERAKAAVESDTEFWDKMQAEWEEMARRNWISENQEAQNQVTISASEKGYYFHTENPFKDWPGAFEEGLKRLKEGDLPVTILFMEAAILQDPGDAEAWQFLGITQAENENEQAAIVALQRCLELQPNNLKALMALAVSYTNTGHQQDACDALKNWIKQNPKYKYLVKSKKGSPGLTRRMSKSPVDSSVLEGVKELYLEAAHQNGDMIDPDLQTGLGVLFHLSGEFNRAIDAFNAALTVRPEDYSLWNRLGATLANGDRSEEAVEAYTRALEIQPGFIRSRYNLGISCINLGAYREAVSNFLTALSLQRKSRNQQQVPHPAISGNIWAALRIALSLMDQPELFQAANLGDLDVLLRAFNLDP

SEQ ID NO: 25120 - protein, 434 aa, Homo sapiens
MAERKSSSSRTGSKELLWSSEHRSQPELSGGKSALNSESASELELVAPTQARLTKEHRWGSALLSRNHSLEEEFERAKAAVESDTEFWDKMQAEWEEMARRNWISENQEAQNQVTISASEKGYYFHTENPFKDWPGAFEEGLKRLKEGDLPVTILFMEAAILQDPGDAEAWQFLGITQAENENEQAAIVALQRCLELQPNNLKALMALAVSYTNTGHQQDACDALKNWIKQNPKYKYLVKSKKGSPGLTRRMSKSPVDSSVLEGVKELYLEAAHQNGDMIDPDLQTGLGVLFHLSGEFNRAIDAFNAALTVRPEDYSLWNRLGATLANGDRSEEAVEAYTRALEIQPGFIRSRYNLGISCINLGAYREAVSNFLTALSLQRKSRNQQQVPHPAISGNIWAALRIALSLMDQPELFQAANLGDLDVLLRAFNLDP

SEQ ID NO: 25121 - protein, 125 aa, Homo sapiens
MAVADLALIPDVDIDSDGVFKYVLIRVHSAPRSGAPAAESKEIVRGYKWAEYHADIYDKVSGDMQKQGCDCECLGGGRISHQSQDKKIHVYGYSMAYGPAQHAISTEKIKAKYPDYEVTWANDGY

SEQ ID NO: 25122 - protein, 124 aa, Homo sapiens
MAVADLALIPDVDIDSDGVFKYVLIRVHSAPRSGAPAAESKEIVRGYKWAEYHADIYDKVSGDMQKQGCDCECLGGGRISHQSQDKKIHVYGYSMMRPTCVPLGASGPRIHHQGLWSCPARHFN

SEQ ID NO: 25123 - protein, 556 aa, Homo sapiens
MAVAAAAAAGPVFWRRLLGLLPGRPGLAALLGRLSDRLGRNRDRQRRRSPWLLLAPLLSPAVPQVTSPPCCLCPEGVHRFQWIRNLVPEFGVSSSHVRVLSSPAEFFELMKGQIRVAKRRVVMASLYLGTGPLEQELVDCLESTLEKSLQAKFPSNLKVSILLDFTRGSRGRKNSRTMLLPLLRRFPEQVRVSLFHTPHLRGLLRLLIPERFNETIGLQHIKVYLFDNSVILSGANLSDSYFTNRQDRYVFLQDCAEIADFFTELVDAVGDVSLQLQGDDTVQVVDGMVHPYKGDRAEYCKAANKRVMDVINSARTRQQMLHAQTFHSNSLLTQEDAAAAGDRRPAPDTWIYPLIQMKPFEIQIDEIVTETLLTEAERGAKVYLTTGYFNLTQAYMDLVLGTRAEYQILLASPEVNGFFGAKGVAGAIPAAYVHIERQFFSEVCSLGQQERVQLQEYWRRGWTFHAKGLWLYLAGSSLPCLTLIGSPNFGYRSVHRDLEAQIAIVTENQALQQQLHQEQEQLYLRSGVVSSATFEQPSRQVKLWVKMVTPLIKNFF

SEQ ID NO: 25124 - protein, 454 aa, Homo sapiens
MAVAAAAAAGPVFWRRLLGLLPGRPGLAALLGRLSDRLGRNRDRQRRRSPWLLLAPLLSPAVPQVTSPPCCLCPEGVHRFQWIRNLVPEFGVSSSHVRVLSSPAEFFELMKVDCLESTLEKSLQAKFPSNLKVSILLDFTRGSRGRKNSRTMLLPLLRRFPEQVRVSLFHTPHLRGLLRLLIPERFNETIGLQHIKVYLFDNSVILSGANLSDSYFTNRQDRYVFLQDCAEIADFFTELVDAVGDVSLQLQGDDTVQVVDGMVHPYKGDRAEYCKAANKRVMDVINSARTRQQMLHAQTFHSNSLLTQEDAAAAGDRRPAPDTWIYPLIQMKPFEIQIDEIVTETLLTEAERGAKVYLTTGYFNLTQAYMDLVLGTRAEYQILLASPEVNGFFGAKGVAGAIPAAYVHIERQFFSEVCSLGQQERVQLQEYWRRGWTFHAKGQFTGTWRPRLRS

SEQ ID NO: 25125 - protein, 330 aa, Homo sapiens
MAVAAAAAAGPVFWRRLLGLLPGRPGLAALLGRLSDRLGRNRDRQRRRSPWLLLAPLLSPAVPQVTSPPCCLCPEGVHRFQWIRNLVPEFGVSSSHVRVLSSPAEFFELMKGQIRVAKRRVVMASLYLGTGPLEQELVDCLESTLEKSLQAKFPSNLKVSILLDFTRGSRGRKNSRTMLLPLLRRFPEQVRVSLFHTPHLRGLLRLLIPERFNETIGLQHIKVYLFDNSVILSGANLSDSYFTNRQDRYVFLQDCAEIADFFTELVDAVGDVSLQLQGDDTVQVVDGMVHPYKGDRAEYCKAANKRVMDVINSARTRQQMLHAQTFHRTL

SEQ ID NO: 25126 - protein, 50 aa, Homo sapiens
MAVAAAAAAGPVFWRRLLGLLPGRPGLAALLGRLSDRLGRNRDRQRRRGR

SEQ ID NO: 25127 - protein, 639 aa, Homo sapiens
MAMRELVEAECGGANPLMKLAGHFTQDKALRQEGLRPGPWPPGAPASEAASKPLGVASEDELVAEFLQDQNAPLVSRAPQTFKMDDLLAEMQQIEQSNFRQAPQRAPGVADLALSENWAQEFLAAGDAVDVTQDYNETDWSQEFISEVTDPLSVSPARWAEEYLEQSEEKLWLGEPEGTATDRWYDEYHPEEDLQHTASDFVAKVDDPKLANSEFLKFVRQIGEGQVSLESGAGSGRAQAEQWAAEFIQQQGTSDAWVDQFTRPVNTSALDMEFERAKSAIESDVDFWDKLQAELEEMAKRDAEAHPWLSDYDDLTSATYDKGYQFEEENPLRDHPQPFEEGLRRLQEGDLPNAVLLFEAAVQQDPKHMEAWQYLGTTQAENEQELLAISALRRCLELKPDNQTALMALAVSFTNESLQRQACETLRDWLRYTPAYAHLVTPAEEGAGGAGLGPSKRILGSLLSDSLFLEVKELFLAAVRLDPTSIDPDVQCGLGVLFNLSGEYDKAVDCFTAALSVRPNDYLLWNKLGATLANGNQSEEAVAAYRRALELQPGYIRSRYNLGISCINLGAHREAVEHFLEALNMQRKSRGPRGEGGAMSENIWSTLRLALSMLGQSDAYGAADARDLSTLLTMFGLPQ

SEQ ID NO: 25128 - protein, 602 aa, Homo sapiens
MAMRELVEAECGGANPLMKLAGHFTQDKALRQEGLRPGPWPPGAPASEAASKPLGVASEDELVAEFLQDQNAPLVSRAPQTFKMDDLLAEMQQIEQSNFRQAPQRAPGVADLALSENWAQEFLAAGDAVDVTQDYNETDWSQEFISEVTDPLSVSPARWAEEYLEQSEEKLWLGEPEGTATDRWYDEYHPEEDLQHTASDFVAKVDDPKLANSEGTSDAWVDQFTRPVNTSALDMEFERAKSAIESDVDFWDKLQAELEEMAKRDAEAHPWLSDYDDLTSATYDKGYQFEEENPLRDHPQPFEEGLRRLQEGDLPNAVLLFEAAVQQDPKHMEAWQYLGTTQAENEQELLAISALRRCLELKPDNQTALMALAVSFTNESLQRQACETLRDWLRYTPAYAHLVTPAEEGAGGAGLGPSKRILGSLLSDSLFLEVKELFLAAVRLDPTSIDPDVQCGLGVLFNLSGEYDKAVDCFTAALSVRPNDYLLWNKLGATLANGNQSEEAVAAYRRALELQPGYIRSRYNLGISCINLGAHREAVEHFLEALNMQRKSRGPRGEGGAMSENIWSTLRLALSMLGQSDAYGAADARDLSTLLTMFGLPQ

SEQ ID NO: 25129 - protein, 631 aa, Homo sapiens
MAMRELVEAECGGANPLMKLAGHFTQDKALRQEGLRPGPWPPGAPASEAASKPLGVASEDELVAEFLQDQNAPLVSRAPQTFKMDDLLAEMQQIEQSNFRQAPQRAPGVADLALSENWAQEFLAAGDAVDVTQDYNETDWSQEFISEVTDPLSVSPARWAEEYLEQSEEKLWLGEPEGTATDRWYDEYHPEEDLQHTASDFVAKVDDPKLANSEFLKFVRQIGEGQVSLESGAGSGRAQAEQWAAEFIQQQGTSDAWVDQFTRPVNTSALDMEFERAKSAIELQAELEEMAKRDAEAHPWLSDYDDLTSATYDKGYQFEEENPLRDHPQPFEEGLRRLQEGDLPNAVLLFEAAVQQDPKHMEAWQYLGTTQAENEQELLAISALRRCLELKPDNQTALMALAVSFTNESLQRQACETLRDWLRYTPAYAHLVTPAEEGAGGAGLGPSKRILGSLLSDSLFLEVKELFLAAVRLDPTSIDPDVQCGLGVLFNLSGEYDKAVDCFTAALSVRPNDYLLWNKLGATLANGNQSEEAVAAYRRALELQPGYIRSRYNLGISCINLGAHREAVEHFLEALNMQRKSRGPRGEGGAMSENIWSTLRLALSMLGQSDAYGAADARDLSTLLTMFGLPQ

SEQ ID NO: 25130 - protein, 654 aa, Homo sapiens
MAMRELVEAECGGANPLMKLAGHFTQDKALRQEGLRPGPWPPGAPASEAVSVLEVESPGAASEAASKPLGVASEDELVAEFLQDQNAPLVSRAPQTFKMDDLLAEMQQIEQSNFRQAPQRAPGVADLALSENWAQEFLAAGDAVDVTQDYNETDWSQEFISEVTDPLSVSPARWAEEYLEQSEEKLWLGEPEGTATDRWYDEYHPEEDLQHTASDFVAKVDDPKLANSEFLKFVRQIGEGQVSLESGAGSGRAQAEQWAAEFIQQQGTSDAWVDQFTRPVNTSALDMEFERAKSAIESDVDFWDKLQAELEEMAKRDAEAHPWLSDYDDLTSATYDKGYQFEEENPLRDHPQPFEEGLRRLQEGDLPNAVLLFEAAVQQDPKHMEAWQYLGTTQAENEQELLAISALRRCLELKPDNQTALMALAVSFTNESLQRQACETLRDWLRYTPAYAHLVTPAEEGAGGAGLGPSKRILGSLLSDSLFLEVKELFLAAVRLDPTSIDPDVQCGLGVLFNLSGEYDKAVDCFTAALSVRPNDYLLWNKLGATLANGNQSEEAVAAYRRALELQPGYIRSRYNLGISCINLGAHREAVEHFLEALNMQRKSRGPRGEGGAMSENIWSTLRLALSMLGQSDAYGAADARDLSTLLTMFGLPQ

SEQ ID NO: 25131 - protein, 208 aa, Homo sapiens
MGSCSGRCALVVLCAFQLVAALERQVFDFLGYQWAPILANFVHIIIVILGLFGTIQYRLRYVMVYTLWAAVWVTWNVFIICFYLEVGGLLKDSELLTFSLSRHRSWWRERWPGCLHEEVPAVGLGAPHGQALVSGAGCALEPSYVEALHSCLQILIALLGFVCGCQVVSVFTEEEDSFDFIGGFDPFPLYHVNEKPSSLLSKQVYLPA

SEQ ID NO: 25132 - protein, 179 aa, Homo sapiens
MAFLASGPYLTHQQKVLRLYKRALRHLESWCVQRDKYRYFACLMRARFEEHKNEKDMAKATQLLKEAEEEFWYRQHPQPYIFPDSPGGTSYERYDCYKVPEWCLDDWHPSEKAMYPDYFAKREQWKKLRRESWEREVKQLQEETPPGGPLTEALPPARKEGDLPPLWWYIVTRPRERPM

SEQ ID NO: 25133 - protein, 254 aa, Homo sapiens [sequence omitted]

SEQ ID NO: 25134 - protein, 172 aa, Homo sapiens
MPDSWDKDVYPEPPRRTPVQPNPIVYMMKAFDLIVDRPVTLVREFIERQHAKNRYYYYHRQYRRVPDITECKEEDIMCMYEAEMQWKRDYKVDQEIINIMQDRLKACQQREGQNYQQNCIKEVEQFTQVAKAYQDRYQDLGAYSSARKCLAKQRQRMLQERKAAKEAAAATS

SEQ ID NO: 25135 - protein, 168 aa, Homo sapiens
MPDSWDKDVYPEPPRRTPVQPNPIVYMMKAFDLIVDRPVTLVREFIERQHAKNRYYYYHRQYRRVPDITECKEEDIMCMYEAEMQWKRDYKVDQEIINIMQDRLKACQQREGQNYQQNCIKEVEQFTQVAKAYQDRCACPTHPQPPTILLRPGGQNHCKSSLPSLVLT

SEQ ID NO: 25136 - protein, 246 aa, Homo sapiens
MVWRFQKHIGKGSSQERPIRKDFLTGTAGRDGDRGWGKWWGTALNFPKDPKGSAEGSAPTPLTEGSLPTVGNAPETQPTRRRGAGQRHCNQKPKAGRHFQTLGQPLVGTPPSPQDAAPRQGSPGPGPARTTAVWRPAPSGAAAEHGQKPQTPSASLQPPFPPPPPPGDPTPPSPLPPAHVPPTLLTLQEPVTGEGTSFRVEGLCASRLAVGRGLGALAANTSAPAAGSPLAAAAAAAAAVSSSKFP

SEQ ID NO: 25137 - protein, 451 aa, Homo sapiens
MGKLQSKHAAAARKRRESPEGDSFVASAYASGRKGAEEAERRARDKQELPNGDPKEGPFREDQCPLQVALPAEKAEGREHPGQLLSADDGERAANREGPRGPGGQRLNIDALQCDVSVEEDDRQEWTFTLYDFDNCGKVTREDMSSLMHTIYEVVDASVNHSSGSSKTLRVKLTVSPEPSSKRKEGPPAGQDREPTRCRMEGELAEEPRVADRRLSAHVRRPSTDPQPCSERGPYCVDENTERRNHYLDLAGIENYTSRFGPGSPPVQAKQEPQGRASHLQARSRSQEPDTHAVHHRRSQVLVEHVVPASEPAARALDTQPRPKGPEKQFLKSPKGSGKPPGVPASSKSGKAFSYYLPAVLPPQAPQDGHHLPQPPPPPYGHKRYRQKGREGHSPLKAPHAQPATVEHEVVRDLPPTPAGEGYAVPVIQRHEHHHHHEHHHHHHHHHFHPS

SEQ ID NO: 25138 - protein, 311 aa, Homo sapiens
MGKLQSKHAAAARKRRESPEGDSFVASAYASGRKGAEEAERRARDKQELPNGDPKEGPFREDQCPLQVALPAEKAEGREHPGQLLSADDGERAANREGPRGPGGQRLNIDALQCDVSVEEDDRQEWTFTLYDFDNCGKVTREDMSSLMHTIYEVVDASVNHSSGSSKTLRVKLTVSPEPSSKRKEGPPAGQDREPTRCRMEGELAEEPRVADRRLSAHVRRPSTDPQPCSERGPYCVDENTERRNHYLDLAGIENYTSRFGPGSQLCEKRSSAPRTHSGDKARGVGLCRELWSQAGHPQWPGPFPSGLVAV

SEQ ID NO: 25139 - protein, 1014 aa, Homo sapiens
MRVPVFEDIKDETEEEKIGEEENEEDQVFYKPVIEDLSMELARKCTELISDIRYKEEFKKSKDKCTFVTDSPMLNHVKNIGAFISEAKYKGTIKADLSNSLYKRMPATIDSVFAGEVTQLQSEVAYKQKHDAAKGFSDYAHMKEPPEVKHAMEVNKHQSNISYRKDVQDTHTYSAELDRPDIKMATQISKIISNAEYKKGQGIMNKEPAVIGRPDFEHAVEASKLSSQIKYKEKFDNEMKDKKHHYNPLESASFRQNQLAATLASNVKYKKDIQNMHDPVSDLPNLLFLDHVLKASKMLSGREYKKLFEENKGMYHFDADAVEHLHHKGNAVLQSQVKYKEEYEKNKGKPMLEFVETPSYQASKEAQKMQSEKVYKEDFEKEIKGRSSLDLDKTPEFLHVKYITNLLREKEYKKDLENEIKGKGMELNSEVLDIQRAKRASEMASEKEYKKDLESIIKGKGMQAGTDTLEMQHAKKAAEIASEKDYKRDLETEIKGKGMQVSTDTLDVQRAKKASEMASQKQYKKDLENEIKGKGMQVSMDIPDILRAKRTSEIYSQRKYKDEAEKMLSNYSTIADTPEIQRIKTTQQNISAVFYKKEVGAGTAVKDSPEIERVKKNQQNISSVKYKEEIKHATAISDPPELKRVKENQKNISNLQYKEQNYKATPVSMTPEIERVRRNQEQLSAVKYKGELQRGTAISDPPELKRAKENQKNISNVYYRGQLGRATTLSVTPEMERVKKNQENISSVKYTQDHKQMKGRPSLILDTPAMRHVKEAQNHISMVKYHEDFEKTKGRGFTPVVDDPVTERVRKNTQVVSDAAYKGVHPHIVEMDRRPGIIVDLKVWRTDPGSIFDLDPLEDNIQSRSLHMLSEKASHYRRHWSRSHSSSTFGTGLGDDRSEISEIYPSFSCCSEVTRPSDEGAPVLPGAYQQSHSQGYGYMHQTSVSSMRSMQHSPNLRTYRAMYDYSAQDEDEVSFRDGDYIVNVQPIDDGWMYGTVQRTGRTGMLPANYIEFVN

SEQ ID NO: 25140 - protein, 270 aa, Homo sapiens
MNPQCARCGKVVYPTEKVNCLDKYWHKGCFHCEVCKMALNMNNYKGYEKKPYCNAHYPKQSFTTVADTPENLRLKQQSELQSQVKYKRDFEESKGRGFSIVTDTPELQRLKRTQEQISNVKYHEDFEKTKGRGFTPVVDDPVTERVRKNTQVVSDAAYKGVHPHIVEMDRRPGIIVAPVLPGAYQQSHSQGYGYMHQTSVSSMRSMQHSPNLRTYRAMYDYSAQDEDEVSFRDGDYIVNVQPIDDGWMYGTVQRTGRTGMLPANYIEFVN

SEQ ID NO: 25141 - protein, 470 aa, Homo sapiens
MGKLHSKPAAVCKRRESPEGDSFAVSAAWARKGIEEWIGRQRCPGGVSGPRQLRLAGTIGRSTRELVGDVLRDTLSEEEEDDFRLEVALPPEKTDGLGSGDEKKMERVSEPCPGSKKQLKFEELQCDVSMEEDSRQEWTFTLYDFDNNGKVTREDITSLLHTIYEVVDSSVNHSPTSSKMLRVKLTVAPDGSQSKRSVLVNQADLQSARPRAETKPTEDLRSWEKKQRAPLRFQGDSRLEQSGCYHHCVDENIERRNHYLDLAGIENYTSQFGPGSPSVAQKSELPPRTSNPTRSRSHEPEAIHIPHRKPQGVDPASFHFLDTPIAKVSELQQRLRGTQDGSKHFVRSPKAQGKSVGVGHVARGARNKPPLGPAIPAVSPSAHLAASPALLPSLAPLGHKKHKHRAKESQQGCRGLQAPLASGGPVLGREHLRELPALVVYESQAGQPVQRHEHHHHHEHHHHYHHFYQT

SEQ ID NO: 25142 - protein, 726 aa, Homo sapiens
MAAPGGRGRSLSGLLPAQTSLEYALLDAVTQQEKDSLVYQYLQKVDGWEQDLSVPEFPEGLEWLNTEEPISVYKDLCGKIVVLDFFTYCCINCIHLLPDLHALEHTYSDKDGLLIIGVHSAKFPNEKVLDNIKSAVLRYNITHPMVNDADASLWQELEVSCWPTLVILGPRGNMLFSLIGEGHKDKLFLYTSIALKYYKDRGQIRDNKIGIKLYKDSLPPSPLLFPGKVTVDQVTDRLVIADTGHHRILVVWKNGQIQYSIGGPNPGRKDGIFSESTFNSPQGVAIMNNIIYVADTENHLIRKIDLEAEKVSTVAGIGIQGTDKEGGAKGEQQPISSPWDVVFGTSGSEVQRGDILWIAMAGTHQIWALLLDSGKLPKKNELTKGTCLRFAGSGNEENRNNAYPHKAGFAQPSGLSLASEDPWSCLFVADSESSTVRTVSLKDGAVKHLVGGERDPMNLFAFGDVDGVGINAKLQHPLGVTWDKKRNLLYVADSYNHKIKVVDPKTKNCTTLAGTGDTNNVTSSSFTESTFNEPGGLCIGENGELLYVADTNNHQIKVMDLETKMVSVLPIFRSENAVVDGPFLVEKQKTLPKLPKSAPSIRLSPVTACAGQTLQFKLRLDLPSGSKLTEGVSSCWFLTAEGNEWLLQGQIAAGDIENISSQPTISLQIPDDCLSLEAIVSVSVFLYYCSADSSACMMKAILFSQPLQITDTQQGCIAPVELRYVF

SEQ ID NO: 25143 - protein, 367 aa, Homo sapiens
MAGTHQIWALLLDSGKLPKKNELTKGTCLRFAGSGNEENRNNAYPHKAGFAQPSGLSLASEDPWSCLFVADSESSTVRTVSLKDGAVKHLVGGERDPMNLFAFGDVDGVGINAKLQHPLGVTWDKKRNLLYVADSYNHKIKVVDPKTKNCTTLAGTGDTNNVTSSSFTESTFNEPGGLCIGENGELLYVADTNNHQIKVMDLETKMVSVLPIFRSENAVVDGPFLVEKQKTLPKLPKSAPSIRLSPVTACAGQTLQFKLRLDLPSGSKLTEGVSSCWFLTAEGNEWLLQGQIAAGDIENISSQPTISLQIPDDCLSLEAIVSVSVFLYYCSADSSACMMKAILFSQPLQITDTQQGCIAPVELRYVF

SEQ ID NO: 25144 - protein, 396 aa, Homo sapiens
MACAGLLTVCLLRPPAPQPQPQTPRHPQLAPDPGPAGHTLFQDVFRRADKNDDGKLSFEEFQNYFADGVLSLGELQELFSGIDGHLTDNLETEKLCDYFSEHLGVYRPVLAALESLNRAVLAAMDATKLEYERASKVDQFVTRFLLRETVSQLQALQSSLEGASDTLEAQAHGWRSDAESVEAQSRLCGSRRAGRRALRSVSRSSTWSPGSSDTGRSSEAEMQWRLQVNRLQELIDQLECKVRAVGPGPHKGGPSWYPPEPGPCWRPGPHSVPSQAPRLEPLREEDLAKGPDLHILMAQRQVQVAEEGLQDFHRALRCYVDFTGAQSHCLHVSAQKMLDGASFTLYEFWQDEASWRRHQQSPGSKAFQRILIDHLRAPDTLTTVFFPASWWIMNNN

SEQ ID NO: 25145 - protein, 362 aa, Homo sapiens
MACAGLLTVCLLRPPAPQPQPQTPRHPQLAPDPGPAGHTLFQDVFRRADKNDDGKLSFEEFQNYFADGVLSLGELQELFSGIDGHLTDNLETEKLCDYFSEHLGVYRPVLAALESLNRAVLAAMDATKLEYERASKVDQFVTRFLLRETVSQLQALQSSLEGASDTLEAQAHGWRSDAESVEAQSRLCGSRRAGRRALRSVSRSSTWSPGSSDTGRSSEAEMQWRLQVNRLQELIDQLECKAPRLEPLREEDLAKGPDLHILMAQRQVQVAEEGLQDFHRALRCYVDFTGAQSHCLHVSAQKMLDGASFTLYEFWQDEASWRRHQQSPGSKAFQRILIDHLRAPDTLTTVFFPASWWIMNNN

SEQ ID NO: 25146 - protein, 203 aa, Homo sapiens
MACAGLLTVCLLRPPAPQPQPQTPRHPQLAPDPGPAGHTLFQDVFRRADKNDDGKLSFEEFQNYFADGVLSLGELQELFSGIDGHLTDNLETEKLCDYFSEHLGVYRPVLAALESLNRAVLAAMDATKLEYERASKVDQFVTRFLLRETVSQLQALQSSLEGASDTLEAQAHGWRYVRVLSTCGASAQAPIVPPFQIPTVPAS

SEQ ID NO: 25147 - protein, 165 aa, Homo sapiens
MELCRSLALLGGSLGLMFCLIALSTDFWFEAVGPTHSAHSGLWPTGHGDIISGYIHVTQTFSIMAVLWALVSVSFLVLSCFPSLFPPGHGPLVSTTAAFAAAISMVVAMAVYTSERWDQPPHPQIQTFFSWSFYLGWVSAILLLCTGALSLGAHCGGPRPGYETL

SEQ ID NO: 25148 - protein, 263 aa, Homo sapiens
MEESGYESVLCVKPDVHVYRIPPRATNRGYRAAEWQLDQPSWSGRLRITAKGQMAYIKLEDRTSGELFAQAPVDQFPGTAVESVTDSSRYFVIRIEDGNGRRAFIGIGFGDRGDAFDFNVALQDHFKWVKQQCEFAKQAQNPDQGPKLDLGFKEGQTIKLNIANMKKKEGAAGNPRVRPASTGGLSLLPPPPGGKTSTLIPPPGEQLAVGGSLVQPAVAPSSGGAPVPWPQPNPATADIWGDFTKSTGSTSSQTQPGTGWVQF

SEQ ID NO: 25149 - protein, 273 aa, Homo sapiens
MEESGYESVLCVKPDVHVYRIPPRATNRGYRAAEWQLDQPSWSGRLRITAKGQMAYIKLEDRTSGELFAQAPVDQFPGTAVESVTDSSRYFVIRIEDGNGRRAFIGIGFGDRGDAFDFNVALQDHFKWVKQQCEFAKQAQNPDQGPKLDLGFKEGQTIKLNIANMKKKEGAAGNPRVRPASTGGLSLLPPPPGGKTSTLIPPPGEQLAVGGSLVQPAVAPSSDQLPARPSQAQAGSSSDLSTVFPHVTSGKALPHLGQRKEDEALLSWPVFGA

SEQ ID NO: 25150 - protein, 172 aa, Homo sapiens
MEESGYESVLCVKPDVHVYRIPPRATNRGYRAAEWQLDQPSWSGRLRITAKGQMAYIKLEDRTSGELFAQAPVDQFPGTAVESVTDSSRYFVIRIEDGNGRRAFIGIGFGDRGDAFDFNVALQDHFKWVKQQCEFAKQAQNPDQGPKLDLGFKEGQTIKLNIAVSSTLAWLW

SEQ ID NO: 25151 - protein, 237 aa, Homo sapiens
MEESGAAEWQLDQPSWSGRLRITAKGQMAYIKLEDRTSGELFAQAPVDQFPGTAVESVTDSSRYFVIRIEDGNGRRAFIGIGFGDRGDAFDFNVALQDHFKWVKQQCEFAKQAQNPDQGPKLDLGFKEGQTIKLNIANMKKKEGAAGNPRVRPASTGGLSLLPPPPGGKTSTLIPPPGEQLAVGGSLVQPAVAPSSGGAPVPWPQPNPATADIWGDFTKSTGSTSSQTQPGTGWVQF

SEQ ID NO: 25152 - protein, 900 aa, Homo sapiens
MESCYNPGLDGIIEYDDFKLNSSIVEPKEPAPETADGPYLVIVEQPKQRGFRFRYGCEGPSHGGLPGASSEKGRKTYPTVKICNYEGPAKIEVDLVTHSDPPRAHAHSLVGKQCSELGICAVSVGPKDMTAQFNNLGVLHVTKKNMMGTMIQKLQRQRLRSRPQGLTEAEQRELEQEAKELKKVMDLSIVRLRFSAFLRASDGSFSLPLKPVISQPIHDSKSPGASNLKISRMDKTAGSVRGGDEVYLLCDKVQKDDIEVRFYEDDENGWQAFGDFSPTDVHKQYAIVFRTPPYHKMKIERPVTVFLQLKRKRGGDVSDSKQFTYYPLVEDKEEVQRKRRKALPTFSQPFGGGSHMGGGSGGAAGGYGGAGGGGSLGFFPSSLAYSPYQSGAGPMGCYPGGGGGAQMAATVPSRDSGEEAAEPSAPSRTPQCEPQAPEMLQRAREYNARLFGLAQRSARALLDYGVTADARALLAGQRHLLTAQDENGDTPLHLAIIHGQTSVIEQIVYVIHHAQDLGVVNLTNHLHQTPLHLAVITGQTSVVSFLLRVGADPALLDRHGDSAMHLALRAGAGAPELLRALLQSGAPAVPQLLHMPDFEGLYPVHLAVRARSPECLDLLVDSGAEVEATERQGGRTALHLATEMEELGLVTHLVTKLRANVNARTFAGNTPLHLAAGLGYPTLTRLLLKAGADIHAENEEPLCPLPSPPTSDSDSDSEGPEKDTRSSFRGHTPLDLTCSTKVKTLLLNAAQNTMEPPLTPPSPAGPGLSLGDTALQNLEQLLDGPEAQGSWAELAERLGLRSLVDTYRQTTSPSGSLLRSYELAGGDLAGLLEALSDMGLEEGVRLLRGPETRDKLPSTAEVKEDSAYGSQSVEQEAEKLGPPPEPPGGLCHGHPQPQVH

SEQ ID NO: 25153 - protein, 428 aa, Homo sapiens
MESCYNPGLDGIIEYDDFKLNSSIVEPKEPAPETADGPYLVIVEQPKQRGFRFRYGCEGPSHGGLPGASSEKGRKTYPTVKICNYEGPAKIEVDLVTHSDPPRAHAHSLVGKQCSELGICAVSVGPKDMTAQFNNLGVLHVTKKNMMGTMIQKLQRQRLRSRPQGLTEAEQRELEQEAKELKKVMDLSIVRLRFSAFLRASDGSFSLPLKPVISQPIHDSKSPGASNLKISRMDKTAGSVRGGDEVYLLCDKVQKDDIEVRFYEDDENGWQAFGDFSPTDVHKQYAIVFRTPPYHKMKIERPVTVFLQLKRKRGGDVSDSKQFTYYPLVEDKEEVQRKRRKALPTFSQPFGGGSHMGGGSGGAAGGYGGAGGGEGVLMEGGVKVREAVEEKNLGEAGRGLHACNPALWEAKAGRLPEIRSSRPAWPTA

SEQ ID NO: 25154 - protein, 899 aa, Homo sapiens
MESCYNPGLDGIIEYDDFKLNSSIVEPKEPAPETADGPYLVIVEQPKQRGFRFRYGCEGPSHGGLPGASSEKGRKTYPTVKICNYEGPAKIEVDLVTHSDPPRAHAHSLVGKQCSELGICAVSVGPKDMTAQFNNLGVLHVTKKNMMGTMIQKLQRQRLRSRPQGLTEAEQRELEQEAKELKKVMDLSIVRLRFSAFLRASDGSFSLPLKPVISQPIHDSKSPGASNLKISRMDKTAGSVRGGDEVYLLCDKVQKDDIEVRFYEDDENGWQAFGDFSPTDVHKQYAIVFRTPPYHKMKIERPVTVFLQLKRKRGGDVSDSKQFTYYPLVEDKEEVQRKRRKALPTFSQPFGGGSHMGGGSGGAAGGYGGAGGGGSLGFFPSSLAYSPYQSGAGPMGCYPGGGGGAQMAATVPSRDSGEEAAEPSAPSRTPQCEPQAPEMLQRAREYNARLFGLAQRSARALLDYGVTADARALLAGQRHLLTAQDENGDTPLHLAIIHGQTSVIEQIVYVIHHAQDLGVVNLTNHLHQTPLHLAVITGQTSVVSFLLRVGADPALLDRHGDSAMHLALRAGAGAPELLRALLQSGAPAVPQLLHMPDFEGLYPVHLAVRARSPECLDLLVDSGAEVEATERQGGRTALHLATEMEELGLVTHLVTKLRANVNARTFAGNTPLHLAAGLGYPTLTRLLLKAGADIHAENEEPLCPLPSPPTSDSDSDSEGPEKDTRSSFRGHTPLDLTCSTKVKTLLLNAAQNTMEPPLTPPSPAGPGLSLGDTALQNLEQLLDGPEAQGSWAELAERLGLRSLVDTYRQTTSPSGSLLRSYELAGGDLAGLLEALSDMGLEEGVRLLRGPETRDKLPSTEVKEDSAYGSQSVEQEAEKLGPPPEPPGGLCHGHPQPQVH

SEQ ID NO: 25155 - protein, 153 aa, Homo sapiens
MTKIKADPDGPEAQAEACSGERTYQELLVNQNPIAQPLASRRLTRKLYKCIKKAVKQKQIRRGVKEVQKFVNKGEKGIMVLAGDTLPIEVYCHLPVMCEDRNLPYVYIPSKTDLGAAAGSKRPTCVIMVKPHEEYQEAYDECLEEVQSLPLPL

SEQ ID NO: 25156 - protein, 175 aa, Homo sapiens
MAAVSMSVVLRQTLWRRRAVAVAALSVSRVPTRSLRTSTWRLAQDQTQDTQLITVDEKLDITTLTGVPEEHIKTRKVRIFVPARNNMQSGVNNTKKWKMEFDTRERWENPLMGWASTADPLSNMVLTFSTKEDAVSFAEKNGWSYDIEERKVPKPKSKSYGANFSWNKRTRVSTK

SEQ ID NO: 25157 - protein, 688 aa, Homo sapiens
MQVSSLNEVKIYSLSCGKSLPEWLSDRKKRALQKKDVDVRRRIELIQDFEMPTVCTTIKVSKDGQYILATGTYKPRVRCYDTYQLSLKFERCLDSEVVTFEILSDDYSKIVFLHNDRYIEFHSQSGFYYKTRIPKFGRDFSYHYPSCDLYFVGASSEVYRLNLEQGRYLNPLQTDAAENNVCDINSVHGLFATGTIEGRVECWDPRTRNRVGLLDCALNSVTADSEINSLPTISALKFNGALTMAVGTTTGQVLLYDLRSDKPLLVKDHQYGLPIKSVHFQDSLDLILSADSRIVKMWNKNSGKIFTSLEPEHDLNDVCLYPNSGMLLTANETPKMGIYYIPVLGPAPRWCSFLDNLTEELEENPESTVYDDYKFVTKKDLENLGLTHLIGSPFLRAYMHGFFMDIRLYHKVKLMVNPFAYEEYRKDKIRQKIEETRAQRVQLKKLPKVNKELALKLIEEEEEKQKSTWKKKVKSLPNILTDDRFKVMFENPDFQVDEESEEFRLLNPLVSKISEKRKKKLRLLEQQELREKEEEEEPEGKPSDAESSESSDDEKAWVEEVRKQRRLLQQEEKVKRQERLKEDQQTVLKPQFYEIKAGEEFRSFKDSATKQKLMNKTLEDRLKIEAKNGTLSVSDTTVGSKQLTFTLKRSEQQKKQQEAEKLHRQERKRLRRSAGHLKSRHKRGRSFH

SEQ ID NO: 25158 - protein, 638 aa, Homo sapiens
MQVSSLNEVKIYSLSCGKSLPEWLSDRKKRALQKKDVDVRRRIELIQDFEMPTVCTTIKVSKDGQYILATGTYKPRVRCYDTYQLSLKFERCLDSEVVTFEILSDDYSKIVFLHNDRYIEFHSQSGFYYKTRIPKFGRDFSYHYPSCDLYFVGASSEVYRLNLEQGRYLNPLQTDAAENNVCDINSVHGLFATGTIEGRVECWDPRTRNRVGLLDCALNSVTADSEINSLPTISALKFNGALTMAVGTTTGQGKIFTSLEPEHDLNDVCLYPNSGMLLTANETPKMGIYYIPVLGPAPRWCSFLDNLTEELEENPESTVYDDYKFVTKKDLENLGLTHLIGSPFLRAYMHGFFMDIRLYHKVKLMVNPFAYEEYRKDKIRQKIEETRAQRVQLKKLPKVNKELALKLIEEEEEKQKSTWKKKVKSLPNILTDDRFKVMFENPDFQVDEESEEFRLLNPLVSKISEKRKKKLRLLEQQELREKEEEEEPEGKPSDAESSESSDDEKAWVEEVRKQRRLLQQEEKVKRQERLKEDQQTVLKPQFYEIKAGEEFRSFKDSATKQKLMNKTLEDRLKIEAKNGTLSVSDTTVGSKQLTFTLKRSEQQKKQQEAEKLHRQERKRLRRSAGHLKSRHKRGRSFH

SEQ ID NO: 25159 - protein, 195 aa, Homo sapiens
MTTQSSEVYRLNLEQGRYLNPLQTDAAENNVCDINSVHGLFATGTIEGRVECWDPRTRNRVGLLDCALNSVTADSEINSLPTISALKFNGALTMAVGTTTGQVLLYDLRSDKPLLVKDHQYGLPIKSVHFQDSLDLILSADSRIVKMWNKNSGKIFTSLEPEHDLNDVCLYPNSGMLLTANETPKMGIYYIPPSL

SEQ ID NO: 25160 - protein, 662 aa, Homo sapiens
MQVSSLNEVKIYSLSCGKSLPEWLSDRKKRALQKKDVDVRRRIELIQDFEMPTVCTTIKVSKDGQYILATVVTFEILSDDYSKIVFLHNDRYIEFHSQSGFYYKTRIPKFGRDFSYHYPSCDLYFVGASSEVYRLNLEQGRYLNPLQTDAAENNVCDINSVHGLFATGTIEGRVECWDPRTRNRVGLLDCALNSVTADSEINSLPTISALKFNGALTMAVGTTTGQVLLYDLRSDKPLLVKDHQYGLPIKSVHFQDSLDLILSADSRIVKMWNKNSGKIFTSLEPEHDLNDVCLYPNSGMLLTANETPKMGIYYIPVLGPAPRWCSFLDNLTEELEENPESTVYDDYKFVTKKDLENLGLTHLIGSPFLRAYMHGFFMDIRLYHKVKLMVNPFAYEEYRKDKIRQKIEETRAQRVQLKKLPKVNKELALKLIEEEEEKQKSTWKKKVKSLPNILTDDRFKVMFENPDFQVDEESEEFRLLNPLVSKISEKRKKKLRLLEQQELREKEEEEEPEGKPSDAESSESSDDEKAWVEEVRKQRRLLQQEEKVKRQERLKEDQQTVLKPQFYEIKAGEEFRSFKDSATKQKLMNKTLEDRLKIEAKNGTLSVSDTTVGSKQLTFTLKRSEQQKKQQEAEKLHRQERKRLRRSAGHLKSRHKRGRSFH

SEQ ID NO: 25161 - protein, 275 aa, Homo sapiens
MWRAGSMSAELGVGCALRAVNERVQQAVARRPRDLPAIQPRLVAVSKTKPADMVIEAYGHGQRTFGENYVQELLEKASNPKILSLCPEIKWHFIGHLQKQNVNKLMAVPNLFMLETVDSVKLADKVNSSWQRKGSPERLKVMVQINTSGEESKHGLPPSETIAIVEHINAKCPNLEFVGLMTIGSFGHDLSQGPNPDFQLLLSLREELCKKLNIPADQVELSMGMSADFQHAVEVGSTNVRIGSTIFGERDYSKKPTPDKCAADVKAPLEVAQEH

SEQ ID NO: 25162 - protein, 709 aa, Homo sapiens
MATAGGGSGADPGSRGLLRLLSFCVLLAGLCRGNSVERKIYIPLNKTAPCVRLLNATHQIGCQSSISGDTGVIHVVEKEEDLQWVLTDGPNPPYMVLLESKHFTRDLMEKLKGRTSRIAGLAVSLTKPSPASGFSPSVQCPNDGFGVYSNSYGPEFAHCREIQWNSLGNGLAYEDFSFPIFLLEDENETKVIKQCYQDHNLSQNGSAPTFPLCAMQLFSHMHAVISTATCMRRSSIQSTFSINPEIVCDPLSDYNVWSMLKPINTTGTLKPDDRVVVAATRLDSRSFFWNVAPGAESAVASFVTQLAAAEALQKAPDVTTLPRNVMFVFFQGETFDYIGSSRMVYDMEKGKFPVQLENVDSFVELGQVALRTSLELWMHTDPVSQKNESVRNQVEDLLATLEKSGAGVPAVILRRPNQSQPLPPSSLQRFLRARNISGVVLADHSGAFHNKYYQSIYDTAENINVSYPEWLSPEEDLNFVTDTAKALADVATVLGRALYELAGGTNFSDTVQADPQTVTRLLYGFLIKANNSWFQSILRQDLRSYLGDGPLQHYIAVSSPTNTTYVVQYALANLTGTVVNLTREQCQDPSKVPSENKDLYEYSWVQGPLHSNETDRLPRCVRSTARLARALSPAFELSQWSSTEYSTWTESRWKDIRARIFLIASKELELITLTVGFGILIFSLIVTYCINAKADVLFIAPREPGAVSY

SEQ ID NO: 25163 - protein, 689 aa, Homo sapiens
MDFNLILESLCRGNSVERKIYIPLNKTAPCVRLLNATHQIGCQSSISGDTGVIHVVEKEEDLQWVLTDGPNPPYMVLLESKHFTRDLMEKLKGRTSRIAGLAVSLTKPSPASGFSPSVQCPNDGFGVYSNSYGPEFAHCREIQWNSLGNGLAYEDFSFPIFLLEDENETKVIKQCYQDHNLSQNGSAPTFPLCAMQLFSHMHAVISTATCMRRSSIQSTFSINPEIVCDPLSDYNVWSMLKPINTTGTLKPDDRVVVAATRLDSRSFFWNVAPGAESAVASFVTQLAAAEALQKAPDVTTLPRNVMFVFFQGETFDYIGSSRMVYDMEKGKFPVQLENVDSFVELGQVALRTSLELWMHTDPVSQKNESVRNQVEDLLATLEKSGAGVPAVILRRPNQSQPLPPSSLQRFLRARNISGVVLADHSGAFHNKYYQSIYDTAENINVSYPEWLSPEEDLNFVTDTAKALADVATVLGRALYELAGGTNFSDTVQADPQTVTRLLYGFLIKANNSWFQSILRQDLRSYLGDGPLQHYIAVSSPTNTTYVVQYALANLTGTVVNLTREQCQDPSKVPSENKDLYEYSWVQGPLHSNETDRLPRCVRSTARLARALSPAFELSQWSSTEYSTWTESRWKDIRARIFLIASKELELITLTVGFGILIFSLIVTYCINAKADVLFIAPREPGAVSY

SEQ ID NO: 25164 - protein, 580 aa, Homo sapiens
MFAGLQDLGVANGEDLKETLTNCTEPLKAIEQFQTENGVLLPSLQSALPFLDLHGTPRLEFHQSVFDELRDKLLERVSAIASEGKAEERYKKLEDLLEKSFSLVKMPSLQPVVMCVMKHLPKVPEKKLKLVMADKELYRACAVEVKRQIWQDNQALFGDEVSPLLKQYILEKESALFSTELSVLHNFFSPSPKTRRQGEVVQRLTRMVGKNVKLYDMVLQFLRTLFLRTRNVHYCTLRAELLMSLHDLDVGEICTVDPCHKFTWCLDACIRERFVDSKRARELQGFLDGVKKGQEQVLGDLSMILCDPFAINTLALSTVRHLQELVGQETLPRDSPDLLLLLRLLALGQGAWDMIDSQVFKEPKMEVELITRFLPMLMSFLVDDYTFNVDQKLPAEEKAPVSYPNTLPESFTKFLQEQRMACEVGLYYVLHITKQRNKNALLRLLPGLVETFGDLAFGDIFLHLLTGNLALLADEFALEDFCSSLFDGFFLTASPRKENVHRHALRLLIHLHPRVAPSKLEALQKALEPTGQSGEAVKELYSQLGEKLEQLDHRKPSPAQAAETPALELPLPSVPAPAPL

SEQ ID NO: 25165 - protein, 628 aa, Homo sapiens
MAELEGAGERGSGGPRGPAERASGVSAAAPGERAGDGAPSRAVAGASAMFAGLQDLGVANGEDLKETLTNCTEPLKAIEQFQTENGVLLPSLQSALPFLDLHGTPRLEFHQSVFDELRDKLLERVSAIASEGKAEERYKKLEDLLEKSFSLVKMPSLQPVVMCVMKHLPKVPEKKLKLVMADKELYRACAVEVKRQIWQDNQALFGDEVSPLLKQYILEKESALFSTELSVLHNFFSPSPKTRRQGEVVQRLTRMVGKNVKLYDMVLQFLRTLFLRTRNVHYCTLRAELLMSLHDLDVGEICTVDPCHKFTWCLDACIRERFVDSKRARELQGFLDGVKKGQEQVLGDLSMILCDPFAINTLALSTVRHLQELVGQETLPRDSPDLLLLLRLLALGQGAWDMIDSQVFKEPKMEVELITRFLPMLMSFLVDDYTFNVDQKLPAEEKAPVSYPNTLPESFTKFLQEQRMACEVGLYYVLHITKQRNKNALLRLLPGLVETFGDLAFGDIFLHLLTGNLALLADEFALEDFCSSLFDGFFLTASPRKENVHRHALRLLIHLHPRVAPSKLEALQKALEPTGQSGEAVKELYSQLGEKLEQLDHRKPSPAQAAETPALELPLPSVPAPAPL

SEQ ID NO: 25166 - protein, 181 aa, Homo sapiens
MMLQHPGQVSASEVSASAIVPCLSPPGSLVFEDFANLTPFVKEELRFAIQNKHLCHRMSSALESVTVSDRPLGVSITKAEVAPEEDERKKRRRERNKIAAAKCRNKKKEKTECLQKESEKLESVNAELKAQIEELKNEKQHLIYMLNLHRPTCIVRAQNGRTPEDERNLFIQQIKEGTLQS

SEQ ID NO: 25167 - protein, 118 aa, Homo sapiens
MMLQHPGQVSASEVSASAIVPCLSPPGSLVFEDFANLTPFVKEELRFAIQNKHLCHRMSSALESVTVSDRPLGVSITKAEVAPEEDERKKRRRERNKIAAAKCRNKKKEKTECLQLQY

SEQ ID NO: 25168 - protein, 135 aa, Homo sapiens
MMLQHPGQVSASEVSASAIVPCLSPPGSLVFEDFANLTPFVKEELRFAIQNKHLCHRMSSALESVTVSDRPLGVSITKAEVAPEEDERKKRRRERNKIAAAKCRNKKKEKTECLQKLPRPFWVQKTCIWAVDSCK

SEQ ID NO: 25169 - protein, 106 aa, Homo sapiens
MMLQHPGQVSASEEELRFAIQNKHLCHRMSSALESVTVSDRPLGVSITKAEVAPEEDERKKRRRERNKIAAAKCRNKKKEKTECLQKLPRPFWVQKTCIWAVDSCK

SEQ ID NO: 25170 - protein, 124 aa, Homo sapiens
MSSALESVTVSDRPLGVSITKAEVAPEEDERKKRRRERNKIAAAKCRNKKKEKTECLQKESEKLESVNAELKAQIEELKNEKQHLIYMLNLHRPTCIVRAQNGRTPEDERNLFIQQIKEGTLQS

SEQ ID NO: 25171 - protein, 621 aa, Homo sapiens
MVLCPVIGKLLHKRVVLASASPRRQEILSNAGLRFEVVPSKFKEKLDKASFATPYGYAMETAKQKALEVANRLYQKDLRAPDVVIGADTIVTVGGLILEKPVDKQDAYRMLSRLSGREHSVFTGVAIVHCSSKDHQLDTRVSEFYEETKVKFSELSEELLWEYVHSGEPMDKAGGYGIQALGGMLVESVHGDFLNVVGFPLNHFCKQLVKLYYPPRPEDLRRSVKHDSIPAADTFEDLSDVEGGGSEPTQRDAGSRDEKAEAGEAGQATAEAECHRTRETLPPFPTRLLELIEGFMLSKGLLTACKLKVFDLLKDEAPQKAADIASKVDASACGMERLLDICAAMGLLEKTEQGYSNTETANVYLASDGEYSLHGFIMHNNDLTWNLFTYLEFAIREGTNQHHRALGKKAEDLFQDAYYQSPETRLRFMRAMHGMTKLTACQVATAFNLSRFSSACDVGGCTGALARELAREYPRMQVTVFDLPDIIELAAHFQPPGPQAVQIHFAAGDFFRDPLPSAELYVLCRILHDWPDDKVHKLLSRVAESCKPGAGLLLVETLLDEEKRVAQRALMQSLNMLVQTEGKERSLGEYQCLLELHGFHQVQVVHLGGVLDAILATKVAP

SEQ ID NO: 25172 - protein, 605 aa, Homo sapiens
MVLCPVIGKLLHKRVVLASASPRRQEILSNAGLRFEVVPSKFKEKLDKASFATPYGYAMETAKQKALEVANRLYQTVGGLILEKPVDKQDAYRMLSRLSGREHSVFTGVAIVHCSSKDHQLDTRVSEFYEETKVKFSELSEELLWEYVHSGEPMDKAGGYGIQALGGMLVESVHGDFLNVVGFPLNHFCKQLVKLYYPPRPEDLRRSVKHDSIPAADTFEDLSDVEGGGSEPTQRDAGSRDEKAEAGEAGQATAEAECHRTRETLPPFPTRLLELIEGFMLSKGLLTACKLKVFDLLKDEAPQKAADIASKVDASACGMERLLDICAAMGLLEKTEQGYSNTETANVYLASDGEYSLHGFIMHNNDLTWNLFTYLEFAIREGTNQHHRALGKKAEDLFQDAYYQSPETRLRFMRAMHGMTKLTACQVATAFNLSRFSSACDVGGCTGALARELAREYPRMQVTVFDLPDIIELAAHFQPPGPQAVQIHFAAGDFFRDPLPSAELYVLCRILHDWPDDKVHKLLSRVAESCKPGAGLLLVETLLDEEKRVAQRALMQSLNMLVQTEGKERSLGEYQCLLELHGFHQVQVVHLGGVLDAILATKVAP

SEQ ID NO: 25173 - protein, 563 aa, Homo sapiens
METAKQKALEVANRLYQKDLRAPDVVIGADTIVTVGGLILEKPVDKQDAYRMLSRLSGREHSVFTGVAIVHCSSKDHQLDTRVSEFYEETKVKFSELSEELLWEYVHSGEPMDKAGGYGIQALGGMLVESVHGDFLNVVGFPLNHFCKQLVKLYYPPRPEDLRRSVKHDSIPAADTFEDLSDVEGGGSEPTQRDAGSRDEKAEAGEAGQATAEAECHRTRETLPPFPTRLLELIEGFMLSKGLLTACKLKVFDLLKDEAPQKAADIASKVDASACGMERLLDICAAMGLLEKTEQGYSNTETANVYLASDGEYSLHGFIMHNNDLTWNLFTYLEFAIREGTNQHHRALGKKAEDLFQDAYYQSPETRLRFMRAMHGMTKLTACQVATAFNLSRFSSACDVGGCTGALARELAREYPRMQVTVFDLPDIIELAAHFQPPGPQAVQIHFAAGDFFRDPLPSAELYVLCRILHDWPDDKVHKLLSRVAESCKPGAGLLLVETLLDEEKRVAQRALMQSLNMLVQTEGKERSLGEYQCLLELHGFHQVQVVHLGGVLDAILATKVAP

SEQ ID NO: 25174 - protein, 291 aa, Homo sapiens
MTKEYQDLQHLDNEESDHHQLRKGPPPPQPLLQRLCSGPRLLLLSLGLSLLLLVVVCVIGSQNSQLQEELRGLRETFSNFTASTEAQVKGLSTQGGNVGRKMKSLESQLEKQQKDLSEDHSSLLLHVKQFVSDLRSLSCQMAALQGNGSERTCCPVNWVEHERSCYWFSRSGKAWADADNYCRLEDAHLVVVTSWEEQKFVQHHIGPVNTWMGLHDQNGPWKWVDGTDYETGFKNWRPEQPDDWYGHGLGGGEDCAHFTDDGRWNDDVCQRPYRWVCETELDKASQEPPLL

SEQ ID NO: 25175 - protein, 252 aa, Homo sapiens
MTKEYQDLQHLDNEESDHHQLRKDSQLQEELRGLRETFSNFTASTEAQVKGLSTQGGNVGRKMKSLESQLEKQQKDLSEDHSSLLLHVKQFVSDLRSLSCQMAALQGNGSERTCCPVNWVEHERSCYWFSRSGKAWADADNYCRLEDAHLVVVTSWEEQKFVQHHIGPVNTWMGLHDQNGPWKWVDGTDYETGFKNWRPEQPDDWYGHGLGGGEDCAHFTDDGRWNDDVCQRPYRWVCETELDKASQEPPLL

SEQ ID NO: 25176 - protein, 1429 aa, Homo sapiens
MVAAAAATEARLRRRTAATAALAGRSGGPHWDWDVTRAGRPGLGAGLRLPRLLSPPLRPRLLLLLLLLSPPLLLLLLPCEAEAAAAAAAVSGSAAAEAKECDRPCVNGGRCNPGTGQCVCPAGWVGEQCQHCGGRFRLTGSSGFVTDGPGNYKYKTKCTWLIEGQPNRIMRLRFNHFATECSWDHLYVYDGDSIYAPLVAAFSGLIVPERDGNETVPEVVATSGYALLHFFSDAAYNLTGFNITYSFDMCPNNCSGRGECKISNSSDTVECECSENWKGEACDIPHCTDNCGFPHRGICNSSDVRGCSCFSDWQGPGCSVPVPANQSFWTREEYSNLKLPRASHKAVVNGNIMWVVGGYMFNHSDYNMVLAYDLASREWLPLNRSVNNVVVRYGHSLALYKDKIYMYGGKIDSTGNVTNELRVFHIHNESWVLLTPKAKEQYAVVGHSAHIVTLKNGRVVMLVIFGHCPLYGYISNVQEYDLDKNTWSILHTQGALVQGGYGHSSVYDHRTRALYVHGGYKAFSANKYRLADDLYRYDVDTQMWTILKDSRFFRYLHTAVIVSGTMLVFGGNTHNDTSMSHGAKCFSSDFMAYDIACDRWSVLPRPDLHHDVNRFGHSAVLHNSTMYVFGGFNSLLLSDILVFTSEQCDAHRSEAACLAAGPGIRCVWNTGSSQCISWALATDEQEEKLKSECFSKRTLDHDRCDQHTDCYSCTANTNDCHWCNDHCVPRNHSCSEGQISIFRYENCPKDNPMYYCNKKTSCRSCALDQNCQWEPRNQECIALPENICGIGWHLVGNSCLKITTAKENYDNAKLFCRNHNALLASLTTQKKVEFVLKQLRIMQSSQSMSKLTLTPWVGLRKINVSYWCWEDMSPFTNSLLQWMPSEPSDAGFCGILSEPSTRGLKAATCINPLNGSVCERPANHSAKQCRTPCALRTACGDCTSGSSECMWCSNMKQCVDSNAYVASFPFGQCMEWYTMSTCPPENCSGYCTCSHCLEQPGCGWCTDPSNTGKGKCIEGSYKGPVKMPSQAPTGNFYPQPLLNSSMCLEDSRYNWSFIHCPACQCNGHSKCINQSICEKCENLTTGKHCETCISGFYGDPTNGGKCQPCKCNGHASLCNTNTGKCFCTTKGVKGDECQLCEVENRYQGNPLRGTCYYTLLIDYQFTFSLSQEDDRYYTAINFVATPDEQNRDLDMFINASKNFNLNITWAASFSAGTQAGEEMPVVSKTNIKEYKDSFSNEKFDFRNHPNITFFVYVSNFTWPIKIQIAFSQHSNFMDLVQFFVTFFSCFLSLLLVAAVVWKIKQSCWASRRREQLLREMQQMASRPFASVNVALETDEEPPDLIGGSIKTVPKPIALEPCFGNKAAVLSVFVRLPRGLGGIPPPGQSGLAVASALVDISQQMPIVYKEKSGAVRNRKQQPPAQPGTCI

SEQ ID NO: 25177 - protein, 1272 aa, Homo sapiens
MVAAAAATEARLRRRTAATAALAGRSGGPHWDWDVTRAGRPGLGAGLRLPRLLSPPLRPRLLLLLLLLSPPLLLLLLPCEAEAAAAAAAVSGSAAAEAKECDRPCVNGGRCNPGTGQCVCPAGWVGEQCQHCGGRFRLTGSSGFVTDGPGNYKYKTKCTWLIEGQPNRIMRLRFNHFATECSWDHLYVYDGDSIYAPLVAAFSGLIVPERDGNETVPEVVATSGYALLHFFSDAAYNLTGFNITYSFDMCPNNCSGRGECKISNSSDTVECECSENWKGEACDIPHCTDNCGFPHRGICNSSDVRGCSCFSDWQGPGCSVPVPANQSFWTREEYSNLKLPRASHKAVVNGNIMWVVGGYMFNHSDYNMVLAYDLASREWLPLNRSVNNVVVRYGHSLALYKDKIYMYGGKIDSTGNVTNELRVFHIHNESWVLLTPKAKEQYAVVGHSAHIVTLKNGRVVMLVIFGHCPLYGYISNVQEYDLDKNTWSILHTQGALVQGGYGHSSVYDHRTRALYVHGGYKAFSANKYRLADDLYRYDVDTQMWTILKDSRFFRYLHTAVIVSGTMLVFGGNTHNDTSMSHGAKCFSSDFMAYDIACDRWSVLPRPDLHHDVNRFGHSAVLHNSTMYVFGGFNSLLLSDILVFTSEQCDAHRSEAACLAAGPGIRCVWNTGSSQCISWALATDEQEEKLKSECFSKRTLDHDRCDQHTDCYSCTANTNDCHWCNDHCVPRNHSCSEGQISIFRYENCPKDNPMYYCNKKTSCRSCALDQNCQWEPRNQECIALPENICGIGWHLVGNSCLKITTAKENYDNAKLFCRNHNALLASLTTQKKVEFVLKQLRIMQSSQSMSKLTLTPWVGLRKINVSYWCWEDMSPFTNSLLQWMPSEPSDAGFCGILSEPSTRGLKAATCINPLNGSVCERPANHSAKQCRTPCALRTACGDCTSGSSECMWCSNMKQCVDSNAYVASFPFGQCMEWYTMSTCPPENCSGYCTCSHCLEQPGCGWCTDPSNTGKGKCIEGSYKGPVKMPSQAPTGNFYPQPLLNSSMCLEDSRYNWSFIHCPACQCNGHSKCINQSICEKCENLTTGKHCETCISGFYGDPTNGGKCQPCKCNGHASLCNTNTGKCFCTTKGVKGDECQLCEVENRYQGNPLRGTCYYTLLIDYQFTFSLSQEDDRYYTAINFVATPDEQNRDLDMFINASKNFNLNITWAASFSAGTQAGEEMPVVSKTNIKEYKDSFSNEKFDFRNHPNITFFVYVSNFTWPIKIQVQTEQ

SEQ ID NO: 25178 - protein, 1198 aa, Homo sapiens
MVAAAAATEARLRRRTAATAALAGRSGGPHCVNGGRCNPGTGQCVCPAGWVGEQCQHCGGRFRLTGSSGFVTDGPGNYKYKTKCTWLIEGQPNRIMRLRFNHFATECSWDHLYVYDGDSIYAPLVAAFSGLIVPERDGNETVPEVVATSGYALLHFFSDAAYNLTGFNITYSFDMCPNNCSGRGECKISNSSDTVECECSENWKGEACDIPHCTDNCGFPHRGICNSSDVRGCSCFSDWQGPGCSVPVPANQSFWTREEYSNLKLPRASHKAVVNGNIMWVVGGYMFNHSDYNMVLAYDLASREWLPLNRSVNNVVVRYGHSLALYKDKIYMYGGKIDSTGNVTNELRVFHIHNESWVLLTPKAKEQYAVVGHSAHIVTLKNGRVVMLVIFGHCPLYGYISNVQEYDLDKNTWSILHTQGALVQGGYGHSSVYDHRTRALYVHGGYKAFSANKYRLADDLYRYDVDTQMWTILKDSRFFRYLHTAVIVSGTMLVFGGNTHNDTSMSHGAKCFSSDFMAYDIACDRWSVLPRPDLHHDVNRFGHSAVLHNSTMYVFGGFNSLLLSDILVFTSEQCDAHRSEAACLAAGPGIRCVWNTGSSQCISWALATDEQEEKLKSECFSKRTLDHDRCDQHTDCYSCTANTNDCHWCNDHCVPRNHSCSEGQISIFRYENCPKDNPMYYCNKKTSCRSCALDQNCQWEPRNQECIALPENICGIGWHLVGNSCLKITTAKENYDNAKLFCRNHNALLASLTTQKKVEFVLKQLRIMQSSQSMSKLTLTPWVGLRKINVSYWCWEDMSPFTNSLLQWMPSEPSDAGFCGILSEPSTRGLKAATCINPLNGSVCERPANHSAKQCRTPCALRTACGDCTSGSSECMWCSNMKQCVDSNAYVASFPFGQCMEWYTMSTCPPENCSGYCTCSHCLEQPGCGWCTDPSNTGKGKCIEGSYKGPVKMPSQAPTGNFYPQPLLNSSMCLEDSRYNWSFIHCPACQCNGHSKCINQSICEKCENLTTGKHCETCISGFYGDPTNGGKCQPCKCNGHASLCNTNTGKCFCTTKGVKGDECQLCEVENRYQGNPLRGTCYYTLLIDYQFTFSLSQEDDRYYTAINFVATPDEQNRDLDMFINASKNFNLNITWAASFSAGTQAGEEMPVVSKTNIKEYKDSFSNEKFDFRNHPNITFFVYVSNFTWPIKIQVQTEQ

SEQ ID NO: 25179 - protein, 1090 aa, Homo sapiens
MMPMILTVFLSNNEQILTEVPITPETTCRDVVEFCKEPGEGSCHLAEVWRGNERPIPFDHMMYEHLQKWGPRREEVKFFLRHEDSPTENSEQGGRQTQEQRTQRNVINVPGEKRTENGVGNPRVELTLSELQDMAARQQQQIENQQQMLVAKEQRLHFLKQQERRQQQSISENEKLQKLKERVEAQENKLKKIRAMRGQVDYSKIMNGNLSAEIERFSAMFQEKKQEVQTAILRVDQLSQQLEDLKKGKLNGFQSYNGKLTGPAAVELKRLYQELQIRNQLNQEQNSKLQQQKELLNKRNMEVAMMDKRISELRERLYGKKIQLNRVNGTSSPQSPLSTSGRVAAVGPYIQVPSAGSFPVLGDPIKPQSLSIASNAAHGRSKSANDGNWPTLKQNSSSSVKPVQVAGADWKDPSVEGSVKQGTVSSQPVPFSALGPTEKPGIEIGKVPPPIPGVGKQLPPSYGTYPSPTPLGPGSTSSLERRKEGSLPRPSAGLPSRQRPTLLPATGSTPQPGSSQQIQQRISVPPSPTYPPAGPPAFPAGDSKPELPLTVAIRPFLADKGSRPQSPRKGPQTVNSSSIYSMYLQQATPPKNYQPAAHSALNKSVKAVYGKPVLPSGSTSPSPLPFLHGSLSTGTPQPQPPSESTEKEPEQDGPAAPADGSTVESLPRPLSPTKLTPIVHSPLRYQSDADLEALRRKLANAPRPLKKRSSITEPEGPGGPNIQKLLYQRFNTLAGGMEGTPFYQPSPSQDFMGTLADVDNGNTNANGNLEELPPAQPTAPLPAEPAPSSDANDNELPSPEPEELICPQTTHQTAEPAEDNNNNVATVPTTEQIPSPVAEAPSPGEEQVPPAPLPPASHPPATSTNKRTNLKKPNSERTGHGLRVRFNPLALLLDASLEGEFDLVQRIIYEVEDPSKPNDEGITPLHNAVCAGHHHIVKFLLDFGVNVNAADSDGWTPLHCAASCNSVHLCKQLVESGAAIFASTISDIETAADKCEEMEEGYIQCSQFLYGVQEKLGVMNKGVAYALWDYEAQNSDELSFHEGDALTILRRKDESETEWWWARLGDREGYVPKNLLGLYPRIKPRQRTLA

SEQ ID NO: 25180 - protein, 380 aa, Homo sapiens
MKEYVLLLFLALCSAKPFFSPSHIALKNMMLKDMEDTDDDDDDDDDDDDDDEDNSLFPTREPRSHFFPFDLFPMCPFGCQCYSRVVHCSDLGLTSVPTNIPFDTRMLDLQNNKIKEIKENDFKGLTSLYGLILNNNKLTKIHPKAFLTTKKLRRLYLSHNQLSEIPLNLPKSLAELRIHENKVKKIQKDTFKGMNALHVLEMSANPLDNNGIEPGAFEGVTVFHIRIAEAKLTSVPKGLPPTLLELHLDYNKISTVELEDFKRYKELQRLGLGNNKITDIENGSLANIPRVREIHLENNKLKKIPSGLPELKYLQIIFLHSNSIARVGVNDFCPTVPKMKKSLYSAISLFNNPVKYWEMQPATFRCVLSRMSVQLGNFGM

SEQ ID NO: 25181 - protein, 252 aa, Homo sapiens
MIKEAGAIISTRHCNPQNGDRCVAALARVECTHFLWPMCIGEVAHVSAEITYTSKHSVEVQVNMMSENILTGAKKLTNKATLWYAPLSLTNVDKVLEEPPVVYFRQEQEEEGQKRYKTQKLERMETNWRNGDIVQPVLNPEPNTVSYSQSSLIHLVGPSDCTLHSFVHEGVTMKVMDEVAGILAARHCKTNLVTASMEAINFDNKIRKGCIKTISGRMTFTSNKSVEIEVLVDADCVVDSSQKRYRAASVFT

SEQ ID NO: 25182 - protein, 380 aa, Homo sapiens
MKLLARALRLCEFGRQASSRRLVAGQGCVGPRRGCCAPVQVVGPRADLPPCGACITGRIMRPDDANVAGNVHGGTILKMIEEAGAIISTRHCNSQNGERCVAALARVERTDFLSPMCIGEVAHVSAEITYTSKHSVEVQVNVMSENILTGAKKLTNKATLWYVPLSLKNVDKVLEVPPVVYSRQEQEEEGRKRYEAQKLERMETKWRNGDIVQPVLNPEPNTVSYSQSSLIHLVGPSDCTLHGFVHGGVTMKLMDEVAGIVAARHCKTNIVTASVDAINFHDKIRKGCVITISGRMTFTSNKSMEIEVLVDADPVVDSSQKRYRAASAFFTYVSLSQEGRSLPVPQLVPETEDEKKRFEEGKGRYLQMKAKRQGHAEPQP

SEQ ID NO: 25183 - protein, 246 aa, Homo sapiens
MSGPDVETPSAIQICRIMRPDDANVAGNVHGGTILKMIEEAGAIISTRHCNSQNGERCVAALARVERTDFLSPMCIGEVAHVSAEITYTSKHSVEVQVNVMSENILTGAKKLTNKATLWYVPLSLKNVDKVLEVPPVVYSRQEQEEEGRKRYEAQKLERMETKWRNGDIVQPVLNPEPNTVSYSQSSLIHLVGPSDCTLHGFVHGGVTMKLMDEVAGIVAARHCKTNIVTASVDAINFHDKIRKAP

SEQ ID NO: 25184 - protein, 283 aa, Homo sapiens
MSGPDVETPSAIQICRIMRPDDANVAGNVHGGTILKMIEEAGAIISTRHCNSQNGERCVAALARVERTDFLSPMCIGEVAHVSAEITYTSKHSVEVQVNVMSENILTGAKKLTNKATLWYVPLSLKNVDKVLEVPPVVYSRQEQEEEGRKRYEAQKLERMETKWRNGDIVQPVLNPEPNTVSYSQSSLIHLVGPSDCTLHGFVHGGVTMKLMDEVAGIVAARHCKTNIVTASVDAINFHDKIRKAHVMPAGADHTAPSSSPSTGTKCSLLRHHHLGTHDLHEQ

SEQ ID NO: 25185 - protein, 338 aa, Homo sapiens
MSGPDVETPSAIQICRIMRPDDANVAGNVHGGTILKMIEEAGAIISTRHCNSQNGERCVAALARVERTDFLSPMCIGEVAHVSAEITYTSKHSVEVQVNVMSENILTGAKKLTNKATLWYVPLSLKNVDKVLEVPPVVYSRQEQEEEGRKRYEAQKLERMETKWRNGDIVQPVLNPEPNTVSYSQSSLIHLVGPSDCTLHGFVHGGVTMKLMDEVAGIVAARHCKTNIVTASVDAINFHDKIRKGCVITISGRMTFTSNKSMEIEVLVDADPVVDSSQKRYRAASAFFTYVSLSQEGRSLPVPQLVPETEDEKKRFEEGKGRYLQMKAKRQGHAEPQP

SEQ ID NO: 25186 - protein, 350 aa, Homo sapiens
MLLLRRSLSLNVLRKEVDRACFGEKAKQIMRPDDANVAGNVHGGTILKMIEEAGAIISTRHCNSQNGERCVAALARVERTDFLSPMCIGEVAHVSAEITYTSKHSVEVQVNVMSENILTGAKKLTNKATLWYVPLSLKNVDKVLEVPPVVYSRQEQEEEGRKRYEAQKLERMETKWRNGDIVQPVLNPEPNTVSYSQSSLIHLVGPSDCTLHGFVHGGVTMKLMDEVAGIVAARHCKTNIVTASVDAINFHDKIRKGCVITISGRMTFTSNKSMEIEVLVDADPVVDSSQKRYRAASAFFTYVSLSQEGRSLPVPQLVPETEDEKKRFEEGKGRYLQMKAKRQGHAEPQP

SEQ ID NO: 25187 - protein, 329 aa, Homo sapiens
MAFQLSRIMRPDDANVAGNVHGGTILKMIEEAGAIISTRHCNSQNGERCVAALARVERTDFLSPMCIGEVAHVSAEITYTSKHSVEVQVNVMSENILTGAKKLTNKATLWYVPLSLKNVDKVLEVPPVVYSRQEQEEEGRKRYEAQKLERMETKWRNGDIVQPVLNPEPNTVSYSQSSLIHLVGPSDCTLHGFVHGGVTMKLMDEVAGIVAARHCKTNIVTASVDAINFHDKIRKGCVITISGRMTFTSNKSMEIEVLVDADPVVDSSQKRYRAASAFFTYVSLSQEGRSLPVPQLVPETEDEKKRFEEGKGRYLQMKAKRQGHAEPQP

SEQ ID NO: 25188 - protein, 370 aa, Homo sapiens
MARPGLIHSAPGLPDTCALLQPPAASAAAAPSMSGPDVETPSAIQICRIMRPDDANVAGNVHGGTILKMIEEAGAIISTRHCNSQNGERCVAALARVERTDFLSPMCIGEVAHVSAEITYTSKHSVEVQVNVMSENILTGAKKLTNKATLWYVPLSLKNVDKVLEVPPVVYSRQEQEEEGRKRYEAQKLERMETKWRNGDIVQPVLNPEPNTVSYSQSSLIHLVGPSDCTLHGFVHGGVTMKLMDEVAGIVAARHCKTNIVTASVDAINFHDKIRKGCVITISGRMTFTSNKSMEIEVLVDADPVVDSSQKRYRAASAFFTYVSLSQEGRSLPVPQLVPETEDEKKRFEEGKGRYLQMKAKRQGHAEPQP

SEQ ID NO: 25189 - protein, 79 aa, Homo sapiens
MYRMKRSQVRTPIRRLIRNVNLDWEDSMALGCTTVIERGTLRRLKRATLNTFLDSPVHVLLVMPKLIPEHWEKWEDVKR

SEQ ID NO: 25190 - protein, 573 aa, Homo sapiens
MSAFCLGLVGRASAPAEPDSACCMELPAAAGDAVRSPAAAAALIFPGGSGELELALEEELALLAAGERPSDPGEHPQAEPGSLAEGAGPQPPPSQDPELLSVIRQKEKDLVLAARLGKALLERNQDMSRQYEQMHKELTDKLEHLEQEKHELRRRFENREGEWEGRVSELESDVKQLQDELERQQIHLREADREKSRAVQELSEQNQRLLDQLSRASEVERQLSMQVHALREDFREKNSSTNQHIIRLESLQAEIKMLSDRKRELEHRLSATLEENDLLQGTVEELQDRVLILERQGHDKDLQLHQSQLELQEVRLSCRQLQVKVEELTEERSLQSSAATSTSLLSEIEQSMEAEELEQEREQLRLQLWEAYCQVRYLCSHLRGNDSADSAVSTDSSMDESSETSSAKDVPAGSLRTALNELKRLIQSIVDGMEPTVTLLSVEMTALKEERDRLRVTSEDKEPKEQLQKAIRDRDEAIAKKNAVELELAKCRMDMMSLNSQLLDAIQQKLNLSQQLEAWQDDMHRVIDRQLMDTHLKERSQPAAALCRGHSAGRGDEPSIAEGKRLFSFFRKI

SEQ ID NO: 25191 - protein, 270 aa, Homo sapiens
MEAEELEQEREQLRLQLWEAYCQVRYLCSHLRGNDSADSAVSTDSSMDESSETSSAKDVPAGSLRTALNELKRLIQSIVDGMEPTGSRRLDDDSLEEQIRQTSEDSRALRELMEGERGKLRQSLEELQRLHSQVTLLSVEMTALKEERDRLRVTSEDKEPKEQLQKAIRDRDEAIAKKNAVELELAKCRMDMMSLNSQLLDAIQQKLNLSQQLEAWQDDMHRVIDRQLMDTHLKERSQPAAALCRGHSAGRGDEPSIAEGKRLFSFFRKI

SEQ ID NO: 25192 - protein, 319 aa, Homo sapiens
MVLSELAARLNCAEYKNWVKAGHCLLLLRSCLQGFVGREVLSFHRGLLAAAPGLGPRAVCRGGSRCSPRARQFQPQCQVCAEWKREILRHHVNRNGDVHWGNCRPGRWPVDAWEVAKAFMPRGLADKQGPEECDAVALLSLINSCDHFVVDRKKVTEVIKCRNEIMHSSEMKVSSTWLRDFQMKIQNFLNEFKNIPEIVAVYSRIEQLLTSDWAVHIPEEDQRDGCECEMGTYLSESQVNEIEMQLLKEKLQEIYLQAEEQEVLPEELSNRLEVVKEFLRNNEDLRNGLTEDMQKLDSLCLHQKLDSQEPGRQTPDRKA

SEQ ID NO: 25193 - protein, 200 aa, Homo sapiens
MPRGLADKQGPEECDAVALLSLINSCDHFVVDRKKVTEVIKCRNEIMHSSEMKVSSTWLRDFQMKIQNFLNEFKNIPEIVAVYSRIEQLLTSDWAVHIPEEDQRDGCECEMGTYLSESQVNEIEMQLLKEKLQEIYLQAEEQEVLPEELSNRLEVVKEFLRNNEDLRNGLTEDMQKLDSLCLHQKLDSQEPGRQTPDRKA

SEQ ID NO: 25194 - protein, 155 aa, Homo sapiens
MVLSELAARLNCAEYKNWVKAGHCLLLLRSCLQGFVGREVLSFHRGLLAAAPGLGPRAVCRGGSRCSPRARQFQPQCQVCAEWKREILRHHVNRNGDVHWGNCRPGRWPVDAWEVAKGLDLLSRLECSGESELIATLNSWAQAILLPQPLEYLGL

SEQ ID NO: 25195 - protein, 593 aa, Homo sapiens
MEKLSALQEQKGELRKRLSYTTHKLEKLETEFDSTRHYLEIELRRAQEELEKVTEKLRRIQSNYMALQRINQELEDKLYRMGQHYEEEKRALSHEIVALNSHLLEAKVTIDKLSEDNELYRKDCNLAAQLLQCSQTYGRVHKVSELPSDFQERVSLHMEKHGCSLPSPLCHPAYADSVPTCVIAKVLEKPDPASLSSRLSDASARDLAFCDGVEKPGPRPPYKGDIYCSDTALYCPEERRRDRRPSVDAPVTDVGFLRAQNSTDSAAEEEEEAEAAAFPAGFQHEAFPSYAGSLPTSSSYSSFSATSEEKEHAQASTLTASQQAIYLNSRDELFDRKPPATTYEGSPRFAKATAAVAAPLEAEVAPGFGRTMSPYPAETFRFPASPGPQQALMPPNLWSLRAKPGTARLPGEDMRGQWRPLSVEDIGAYSYPVSAAGRASPCSFSERYYGGAGGSPGKKADGRASPLYASYKADSFSEGDDLSQGHLAEPCFLRAGGDLSLSPGRSADPLPGYAPSEGGDGDRLGVQLCGTASSPEPEQGSRDSLEPSSMEASPEMHPAARLSPQQAFPRTGGSGLSRKDSLTKAQLYGTLLN

SEQ ID NO: 25196 - protein, 514 aa, Homo sapiens
MSSPDKVSVCGAGFDLEGGKKAGSRTASPGAPGAHSHGLDLGVPGSGDGKSESGFTDPEGFSFESESELIEQGRVVLWGREGRPGTPVDDQGDVVDYSFYLADEPAAIVPPPSVQGHPFPEGAAAEGSAENWADAEVGPSGRDVLGHSPGKWQQASAGRLHLCGPGPVRAWKNPERGSKSRWSLRVDPQQPSAKGPTRLPTHDSDSADESSDLPLMKVGICRNEGSQAKPGSPKKRADTSRQASFHCKESYLPVPGRFLTSAPRGLTPVAERPAVGELEDSPQKKMQSRAWGKVEVRPSCSGAAAAGALPQGLSRRKMAGGKKSLGGASQLALGRGFPACGERLSAAPPEPATFPPFSGVRPQGMSKKPQKPKHSSPGKKPAGRKTRESQAAAREDNDPNRDEVPRAQLPTHRPGLPRLSVRRGEFSSSDPNIRAPQLPGTSEPSAYSPGGLVPRRHAPSGNQQPPVHPPRPERQQQPPGAQGCPRCIWLQREIEDLTQQLAAMQFLTDKFQDL

SEQ ID NO: 25197 - protein, 332 aa, Homo sapiens
MNRSSNVPRKGILKSGTRSLQKVRRVHFANARNARSLLSMLKDISAQIIQRAWLSHTNKMIFRLLKHAICAAEFYVTHEILKKVAPLEAKLIKDPTMQCKIRFRFRGETFPPFIVFKIFLHTDGHGYKYFSGKNVLMPSSKAVDDACKLMGERKFHRIIMEDERIFPKSKVTDIMDVVTMQDYVQYRSFFDEAPAFSGGRNNSWRKLNLENIPRTMLMYDIVHYSESGVISNRLRNEMKFLLQRPVTQEIHKHQLRIVSEIRGPYLTVQPLYRPYKQQNQVKFLGRRSKQAQMKVEKMRKVYLAKEKNTSEVTEPKTGPSGTKDNYHLHSIF

SEQ ID NO: 25198 - protein, 108 aa, Homo sapiens
MAKVTSEPQKPNEDVDEQTPSTSSTKGRKKGKTPRQRRSRSGVKGLKTTRKAKRPLRGSSSQKAGETNTPAGKPKKARGPILRGRYHRLKEKMKKEEADKEQSETSVL

SEQ ID NO: 25199 - protein, 108 aa, Homo sapiens; identical to SEQ ID NO: 25198

SEQ ID NO: 25200 - protein, 174 aa, Homo sapiens
MPKSLEIYKGSCNWEESGLLGSCFSQGLALLPRVEWSGAILAHCIVDLPSSSDPPTSASHFSGLQAHTTTARWSLTLLPRLECSGTISAHYNLRLLGSSNSPVSASQVAETTEACHHTRLIFVFSVETGFHHVGQAGLKLLTSGDPPASASQSAGITGVSHSARPKSCFLQLLG

SEQ ID NO: 25201 - protein, 183 aa, Homo sapiens
MFIFIKHGDNQQFLVNTNCAVVVLLYYIRSKVKLPKTNTIDLCEQTGKMKMLFLMKPNHAEYASKYLTARSTYYVCKVERGPPGTRLENAYRAFVPLLKNPEPWLLVALRIQCDALERRRIQMLKMKEAKKVVIIEPPASVPSKQSGRSDKKKSTRKSPTFRNRPDFRKNKGRQLNKTTKQKK

SEQ ID NO: 25202 - protein, 361 aa, Homo sapiens
MNLVICVLLLSIWKNNCMTTNQTNGSSTTGDKPVESMQTKLNYLRRNLLILVGIIIMVFVFICFCYLHYNCLSDDASKAGMVKKKGIAAKSSKTSFSEAKTASQCSPETQPMLSTADKSSDSSSPERASAQSSTEKLIRPSSLQKPSIPNSAGKLTRPSYPKRSSKSSCSKKLSKSSHLEKAHKKGSLEKLCKLDYACKLASSDKPVRPPQLFKPLYSSHPQNEISPSKPFGPQELAKPPKHFNPKRSVSLGRAALLSNSELAETCQPYKKKHLVAKTYRPLVNDISEAKEKNTQNLHVSSKVKSSSRSFRKLDSRNNAYGDHVNDSDTMKYYSEVDSDKVIIITCDRGYNQVTSEVTLND

SEQ ID NO: 25203 - protein, 968 aa, Homo sapiens
MDDSEVESTASILASVKEQEAQFEKLTRALEEERRHVSAQLERVRVSPQDANPLMANGTLTRRHQNGRFVGDADLERQKFSDLKLNGPQDHSHLLYSTIPRMQEPGQIVETYTEEDPEGAMSVVSVETSDDGTTRRTETTVKKVVKTVTTRTVQPVAMGPDGLPVDASSVSNNYIQTLGRDFRKNGNGGPGPYVGQAGTATLPRNFHYPPDGYSRHYEDGYPGGSDNYGSLSRVTRIEERYRPSMEGYRAPSRQDVYGPQPQVRVGGSSVDLHRFHPEPYGLEDDQRSMGYDDLDYGMMSDYGTARRTGTPSDPRRRLRSYEDMIGEEVPSDQYYWAPLAQHERGSLASLDSLRKGGPPPPNWRQPELPEVIAMLGFRLDAVKSNAAAYLQHLCYRNDKVKTDVRKLKGIPVLVGLLDHPKKEVHLGACGALKNISFGRDQDNKIAIKNCDGVPALVRLLRKARDMDLTEVITGTLWNLSSHDSIKMEIVDHALHALTDEVIIPHSGWEREPNEDCKPRHIEWESVLTNTAGCLRNVSSERSEARRKLRECDGLVDALIFIVQAEIGQKDSDSKLVENCVCLLRNLSYQVHREIPQAERYQEAAPNVANNTGPHAASCFGAKKGKDEWFSRGKKPIEDPANDTVDFPKRTSPARGYELLFQPEVVRIYISLLKESKTPAILEASAGAIQNLCAGRWTYGRYIRSALRQEKALSAIADLLTNEHERVVKAASGALRNLAVDARNKELIGKHAIPNLVKNLPGGQQNSSWNFSEDTVISILNTINEVIAENLEAAKKLRETQGIEKLVLINKSGNRSEKEVRAAALVLQTIWGYKELRKPLEKEGWKKSDFQVNLNNASRSQSSHSYDDSTLPLIDRNQKSDKKPDREEIQMSNMGSNTKSLDNNYSTPNERGDHNRTLDRSGDLGDMEPLKGTTPLMQDEGQESLEEELDVLVLDDEGGQVSYPSMQKI

SEQ ID NO: 25204 - protein, 962 aa, Homo sapiens
MDDSEVESTASILASVKEQEAQFEKLTRALEEERRHVSAQLERVRVSPQDANPLMANGTLTRRHQNGRFVGDADLERQKFSDLKLNGPQDHSHLLYSTIPRMQEPGQIVETYTEEDPEGAMSVVSVETSDDGTTRRTETTVKKVVKTVTTRTVQPVAMGPDGLPVDASSVSNNYIQTLGRDFRKNGNGGPGPYVGQAGTATLPRNFHYPPDGYSRHYEDGYPGGSDNYGSLSRVTRIEERYRPSMEGYRAPSRQDVYGPQPQVRVGGSSVDLHRFHPEPYGLEDDQRSMGYDDLDYGMMSDYGTARRTGTPSDPRRRLRSYEDMIGEEVPSDQYYWAPLAQHERGSLASLDSLRKGGPPPPNWRQPELPEVIAMLGFRLDAVKSNAAAYLQHLCYRNDKVKTDVRKLKGIPVLVGLLDHPKKEVHLGACGALKNISFGRDQDNKIAIKNCDGVPALVRLLRKARDMDLTEVITGTLWNLSSHDSIKMEIVDHALHALTDEVIIPHSGWEREPNEDCKPRHIEWESVLTNTAGCLRNVSSERSEARRKLRECDGLVDALIFIVQAEIGQKDSDSKLVENCVCLLRNLSYQVHREIPQAERYQEAAPNVANNTGPHAASCFGAKKGKGKKPIEDPANDTVDFPKRTSPARGYELLFQPEVVRIYISLLKESKTPAILEASAGAIQNLCAGRWTYGRYIRSALRQEKALSAIADLLTNEHERVVKAASGALRNLAVDARNKELIGKHAIPNLVKNLPGGQQNSSWNFSEDTVISILNTINEVIAENLEAAKKLRETQGIEKLVLINKSGNRSEKEVRAAALVLQTIWGYKELRKPLEKEGWKKSDFQVNLNNASRSQSSHSYDDSTLPLIDRNQKSDKKPDREEIQMSNMGSNTKSLDNNYSTPNERGDHNRTLDRSGDLGDMEPLKGTTPLMQDEGQESLEEELDVLVLDDEGGQVSYPSMQKI

SEQ ID NO: 25205 - protein, 939 aa, Homo sapiens
MDDSEVESTASILASVKEQEAQFEKLTRALEEERRHVSAQLERVRVSPQDANPLMANGTLTRRHQNGRFVGDADLERQKFSDLKLNGPQDHSHLLYSTIPRMQEPGQIVETYTEEDPEGAMSVVSVETSDDGTTRRTETTVKKVVKTVTTRTVQPVAMGPDGLPVDASSVSNNYIQTLGRDFRKNGNGGPGPYVGQAGTATLPRNFHYPPDGYSRHYEDGYPGGSDNYGSLSRVTRIEERYRPSMEGYRAPSRQDVYGPQPQVRVGGSSVDLHRFHPEPYGLEDDQRSMGYDDLDYGMMSDYGTARRTGTPSDPRRRLRSYEDMIGEEVPSDQYYWAPLAQHERGSLASLDSLRKGGPPPPNWRQPELPEVIAMLGFRLDAVKSNAAAYLQHLCYRNDKVKTDVRKLKGIPVLVGLLDHPKKEVHLGACGALKNISFGRDQDNKIAIKNCDGVPALVRLLRKARDMDLTEVITGTLWNLSSHDSIKMEIVDHALHALTDEVIIPHSGWEREPNEDCKPRHIEWESVLTNTAGCLRNVSSERSEARRKLRECDGLVDALIFIVQAEIGQKDSDSKLVENCVCLLRNLSYQVHREIPQAERYQEAAPNVANNTGPHAASCFGAKKGKDEWFSRGKKPIEDPANDTVDFPKRTSPARGYELLFQPEVVRIYISLLKESKTPAILEASAGAIQNLCAGRWTYGRYIRSALRQEKALSAIADLLTNEHERVVKAASGALRNLAVDARNKELIGKHAIPNLVKNLPGGQQNSSWNFSEDTVISILNTINEVIAENLEAAKKLRETQGIEKLVLINKSGNRSEKEVRAAALVLQTIWGYKELRKPLEKEGWKKSDFQVNLNNASRSQSSHSYDDSTLPLIDRNQKSDKKPDREEIQMSNMGSNTKSLDNNYSTPNERGDHNRTLDRSGDLGDMEPLKGTTPLMQKI

SEQ ID NO: 25206 - protein, 947 aa, Homo sapiens
MDDSEVESTASILASVKEQEAQFEKLTRALEEERRHVSAQLERVRVSPQDANPLMANGTLTRRHQNGRFVGDADLERQKFSDLKLNGPQDHSHLLYSTIPRMQEPGQIVETYTEEDPEGAMSVVSVETSDDGTTRRTETTVKKVVKTVTTRTVQPVAMGPDGLPVDASSVSNNYIQTLGRDFRKNGNGGPGPYVGQAGTATLPRNFHYPPDGYSRHYEDGYPGGSDNYGSLSRVTRIEERYRPSMEGYRAPSRQDVYGPQPQVRVGGSSVDLHRFHPEPYGLEDDQRSMGYDDLDYGMMSDYGTARRTGTPSDPRRRLRSYEDMIGEEVPSDQYYWAPLAQHERGSLASLDSLRKGGPPPPNWRQPELPEVIAMLGFRLDAVKSNAAAYLQHLCYRNDKVKTDVRKLKGIPVLVGLLDHPKKEVHLGACGALKNISFGRDQDNKIAIKNCDGVPALVRLLRKARDMDLTEVITGTLWNLSSHDSIKMEIVDHALHALTDEVIIPHSGWEREPNEDCKPRHIEWESVLTNTAGCLRNVSSERSEARRKLRECDGLVDALIFIVQAEIGQKDSDSKLVENCVCLLRNLSYQVHREIPQAERYQEAAPNVANNTGPHAASCFGAKKGKDEWFSRGKKPIEDPANDTVDFPKRTSPARGYELLFQPEVVRIYISLLKESKTPAILEASAGAIQNLCAGRWTYGRYIRSALRQEKALSAIADLLTNEHERVVKAASGALRNLAVDARNKELIGKHAIPNLVKNLPGGQQNSSWNFSEDTVISILNTINEVIAENLEAAKKLRETQGIEKLVLINKSGNRSEKEVRAAALVLQTIWGYKELRKPLEKEGWKKSDFQVNLNNASRSQSSHSYDDSTLPLIDRNQKSDNNYSTPNERGDHNRTLDRSGDLGDMEPLKGTTPLMQDEGQESLEEELDVLVLDDEGGQVSYPSMQKI

SEQ ID NO: 25207 - protein, 933 aa, Homo sapiens
MDDSEVESTASILASVKEQEAQFEKLTRALEEERRHVSAQLERVRVSPQDANPLMANGTLTRRHQNGRFVGDADLERQKFSDLKLNGPQDHSHLLYSTIPRMQEPGQIVETYTEEDPEGAMSVVSVETSDDGTTRRTETTVKKVVKTVTTRTVQPVAMGPDGLPVDASSVSNNYIQTLGRDFRKNGNGGPGPYVGQAGTATLPRNFHYPPDGYSRHYEDGYPGGSDNYGSLSRVTRIEERYRPSMEGYRAPSRQDVYGPQPQVRVGGSSVDLHRFHPEPYGLEDDQRSMGYDDLDYGMMSDYGTARRTGTPSDPRRRLRSYEDMIGEEVPSDQYYWAPLAQHERGSLASLDSLRKGGPPPPNWRQPELPEVIAMLGFRLDAVKSNAAAYLQHLCYRNDKVKTDVRKLKGIPVLVGLLDHPKKEVHLGACGALKNISFGRDQDNKIAIKNCDGVPALVRLLRKARDMDLTEVITGTLWNLSSHDSIKMEIVDHALHALTDEVIIPHSGWEREPNEDCKPRHIEWESVLTNTAGCLRNVSSERSEARRKLRECDGLVDALIFIVQAEIGQKDSDSKLVENCVCLLRNLSYQVHREIPQAERYQEAAPNVANNTGPHAASCFGAKKGKGKKPIEDPANDTVDFPKRTSPARGYELLFQPEVVRIYISLLKESKTPAILEASAGAIQNLCAGRWTYGRYIRSALRQEKALSAIADLLTNEHERVVKAASGALRNLAVDARNKELIGKHAIPNLVKNLPGGQQNSSWNFSEDTVISILNTINEVIAENLEAAKKLRETQGIEKLVLINKSGNRSEKEVRAAALVLQTIWGYKELRKPLEKEGWKKSDFQVNLNNASRSQSSHSYDDSTLPLIDRNQKSDKKPDREEIQMSNMGSNTKSLDNNYSTPNERGDHNRTLDRSGDLGDMEPLKGTTPLMQKI

SEQ ID NO: 25208 - protein, 941 aa, Homo sapiens
MDDSEVESTASILASVKEQEAQFEKLTRALEEERRHVSAQLERVRVSPQDANPLMANGTLTRRHQNGRFVGDADLERQKFSDLKLNGPQDHSHLLYSTIPRMQEPGQIVETYTEEDPEGAMSVVSVETSDDGTTRRTETTVKKVVKTVTTRTVQPVAMGPDGLPVDASSVSNNYIQTLGRDFRKNGNGGPGPYVGQAGTATLPRNFHYPPDGYSRHYEDGYPGGSDNYGSLSRVTRIEERYRPSMEGYRAPSRQDVYGPQPQVRVGGSSVDLHRFHPEPYGLEDDQRSMGYDDLDYGMMSDYGTARRTGTPSDPRRRLRSYEDMIGEEVPSDQYYWAPLAQHERGSLASLDSLRKGGPPPPNWRQPELPEVIAMLGFRLDAVKSNAAAYLQHLCYRNDKVKTDVRKLKGIPVLVGLLDHPKKEVHLGACGALKNISFGRDQDNKIAIKNCDGVPALVRLLRKARDMDLTEVITGTLWNLSSHDSIKMEIVDHALHALTDEVIIPHSGWEREPNEDCKPRHIEWESVLTNTAGCLRNVSSERSEARRKLRECDGLVDALIFIVQAEIGQKDSDSKLVENCVCLLRNLSYQVHREIPQAERYQEAAPNVANNTGPHAASCFGAKKGKGKKPIEDPANDTVDFPKRTSPARGYELLFQPEVVRIYISLLKESKTPAILEASAGAIQNLCAGRWTYGRYIRSALRQEKALSAIADLLTNEHERVVKAASGALRNLAVDARNKELIGKHAIPNLVKNLPGGQQNSSWNFSEDTVISILNTINEVIAENLEAAKKLRETQGIEKLVLINKSGNRSEKEVRAAALVLQTIWGYKELRKPLEKEGWKKSDFQVNLNNASRSQSSHSYDDSTLPLIDRNQKSDNNYSTPNERGDHNRTLDRSGDLGDMEPLKGTTPLMQDEGQESLEEELDVLVLDDEGGQVSYPSMQKI

SEQ ID NO: 25209 - protein, 918 aa, Homo sapiens
MDDSEVESTASILASVKEQEAQFEKLTRALEEERRHVSAQLERVRVSPQDANPLMANGTLTRRHQNGRFVGDADLERQKFSDLKLNGPQDHSHLLYSTIPRMQEPGQIVETYTEEDPEGAMSVVSVETSDDGTTRRTETTVKKVVKTVTTRTVQPVAMGPDGLPVDASSVSNNYIQTLGRDFRKNGNGGPGPYVGQAGTATLPRNFHYPPDGYSRHYEDGYPGGSDNYGSLSRVTRIEERYRPSMEGYRAPSRQDVYGPQPQVRVGGSSVDLHRFHPEPYGLEDDQRSMGYDDLDYGMMSDYGTARRTGTPSDPRRRLRSYEDMIGEEVPSDQYYWAPLAQHERGSLASLDSLRKGGPPPPNWRQPELPEVIAMLGFRLDAVKSNAAAYLQHLCYRNDKVKTDVRKLKGIPVLVGLLDHPKKEVHLGACGALKNISFGRDQDNKIAIKNCDGVPALVRLLRKARDMDLTEVITGTLWNLSSHDSIKMEIVDHALHALTDEVIIPHSGWEREPNEDCKPRHIEWESVLTNTAGCLRNVSSERSEARRKLRECDGLVDALIFIVQAEIGQKDSDSKLVENCVCLLRNLSYQVHREIPQAERYQEAAPNVANNTGPHAASCFGAKKGKDEWFSRGKKPIEDPANDTVDFPKRTSPARGYELLFQPEVVRIYISLLKESKTPAILEASAGAIQNLCAGRWTYGRYIRSALRQEKALSAIADLLTNEHERVVKAASGALRNLAVDARNKELIGKHAIPNLVKNLPGGQQNSSWNFSEDTVISILNTINEVIAENLEAAKKLRETQGIEKLVLINKSGNRSEKEVRAAALVLQTIWGYKELRKPLEKEGWKKSDFQVNLNNASRSQSSHSYDDSTLPLIDRNQKSDNNYSTPNERGDHNRTLDRSGDLGDMEPLKGTTPLMQKI

SEQ ID NO: 25210 - protein, 912 aa, Homo sapiens
MDDSEVESTASILASVKEQEAQFEKLTRALEEERRHVSAQLERVRVSPQDANPLMANGTLTRRHQNGRFVGDADLERQKFSDLKLNGPQDHSHLLYSTIPRMQEPGQIVETYTEEDPEGAMSVVSVETSDDGTTRRTETTVKKVVKTVTTRTVQPVAMGPDGLPVDASSVSNNYIQTLGRDFRKNGNGGPGPYVGQAGTATLPRNFHYPPDGYSRHYEDGYPGGSDNYGSLSRVTRIEERYRPSMEGYRAPSRQDVYGPQPQVRVGGSSVDLHRFHPEPYGLEDDQRSMGYDDLDYGMMSDYGTARRTGTPSDPRRRLRSYEDMIGEEVPSDQYYWAPLAQHERGSLASLDSLRKGGPPPPNWRQPELPEVIAMLGFRLDAVKSNAAAYLQHLCYRNDKVKTDVRKLKGIPVLVGLLDHPKKEVHLGACGALKNISFGRDQDNKIAIKNCDGVPALVRLLRKARDMDLTEVITGTLWNLSSHDSIKMEIVDHALHALTDEVIIPHSGWEREPNEDCKPRHIEWESVLTNTAGCLRNVSSERSEARRKLRECDGLVDALIFIVQAEIGQKDSDSKLVENCVCLLRNLSYQVHREIPQAERYQEAAPNVANNTGPHAASCFGAKKGKGKKPIEDPANDTVDFPKRTSPARGYELLFQPEVVRIYISLLKESKTPAILEASAGAIQNLCAGRWTYGRYIRSALRQEKALSAIADLLTNEHERVVKAASGALRNLAVDARNKELIGKHAIPNLVKNLPGGQQNSSWNFSEDTVISILNTINEVIAENLEAAKKLRETQGIEKLVLINKSGNRSEKEVRAAALVLQTIWGYKELRKPLEKEGWKKSDFQVNLNNASRSQSSHSYDDSTLPLIDRNQKSDNNYSTPNERGDHNRTLDRSGDLGDMEPLKGTTPLMQKI

SEQ ID NO: 25211 - protein, 914 aa, Homo sapiens
MANGTLTRRHQNGRFVGDADLERQKFSDLKLNGPQDHSHLLYSTIPRMQEPGQIVETYTEEDPEGAMSVVSVETSDDGTTRRTETTVKKVVKTVTTRTVQPVAMGPDGLPVDASSVSNNYIQTLGRDFRKNGNGGPGPYVGQAGTATLPRNFHYPPDGYSRHYEDGYPGGSDNYGSLSRVTRIEERYRPSMEGYRAPSRQDVYGPQPQVRVGGSSVDLHRFHPEPYGLEDDQRSMGYDDLDYGMMSDYGTARRTGTPSDPRRRLRSYEDMIGEEVPSDQYYWAPLAQHERGSLASLDSLRKGGPPPPNWRQPELPEVIAMLGFRLDAVKSNAAAYLQHLCYRNDKVKTDVRKLKGIPVLVGLLDHPKKEVHLGACGALKNISFGRDQDNKIAIKNCDGVPALVRLLRKARDMDLTEVITGTLWNLSSHDSIKMEIVDHALHALTDEVIIPHSGWEREPNEDCKPRHIEWESVLTNTAGCLRNVSSERSEARRKLRECDGLVDALIFIVQAEIGQKDSDSKLVENCVCLLRNLSYQVHREIPQAERYQEAAPNVANNTGPHAASCFGAKKGKDEWFSRGKKPIEDPANDTVDFPKRTSPARGYELLFQPEVVRIYISLLKESKTPAILEASAGAIQNLCAGRWTYGRYIRSALRQEKALSAIADLLTNEHERVVKAASGALRNLAVDARNKELIGKHAIPNLVKNLPGGQQNSSWNFSEDTVISILNTINEVIAENLEAAKKLRETQGIEKLVLINKSGNRSEKEVRAAALVLQTIWGYKELRKPLEKEGWKKSDFQVNLNNASRSQSSHSYDDSTLPLIDRNQKSDKKPDREEIQMSNMGSNTKSLDNNYSTPNERGDHNRTLDRSGDLGDMEPLKGTTPLMQDEGQESLEEELDVLVLDDEGGQVSYPSMQKI

SEQ ID NO: 25212 - protein, 908 aa, Homo sapiens
MANGTLTRRHQNGRFVGDADLERQKFSDLKLNGPQDHSHLLYSTIPRMQEPGQIVETYTEEDPEGAMSVVSVETSDDGTTRRTETTVKKVVKTVTTRTVQPVAMGPDGLPVDASSVSNNYIQTLGRDFRKNGNGGPGPYVGQAGTATLPRNFHYPPDGYSRHYEDGYPGGSDNYGSLSRVTRIEERYRPSMEGYRAPSRQDVYGPQPQVRVGGSSVDLHRFHPEPYGLEDDQRSMGYDDLDYGMMSDYGTARRTGTPSDPRRRLRSYEDMIGEEVPSDQYYWAPLAQHERGSLASLDSLRKGGPPPPNWRQPELPEVIAMLGFRLDAVKSNAAAYLQHLCYRNDKVKTDVRKLKGIPVLVGLLDHPKKEVHLGACGALKNISFGRDQDNKIAIKNCDGVPALVRLLRKARDMDLTEVITGTLWNLSSHDSIKMEIVDHALHALTDEVIIPHSGWEREPNEDCKPRHIEWESVLTNTAGCLRNVSSERSEARRKLRECDGLVDALIFIVQAEIGQKDSDSKLVENCVCLLRNLSYQVHREIPQAERYQEAAPNVANNTGPHAASCFGAKKGKGKKPIEDPANDTVDFPKRTSPARGYELLFQPEVVRIYISLLKESKTPAILEASAGAIQNLCAGRWTYGRYIRSALRQEKALSAIADLLTNEHERVVKAASGALRNLAVDARNKELIGKHAIPNLVKNLPGGQQNSSWNFSEDTVISILNTINEVIAENLEAAKKLRETQGIEKLVLINKSGNRSEKEVRAAALVLQTIWGYKELRKPLEKEGWKKSDFQVNLNNASRSQSSHSYDDSTLPLIDRNQKSDKKPDREEIQMSNMGSNTKSLDNNYSTPNERGDHNRTLDRSGDLGDMEPLKGTTPLMQDEGQESLEEELDVLVLDDEGGQVSYPSMQKI

SEQ ID NO: 25213 - protein, 885 aa, Homo sapiens
MANGTLTRRHQNGRFVGDADLERQKFSDLKLNGPQDHSHLLYSTIPRMQEPGQIVETYTEEDPEGAMSVVSVETSDDGTTRRTETTVKKVVKTVTTRTVQPVAMGPDGLPVDASSVSNNYIQTLGRDFRKNGNGGPGPYVGQAGTATLPRNFHYPPDGYSRHYEDGYPGGSDNYGSLSRVTRIEERYRPSMEGYRAPSRQDVYGPQPQVRVGGSSVDLHRFHPEPYGLEDDQRSMGYDDLDYGMMSDYGTARRTGTPSDPRRRLRSYEDMIGEEVPSDQYYWAPLAQHERGSLASLDSLRKGGPPPPNWRQPELPEVIAMLGFRLDAVKSNAAAYLQHLCYRNDKVKTDVRKLKGIPVLVGLLDHPKKEVHLGACGALKNISFGRDQDNKIAIKNCDGVPALVRLLRKARDMDLTEVITGTLWNLSSHDSIKMEIVDHALHALTDEVIIPHSGWEREPNEDCKPRHIEWESVLTNTAGCLRNVSSERSEARRKLRECDGLVDALIFIVQAEIGQKDSDSKLVENCVCLLRNLSYQVHREIPQAERYQEAAPNVANNTGPHAASCFGAKKGKDEWFSRGKKPIEDPANDTVDFPKRTSPARGYELLFQPEVVRIYISLLKESKTPAILEASAGAIQNLCAGRWTYGRYIRSALRQEKALSAIADLLTNEHERVVKAASGALRNLAVDARNKELIGKHAIPNLVKNLPGGQQNSSWNFSEDTVISILNTINEVIAENLEAAKKLRETQGIEKLVLINKSGNRSEKEVRAAALVLQTIWGYKELRKPLEKEGWKKSDFQVNLNNASRSQSSHSYDDSTLPLIDRNQKSDKKPDREEIQMSNMGSNTKSLDNNYSTPNERGDHNRTLDRSGDLGDMEPLKGTTPLMQKI

SEQ ID NO: 25214 - protein, 893 aa, Homo sapiens
MANGTLTRRHQNGRFVGDADLERQKFSDLKLNGPQDHSHLLYSTIPRMQEPGQIVETYTEEDPEGAMSVVSVETSDDGTTRRTETTVKKVVKTVTTRTVQPVAMGPDGLPVDASSVSNNYIQTLGRDFRKNGNGGPGPYVGQAGTATLPRNFHYPPDGYSRHYEDGYPGGSDNYGSLSRVTRIEERYRPSMEGYRAPSRQDVYGPQPQVRVGGSSVDLHRFHPEPYGLEDDQRSMGYDDLDYGMMSDYGTARRTGTPSDPRRRLRSYEDMIGEEVPSDQYYWAPLAQHERGSLASLDSLRKGGPPPPNWRQPELPEVIAMLGFRLDAVKSNAAAYLQHLCYRNDKVKTDVRKLKGIPVLVGLLDHPKKEVHLGACGALKNISFGRDQDNKIAIKNCDGVPALVRLLRKARDMDLTEVITGTLWNLSSHDSIKMEIVDHALHALTDEVIIPHSGWEREPNEDCKPRHIEWESVLTNTAGCLRNVSSERSEARRKLRECDGLVDALIFIVQAEIGQKDSDSKLVENCVCLLRNLSYQVHREIPQAERYQEAAPNVANNTGPHAASCFGAKKGKDEWFSRGKKPIEDPANDTVDFPKRTSPARGYELLFQPEVVRIYISLLKESKTPAILEASAGAIQNLCAGRWTYGRYIRSALRQEKALSAIADLLTNEHERVVKAASGALRNLAVDARNKELIGKHAIPNLVKNLPGGQQNSSWNFSEDTVISILNTINEVIAENLEAAKKLRETQGIEKLVLINKSGNRSEKEVRAAALVLQTIWGYKELRKPLEKEGWKKSDFQVNLNNASRSQSSHSYDDSTLPLIDRNQKSDNNYSTPNERGDHNRTLDRSGDLGDMEPLKGTTPLMQDEGQESLEEELDVLVLDDEGGQVSYPSMQKI

SEQ ID NO: 25215 - protein, 879 aa, Homo sapiens
MANGTLTRRHQNGRFVGDADLERQKFSDLKLNGPQDHSHLLYSTIPRMQEPGQIVETYTEEDPEGAMSVVSVETSDDGTTRRTETTVKKVVKTVTTRTVQPVAMGPDGLPVDASSVSNNYIQTLGRDFRKNGNGGPGPYVGQAGTATLPRNFHYPPDGYSRHYEDGYPGGSDNYGSLSRVTRIEERYRPSMEGYRAPSRQDVYGPQPQVRVGGSSVDLHRFHPEPYGLEDDQRSMGYDDLDYGMMSDYGTARRTGTPSDPRRRLRSYEDMIGEEVPSDQYYWAPLAQHERGSLASLDSLRKGGPPPPNWRQPELPEVIAMLGFRLDAVKSNAAAYLQHLCYRNDKVKTDVRKLKGIPVLVGLLDHPKKEVHLGACGALKNISFGRDQDNKIAIKNCDGVPALVRLLRKARDMDLTEVITGTLWNLSSHDSIKMEIVDHALHALTDEVIIPHSGWEREPNEDCKPRHIEWESVLTNTAGCLRNVSSERSEARRKLRECDGLVDALIFIVQAEIGQKDSDSKLVENCVCLLRNLSYQVHREIPQAERYQEAAPNVANNTGPHAASCFGAKKGKGKKPIEDPANDTVDFPKRTSPARGYELLFQPEVVRIYISLLKESKTPAILEASAGAIQNLCAGRWTYGRYIRSALRQEKALSAIADLLTNEHERVVKAASGALRNLAVDARNKELIGKHAIPNLVKNLPGGQQNSSWNFSEDTVISILNTINEVIAENLEAAKKLRETQGIEKLVLINKSGNRSEKEVRAAALVLQTIWGYKELRKPLEKEGWKKSDFQVNLNNASRSQSSHSYDDSTLPLIDRNQKSDKKPDREEIQMSNMGSNTKSLDNNYSTPNERGDHNRTLDRSGDLGDMEPLKGTTPLMQKI

SEQ ID NO: 25216 - protein, 887 aa, Homo sapiens
MANGTLTRRHQNGRFVGDADLERQKFSDLKLNGPQDHSHLLYSTIPRMQEPGQIVETYTEEDPEGAMSVVSVETSDDGTTRRTETTVKKVVKTVTTRTVQPVAMGPDGLPVDASSVSNNYIQTLGRDFRKNGNGGPGPYVGQAGTATLPRNFHYPPDGYSRHYEDGYPGGSDNYGSLSRVTRIEERYRPSMEGYRAPSRQDVYGPQPQVRVGGSSVDLHRFHPEPYGLEDDQRSMGYDDLDYGMMSDYGTARRTGTPSDPRRRLRSYEDMIGEEVPSDQYYWAPLAQHERGSLASLDSLRKGGPPPPNWRQPELPEVIAMLGFRLDAVKSNAAAYLQHLCYRNDKVKTDVRKLKGIPVLVGLLDHPKKEVHLGACGALKNISFGRDQDNKIAIKNCDGVPALVRLLRKARDMDLTEVITGTLWNLSSHDSIKMEIVDHALHALTDEVIIPHSGWEREPNEDCKPRHIEWESVLTNTAGCLRNVSSERSEARRKLRECDGLVDALIFIVQAEIGQKDSDSKLVENCVCLLRNLSYQVHREIPQAERYQEAAPNVANNTGPHAASCFGAKKGKGKKPIEDPANDTVDFPKRTSPARGYELLFQPEVVRIYISLLKESKTPAILEASAGAIQNLCAGRWTYGRYIRSALRQEKALSAIADLLTNEHERVVKAASGALRNLAVDARNKELIGKHAIPNLVKNLPGGQQNSSWNFSEDTVISILNTINEVIAENLEAAKKLRETQGIEKLVLINKSGNRSEKEVRAAALVLQTIWGYKELRKPLEKEGWKKSDFQVNLNNASRSQSSHSYDDSTLPLIDRNQKSDNNYSTPNERGDHNRTLDRSGDLGDMEPLKGTTPLMQDEGQESLEEELDVLVLDDEGGQVSYPSMQKI

SEQ ID NO: 25217 - protein, 864 aa, Homo sapiens
MANGTLTRRHQNGRFVGDADLERQKFSDLKLNGPQDHSHLLYSTIPRMQEPGQIVETYTEEDPEGAMSVVSVETSDDGTTRRTETTVKKVVKTVTTRTVQPVAMGPDGLPVDASSVSNNYIQTLGRDFRKNGNGGPGPYVGQAGTATLPRNFHYPPDGYSRHYEDGYPGGSDNYGSLSRVTRIEERYRPSMEGYRAPSRQDVYGPQPQVRVGGSSVDLHRFHPEPYGLEDDQRSMGYDDLDYGMMSDYGTARRTGTPSDPRRRLRSYEDMIGEEVPSDQYYWAPLAQHERGSLASLDSLRKGGPPPPNWRQPELPEVIAMLGFRLDAVKSNAAAYLQHLCYRNDKVKTDVRKLKGIPVLVGLLDHPKKEVHLGACGALKNISFGRDQDNKIAIKNCDGVPALVRLLRKARDMDLTEVITGTLWNLSSHDSIKMEIVDHALHALTDEVIIPHSGWEREPNEDCKPRHIEWESVLTNTAGCLRNVSSERSEARRKLRECDGLVDALIFIVQAEIGQKDSDSKLVENCVCLLRNLSYQVHREIPQAERYQEAAPNVANNTGPHAASCFGAKKGKDEWFSRGKKPIEDPANDTVDFPKRTSPARGYELLFQPEVVRIYISLLKESKTPAILEASAGAIQNLCAGRWTYGRYIRSALRQEKALSAIADLLTNEHERVVKAASGALRNLAVDARNKELIGKHAIPNLVKNLPGGQQNSSWNFSEDTVISILNTINEVIAENLEAAKKLRETQGIEKLVLINKSGNRSEKEVRAAALVLQTIWGYKELRKPLEKEGWKKSDFQVNLNNASRSQSSHSYDDSTLPLIDRNQKSDNNYSTPNERGDHNRTLDRSGDLGDMEPLKGTTPLMQKI

SEQ ID NO: 25218 - protein, 858 aa, Homo sapiens
MANGTLTRRHQNGRFVGDADLERQKFSDLKLNGPQDHSHLLYSTIPRMQEPGQIVETYTEEDPEGAMSVVSVETSDDGTTRRTETTVKKVVKTVTTRTVQPVAMGPDGLPVDASSVSNNYIQTLGRDFRKNGNGGPGPYVGQAGTATLPRNFHYPPDGYSRHYEDGYPGGSDNYGSLSRVTRIEERYRPSMEGYRAPSRQDVYGPQPQVRVGGSSVDLHRFHPEPYGLEDDQRSMGYDDLDYGMMSDYGTARRTGTPSDPRRRLRSYEDMIGEEVPSDQYYWAPLAQHERGSLASLDSLRKGGPPPPNWRQPELPEVIAMLGFRLDAVKSNAAAYLQHLCYRNDKVKTDVRKLKGIPVLVGLLDHPKKEVHLGACGALKNISFGRDQDNKIAIKNCDGVPALVRLLRKARDMDLTEVITGTLWNLSSHDSIKMEIVDHALHALTDEVIIPHSGWEREPNEDCKPRHIEWESVLTNTAGCLRNVSSERSEARRKLRECDGLVDALIFIVQAEIGQKDSDSKLVENCVCLLRNLSYQVHREIPQAERYQEAAPNVANNTGPHAASCFGAKKGKGKKPIEDPANDTVDFPKRTSPARGYELLFQPEVVRIYISLLKESKTPAILEASAGAIQNLCAGRWTYGRYIRSALRQEKALSAIADLLTNEHERVVKAASGALRNLAVDARNKELIGKHAIPNLVKNLPGGQQNSSWNFSEDTVISILNTINEVIAENLEAAKKLRETQGIEKLVLINKSGNRSEKEVRAAALVLQTIWGYKELRKPLEKEGWKKSDFQVNLNNASRSQSSHSYDDSTLPLIDRNQKSDNNYSTPNERGDHNRTLDRSGDLGDMEPLKGTTPLMQKI

SEQ ID NO: 25219 - protein, 867 aa, Homo sapiens
MQEPGQIVETYTEEDPEGAMSVVSVETSDDGTTRRTETTVKKVVKTVTTRTVQPVAMGPDGLPVDASSVSNNYIQTLGRDFRKNGNGGPGPYVGQAGTATLPRNFHYPPDGYSRHYEDGYPGGSDNYGSLSRVTRIEERYRPSMEGYRAPSRQDVYGPQPQVRVGGSSVDLHRFHPEPYGLEDDQRSMGYDDLDYGMMSDYGTARRTGTPSDPRRRLRSYEDMIGEEVPSDQYYWAPLAQHERGSLASLDSLRKGGPPPPNWRQPELPEVIAMLGFRLDAVKSNAAAYLQHLCYRNDKVKTDVRKLKGIPVLVGLLDHPKKEVHLGACGALKNISFGRDQDNKIAIKNCDGVPALVRLLRKARDMDLTEVITGTLWNLSSHDSIKMEIVDHALHALTDEVIIPHSGWEREPNEDCKPRHIEWESVLTNTAGCLRNVSSERSEARRKLRECDGLVDALIFIVQAEIGQKDSDSKLVENCVCLLRNLSYQVHREIPQAERYQEAAPNVANNTGPHAASCFGAKKGKDEWFSRGKKPIEDPANDTVDFPKRTSPARGYELLFQPEVVRIYISLLKESKTPAILEASAGAIQNLCAGRWTYGRYIRSALRQEKALSAIADLLTNEHERVVKAASGALRNLAVDARNKELIGKHAIPNLVKNLPGGQQNSSWNFSEDTVISILNTINEVIAENLEAAKKLRETQGIEKLVLINKSGNRSEKEVRAAALVLQTIWGYKELRKPLEKEGWKKSDFQVNLNNASRSQSSHSYDDSTLPLIDRNQKSDKKPDREEIQMSNMGSNTKSLDNNYSTPNERGDHNRTLDRSGDLGDMEPLKGTTPLMQDEGQESLEEELDVLVLDDEGGQVSYPSMQKI

SEQ ID NO: 25220 - protein, 861 aa, Homo sapiens
MQEPGQIVETYTEEDPEGAMSVVSVETSDDGTTRRTETTVKKVVKTVTTRTVQPVAMGPDGLPVDASSVSNNYIQTLGRDFRKNGNGGPGPYVGQAGTATLPRNFHYPPDGYSRHYEDGYPGGSDNYGSLSRVTRIEERYRPSMEGYRAPSRQDVYGPQPQVRVGGSSVDLHRFHPEPYGLEDDQRSMGYDDLDYGMMSDYGTARRTGTPSDPRRRLRSYEDMIGEEVPSDQYYWAPLAQHERGSLASLDSLRKGGPPPPNWRQPELPEVIAMLGFRLDAVKSNAAAYLQHLCYRNDKVKTDVRKLKGIPVLVGLLDHPKKEVHLGACGALKNISFGRDQDNKIAIKNCDGVPALVRLLRKARDMDLTEVITGTLWNLSSHDSIKMEIVDHALHALTDEVIIPHSGWEREPNEDCKPRHIEWESVLTNTAGCLRNVSSERSEARRKLRECDGLVDALIFIVQAEIGQKDSDSKLVENCVCLLRNLSYQVHREIPQAERYQEAAPNVANNTGPHAASCFGAKKGKGKKPIEDPANDTVDFPKRTSPARGYELLFQPEVVRIYISLLKESKTPAILEASAGAIQNLCAGRWTYGRYIRSALRQEKALSAIADLLTNEHERVVKAASGALRNLAVDARNKELIGKHAIPNLVKNLPGGQQNSSWNFSEDTVISILNTINEVIAENLEAAKKLRETQGIEKLVLINKSGNRSEKEVRAAALVLQTIWGYKELRKPLEKEGWKKSDFQVNLNNASRSQSSHSYDDSTLPLIDRNQKSDKKPDREEIQMSNMGSNTKSLDNNYSTPNERGDHNRTLDRSGDLGDMEPLKGTTPLMQDEGQESLEEELDVLVLDDEGGQVSYPSMQKI

SEQ ID NO: 25221 - protein, 838 aa, Homo sapiens
MQEPGQIVETYTEEDPEGAMSVVSVETSDDGTTRRTETTVKKVVKTVTTRTVQPVAMGPDGLPVDASSVSNNYIQTLGRDFRKNGNGGPGPYVGQAGTATLPRNFHYPPDGYSRHYEDGYPGGSDNYGSLSRVTRIEERYRPSMEGYRAPSRQDVYGPQPQVRVGGSSVDLHRFHPEPYGLEDDQRSMGYDDLDYGMMSDYGTARRTGTPSDPRRRLRSYEDMIGEEVPSDQYYWAPLAQHERGSLASLDSLRKGGPPPPNWRQPELPEVIAMLGFRLDAVKSNAAAYLQHLCYRNDKVKTDVRKLKGIPVLVGLLDHPKKEVHLGACGALKNISFGRDQDNKIAIKNCDGVPALVRLLRKARDMDLTEVITGTLWNLSSHDSIKMEIVDHALHALTDEVIIPHSGWEREPNEDCKPRHIEWESVLTNTAGCLRNVSSERSEARRKLRECDGLVDALIFIVQAEIGQKDSDSKLVENCVCLLRNLSYQVHREIPQAERYQEAAPNVANNTGPHAASCFGAKKGKDEWFSRGKKPIEDPANDTVDFPKRTSPARGYELLFQPEVVRIYISLLKESKTPAILEASAGAIQNLCAGRWTYGRYIRSALRQEKALSAIADLLTNEHERVVKAASGALRNLAVDARNKELIGKHAIPNLVKNLPGGQQNSSWNFSEDTVISILNTINEVIAENLEAAKKLRETQGIEKLVLINKSGNRSEKEVRAAALVLQTIWGYKELRKPLEKEGWKKSDFQVNLNNASRSQSSHSYDDSTLPLIDRNQKSDKKPDREEIQMSNMGSNTKSLDNNYSTPNERGDHNRTLDRSGDLGDMEPLKGTTPLMQKI

SEQ ID NO: 25222 - protein, 846 aa, Homo sapiens
MQEPGQIVETYTEEDPEGAMSVVSVETSDDGTTRRTETTVKKVVKTVTTRTVQPVAMGPDGLPVDASSVSNNYIQTLGRDFRKNGNGGPGPYVGQAGTATLPRNFHYPPDGYSRHYEDGYPGGSDNYGSLSRVTRIEERYRPSMEGYRAPSRQDVYGPQPQVRVGGSSVDLHRFHPEPYGLEDDQRSMGYDDLDYGMMSDYGTARRTGTPSDPRRRLRSYEDMIGEEVPSDQYYWAPLAQHERGSLASLDSLRKGGPPPPNWRQPELPEVIAMLGFRLDAVKSNAAAYLQHLCYRNDKVKTDVRKLKGIPVLVGLLDHPKKEVHLGACGALKNISFGRDQDNKIAIKNCDGVPALVRLLRKARDMDLTEVITGTLWNLSSHDSIKMEIVDHALHALTDEVIIPHSGWEREPNEDCKPRHIEWESVLTNTAGCLRNVSSERSEARRKLRECDGLVDALIFIVQAEIGQKDSDSKLVENCVCLLRNLSYQVHREIPQAERYQEAAPNVANNTGPHAASCFGAKKGKDEWFSRGKKPIEDPANDTVDFPKRTSPARGYELLFQPEVVRIYISLLKESKTPAILEASAGAIQNLCAGRWTYGRYIRSALRQEKALSAIADLLTNEHERVVKAASGALRNLAVDARNKELIGKHAIPNLVKNLPGGQQNSSWNFSEDTVISILNTINEVIAENLEAAKKLRETQGIEKLVLINKSGNRSEKEVRAAALVLQTIWGYKELRKPLEKEGWKKSDFQVNLNNASRSQSSHSYDDSTLPLIDRNQKSDNNYSTPNERGDHNRTLDRSGDLGDMEPLKGTTPLMQDEGQESLEEELDVLVLDDEGGQVSYPSMQKI

SEQ ID NO: 25223 - protein, 832 aa, Homo sapiens
MQEPGQIVETYTEEDPEGAMSVVSVETSDDGTTRRTETTVKKVVKTVTTRTVQPVAMGPDGLPVDASSVSNNYIQTLGRDFRKNGNGGPGPYVGQAGTATLPRNFHYPPDGYSRHYEDGYPGGSDNYGSLSRVTRIEERYRPSMEGYRAPSRQDVYGPQPQVRVGGSSVDLHRFHPEPYGLEDDQRSMGYDDLDYGMMSDYGTARRTGTPSDPRRRLRSYEDMIGEEVPSDQYYWAPLAQHERGSLASLDSLRKGGPPPPNWRQPELPEVIAMLGFRLDAVKSNAAAYLQHLCYRNDKVKTDVRKLKGIPVLVGLLDHPKKEVHLGACGALKNISFGRDQDNKIAIKNCDGVPALVRLLRKARDMDLTEVITGTLWNLSSHDSIKMEIVDHALHALTDEVIIPHSGWEREPNEDCKPRHIEWESVLTNTAGCLRNVSSERSEARRKLRECDGLVDALIFIVQAEIGQKDSDSKLVENCVCLLRNLSYQVHREIPQAERYQEAAPNVANNTGPHAASCFGAKKGKGKKPIEDPANDTVDFPKRTSPARGYELLFQPEVVRIYISLLKESKTPAILEASAGAIQNLCAGRWTYGRYIRSALRQEKALSAIADLLTNEHERVVKAASGALRNLAVDARNKELIGKHAIPNLVKNLPGGQQNSSWNFSEDTVISILNTINEVIAENLEAAKKLRETQGIEKLVLINKSGNRSEKEVRAAALVLQTIWGYKELRKPLEKEGWKKSDFQVNLNNASRSQSSHSYDDSTLPLIDRNQKSDKKPDREEIQMSNMGSNTKSLDNNYSTPNERGDHNRTLDRSGDLGDMEPLKGTTPLMQKI

SEQ ID NO: 25224 - protein, 840 aa, Homo sapiens
MQEPGQIVETYTEEDPEGAMSVVSVETSDDGTTRRTETTVKKVVKTVTTRTVQPVAMGPDGLPVDASSVSNNYIQTLGRDFRKNGNGGPGPYVGQAGTATLPRNFHYPPDGYSRHYEDGYPGGSDNYGSLSRVTRIEERYRPSMEGYRAPSRQDVYGPQPQVRVGGSSVDLHRFHPEPYGLEDDQRSMGYDDLDYGMMSDYGTARRTGTPSDPRRRLRSYEDMIGEEVPSDQYYWAPLAQHERGSLASLDSLRKGGPPPPNWRQPELPEVIAMLGFRLDAVKSNAAAYLQHLCYRNDKVKTDVRKLKGIPVLVGLLDHPKKEVHLGACGALKNISFGRDQDNKIAIKNCDGVPALVRLLRKARDMDLTEVITGTLWNLSSHDSIKMEIVDHALHALTDEVIIPHSGWEREPNEDCKPRHIEWESVLTNTAGCLRNVSSERSEARRKLRECDGLVDALIFIVQAEIGQKDSDSKLVENCVCLLRNLSYQVHREIPQAERYQEAAPNVANNTGPHAASCFGAKKGKGKKPIEDPANDTVDFPKRTSPARGYELLFQPEVVRIYISLLKESKTPAILEASAGAIQNLCAGRWTYGRYIRSALRQEKALSAIADLLTNEHERVVKAASGALRNLAVDARNKELIGKHAIPNLVKNLPGGQQNSSWNFSEDTVISILNTINEVIAENLEAAKKLRETQGIEKLVLINKSGNRSEKEVRAAALVLQTIWGYKELRKPLEKEGWKKSDFQVNLNNASRSQSSHSYDDSTLPLIDRNQKSDNNYSTPNERGDHNRTLDRSGDLGDMEPLKGTTPLMQDEGQESLEEELDVLVLDDEGGQVSYPSMQKI

SEQ ID NO: 25225 - protein, 817 aa, Homo sapiens
MQEPGQIVETYTEEDPEGAMSVVSVETSDDGTTRRTETTVKKVVKTVTTRTVQPVAMGPDGLPVDASSVSNNYIQTLGRDFRKNGNGGPGPYVGQAGTATLPRNFHYPPDGYSRHYEDGYPGGSDNYGSLSRVTRIEERYRPSMEGYRAPSRQDVYGPQPQVRVGGSSVDLHRFHPEPYGLEDDQRSMGYDDLDYGMMSDYGTARRTGTPSDPRRRLRSYEDMIGEEVPSDQYYWAPLAQHERGSLASLDSLRKGGPPPPNWRQPELPEVIAMLGFRLDAVKSNAAAYLQHLCYRNDKVKTDVRKLKGIPVLVGLLDHPKKEVHLGACGALKNISFGRDQDNKIAIKNCDGVPALVRLLRKARDMDLTEVITGTLWNLSSHDSIKMEIVDHALHALTDEVIIPHSGWEREPNEDCKPRHIEWESVLTNTAGCLRNVSSERSEARRKLRECDGLVDALIFIVQAEIGQKDSDSKLVENCVCLLRNLSYQVHREIPQAERYQEAAPNVANNTGPHAASCFGAKKGKDEWFSRGKKPIEDPANDTVDFPKRTSPARGYELLFQPEVVRIYISLLKESKTPAILEASAGAIQNLCAGRWTYGRYIRSALRQEKALSAIADLLTNEHERVVKAASGALRNLAVDARNKELIGKHAIPNLVKNLPGGQQNSSWNFSEDTVISILNTINEVIAENLEAAKKLRETQGIEKLVLINKSGNRSEKEVRAAALVLQTIWGYKELRKPLEKEGWKKSDFQVNLNNASRSQSSHSYDDSTLPLIDRNQKSDNNYSTPNERGDHNRTLDRSGDLGDMEPLKGTTPLMQKI

SEQ ID NO: 25226 - protein, 811 aa, Homo sapiens
MQEPGQIVETYTEEDPEGAMSVVSVETSDDGTTRRTETTVKKVVKTVTTRTVQPVAMGPDGLPVDASSVSNNYIQTLGRDFRKNGNGGPGPYVGQAGTATLPRNFHYPPDGYSRHYEDGYPGGSDNYGSLSRVTRIEERYRPSMEGYRAPSRQDVYGPQPQVRVGGSSVDLHRFHPEPYGLEDDQRSMGYDDLDYGMMSDYGTARRTGTPSDPRRRLRSYEDMIGEEVPSDQYYWAPLAQHERGSLASLDSLRKGGPPPPNWRQPELPEVIAMLGFRLDAVKSNAAAYLQHLCYRNDKVKTDVRKLKGIPVLVGLLDHPKKEVHLGACGALKNISFGRDQDNKIAIKNCDGVPALVRLLRKARDMDLTEVITGTLWNLSSHDSIKMEIVDHALHALTDEVIIPHSGWEREPNEDCKPRHIEWESVLTNTAGCLRNVSSERSEARRKLRECDGLVDALIFIVQAEIGQKDSDSKLVENCVCLLRNLSYQVHREIPQAERYQEAAPNVANNTGPHAASCFGAKKGKGKKPIEDPANDTVDFPKRTSPARGYELLFQPEVVRIYISLLKESKTPAILEASAGAIQNLCAGRWTYGRYIRSALRQEKALSAIADLLTNEHERVVKAASGALRNLAVDARNKELIGKHAIPNLVKNLPGGQQNSSWNFSEDTVISILNTINEVIAENLEAAKKLRETQGIEKLVLINKSGNRSEKEVRAAALVLQTIWGYKELRKPLEKEGWKKSDFQVNLNNASRSQSSHSYDDSTLPLIDRNQKSDNNYSTPNERGDHNRTLDRSGDLGDMEPLKGTTPLMQKI

SEQ ID NO: 25227 - protein, 645 aa, Homo sapiens
MIGEEVPSDQYYWAPLAQHERGSLASLDSLRKGGPPPPNWRQPELPEVIAMLGFRLDAVKSNAAAYLQHLCYRNDKVKTDVRKLKGIPVLVGLLDHPKKEVHLGACGALKNISFGRDQDNKIAIKNCDGVPALVRLLRKARDMDLTEVITGTLWNLSSHDSIKMEIVDHALHALTDEVIIPHSGWEREPNEDCKPRHIEWESVLTNTAGCLRNVSSERSEARRKLRECDGLVDALIFIVQAEIGQKDSDSKLVENCVCLLRNLSYQVHREIPQAERYQEAAPNVANNTGPHAASCFGAKKGKDEWFSRGKKPIEDPANDTVDFPKRTSPARGYELLFQPEVVRIYISLLKESKTPAILEASAGAIQNLCAGRWTYGRYIRSALRQEKALSAIADLLTNEHERVVKAASGALRNLAVDARNKELIGKHAIPNLVKNLPGGQQNSSWNFSEDTVISILNTINEVIAENLEAAKKLRETQGIEKLVLINKSGNRSEKEVRAAALVLQTIWGYKELRKPLEKEGWKKSDFQVNLNNASRSQSSHSYDDSTLPLIDRNQKSDKKPDREEIQMSNMGSNTKSLDNNYSTPNERGDHNRTLDRSGDLGDMEPLKGTTPLMQDEGQESLEEELDVLVLDDEGGQVSYPSMQKI

SEQ ID NO: 25228 - protein, 639 aa, Homo sapiens
MIGEEVPSDQYYWAPLAQHERGSLASLDSLRKGGPPPPNWRQPELPEVIAMLGFRLDAVKSNAAAYLQHLCYRNDKVKTDVRKLKGIPVLVGLLDHPKKEVHLGACGALKNISFGRDQDNKIAIKNCDGVPALVRLLRKARDMDLTEVITGTLWNLSSHDSIKMEIVDHALHALTDEVIIPHSGWEREPNEDCKPRHIEWESVLTNTAGCLRNVSSERSEARRKLRECDGLVDALIFIVQAEIGQKDSDSKLVENCVCLLRNLSYQVHREIPQAERYQEAAPNVANNTGPHAASCFGAKKGKGKKPIEDPANDTVDFPKRTSPARGYELLFQPEVVRIYISLLKESKTPAILEASAGAIQNLCAGRWTYGRYIRSALRQEKALSAIADLLTNEHERVVKAASGALRNLAVDARNKELIGKHAIPNLVKNLPGGQQNSSWNFSEDTVISILNTINEVIAENLEAAKKLRETQGIEKLVLINKSGNRSEKEVRAAALVLQTIWGYKELRKPLEKEGWKKSDFQVNLNNASRSQSSHSYDDSTLPLIDRNQKSDKKPDREEIQMSNMGSNTKSLDNNYSTPNERGDHNRTLDRSGDLGDMEPLKGTTPLMQDEGQESLEEELDVLVLDDEGGQVSYPSMQKI

SEQ ID NO: 25229 - protein, 616 aa, Homo sapiens
MIGEEVPSDQYYWAPLAQHERGSLASLDSLRKGGPPPPNWRQPELPEVIAMLGFRLDAVKSNAAAYLQHLCYRNDKVKTDVRKLKGIPVLVGLLDHPKKEVHLGACGALKNISFGRDQDNKIAIKNCDGVPALVRLLRKARDMDLTEVITGTLWNLSSHDSIKMEIVDHALHALTDEVIIPHSGWEREPNEDCKPRHIEWESVLTNTAGCLRNVSSERSEARRKLRECDGLVDALIFIVQAEIGQKDSDSKLVENCVCLLRNLSYQVHREIPQAERYQEAAPNVANNTGPHAASCFGAKKGKDEWFSRGKKPIEDPANDTVDFPKRTSPARGYELLFQPEVVRIYISLLKESKTPAILEASAGAIQNLCAGRWTYGRYIRSALRQEKALSAIADLLTNEHERVVKAASGALRNLAVDARNKELIGKHAIPNLVKNLPGGQQNSSWNFSEDTVISILNTINEVIAENLEAAKKLRETQGIEKLVLINKSGNRSEKEVRAAALVLQTIWGYKELRKPLEKEGWKKSDFQVNLNNASRSQSSHSYDDSTLPLIDRNQKSDKKPDREEIQMSNMGSNTKSLDNNYSTPNERGDHNRTLDRSGDLGDMEPLKGTTPLMQKI

SEQ ID NO: 25230 - protein, 624 aa, Homo sapiens
MIGEEVPSDQYYWAPLAQHERGSLASLDSLRKGGPPPPNWRQPELPEVIAMLGFRLDAVKSNAAAYLQHLCYRNDKVKTDVRKLKGIPVLVGLLDHPKKEVHLGACGALKNISFGRDQDNKIAIKNCDGVPALVRLLRKARDMDLTEVITGTLWNLSSHDSIKMEIVDHALHALTDEVIIPHSGWEREPNEDCKPRHIEWESVLTNTAGCLRNVSSERSEARRKLRECDGLVDALIFIVQAEIGQKDSDSKLVENCVCLLRNLSYQVHREIPQAERYQEAAPNVANNTGPHAASCFGAKKGKDEWFSRGKKPIEDPANDTVDFPKRTSPARGYELLFQPEVVRIYISLLKESKTPAILEASAGAIQNLCAGRWTYGRYIRSALRQEKALSAIADLLTNEHERVVKAASGALRNLAVDARNKELIGKHAIPNLVKNLPGGQQNSSWNFSEDTVISILNTINEVIAENLEAAKKLRETQGIEKLVLINKSGNRSEKEVRAAALVLQTIWGYKELRKPLEKEGWKKSDFQVNLNNASRSQSSHSYDDSTLPLIDRNQKSDNNYSTPNERGDHNRTLDRSGDLGDMEPLKGTTPLMQDEGQESLEEELDVLVLDDEGGQVSYPSMQKI

SEQ ID NO: 25231 - protein, 610 aa, Homo sapiens
MIGEEVPSDQYYWAPLAQHERGSLASLDSLRKGGPPPPNWRQPELPEVIAMLGFRLDAVKSNAAAYLQHLCYRNDKVKTDVRKLKGIPVLVGLLDHPKKEVHLGACGALKNISFGRDQDNKIAIKNCDGVPALVRLLRKARDMDLTEVITGTLWNLSSHDSIKMEIVDHALHALTDEVIIPHSGWEREPNEDCKPRHIEWESVLTNTAGCLRNVSSERSEARRKLRECDGLVDALIFIVQAEIGQKDSDSKLVENCVCLLRNLSYQVHREIPQAERYQEAAPNVANNTGPHAASCFGAKKGKGKKPIEDPANDTVDFPKRTSPARGYELLFQPEVVRIYISLLKESKTPAILEASAGAIQNLCAGRWTYGRYIRSALRQEKALSAIADLLTNEHERVVKAASGALRNLAVDARNKELIGKHAIPNLVKNLPGGQQNSSWNFSEDTVISILNTINEVIAENLEAAKKLRETQGIEKLVLINKSGNRSEKEVRAAALVLQTIWGYKELRKPLEKEGWKKSDFQVNLNNASRSQSSHSYDDSTLPLIDRNQKSDKKPDREEIQMSNMGSNTKSLDNNYSTPNERGDHNRTLDRSGDLGDMEPLKGTTPLMQKI

SEQ ID NO: 25232 - protein, 618 aa, Homo sapiens
MIGEEVPSDQYYWAPLAQHERGSLASLDSLRKGGPPPPNWRQPELPEVIAMLGFRLDAVKSNAAAYLQHLCYRNDKVKTDVRKLKGIPVLVGLLDHPKKEVHLGACGALKNISFGRDQDNKIAIKNCDGVPALVRLLRKARDMDLTEVITGTLWNLSSHDSIKMEIVDHALHALTDEVIIPHSGWEREPNEDCKPRHIEWESVLTNTAGCLRNVSSERSEARRKLRECDGLVDALIFIVQAEIGQKDSDSKLVENCVCLLRNLSYQVHREIPQAERYQEAAPNVANNTGPHAASCFGAKKGKGKKPIEDPANDTVDFPKRTSPARGYELLFQPEVVRIYISLLKESKTPAILEASAGAIQNLCAGRWTYGRYIRSALRQEKALSAIADLLTNEHERVVKAASGALRNLAVDARNKELIGKHAIPNLVKNLPGGQQNSSWNFSEDTVISILNTINEVIAENLEAAKKLRETQGIEKLVLINKSGNRSEKEVRAAALVLQTIWGYKELRKPLEKEGWKKSDFQVNLNNASRSQSSHSYDDSTLPLIDRNQKSDNNYSTPNERGDHNRTLDRSGDLGDMEPLKGTTPLMQDEGQESLEEELDVLVLDDEGGQVSYPSMQKI

SEQ ID NO: 25233 - protein, 595 aa, Homo sapiens
MIGEEVPSDQYYWAPLAQHERGSLASLDSLRKGGPPPPNWRQPELPEVIAMLGFRLDAVKSNAAAYLQHLCYRNDKVKTDVRKLKGIPVLVGLLDHPKKEVHLGACGALKNISFGRDQDNKIAIKNCDGVPALVRLLRKARDMDLTEVITGTLWNLSSHDSIKMEIVDHALHALTDEVIIPHSGWEREPNEDCKPRHIEWESVLTNTAGCLRNVSSERSEARRKLRECDGLVDALIFIVQAEIGQKDSDSKLVENCVCLLRNLSYQVHREIPQAERYQEAAPNVANNTGPHAASCFGAKKGKDEWFSRGKKPIEDPANDTVDFPKRTSPARGYELLFQPEVVRIYISLLKESKTPAILEASAGAIQNLCAGRWTYGRYIRSALRQEKALSAIADLLTNEHERVVKAASGALRNLAVDARNKELIGKHAIPNLVKNLPGGQQNSSWNFSEDTVISILNTINEVIAENLEAAKKLRETQGIEKLVLINKSGNRSEKEVRAAALVLQTIWGYKELRKPLEKEGWKKSDFQVNLNNASRSQSSHSYDDSTLPLIDRNQKSDNNYSTPNERGDHNRTLDRSGDLGDMEPLKGTTPLMQKI

SEQ ID NO: 25234 - protein, 589 aa, Homo sapiens
MIGEEVPSDQYYWAPLAQHERGSLASLDSLRKGGPPPPNWRQPELPEVIAMLGFRLDAVKSNAAAYLQHLCYRNDKVKTDVRKLKGIPVLVGLLDHPKKEVHLGACGALKNISFGRDQDNKIAIKNCDGVPALVRLLRKARDMDLTEVITGTLWNLSSHDSIKMEIVDHALHALTDEVIIPHSGWEREPNEDCKPRHIEWESVLTNTAGCLRNVSSERSEARRKLRECDGLVDALIFIVQAEIGQKDSDSKLVENCVCLLRNLSYQVHREIPQAERYQEAAPNVANNTGPHAASCFGAKKGKGKKPIEDPANDTVDFPKRTSPARGYELLFQPEVVRIYISLLKESKTPAILEASAGAIQNLCAGRWTYGRYIRSALRQEKALSAIADLLTNEHERVVKAASGALRNLAVDARNKELIGKHAIPNLVKNLPGGQQNSSWNFSEDTVISILNTINEVIAENLEAAKKLRETQGIEKLVLINKSGNRSEKEVRAAALVLQTIWGYKELRKPLEKEGWKKSDFQVNLNNASRSQSSHSYDDSTLPLIDRNQKSDNNYSTPNERGDHNRTLDRSGDLGDMEPLKGTTPLMQKI

SEQ ID NO: 25235 - protein, 828 aa, Homo sapiens
MNSTEFTEDVEEVLKSITVKVETEAEDAALDCSVNSRTSEKHSVDSVLTALQDSSKRKQLVSDGLLDSVPGVKRRRLIPEALLAGMRNRENSSPCQGNGEQAGRGRSLGNVWPGEEEPCNDATTPSYKKPLYGISHKIMEKKNPPSGDLLNVYELFEKANASNSPSSLRLLNEPQKRDCGSTGAGTDNDPNIYFLIQKMFYMLNTLTSNMSQLHSKVDLLSLEVSRIKKQVSPTEMVAKFQPPPEYQLTAAELKQIVDQSLSGGDLACRLLVQLFPELFSDVDFSRGCSACGFAAKRKLESLHLQLIRNYVEVYYPSVKDTAVWQAECLPQLNDFFSRFWAQREMEDSQPSGQVASFFEAEQVDPGHFLDNKDQEEALSLDRSSTIASDHVVDTQDLTEFLDEASSPGEFAVFLLHRLFPELFDHRKLGEQYSCYGDGGKQELDPQRLQIIRNYTEIYFPDMQEEEAWLQQCAQRINDELEGLGLDAGSEGDPPRDDCYDSSSLPDDISVVKVEDSFEGERPGRRSKKIWLVPIDFDKLEIPQPDFEVPGADCLLSKEQLRSIYESSLSIGNFASRLLVHLFPELFTHENLRKQYNCSGSLGKKQLDPSRIKLIRHYVQLLYPRAKNDRVWTLEFVGKLDERCRRRDTEQRRSYQQQRKVHVPGPECRDLTSYAINPERFREEFEGPPLPPERSSKDFCKIPLDELVVPSPDFPVPSPYLLSDKEVREIVQQSLSVGNFAARLLVRLFPELFTAENLRLQYNHSGACNKKQLDPTRLRLIRHYVEAVYPVEKMEEVWHYECIPSIDERCRRPNRKKCDILKKAKKVEK

SEQ ID NO: 25236 - protein, 411 aa, Homo sapiens
MTHWFHRNPLKATAPVSFNYYGVVTGPSASKICNDLRSSRARLLELFTDLSCNPEMMKNAADSYFSLLQGFINSLDESTQESKLRYIQNFKWTDTLQGQVPSAQQDAVFELISMGFNVALWYTKYASRLAGKENITEDEAKEVHRSLKIAAGIFKHLKESHLPKLITPAEKGRDLESRLIEAYVIQCQAEAQEVTIARAIELKHAPGLIAALAYETANFYQKADHTLSSLEPAYSAKWRKYLHLKMCFYTAYAYCYHGETLLASDKCGEAIRSLQEAEKLYAKAEALCKEYGETKGPGPTVKPSGHLFFRKLGNLVKNTLEKCQRENGFIYFQKIPTEAPQLELKANYGLVEPIPFEFPPTSVQWTPETLAAFDLTKRPKDDSTKPKPEEEVKPVKEPDIKPQKDTGCYIS

SEQ ID NO: 25237 - protein, 379 aa, Homo sapiens
MTHWFHRNPLKATAPVSFNYYGVVTGPSASKICNDLRSSRARLLELFTDLSCNPEMMKNAADSYFSLLQGFINSLDESTQESKLRYIQNFKWTDTLQGQVPSITEDEAKEVHRSLKIAAGIFKHLKESHLPKLITPAEKGRDLESRLIEAYVIQCQAEAQEVTIARAIELKHAPGLIAALAYETANFYQKADHTLSSLEPAYSAKWRKYLHLKMCFYTAYAYCYHGETLLASDKCGEAIRSLQEAEKLYAKAEALCKEYGETKGPGPTVKPSGHLFFRKLGNLVKNTLEKCQRENGFIYFQKIPTEAPQLELKANYGLVEPIPFEFPPTSVQWTPETLAAFDLTKRPKDDSTKPKPEEEVKPVKEPDIKPQKDTGCYIS

SEQ ID NO: 25238 - protein, 799 aa, Homo sapiens
MSERTQEQDFVIITVDDSDDNNDCSIEMVEVSETADNSTNDIADDSTYVTADNPTDDTATQPNFPGGNDGHHRPLQMSYGSGSVTQAGVQWHDHSSLQPQPLGLKQFFHLSLPSSWDDRRTPPCPVAHGDQIVSQINHPVHLRRYSYNSEEVDFPKRGRFYTPEVQSSISPPAERQETHAWASPAVTSLESAACHELQEADLSESLSYPRIVSSSSLQQYVAQGGSFPCFGMPWNFISGGAESTNAVISFANATTAVPMAVLSRRESSLANNPGVVNYSALPENENVGPGRALSSFCFHPNLEMPERPANSSKNSTETANYPTLMGNYNGQNTASLSVFIPPYFAEKIILTEMPGTTETNVENNSQTVYYPALSGNTSAPYPASSYLPITSNFESGPQMSYGTMSYSTEMKNNCDQDDASASACLTPDFALLPLNILVKVDTNTENSVNTMNRSTLLDSDSGQDSSSSSVCIPPKYGYLGDPKRNVRVLKIHLLAVQNMAKPKQAACYLVRILFSKEILISSSVDIHLKDSQSLDPNKMAALREYLATTFPTCDLHEHGKDWQDCISGINSMIYCLCSEGKSTPKTVRKNKKRTNRVASASADRNDQRGRDGGEGCSWMFQPMNNSKMREKRNLQPNSNAIPEGMREPSTDNPEEPGEAWSYFGRPWRNIRMPCSVLTLAKTKSCASLSARYLIQKLFTKDVLVQSNVYGNLKHGLCALDPNKISALREFLQENYPICDLSENGRDWKSCVTSINSGIRSLRHDVRRAEARSQSLPAVTPPELEQESKPGDPDATDPST

SEQ ID NO: 25239 - protein, 645 aa, Homo sapiens
MSERTQEQDFVIITVDDSDDNNDCSIEMVEVSETADNSTNDIADDSTYVTADNPTDDTATQPNFPGGNDGHHRPLQMSYGSGSVTQAGVQWHDHSSLQPQPLGLKQFFHLSLPSSWDDRRTPPCPVAHGDQIVSQINHPVHLRRYSYNSEEVDFPKRGRFYTPEVQSSISPPAERQETHAWASPAVTSLESAACHELQEADLSESLSYPRIVSSSSLQQYVAQGGSFPCFGMPWNFISGGAESTNAVISFANATTAVPMAVLSRRESSLANNPGVVNYSALPENENVGPGRALSSFCFHPNLESGPQMSYGTMSYSTEMKNNCDQDDASASACLTPDFALLPLNILVKVDTNTENSVNTMNRSTLLDSDSGQDSSSSSVCIPPKYGYLGDPKRNVRVLKIHLLAVQNMAKPKQAACYLVRILFSKEILISSSVDIHLKDSQSLDPNKMAALREYLATTFPTCDLHEHGKDWQDCISGINSMIYCLCSEGKSTPKTVRKNKKRTNRVASASADRNDQRGRDGGEGCSWMFQPMNNSKMREKRNLQPNSNAIPEGMREPSTDNPEEPGEAWSYFGRPWRNIRMPCSVLTLAKTKSCASLSARYLIQKLFTKDVLVQSNVYGNLKHGLCALDPNKISALRGLLHIEYV

SEQ ID NO: 25240 - protein, 328 aa, Homo sapiens
MTGSNEFKLNQPPEDGISSVKFSPNTSQFLLVSSWDTSVRLYDVPANSMRLKYQHTGAVLDCAFYDPTHAWSGGLDHQLKMHDLNTDQENLVGTHDAPIRCVEYCPEVNVMVTGSWDQTVKLWDPRTPCNAGTFSQPEKVYTLSVSGDRLIVGTAGRRVLVWDLRNMGYVQQRRESSLKYQTRCIRAFPNKQGYVLSSIEGRVAVEYLDPSPEVQKKKYAFKCHRLKENNIEQIYPVNAISFHNIHNTFATGGSDGFVNIWDPFNKKRLCQFHRYPTSIASLAFSNDGTTLAIASSYMYEMDDTEHPEDGIFIRQVTDAETKPKSPCT

SEQ ID NO: 25241 - protein, 326 aa, Homo sapiens
MTGSNEFKLNQPPEDGISSVKFSPNTSQFLLVSSWDTSVRLYDVPANSMRLKYQHTGAVLDCAFYDPTHAWSGGLDHQLKMHDLNTDQENLVGTHDAPIRCVEYCPEVNVMVTGSWDQTVKLWDPRTPCNAGTFSQPEKVYTLSVSGDRLIVGTAGRRVLVWDLRNMGYVQQRRESSLKYQTRCIRAFPNKQGYVLSSIEGRVAVEYLDPSPEVQKKKYAFKCHRLKENNIEQIYPVNAISFHNIHNTFATGGSDGFVNIWDPFNKKRLCQFHRYPTSIASLAFSNDGTTLAIASSYMYEMDDTEHPEDGIFIRQVTDAETKPKST

SEQ ID NO: 25242 - protein, 668 aa, Homo sapiens
MTVTYSSKVANATFFGFHRLLLKWRGSIYKLLYREFIVFAVLYTAISLVYRLLLTGVQKRYFEKLSIYCDRYAEQIPVTFVLGFYVTLVVNRWWNQFVNLPWPDRLMFLISSSVHGSDEHGRLLRRTLMRYVNLTSLLIFRSVSTAVYKRFPTMDHVVEAGFMTTDERKLFNHLKSPHLKYWVPFIWFGNLATKARNEGRIRDSVDLQSLMTEMNRYRSWCSLLFGYDWVGIPLVYTQVVTLAVYTFFFACLIGRQFLDPTKGYAGHDLDLYIPIFTLLQFFFYAGWLKVAEQLINPFGEDDDDFETNWCIDRNLQVSLLAVDEMHMSLPKMKKDIYWDDSAARPPYTLAAADYCIPSFLGSTVQMGLSGSDFPDEEWLWDYEKHGHRHSMIRRVKRFLSAHEHPSSPRRRSYRRQTSDSSMFLPRDDLSPARDLLDVPSRNPPRASPTWKKSCFPEGSPTLHFSMGELSTIRETSQTSTLQSLTPQSSVRTSPIKMPLVPEVLITAAEAPVPTSGGYHHDSATSILSSEFTGVQPSKTEQQQGPMGSILSPSEKETPPGGPSPQTVSASAEENIFNCEEDPGDTFLKRWSLPGFLGSSHTSLGNLSPDPMSSQPALLIDTETSSEISGINIVAGSRVSSDMLYLMENLDTKETDIIELNKETEESPK

SEQ ID NO: 25243 - protein, 398 aa, Homo sapiens
MTVTYSSKVANATFFGFHRLLLKWRGSIYKLLYREFIVFAVLYTAISLVYRLLLTGVQKRYFEKLSIYCDRYAEQIPVTFVLGFYVTLVVNRWWNQFVNLPWPDRLMFLISSSVHGSDEHGRLLRRTLMRYVNLTSLLIFRSVSTAVYKRFPTMDHVVEAGFMTTDERKLFNHLKSPHLKYWVPFIWFGNLATKARNEGRIRDSVDLQSLMTEMNRYRSWCSLLFGYDWVGIPLVYTQVVTLAVYTFFFACLIGRQFLDPTKGYAGHDLDLYIPIFTLLQFFFYAGWLKVAEQLINPFGEDDDDFETNWCIDRNLQVSLLAVDEMHMSLPKMKKDIYWDDSAARPPYTLAAADYCIPSFLGSTVQMGKQMPKNEWKMEDIKIPLPQPQFQCAKSDPGG

SEQ ID NO: 25244 - protein, 72 aa, Homo sapiens
MFLISSSVHGSDEHGRLLRRTLMRYVNLTSLLIFRSVSTAVYKRFPTMDHVVEAERTGMKPILPSSFEMQSF

SEQ ID NO: 25245 - protein, 455 aa, Homo sapiens
MTTDERKLFNHLKSPHLKYWVPFIWFGNLATKARNEGRIRDSVDLQSLMTEMNRYRSWCSLLFGYDWVGIPLVYTQVAEQLINPFGEDDDDFETNWCIDRNLQVSLLAVDEMHMSLPKMKKDIYWDDSAARPPYTLAAADYCIPSFLGSTVQMGLSGSDFPDEEWLWDYEKHGHRHSMIRRVKRFLSAHEHPSSPRRRSYRRQTSDSSMFLPRDDLSPARDLLDVPSRNPPRASPTWKKSCFPEGSPTLHFSMGELSTIRETSQTSTLQSLTPQSSVRTSPIKMPLVPEVLITAAEAPVPTSGGYHHDSATSILSSEFTGVQPSKTEQQQGPMGSILSPSEKETPPGGPSPQTVSASAEENIFNCEEDPGDTFLKRWSLPGFLGSSHTSLGNLSPDPMSSQPALLIDTETSSEISGINIVAGSRVSSDMLYLMENLDTKETDIIELNKETEESPK

SEQ ID NO: 25246 - protein, 562 aa, Homo sapiens
MFLISSSVHGSDEHGRLLRRTLMRYVNLTSLLIFRSVSTAVYKRFPTMDHVVEAGFMTTDERKLFNHLKSPHLKYWVPFIWFGNLATKARNEGRIRDSVDLQSLMTEMNRYRSWCSLLFGYDWVGIPLVYTQVVTLAVYTFFFACLIGRQFLDPTKGYAGHDLDLYIPIFTLLQFFFYAGWLKVAEQLINPFGEDDDDFETNWCIDRNLQVSLLAVDEMHMSLPKMKKDIYWDDSAARPPYTLAAADYCIPSFLGSTVQMGLSGSDFPDEEWLWDYEKHGHRHSMIRRVKRFLSAHEHPSSPRRRSYRRQTSDSSMFLPRDDLSPARDLLDVPSRNPPRASPTWKKSCFPEGSPTLHFSMGELSTIRETSQTSTLQSLTPQSSVRTSPIKMPLVPEVLITAAEAPVPTSGGYHHDSATSILSSEFTGVQPSKTEQQQGPMGSILSPSEKETPPGGPSPQTVSASAEENIFNCEEDPGDTFLKRWSLPGFLGSSHTSLGNLSPDPMSSQPALLIDTETSSEISGINIVAGSRVSSDMLYLMENLDTKETDIIELNKETEESPK

SEQ ID NO: 25247 - protein, 565 aa, Homo sapiens
MAEGKAGGAAGLFAKQVQKKFSRAQEKVLQKLGKAVETKDERFEQSASNFYQQQAEGHKLYKDLKNFLSAVKVMHESSKRVSETLQEIYSSEWDGHEELKAIVWNNDLLWEDYEEKLADQAVRTMEIYVAQFSEIKERIAKRGRKLVDYDSARHHLEAVQNAKKKDEAKTAKAEEEFNKAQTVFEDLNQELLEELPILYNSRIGCYVTIFQNISNLRDVFYREMSKLNHNLYEVMSKLEKQHSNKVFVVKGLSSSSRRSLVISPPVRTATVSSPLTSPTSPSTLSLKSESESVSATEDLAPDAAQGEDNSEIKELLEEEEIEKEGSEASSSEEDEPLPACNGPAQAQPSPTTERAKSQEEVLPSSTTPSPGGALSPSGQPSSSATEVVLRTRTASEGSEQPKKRASIQRTSAPPSRPPPPRATASPRPSSGNIPSSPTASGGGSPTSPRASLGTGTASPRTSLEVSPNPEPPEKPVRTPEAKENENIHNQNPEELCTSPTLMTSQVASEPGEAKKMEDKEKDNKLISANSSEGQDQLQVSMVPENNNLTAPEPQEEVSTSENPQL

SEQ ID NO: 25248 - protein, 533 aa, Homo sapiens
MAEGKAGGAAGLFAKQVQKKFSRAQEKVLQKLGKAVETKDERFEQSASNFYQQQAEGHKLYKDLKNFLSAVKVMHESSKRVSETLQEIYSSEWDGHEELKAIVWERIAKRGRKLVDYDSARHHLEAVQNAKKKDEAKTAKAEEEFNKAQTVFEDLNQELLEELPILYNSRIGCYVTIFQNISNLRDVFYREMSKLNHNLYEVMSKLEKQHSNKVFVVKGLSSSSRRSLVISPPVRTATVSSPLTSPTSPSTLSLKSESESVSATEDLAPDAAQGEDNSEIKELLEEEEIEKEGSEASSSEEDEPLPACNGPAQAQPSPTTERAKSQEEVLPSSTTPSPGGALSPSGQPSSSATEVVLRTRTASEGSEQPKKRASIQRTSAPPSRPPPPRATASPRPSSGNIPSSPTASGGGSPTSPRASLGTGTASPRTSLEVSPNPEPPEKPVRTPEAKENENIHNQNPEELCTSPTLMTSQVASEPGEAKKMEDKEKDNKLISANSSEGQDQLQVSMVPENNNLTAPEPQEEVSTSENPQL

SEQ ID NO: 25249 - protein, 539 aa, Homo sapiens
MVLQKLGKAVETKDERFEQSASNFYQQQAEGHKLYKDLKNFLSAVKVMHESSKRVSETLQEIYSSEWDGHEELKAIVWNNDLLWEDYEEKLADQAVRTMEIYVAQFSEIKERIAKRGRKLVDYDSARHHLEAVQNAKKKDEAKTAKAEEEFNKAQTVFEDLNQELLEELPILYNSRIGCYVTIFQNISNLRDVFYREMSKLNHNLYEVMSKLEKQHSNKVFVVKGLSSSSRRSLVISPPVRTATVSSPLTSPTSPSTLSLKSESESVSATEDLAPDAAQGEDNSEIKELLEEEEIEKEGSEASSSEEDEPLPACNGPAQAQPSPTTERAKSQEEVLPSSTTPSPGGALSPSGQPSSSATEVVLRTRTASEGSEQPKKRASIQRTSAPPSRPPPPRATASPRPSSGNIPSSPTASGGGSPTSPRASLGTGTASPRTSLEVSPNPEPPEKPVRTPEAKENENIHNQNPEELCTSPTLMTSQVASEPGEAKKMEDKEKDNKLISANSSEGQDQLQVSMVPENNNLTAPEPQEEVSTSENPQL

SEQ ID NO: 25250 - protein, 473 aa, Homo sapiens
MTVSYTLKVAEARFGGFSGLLLRWRGSIYKLLYKEFLLFGALYAVLSITYRLLLTQEQRYVYAQVARYCNRSADLIPLSFVLGFYVTLVVNRWWSQYTSIPLPDQLMCVISASVHGVDQRGRLLRRTLIRYANLASVLVLRSVSTRVLKRFPTMEHVVDAGFMSQEERKKFESLKSDFNKYWVPCVWFTNLAAQARRDGRIRDDIALCLLLEELNKYRAKCSMLFHYDWISIPLVYTQVVTIAVYSFFALSLVGRQFVEPEAGAAKPQKLLKPGQEPAPALGDPDMYVPLTTLLQFFFYAGWLKVAEQIINPFGEDDDDFETNQLIDRNLQVSLLSVDEMYQNLPPAEKDQYWDEDQPQPPYTVATAAESLRPSFLGSTFNLRMSDDPEQSLQVEASPGSGRPAPAAQTPLLGRFLGVGAPSPAISLRNFGRVRGTPRPPHLLRFRAEEGGDPEAAARIEEESAESGDEALEP

SEQ ID NO: 25251 - protein, 412 aa, Homo sapiens
MILASVLRSGPGGGLPLRPLLGPALALRARSTSATDTHHVEMARERSKTVTSFYNQSAIDAAAEKPSVRLTPTMMLYAGRSQDGSHLLKSARYLQQELPVRIAHRIKGFRCLPFIIGCNPTILHVHELYIRAFQKLTDFPPIKDQADEAQYCQLVRQLLDDHKDVVTLLAEGLRESRKHIEDEKLVRYFLDKTLTSRLGIRMLATHHLALHEDKPDFVGIICTRLSPKKIIEKWVDFARRLCEHKYGNAPRVRINGHVAARFPFIPMPLDYILPELLKNAMRATMESHLDTPYNVPDVVITIANNDVDLIIRISDRGGGIAHKDLDRVMDYHFTTAEASTQDPRISPLFGHLDMHSGAQSGPMHGFGFGLPTSRAYAEYLGGSLQLQSLQGIGTDVYLRLRHIDGREESFRI

SEQ ID NO: 25252 - protein, 335 aa, Homo sapiens
MILASVLRSGPGGGLPLRPLLGPALALRARSTSATDTHHVEMARERSKTVTSFYNQSAIDAAAEKPSVRLTPTMMLYAGRSQDGSHLLKSARYLQQELPVRIAHRIKGFRCLPFIIGCNPTILHVHELYIRAFQKLTDFPPIKDQADEAQYCQLVRQLLDDHKDVVTLLAEGLRESRKHIEDEKLVRYFLDKTLTSRLGIRMLATHHLALHEDKPDFVGIICTRLSPKKIIEKWVDFARRLCEHKYGNAPRVRINGHVAARFPFIPMPLDYILPELLKNAMRISDRGGGIAHKDLDRVMDYHFTTAEASTQDPRISPLFGHLDMHSGAQSGPMHG

SEQ ID NO: 25253 - protein, 365 aa, Homo sapiens
MILASVLRSGPGGGLPLRPLLGPALALRARSTSATDTHHVEMARERSKTVTSFYNQSAIDAAAEKPSVRLTPTMMLYAGRSQDGSHLLKSARYLQQELPVRIAHRIKGFRCLPFIIGCNPTILHVHELYIRAFQKLTDFPPIKDQADEAQYCQLVRQLLDDHKDVVTLLAEGLRESRKHIEDEKLVRYFLDKTLTSRLGIRMLATHHLALHEDKPDFVGIICTRLSPKKIIEKWVDFARRLCEHKYGNAPRVRINGHVAARFPFIPMPLDYILPELLKNAMRATMESHLDTPYNVPDVVITIANNDVDLIIRISDRGGGIAHKDLDRVMDYHFTTAEASTQDPRISPLFGHLDMHSGAQSGPMHG

SEQ ID NO: 25254 - protein, 479 aa, Homo sapiens
MGSPAAPEGALGYVREFTRHSSDVLGNLNELRLRGILTDVTLLVGGQPLRAHKAVLIACSGFFYSIFRGRAGVGVDVLSLPGGPEARGFAPLLDFMYTSRLRLSPATAPAVLAAATYLQMEHVVQACHRFIQASYEPLGISLRPLEAEPPTPPTAPPPGSPRRSEGHPDPPTESRSCSQGPPSPASPDPKACNWKKYKYIVLNSQASQAGSLVGERSSGQPCPQARLPSGDEASSSSSSSSSSSEEGPIPGPQSRLSPTAATVQFKCGAPASTPYLLTSQAQDTSGSPSERARPLPGSEFFSCQNCEAVAGCSSGLDSLVPGDEDKPYKCQLCRSSFRYKGNLASHRTVHTGEKPYHCSICGARFNRPANLKTHSRIHSGEKPYKCETCGSRFVQVAHLRAHVLIHTGEKPYPCPTCGTRFRHLQTLKSHVRIHTGEKPYHCDPCGLHFRHKSQLRLHLRQKHGAATNTKVHYHILGGP

SEQ ID NO: 25255 - protein, 1499 aa, Homo sapiens
MRILANKTRLPHPRRREAPGSPPLSPRGHCPPAPAKPMHPENKLTNHGKTGNGGAQSQHQNVNQGPTCNVGSKGVGAGNHGAKANQISPSNSSLKNPQAGVPPFSSLKGKVKRDRSVSVDSGEQREAGTPSLDSEAKEVAPRSKRRCVLERKQPYSGDEWCSGPDSEEDDKPIGATHNCNVADPAMAAPQLGPGQTTQLPLSESSVPGAPHGPPPGLRPDAPGGGGGGGGVPGKPPSQFVYVFTTHLANTAAEAVLQGRADSILAYHQQNVPRAKLDQAPKVPPTPEPLPLSTPSAGTPQSQPPPLPPPPPPAPGSAPPALPPEGPPEDSSQDLAPNSVGAASTGGGTGGTHPNTPTATTANNPLPPGGDPSSAPGPALLGEAAAPGNGQRSLVGSEGLSKEQLEHRERSLQTLRDIERLLLRSGETEPFLKGPPGGAGEGGPPAQAPPPPQQPPTAPPSGLKKYEEPLQSMISQTQSLGGPPLEHEVPGHPPGGDMGQQMNMMIQRLGQDSLTPEQVAWRKLQEEYYEEKRRKEEQIGLHGSRPLQDMMGMGGMMVRGPPPPYHSKPGDQWPPGMGAQLRGPMDVQDPMQLRGGPPFPGPRFPGNQIQRVPGFGGMQSMPMEVPMNAMQRPVRPGMGWTEDLPPMGGPSNFAQNTMPYPGGQGEAERFMTPRVREELLRHQLLEKRSMGMQRPLGMAGSGMGQSMEMERMMQAHRQMDPAMFPGQMAGGEGLAGTPMGMEFGGGRGLLSPPMGQSGLREVDPPMGPGNLNMNMNVNMNMNMNLNVQMTPQQQMLMSQKMRGPGDLMGPQGLSPEEMARVRAQNSSGVMGGPQKMLMPSQFPNQGQQGFSGGQGPYQAMSQDMGNTQDMFSPDQSSMPMSNVGTTRLSHMPLPPASNPPGTVHSAPNRGLGRRPSDLTISINQMGSPGMGHLKSPTLSQVHSPLVTSPSANLKSPQTPSQMVPLPSANPPGPLKSPQVLGSSLSVRSPTGSPSRLKSPSMAVPSPGWVASPKTAMPSPGVSQNKQPPLNMNSSTTLSNMEQGTLPPSGPRSSSSAPPANPPSGLMNPSLPFTSSPDPTPSQNPLSLMMTQMSKYAMPSSTPLYHNAIKTIATSDDELLPDRPLLPPPPPPQGSGPGISNSQPSQMHLNSAAAQSPMGMNLPGQQPLSHEPPPAMLPSPTPLGSNIPLHPNAQGTGGPPQNSMMMAPGGPDSLNAPCGPVPSSSQMMPFPPRLQQPHGAMAPTGGGGGGPGLQQHYPSGMALPPEDLPNQPPGPMPPQQHLMGKAMAGRMGDAYPPGVLPGVASVLNDPELSEVIRPTPTGIPEFDLSRIIPSEKPSSTLQYFPKSENQPPKAQPPNLHLMNLQNMMAEQTPSRPPNLPGQQGVQRGLNMSMCHPGQMSLLGRTGVPPQQGMVPHGLHQGVMSPPQGLMTQQNFMLMKQRGVGGEVYSQPPHMLSPQGSLMGPPPQQNLMVSHPLRQRSVSLDSQMGYLPAPGGMANLPF

SEQ ID NO: 25256 - protein, 1494 aa, Homo sapiens
MRILANKTRRREAPGSPPLSPRGHCPPAPAKPMHPENKLTNHGKTGNGGAQSQHQNVNQGPTCNVGSKGVGAGNHGAKANQISPSNSSLKNPQAGVPPFSSLKGKVKRDRSVSVDSGEQREAGTPSLDSEAKEVAPRSKRRCVLERKQPYSGDEWCSGPDSEEDDKPIGATHNCNVADPAMAAPQLGPGQTTQLPLSESSVPGAPHGPPPGLRPDAPGGGGGGGGVPGKPPSQFVYVFTTHLANTAAEAVLQGRADSILAYHQQNVPRAKLDQAPKVPPTPEPLPLSTPSAGTPQSQPPPLPPPPPPAPGSAPPALPPEGPPEDSSQDLAPNSVGAASTGGGTGGTHPNTPTATTANNPLPPGGDPSSAPGPALLGEAAAPGNGQRSLVGSEGLSKEQLEHRERSLQTLRDIERLLLRSGETEPFLKGPPGGAGEGGPPAQAPPPPQQPPTAPPSGLKKYEEPLQSMISQTQSLGGPPLEHEVPGHPPGGDMGQQMNMMIQRLGQDSLTPEQVAWRKLQEEYYEEKRRKEEQIGLHGSRPLQDMMGMGGMMVRGPPPPYHSKPGDQWPPGMGAQLRGPMDVQDPMQLRGGPPFPGPRFPGNQIQRVPGFGGMQSMPMEVPMNAMQRPVRPGMGWTEDLPPMGGPSNFAQNTMPYPGGQGEAERFMTPRVREELLRHQLLEKRSMGMQRPLGMAGSGMGQSMEMERMMQAHRQMDPAMFPGQMAGGEGLAGTPMGMEFGGGRGLLSPPMGQSGLREVDPPMGPGNLNMNMNVNMNMNMNLNVQMTPQQQMLMSQKMRGPGDLMGPQGLSPEEMARVRAQNSSGVMGGPQKMLMPSQFPNQGQQGFSGGQGPYQAMSQDMGNTQDMFSPDQSSMPMSNVGTTRLSHMPLPPASNPPGTVHSAPNRGLGRRPSDLTISINQMGSPGMGHLKSPTLSQVHSPLVTSPSANLKSPQTPSQMVPLPSANPPGPLKSPQVLGSSLSVRSPTGSPSRLKSPSMAVPSPGWVASPKTAMPSPGVSQNKQPPLNMNSSTTLSNMEQGTLPPSGPRSSSSAPPANPPSGLMNPSLPFTSSPDPTPSQNPLSLMMTQMSKYAMPSSTPLYHNAIKTIATSDDELLPDRPLLPPPPPPQGSGPGISNSQPSQMHLNSAAAQSPMGMNLPGQQPLSHEPPPAMLPSPTPLGSNIPLHPNAQGTGGPPQNSMMMAPGGPDSLNAPCGPVPSSSQMMPFPPRLQQPHGAMAPTGGGGGGPGLQQHYPSGMALPPEDLPNQPPGPMPPQQHLMGKAMAGRMGDAYPPGVLPGVASVLNDPELSEVIRPTPTGIPEFDLSRIIPSEKPSSTLQYFPKSENQPPKAQPPNLHLMNLQNMMAEQTPSRPPNLPGQQGVQRGLNMSMCHPGQMSLLGRTGVPPQQGMVPHGLHQGVMSPPQGLMTQQNFMLMKQRGVGGEVYSQPPHMLSPQGSLMGPPPQQNLMVSHPLRQRSVSLDSQMGYLPAPGGMANLPF

SEQ ID NO: 25257 - protein, 1395 aa, Homo sapiens
MRILANKTRLPHPRRREAPGSPPLSPRGHCPPAPAKPMHPENKLTNHGKTGNGGAQSQHQNVNQGPTCNVGSKGVGAGNHGAKANQISPSNSSLKNPQAGVPPFSSLKGKVKRDRSVSVDSGEQREAGTPSLDSEAKEVAPRSKRRCVLERKQPYSGDEWCSGPDSEEDDKPIGATHNCNVADPAMAAPQLGPGQTTQLPLSESSVPGAPHGPPPGLRPDAPGGGGGGGGVPGKPPSQFVYVFTTHLANTAAEAVLQGRADSILAYHQQNVPRAKLDQAPKVPPTPEPLPLSTPSAGTPQSQPPPLPPPPPPAPGSAPPALPPEGPPEDSSQDLAPNSVGAASTGGGTGGTHPNTPTATTANNPLPPGGDPSSAPGPALLGEAAAPGNGQRSLVGSEGLSKEQLEHRERSLQTLRDIERLLLRSGETEPFLKGPPGGAGEGGPPAQAPPPPQQPPTAPPSGLKKYEEPLQSMISQTQSLGGPPLEHEVPGHPPGGDMGQQMNMMIQRLGQDSLTPEQVAWRKLQEEYYEEKRRKEEQIGLHGSRPLQDMMGMGGMMVRGPPPPYHSKPGDQWPPGMGAQLRGPMDVQDPMQLRGGPPFPGPRFPGNQIQRVPGFGGMQSMPMEVPMNAMQRPVRPGMGWTEDLPPMGGPSNFAQNTMPYPGGQGEAERFMTPRVREELLRHQLLEKRSMGMQRPLGMAGSGMGQSMEMERMMQAHRQMDPAMFPGQMAGGEGLAGTPMGMEFGGGRGLLSPPMGQSGLREVDPPMGPGNLNMNMNVNMNMNMNLNVQMTPQQQMLMSQKMRGPGDLMGPQGLSPEEMARVRAQNSSGVMGGPQKMLMPSQFPNQGQQGFSGGQGPYQAMSQDMGNTQDMFSPDQSSMPMSNVGTTRLSHMPLPPASNPPGTVHSAPNRGLGRRPSDLTISINQMGSPGMGHLKSPTLSQVHSPLVTSPSANLKSPQTPSQMVPLPSANPPGPLKSPQVLGSSLSVRSPTGSPSRLKSPSMAVPSPGWVASPKTAMPSPGVSQNKQPPLNMNSSTTLSNMEQGTLPPSGPRSSSSAPPANPPSGLMNPSLPFTSSPDPTPSQNPLSLMMTQMSKYAMPSSTPLYHNAIKTIATSDDELLPDRPLLPPPPPPQGSGPGISNSQPSQMHLNSAAAQSPMGMNLPGQQPLSHEPPPAMLPSPTPLGSNIPLHPNAQGTGGPPQNSMMMAPGGPDSLNAPCGPVPSSSQMMPFPPRLQQPHGAMAPTGGGGGGPGLQQHYPSGMALPPEDLPNQPPGPMPPQQHLMGKAMAGRMGDAYPPGVLPGVASVLNDPELSEVIRPTPTGIPEFDLSRIIPSWFLRTRPFSFCLYLLRILSLLMWLTPLPPLPAGGWPGGQVPAGAVNRALRFCAGLCVCCISVF

SEQ ID NO: 25258 - protein, 1453 aa, Homo sapiens
MRILANKTRLPHPRRREAPGSPPLSPRGHCPPAPAKPMHPENKLTNHGKTGNGGAQSQHQNVNQGPTCNVGSKGVGAGNHGAKANQISPSNSSLKNPQAGVPPFSSLKGKVKRDRSVSVDSGEQREAGTPSLDSEAKEVAPRSKRRCVLERKQPYSGDEWCSGPDSEEDDKPIGATHNCNVADPAMAAPQLGPGQTTQLPLSESSVPGAPHGPPPGLRPDAPGGGGGGGGVPGKPPSQFVYVFTTHLANTAAEAVLQGRADSILAYHQQNVPRAKLDQAPKVPPTPEPLPLSTPSAGTPQSQPPPLPPPPPPAPGSAPPALPPEGPPEDSSQDLAPNSVGAASTGGGTGGTHPNTPTATTANNPLPPGGDPSSAPGPALLGEAAAPGNGQRSLVGSEGLSKEQLEHRERSLQTLRDIERLLLRSGETEPFLKGPPGGAGEGGPPAQAPPPPQQPPTAPPSGLKKYEEPLQSMISQTQSLGGPPLEHEVPGHPPGGDMGQQMNMMIQRLGQDSLTPEQVAWRKLQEEYYEEKRRKEEQIGLHGSRPLQDMMGMGGMMVRGPPPPYHSKPGDQWPPGMGAQLRGPMDVQDPMQLRGGPPFPGPRFPGNQIQRVPGFGGMQSMPMEVPMNAMQRPVRPGMGWTEDLPPMGGPSNFAQNTMPYPGGQGEAERFMTPRVREELLRHQLLEKRSMGMQRPLGMAGSGMGQSMEMERMMQAHRQMDPAMFPGQMAGGEGLAGTPMGMEFGGGRGLLSPPMGQSGLREVDPPMGPGNLNMNMNVNMNMNMNLNVQMTPQQQMLMSQKMRGPGDLMGPQGLSPEEMARVRAQNSSGVMGGPQKMLMPSQFPNQGQQGFSGGQGPYQAMSQDMGNTQDMFSPDQSSMPMSNVGTTRLSHMPLPPASNPPGTVHSAPNRGLGRRPSDLTISINQMGSPGMGHLKSPTLSQVHSPLVTSPSANLKSPQTPSQMVPLPSANPPGPLKSPQVLGSSLSVRSPTGSPSRLKSPSMAVPSPGWVASPKTAMPSPGVSQNKQPPLNMNSSTTLSNMEQGTLPPSGPRSSSSAPPANPPSGLMNPSLPFTSSPDPTPSQNPLSLMMTQMSKYAMPSSTPLYHNAIKTIATSDDELLPDRPLLPPPPPPQGSGPGISNSQPSQMHLNSAAAQSPMGMNLPGQQPLSHEPPPAMLPSPTPLGSNIPLHPNAQGTGGPPQNSMMMAPGGPDSLNAPCGPVPSSSQMMPFPPRLQQPHGAMAGRMGDAYPPGVLPGVASVLNDPELSEVIRPTPTGIPEFDLSRIIPSEKPSSTLQYFPKSENQPPKAQPPNLHLMNLQNMMAEQTPSRPPNLPGQQGVQRGLNMSMCHPGQMSLLGRTGVPPQQGMVPHGLHQGVMSPPQGLMTQQNFMLMKQRGVGGEVYSQPPHMLSPQGSLMGPPPQQNLMVSHPLRQRSVSLDSQMGYLPAPGGMANLPF

SEQ ID NO: 25259 - protein, 529 aa, Homo sapiens
MPSKGKDKKKGKSKGKDTKKLIKTDESVVDRAKANASLWEARLEVTELSRIKYRDTSRILAKSNEDLKKKQCKMEKDIMSVLSYLKKQDQEKDNMIEKLKQQLNETKEKAQEEKDKLEQKYTRQINELEGQFHQKAKEIGMIHTELKAVRQFQKRKIQVERELDDLKENLRNTERIHQETLRRLESRFFEEKHRLEQEAEKKIIMLAERAHHEAIVQLNDAGRNVFKENDYLQKALAYHLKETDALQKNSQKLQESHTLLLHQKEINDLLVKEKIMQLVQQRSQIQTLQKKVVNLETALSYMTKEFESEVLKLQQHAMIENQAGQVEIDKLQHLLQMKDREMNRVKKLAKNILDERTEVERFFLDALHQVKQQILISRKHYKQIAQAAFNLKMRAACTGRTEYPKIRTFDGREHSTNSVNQDLLEAEKWTHIEGNVDIGDLTWEQKEKVLRLLFAKMNGCPSRKYNQSSRPPVPDYVVSDSGETKEFGDESKLQDKIFITQQIAISDSSGEVVLPTIPKEPQESDTGTF

SEQ ID NO: 25260 - protein, 356 aa, Homo sapiens
MPILKQLVSSSVHSKRRSRADLTAEMISAPLGDFRHTMHVGRAGDAFGDTSFLNSKAGEPDGESLDEQPSSSSSKRSLLSRKFRGSKRSQSVTRGEREQRDMLGSLRDSALFVKNAMSLPQLNEKEAAEKGTSKLPKSLSSSPVKKANDGEGGDEEAGTEEAVPRRNGAAGPHSPDPLLDEQAFGDLTDLPVVPKATYGLKHAESIMSFHIDLGPSMLGDVLSIMDKEEWDPEEGEGGYHGDEGAAGTITQAPPYAVAAPPLARQEGKAGPDLPSLPSHALEDEGWAAAAPSPGSARSMGSHTTRDSSSLSSCTSGILEERSPAFRGPDRARAAVSRQPDKEFSFMDEEEEDEIRV

SEQ ID NO: 25261 - protein, 286 aa, Homo sapiens
MPILKQLVSSSVHSKRRSRADLTAEMISAPLGDFRHTMHVGRAGDAFGDTSFLNSKAAEKGTSKLPKSLSSSPVKKANDGEGGDEEAGTEEAVPRRNGAAGPHSPDPLLDEQAFGDLTDLPVVPKATYGLKHAESIMSFHIDLGPSMLGDVLSIMDKEEWDPEEGEGGYHGDEGAAGTITQAPPYAVAAPPLARQEGKAGPDLPSLPSHALEDEGWAAAAPSPGSARSMGSHTTRDSSSLSSCTSGILEERSPAFRGPDRARAAVSRQPDKEFSFMDEEEEDEIRV

SEQ ID NO: 25262 - protein, 225 aa, Homo sapiens
MAELKSLSGDAYLALSHGYAAAAAGLAYGAAREPEAARGYGTPGPGGDLPAAPAPRAPAQAAESSGEQSGDEDDAFEQRRRRRGPGSAADGRRRPREQRSLRLSINARERRRMHDLNDALDGLRAVIPYAHSPSVRKLSKIATLLLAKNYILMQAQALDEMRRLVAFLNQGQGLAAPVNAAPLTPFGQATVCPFSAGAALGPCPDKCAAFSGTPSALCKHCHEKP

SEQ ID NO: 25263 - protein, 149 aa, Homo sapiens [sequence omitted]

SEQ ID NO: 25264 - protein, 203 aa, Homo sapiens
MTQDRPLLAVQEALKKCFPVVEEQQGLWQSALRDCQPLLSSLSNLAEQLQAAQNLRFEDVPALRAFPDLKERLRRKQLVAGDIVLDKLGERLAILLKVRDMVSSHVERVFQIYEQHADTVGIDAVLQPSAVSPSVADMLEWLQDIERHYRKSYLKRKYLLSSIQWGDLANIQALPKAWDRISKDEHQDLVQDILLNVSFFLEE

SEQ ID NO: 25265 - protein, 113 aa, Homo sapiens
MTQDRPLLAVQEALKKCFPVVEEQQGLWQSALRDCQPLLSSLSNLAEQLQAAQNLRFEDVPALRAFPDLKERLRQPSSSRCETWSAAMWSECFRSMSNTQTQLALMLSCSLQQ

SEQ ID NO: 25266 - protein, 400 aa, Homo sapiens
MAEKILEKLDVLDKQAEIILARRTKINRLQSEGRKTTMAIPLTFDFQLEFEEALATSASKAISKIKEDKSCSITKSKMHVSFKCEPEPRKSNFEKSNLRPFFIQTNVKNKESESTAQIEKKPRKPLDSVGLLEGDRNKRKKSPQMNDFNIKENKSVRNYQLSKYRSVRKKSLLPLCFEDELKNPHAKIVNVSPTKTVTSHMEQKDTNPIIFHDTEYVRMLLLTKNRFSSHPLENENIYPHKRTNFILERNCEILKSIIGNQSISLFKPQKTMPTVQRKDIQIPMSFKAGHTTVDDKLKKKTNKQTLENRSWNTLYNFSQNFSSLTKQFVGYLDKAVIHEMSAQTGKFERMFSAGKPTSIPTSSALPVKCYSKPFKYIYELNNVTPLDNLLNLSNEILNAS

SEQ ID NO: 25267 - protein, 80 aa, Homo sapiens
MAEKILEKLDVLDKQAEIILARRTKINRLQSEGRKTTMAIPLTFDFQLEFEEALATSASKAISKIKEDKSCSITKSKISN

SEQ ID NO: 25268 - protein, 384 aa, Homo sapiens
MARALVQLWAICMLRVALATVYFQEEFLDGEHWRNRWLQSTNDSRFGHFRLSSGKFYGHKEKDKGLQTTQNGRFYAISARFKPFSNKGKTLVIQYTVKHEQKMDCGGGYIKVFPADIDQKNLNGKSQYYIMFGPDICGFDIKKVHVILHFKNKYHENKKLIRCKVDGFTHLYTLILRPDLSYDVKIDGQSIESGSIEYDWNLTSLKKETSPAESKDWEQTKDNKAQDWEKHFLDASTSKQSDWNGDLDGDWPAPMLQKPPYQDGLKPEGIHKDVWLHRKMKNTDYLTQYDLSEFENIGAIGLELWQVRSGTIFDNFLITDDEEYADNFGKATWGETKGPEREMDAIQAKEEMKKAREEEEEELLSGKINRHEHYFNQFHRRNEL

SEQ ID NO: 25269 - protein, 928 aa, Homo sapiens
MNEAMATDSPRRPSRCTGGVVVRPQAVTEQSYMESVVTFLQDVVPQAYSGTPLTEEKEKIVWVRFENADLNDTSRNLEFHEIHSTGNEPPLLIMIGYSDGMQVWSIPISGEAQELFSVRHGPIRAARILPAPQFGAQKCDNFAEKRPLLGVCKSIGSSGTSPPYCCVDLYSLRTGEMVKSIQFKTPIYDLHCNKRILVVVLQEKIAAFDSCTFTKKFFVTSCYPCPGPNMNPIALGSRWLAYAENKLIRCHQSRGGACGDNIQSYTATVISAAKTLKSGLTMVGKVVTQLTGTLPSGVTEDDVAIHSNSRRSPLVPGIITVIDTETVGEGQVLVSEDSDSDGIVAHFPAHEKPVCCMAFNTSGMLLVTTDTLGHDFHVFQILTHPWSSSQCAVHHLYTLHRGETEAKVQDICFSHDCRWVVVSTLRGTSHVFPINPYGGQPCVRTHMSPRVVNRMSRFQKSAGLEEIEQELTSKQGGRCSPVPGLSSSPSGSPLHGKLNSQDSYNNFTNNNPGNPRLSPLPSLMVVMPLAQIKQPMTLGTITKRTGPYLFGAGCFSIKAPCKVKPPPQISPSKSMGGEFCVAAIFGTSRSWFANNAGLKREKDQSKQVVVESLYIISCYGTLVEHMMEPRPLSTAPKISDDTPLEMMTSPRASWTLVRTPQWNELQPPFNANHPLLLAADAVQYYQFLLAGLVPPGSPGPITRHGSYDSLASDHSGQEDEEWLSQVEIVTHTGPHRRLWMGPQFQFKTIHPSGQTTVISSSSSVLQSHGPSDTPQPLLDFDTDDLDLNSLRIQPVRSDPVSMPGSSRPVSDRRGVSTVIDAASGTFDRSVTLLEVCGSWPEGFGLRHMSSMEHTEEGLRERLADAMAESPSRDVVGSGTELQREGSIETLSNSSGSTSGSIPRNFDGYRSPLPTNESQPLSLFPTGFP

SEQ ID NO: 25270 - protein, 913 aa, Homo sapiens
MNEAMATDSPRRPSRCTGGVVVRPQAVTEQSYMESVVTFLQDVVPQAYSGTPLTEEKEKIVWVRFENADLNDTSRNLEFHEIHSTGNEPPLLIMIGYSDGMQVWSIPISGEAQELFSVRHGPIRAARILPAPQFGAQKCDNFAEKRPLLGVCKSIGSSGTSPPYCCVDLYSLRTGEMVKSIQFKTPIYDLHCNKRILVVVLQEKIAAFDSCTFTKKFFVTSCYPCPGPNMNPIALGSRWLAYAENKLIRCHQSRGGACGDNIQSYTATVISAAKTLKSGLTMVGKVVTQLTGTLPSGVTEDDVAIHSNSRRSPLVPGIITVIDTETVGEGQVLVSEDSDSDGIVAHFPAHEKPVCCMAFNTSGMLLVTTDTLGHDFHVFQILTHPWSSSQCAVHHLYTLHRGETEAKVQDICFSHDCRWVVVSTLRGTSHVFPINPYGGQPCVRTHMSPRVVNRMSRFQKSAGLEEIEQELTSKQGGRCSPVPGLSSSPSGSPLHGKLNSQDSYNNFTNNNPGNPRLSPLPSLMVVMPLAQIKQPMTLGTITKRTGKVKPPPQISPSKSMGGEFCVAAIFGTSRSWFANNAGLKREKDQSKQVVVESLYIISCYGTLVEHMMEPRPLSTAPKISDDTPLEMMTSPRASWTLVRTPQWNELQPPFNANHPLLLAADAVQYYQFLLAGLVPPGSPGPITRHGSYDSLASDHSGQEDEEWLSQVEIVTHTGPHRRLWMGPQFQFKTIHPSGQTTVISSSSSVLQSHGPSDTPQPLLDFDTDDLDLNSLRIQPVRSDPVSMPGSSRPVSDRRGVSTVIDAASGTFDRSVTLLEVCGSWPEGFGLRHMSSMEHTEEGLRERLADAMAESPSRDVVGSGTELQREGSIETLSNSSGSTSGSIPRNFDGYRSPLPTNESQPLSLFPTGFP

SEQ ID NO: 25271 - protein, 935 aa, Homo sapiens
MNEAMATDSPRRPSRCTGGVVVRPQAVTEQSYMESVVTFLQDVVPQAYSGTPLTEEKEKIVWVRFENADLNDTSRNLEFHEIHSTGNEPPLLIMIGYSDGMQVWSIPISGEAQELFSVRHGPIRAARILPAPQFGAQKCDNFAEKRPLLGVCKSIGSSGTSPPYCCVDLYSLRTGEMVKSIQFKTPIYDLHCNKRILVVVLQEKIAAFDSCTFTKKFFVTSCYPCPGPNMNPIALGSRWLAYAENKLIRCHQSRGGACGDNIQSYTATVISAAKTLKSGLTMVGKVVTQLTGTLPSGVTEDDVAIHSNSRRSPLVPGIITVIDTETVGEGQVLVSEDSDSDGIVAHFPAHEKPVCCMAFNTSGMLLVTTDTLGHDFHVFQILTHPWSSSQCAVHHLYTLHRGETEAKVQDICFSHDCRWVVVSTLRGTSHVFPINPYGGQPCVRTHMSPRVVNRMSRFQKSAGLEEIEQELTSKQGGRCSPVPGLSSSPSGSPLHGKLNSQDSYNNFTNNNPGNPRLSPLPSLMVVMPLAQIKQPMTLGTITKRTGKVKPPPQISPSKSMGGEFCVAAIFGTSRSWFANNAGLKREKDQSKQVVVESLYIISCYGTLVEHMMEPRPLSTAPKISDDTPLEMMTSPRASWTLVRTPQWNELQPPFNANHPLLLAADAVQYYQFLLAGLVPPGSPGPITRHGSYDSLASDHSGQEDEEWLSQVEIVTHTGPHRRLWMGPQFQFKTIHPSGQTTVISSSSSVLQSHGPSDTPQPLLDFDTDDLDLNSLRIQPVRSDPVSMPGSSRPVSDRRGVSTVIDAASGTFDRSVTLLEVCGSWPEGFGLRHMSSMEHTEEGLRERLADAMAESPSRDVVGSGTDTALDVAVKTFPPERHVAVKCFELQREGSIETLSNSSGSTSGSIPRNFDGYRSPLPTNESQPLSLFPTGFP

SEQ ID NO: 25272 - protein, 950 aa, Homo sapiens
MNEAMATDSPRRPSRCTGGVVVRPQAVTEQSYMESVVTFLQDVVPQAYSGTPLTEEKEKIVWVRFENADLNDTSRNLEFHEIHSTGNEPPLLIMIGYSDGMQVWSIPISGEAQELFSVRHGPIRAARILPAPQFGAQKCDNFAEKRPLLGVCKSIGSSGTSPPYCCVDLYSLRTGEMVKSIQFKTPIYDLHCNKRILVVVLQEKIAAFDSCTFTKKFFVTSCYPCPGPNMNPIALGSRWLAYAENKLIRCHQSRGGACGDNIQSYTATVISAAKTLKSGLTMVGKVVTQLTGTLPSGVTEDDVAIHSNSRRSPLVPGIITVIDTETVGEGQVLVSEDSDSDGIVAHFPAHEKPVCCMAFNTSGMLLVTTDTLGHDFHVFQILTHPWSSSQCAVHHLYTLHRGETEAKVQDICFSHDCRWVVVSTLRGTSHVFPINPYGGQPCVRTHMSPRVVNRMSRFQKSAGLEEIEQELTSKQGGRCSPVPGLSSSPSGSPLHGKLNSQDSYNNFTNNNPGNPRLSPLPSLMVVMPLAQIKQPMTLGTITKRTGPYLFGAGCFSIKAPCKVKPPPQISPSKSMGGEFCVAAIFGTSRSWFANNAGLKREKDQSKQVVVESLYIISCYGTLVEHMMEPRPLSTAPKISDDTPLEMMTSPRASWTLVRTPQWNELQPPFNANHPLLLAADAVQYYQFLLAGLVPPGSPGPITRHGSYDSLASDHSGQEDEEWLSQVEIVTHTGPHRRLWMGPQFQFKTIHPSGQTTVISSSSSVLQSHGPSDTPQPLLDFDTDDLDLNSLRIQPVRSDPVSMPGSSRPVSDRRGVSTVIDAASGTFDRSVTLLEVCGSWPEGFGLRHMSSMEHTEEGLRERLADAMAESPSRDVVGSGTDTALDVAVKTFPPERHVAVKCFELQREGSIETLSNSSGSTSGSIPRNFDGYRSPLPTNESQPLSLFPTGFP

SEQ ID NO: 25273 - protein, 928 aa, Homo sapiens
MNEAMATDSPRRPSRCTGGVVVRPQAVTEQSYMESVVTFLQDVVPQAYSGTPLTEEKEKIVWVRFENADLNDTSRNLEFHEIHSTGNEPPLLIMIGYSDGMQVWSIPISGEAQELFSVRHGPIRAARILPAPQFGAQKCDNFAEKRPLLGVCKSIGSSGTSPPYCCVDLYSLRTGEMVKSIQFKTPIYDLHCNKRILVVVLQEKIAAFDSCTFTKKFFVTSCYPCPGPNMNPIALGSRWLAYAENKLIRCHQSRGGACGDNIQSYTATVISAAKTLKSGLTMVGKVVTQLTGTLPSGVTEDDVAIHSNSRRSPLVPGIITVIDTETVGEGQVLVSEDSDSDGIVAHFPAHEKPVCCMAFNTSGMLLVTTDTLGHDFHVFQILTHPWSSSQCAVHHLYTLHRGETEAKVQDICFSHDCRWVVVSTLRGTSHVFPINPYGGQPCVRTHMSPRVVNRMSRFQKSAGLEEIEQELTSKQGGRCSPVPGLSSSPSGSPLHGKLNSQDSYNNFTNNNPGNPRLSPLPSLMVVMPLAQIKQPMTLGTITKRTGKVKPPPQISPSKSMGGEFCVAAIFGTSRSWFANNAGLKREKDQSKQVVVESLYIISCYGTLVEHMMEPRPLSTAPKISDDTPLEMMTSPRASWTLVRTPQWNELQPPFNANHPLLLAADAVQYYQFLLAGLVPPGSPGPITRHGSYDSLASDHSGQEDEEWLSQVEIVTHTGPHRRLWMGPQFQFKTIHPSGQTTVISSSSSVLQSHGPSDTPQPLLDFDTDDLDLNSLRIQPVRSDPVSMPGSSRPVSDRRGVSTVIDAASGTFDRSVTLLEVCGSWPEGFGLRHMSSMEHTEEGLRERLADAMAESPSRDVVGSGTDTALDVAVKTFPPERHVAVKCFGKKKGKKKQCQQPSVREQPNSNKACVRDGGRTSARGKHRDSE

SEQ ID NO: 25274 - protein, 684 aa, Homo sapiens
MNPIALGSRWLAYAENKLIRCHQSRGGACGDNIQSYTATVISAAKTLKSGLTMVGKVVTQLTGTLPSGVTEDDVAIHSNSRRSPLVPGIITVIDTETVGEGQVLVSEDSDSDGIVAHFPAHEKPVCCMAFNTSGMLLVTTDTLGHDFHVFQILTHPWSSSQCAVHHLYTLHRGETEAKVQDICFSHDCRWVVVSTLRGTSHVFPINPYGGQPCVRTHMSPRVVNRMSRFQKSAGLEEIEQELTSKQGGRCSPVPGLSSSPSGSPLHGKLNSQDSYNNFTNNNPGNPRLSPLPSLMVVMPLAQIKQPMTLGTITKRTGKVKPPPQISPSKSMGGEFCVAAIFGTSRSWFANNAGLKREKDQSKQVVVESLYIISCYGTLVEHMMEPRPLSTAPKISDDTPLEMMTSPRASWTLVRTPQWNELQPPFNANHPLLLAADAVQYYQFLLAGLVPPGSPGPITRHGSYDSLASDHSGQEDEEWLSQVEIVTHTGPHRRLWMGPQFQFKTIHPSGQTTVISSSSSVLQSHGPSDTPQPLLDFDTDDLDLNSLRIQPVRSDPVSMPGSSRPVSDRRGVSTVIDAASGTFDRSVTLLEVCGSWPEGFGLRHMSSMEHTEEGLRERLADAMAESPSRDVVGSGTELQREGSIETLSNSSGSTSGSIPRNFDGYRSPLPTNESQPLSLFPTGFP

SEQ ID NO: 25275 - protein, 1435 aa, Homo sapiens
MAQTPDGISCELRGEITRFLWPKEVELLLKTWLPGEGAVQNHVLALLRWRAYLLHTTCLPLRVDCTFSYLEVQAMALQETPPQVTFELESLRELVLEFPGVAALEQLAQHVAAAIKKVFPRSTLGKLFRRPTPASMLARLERSSPSESTDPCSPCGGFLETYEALCDYNGFPFREEIQWDVDTIYHRQGCRHFSLGDFSHLGSRDLALSVAALSYNLWFRCLSCVDMKLSLEVSEQILHMMSQSSHLEELVLETCSLRGDFVRRLAQALAGHSSSGLRELSLAGNLLDDRGMTALSRHLERCPGALRRLSLAQTGLTPRGMRALGRALATNAAFDSTLTHLDLSGNPGALGASEDSGGLYSFLSRPNVLSFLNLAGTDTALDTVRGCSVGGWMTGRADWRAGRGGLGPPAGVANSLPPQLFAAVSRGCCTSLTHLDASRNVFSRTKSRAAPAALQLFLSRARTLRHLGLAGCKLPPDALRALLDGLALNTHLRDLHLDLSACELRSAGAQVIQDLVCDAGAVSSLDLADNGFGSDMVTLVLAIGRSRSLRHVALGRNFNVRCKETLDDVLHRIVQLMQDDDCPLQSLSVAESRLKLGASVLLRALATNPNLTALDISGNAMGDAGAKLLAKALRVNSRLRSVVWDRNHTSALGLLDVAQALEQNHSLKAMPLPLNDVAQAQRSRPELTARAVHQIQACLLRNNRADPASSDHTTRLQPLGLVSDPSEQEVNELCQSVQEHVELLGCGAGPQGEAAVRQAEDAIQNANFSLSILPILYEAGSSPSHHWQLGQKLEGLLRQVGEVCRQDIQDFTQATLDTARSLCPQMLQGSSWREQLEGVLAGSRGLPELLPEQLLQDAFTRLRDMRLSITGTLAESIVAQALAGLSAARDQLVESLAQQATVTMPPALPAPDGGEPSLLEPGELEGLFFPEEKEEEKEKDDSPPQKWPELSHGLHLVPFIHSAAEEAEPEPELAAPGEDAEPQAGPSARGSPSPAAPGPPAGPLPRMDLPLAGQPLRHPTRARPRPRRQHHHRPPPGGPQVPPALPQEGNGLSARVDEGVEEFFSKRLIQQDRLWAPEEDPATEGGATPVPRTLRKKLGTLFAFKKPRSTRGPRTDLETSPGAAPRTRKTTFGDLLRPPTRPSRGEELGGAEGDTSSPDPAGRSRPRYTRDSKAYSMILLPAEEEATLGARPDKRRPLERGETELAPSFEQRVQVMLQRIGVSRGSGGAEGKRKQSKDGEIKKAGSDGDIMDSSTEAPPISIKSRTHSVSADPSCRPGPGSQGPESATWKTLGQQLNAELRSRGWGQQDGPGPPSPGQSPSPCRTSPSPDSLGLPEDPCLGPRNEDGQLRPRPLSAGRRAVSVHEDQLQAPAERPLRLQRSPVLKRRPKLEAPPSPSLGSGLGTEPLPPQPTEPSSPERSPPSPATDQRGGGPNP

SEQ ID NO: 25276 - protein, 1372 aa, Homo sapiens
MAQTPDGISCELRGEITRFLWPKEVELLLKTWLPGEGAVQNHVLALLRWRAYLLHTTCLPLRVDCTFSYLEVQAMALQETPPQVTFELESLRELVLEFPGVAALEQLAQHVAAAIKKVFPRSTLGKLFRRPTPASMLARLERSSPSESTDPCSPCGGFLETYEALCDYNGFPFREEIQWDVDTIYHRQGCRHFSLGDFSHLGSRDLALSVAALSYNLWFRCLSCVDMKLSLEVSEQILHMMSQSSHLEELVLETCSLRGDFVRRLAQALAGHSSSGLRELSLAGNLLDDRGMTALSRHLERCPGALRRLSLAQTGLTPRGMRALGRALATNAAFDSTLTHLDLSGNPGALGASEDSGGLYSFLSRPNVLSFLNLAGTDTALDTLFAAVSRGCCTSLTHLDASRNVFSRTKSRAAPAALQLFLSRARTLRHLGLAGCKLPPDALRALLDGLALNTHLRDLHLDLSACELRSAGAQVIQDLVCDAGAVSSLDLADNGFGSDMVTLVLAIGRSRSLRHVALGRNFNVRCKETLDDVLHRIVQLMQDDDCPLQSLSVAESRLKLGASVLLRALATNPNLTALDISGNAMGDAGAKLLAKALRVNSRLRSVVWDRNHTSALGLLDVAQALEQNHSLKAMPLPLNDVAQAQRSRPELTARAVHQIQACLLRNNRADPASSDHTTRLQPLGLVSDPSEQEVNELCQSVQEHVELLGCGAGPQGEAAVRQAEDAIQNANFSLSILPILYEAGSSPSHHWQLGQKLEGLLRQVGEVCRQDIQDFTQATLDTARSLCPQMLQGSSWREQLEGVLAGSRGLPELLPEQLLQDAFTRLRDMRLSITGTLAESIVAQALAGLSAARDQLVESLAQQATVTMPPALPAPDGGEPSLLEPGELEGLFFPEEKEEEKEKDDSPPQKWPELSHGLHLVPFIHSAAEEAEPEPELAAPGEDAEPQAGPSARGSPSPAAPGPPAGPLPRMDLPLAGQPLRHPTRARPRPRRQHHHRPPPGGPQVPPALPQEGNGLSARVDEGVEEFFSKRLIQQDRLWAPEEDPATEGGATPVPRTLRKKLGTLFAFKKPRSTRGPRTDLETSPGAAPRTRKTTFGDLLRPPTRPSRGEELGGAEGDTSSPDPAGRSRPRYTRDSKAYSMILLPAEEEATLGARPDKRRPLERGETELAPSFEQRVQVMLQRIGVSRGSGGAEGKRKQSKDGEIKKAGSDGDIMDSSTEAPPISIKSRTHSVSADPSCRPGPGSQGPESATWKTLGQQLNAELRSRGWGQQDGPGPPSPGQSPSPCRTSPSPDSLGLPEDPCLGPRNEERPLRLQRSPVLKRRPKLEAPPSPSLGSGLGTEPLPPQPTEPSSPERSPPSPATDQRGGGPNP

SEQ ID NO: 25277 - protein, 79 aa, Homo sapiens
MVLNEEIPRHLLLTQNNDIIPKHHILILPAVDSYQKSVNDLRALTFSKFQELKHAHELRNLCVSQSRFLAIMWFGTNTN

SEQ ID NO: 25278 - protein, 269 aa, Homo sapiens
MLLLDLMSSPSPQLLVAAAQQTLGMGKRRSPPQAICLHLAGEVLAVARGLKPAVLYDCNCAGASELQSYLEELKGLGFLTFGLHILEIGENSLIVSPEHVCQHLEQVLLGTIAFVDVSSCQRHPSVCSLDQLQDLKALVAEIITHLQGLQRDLSLAVSYSRLHSSDWNLCTVFGILLGYPVPYTFHLNQGDDNCLALTPLRVFTARISWLLGQPPILLYSFSVPESLFPGLRDILNTWEKDLRTRFRTQNDFADLSISSEIVTLPAVAL

SEQ ID NO: 25279 - protein, 377 aa, Homo sapiens
MTDDESESVLSDSHEGSELELPVIQLCGLVEELSYVNSALKTETEMFEKYYAKLEPRDQRPPRLSEIKISAADYAQFRGRRRSKSRTGMDRGVGLTADQKLELVQKEVADMKDDLRHTRANAERDLQHHEAIIEEAEIRWSEVSREVHEFEKDILKAISKKKGSILATQKVMKYIEDMNRRRDNMKEKLRLKNVSLKVQRKKMLLQLRQKEEVSEALHDVDFQQLKIENAQFLETIEARNQELTQLKLSSGNTLQVLNAYKSKLHKAMEIYLNLDKEILLRKELLEKIEKETLQVEEDRAKAEAVNKRLRKQLAEFRAPQVMTYVREKILNADLEKSIRMWERKVEIAEMSLKGHRKAWNRMKITNEQLQADYLAGK

SEQ ID NO: 25280 - protein, 323 aa, Homo sapiens
MTDDESESVLSDSHEGSELELPVIQLCGLVEELSYVNSALKTETEMFEKYYAKLEPRDQRPPRLSEIKISAADYAQAIIEEAEIRWSEVSREVHEFEKDILKAISKKKGSILATQKVMKYIEDMNRRRDNMKEKLRLKNVSLKVQRKKMLLQLRQKEEVSEALHDVDFQQLKIENAQFLETIEARNQELTQLKLSSGNTLQVLNAYKSKLHKAMEIYLNLDKEILLRKELLEKIEKETLQVEEDRAKAEAVNKRLRKQLAEFRAPQVMTYVREKILNADLEKSIRMWERKVEIAEMSLKGHRKAWNRMKITNEQLQADYLAGK

SEQ ID NO: 25281 - protein, 457 aa, Homo sapiens
MKTKFCTGGEAEPSPLGLLLSCGSGSAAPAPGVGQQRDAASDLESKQLGGQQPPLALPPPPPLPLPLPLPQPPPPQPPADEQPEPRTRRRAYLWCKEFLPGAWRGLREDEFHISVIRGGLSNMLFQCSLPDTTATLGDEPRKVLLRLYGAILQMRSCNKEGSEQAQKENEFQGAEAMVLESVMFAILAERSLGPKLYGIFPQGRLEQFIPSRRLDTEELSLPDISAEIAEKMATFHGMKMPFNKEPKWLFGTMEKYLKEVLRIKFTEESRIKKLHKLLSYNLPLELENLRSLLESTPSPVVFCHNDCQEGNILLLEGRENSEKQKLMLIDFEYSSYNYRGFDIGNHFCEWMYDYSYEKYPFFRANIRKYPTKKQQLHFISSYLPAFQNDFENLSTEEKSIIKEEMLLEVNRFALASHFLWGLWSIVQAKISSIEFGYMDYAQARFDAYFHQKRKLGV

SEQ ID NO: 25282 - protein, 439 aa, Homo sapiens
MKTKFCTGGEAEPSPLGLLLSCGSGSAAPAPGVGQQRDAASDLESKQLGGQQPPLALPPPPPLPLPLPLPQPPPPQPPADEQPEPRTRRRAYLWCKEFLPGAWRGLREDEFHISVIRGGLSNMLFQCSLPDTTATLGDEPRKVLLRLYGAILQMGAEAMVLESVMFAILAERSLGPKLYGIFPQGRLEQFIPSRRLDTEELSLPDISAEIAEKMATFHGMKMPFNKEPKWLFGTMEKYLKEVLRIKFTEESRIKKLHKLLSYNLPLELENLRSLLESTPSPVVFCHNDCQEGNILLLEGRENSEKQKLMLIDFEYSSYNYRGFDIGNHFCEWMYDYSYEKYPFFRANIRKYPTKKQQLHFISSYLPAFQNDFENLSTEEKSIIKEEMLLEVNRFALASHFLWGLWSIVQAKISSIEFGYMDYAQARFDAYFHQKRKLGV

SEQ ID NO: 25283 - protein, 461 aa, Homo sapiens
MLELRHRGSCPGPREAVSPPHREGEAAGGDHETESTSDKETDIDDRYGDLDSRTDSDIPEIPPSSDRTPEILKKALSGLSSRWKNWWIRGILTLTMISLFFLIIYMGSFMLMLLVLGIQVKCFHEIITIGYRVYHSYDLPWFRTLSWYFLLCVNYFFYGETVADYFATFVQREEQLQFLIRYHRFISFALYLAGFCMFVLSLVKKHYRLQFYMFAWTHVTLLITVTQSHLVIQNLFEGMIWFLVPISSVICNDITAYLFGFFFGRTPLIKLSPKKTWEGFIGGFFSTVVFGFIAAYVLSKYQYFVCPVEYRSDVNSFVTECEPSELFQLQTYSLPPFLKAVLRQERVSLYPFQIHSIALSTFASLIGPFGGFFASGFKRAFKIKDFANTIPGHGGIMDRFDCQYLMATFVHVYITSFIRGPNPSKVLQQLLVLQPEQQLNIYKTLKTHLIEKGILQPTLKV

SEQ ID NO: 25284 - protein, 522 aa, Homo sapiens
MQPWHGKAMQRASEAGATAPKASARNARGAPMDPTESPAAPEAALPKAGKFGPARKSGSRQKKSAPDTQERPPVRATGARAKKAPQRAQDTQPSDATSAPGAEGLEPPAAREPALSRAGSCRQRGARCSTKPRPPPGPWDVPSPGLPVSAPILVRRDAAPGASKLRAVLEKLKLSRDDISTAAGMVKGVVDHLLLRLKCDSAFRGVGLLNTGSYYEHVKISAPNEFDVMFKLEVPRIQLEEYSNTRAYYFVKFKRNPKENPLSQFLEGEILSASKMLSKFRKIIKEEINDIKDTDVIMKRKRGGSPAVTLLISEKISVDITLALESKSSWPASTQEGLRIQNWLSAKVRKQLRLKPFYLVPKHAKEGNGFQEETWRLSFSHIEKEILNNHGKSKTCCENKEEKCCRKDCLKLMKYLLEQLKERFKDKKHLDKFSSYHVKTAFFHVCTQNPQDSQWDRKDLGLCFDNCVTYFLQCLRTEKLENYFIPEFNLFSSNLIDKRSKEFLTKQIEYERNNEFPVFDEF

SEQ ID NO: 25285 - protein, 447 aa, Homo sapiens
MQPWHGKAMQRASEAGATAPKASARNARGAPMDPTESPAAPEAALPKAGKFGPARKSGSRQKKSAPDTQERPPVRATGARAKKAPQRAQDTQPSDATSAPGAEGLEPPAAREPALSRAGSCRQRGARCSTKPRPPPGPWDVPSPGLPVSAPILVRRDAAPGASKLRAVLEKLKLSRDDISTAAGMVKGVVDHLLLRLKCDSAFRGVGLLNTGSYYEHVKISAPNEFDVMFKLEVPRIQLEEYSNTRAYYFVKFKRNPKENPLSQFLEGEILSASKMLSKFRKIIKEEINDIKDTDVIMKRKRGGSPAVTLLISEKISVDITLALESKSSWPASTQEGLRIQNWLSAKVRKQLRLKPFYLVPKHAKEGNGFQEETWRLSFSHIEKEILNNHGKSKTCCENKEEKCCRKDCLKLMKYLLEQLKERFKDKKHLDKFSSYHVKTAFFHRLY

SEQ ID NO: 25286 - protein, 294 aa, Homo sapiens
MFLRRLGGWLPRPWGRRKPMRPDPPYPEPRRVDSSSENSGSDWDSAPETMEDVGHPKTKDSGALRVSGAASEPSKEEPQVEQLGSKRMDSLKWDQPISSTQESGRLEAGGASPKLRWDHVDSGGTRRPGVSPEGGLSVPGPGAPLEKPGRREKLLGWLRGEPGAPSRYLGGPEECLQISTNLTLHLLELLASALLALCSRPLRAALDTLGLRGPLGLWLHGLLSFLAALHGLHAVLSLLTAHPLHFACLFGLLQALVLAVSLREPNGDEAATDWESEGLEREGEEQRGDPGKGL

SEQ ID NO: 25287 - protein, 506 aa, Homo sapiens
MASGDLYEVERIVDKRKNKKGKWEYLIRWKGYGSTEDTWEPEHHLLHCEEFIDEFNGLHMSKDKRIKSGKQSSTSKLLRDSRGPSVEKLSHRPSDPGKSKGTSHKRKRINPPLAKPKKGYSGKPSSGGDRATKTVSYRTTPSGLQIMPLKKSQNGMENGDAGSEKDERHFGNGSHQPGLDLNDHVGEQDMGECDVNHATLAENGLGSALTNGGLNLHSPVKRKLEAEKDYVFDKRLRYSVRQNESNCRFRDIVVRKEEGFTHILLSSQTSDNNALTPEIMKEVRRALCNAATDDSKLLLLSAVGSVFCSGLDYSYLIGRLSSDRRKESTRIAEAIRDFVKAFIQFKKPIVVAINGPALGLGASILPLCDIVWASEKAWFQTPYATIRLTPAGCSSYTFPQILGVALANEMLFCGRKLTAQEACSRGLVSQVFWPTTFSQEVMLRVKEMASCSAVVLEESKCLVRSFLKSVLEDVNEKECLMLKQLWSSSKGLDSLFSYLQDKIYEV

SEQ ID NO: 25288 - protein, 196 aa, Homo sapiens
MDDTLFQLKFTAKQLEKLAKKAEKDSKAEQAKVKKALLQKNVECARVYAENAIRKKNEGVNWLRMASRVDAVASKVQTAVTMKGVTKNMAQVTKALDKALSTMDLQKVSSVMDRFEQQVQNLDVHTSVMEDSMSSATTLTTPQEQVDSLIMQIAEENGLEVLDQLSQLPEGASAVGESSVRSQEDQLSRRLAALRN

SEQ ID NO: 25289 - protein, 68 aa, Homo sapiens
MEDSMSSATTLTTPQEQVDSLIMQIAEENGLEVLDQLSQLPEGASAVGESSVRSQEDQLSRRLAALRN

SEQ ID NO: 25290 - protein, 309 aa, Homo sapiens
MPAEGGKTDMERIGLFSEMEYITVGDKYVSQFNRPFNEAASKNKQMLPGGSKEMSDLQAGYFDPHFVRIFEGEGYINLNQVRRRDMVEAAKKNLGKAFLPSNGEKKPCGLGSYYGTIGGPVPFFSAQSKPREKYKAPGKNLYTNPGKKGTGYGYANITIGKQFSHSADFYDAAKLKYKKANEEHHRLLKGAPFKLNLHPRDYFDANPYFSEESLPPIKKEEKKKTISNTFKPSSPGKKPGGMKAGTFDPYPSHSADPYVAKLANISGKDDKIFHPPSGPKSRPVESIMTLNVRRALNSKNYKTSSVPSY

SEQ ID NO: 25291 - protein, 269 aa, Homo sapiens
MSAALFSLDGPARGAPWPAEPAPFYEPGRAGKPGRGAEPGALGEPGAAAPAMYDDESAIDFSAYIDSMAAVPTLELCHDELFADLFNSNHKAGGAGPLELLPGGPARPLGPGPAAPRLLKREPDWGDGDAPGSLLPAQVAACAQTVVSLAAAGQPTPPTSPEPPRSSPRQTPAPGPAREKSAGKRGPDRGSPEYRQRRERNNIAVRKSRDKAKRRNQEMQQKLVELSAENEKLHQRVEQLTRDLAGLRQFFKQLPSPPFLPAAGTADCR

SEQ ID NO: 25292 - protein, 583 aa, Homo sapiens
MKLLHVFLLFLCFHLRFCKVTYTSQEDLVEKKCLAKKYTHLSCDKVFCQPWQRCIEGTCVCKLPYQCPKNGTAVCATNRRSFPTYCQQKSLECLHPGTKFLNNGTCTAEGKFSVSLKHGNTDSEGIVEVKLVDQDKTMFICKSSWSMREANVACLDLGFQQGADTQRRFKLSDLSINSTECLHVHCRGLETSLAECTFTKRRTMGYQDFADVVCYTQKADSPMDDFFQCVNGKYISQMKACDGINDCGDQSDELCCKACQGKGFHCKSGVCIPSQYQCNGEVDCITGEDEVGCAGFASVTQEETEILTADMDAERRRIKSLLPKLSCGVKNRMHIRRKRIVGGKRAQLGDLPWQVAIKDASGITCGGIYIGGCWILTAAHCLRASKTHRYQIWTTVVDWIHPDLKRIVIEYVDRIIFHENYNAGTYQNDIALIEMKKDGNKKDCELPRSIPACVPWSPYLFQPNDTCIVSGWGREKDNERVFSLQWGEVKLISNCSKFYGNRFYEKEMECAGTYDGSIDACKGDSGGPLVCMDANNVTYVWGVVSWGENCGKPEFPGVYTKVANYFDWISYHVGRPFISQYNV

SEQ ID NO: 25293 - protein, 469 aa, Homo sapiens
MCDLIEPQPAEKIGKMKKLRRTLSESFSRIALKKDDTTFDEICVTKMSTRNCQGMDSVIKPLDTIPEDKKVRVQRTQSTFDPFEKPANQVKRVHSENNACINFKTSSTGKESPKVRRHSSPSSPTSPKFGKADSYEKLEKLGEGSYATVYKGKSKVNGKLVALKVIRLQEEEGTPFTAIREASLLKGLKHANIVLLHDIIHTKETLTLVFEYVHTDLCQYMDKHPGGLHPDNVKLFLFQLLRGLSYIHQRYILHRDLKPQNLLISDTGELKLADFGLARAKSVPSHTYSNEVVTLWYRPPDVLLGSTEYSTCLDMWGVGCIFVEMIQGVAAFPGMKDIQDQLERIFLVLGTPNEDTWPGVHSLPHFKPERFTLYSSKNLRQAWNKLSYVNHAEDLASKLLQCSPKNRLSAQAALSHEYFSDLPPRLWELTDMSSIFTVPNVRLQPEAGESMRAFGKNNSYGKSLSNSKH

SEQ ID NO: 25294 - protein, 451 aa, Homo sapiens
MHGYFGCNAAAEPGYSAFVGTPQICVTKMSTRNCQGMDSVIKPLDTIPEDKKVRVQRTQSTFDPFEKPANQVKRVHSENNACINFKTSSTGKESPKVRRHSSPSSPTSPKFGKADSYEKLEKLGEGSYATVYKGKSKVNGKLVALKVIRLQEEEGTPFTAIREASLLKGLKHANIVLLHDIIHTKETLTLVFEYVHTDLCQYMDKHPGGLHPDNVKLFLFQLLRGLSYIHQRYILHRDLKPQNLLISDTGELKLADFGLARAKSVPSHTYSNEVVTLWYRPPDVLLGSTEYSTCLDMWGVGCIFVEMIQGVAAFPGMKDIQDQLERIFLVLGTPNEDTWPGVHSLPHFKPERFTLYSSKNLRQAWNKLSYVNHAEDLASKLLQCSPKNRLSAQAALSHEYFSDLPPRLWELTDMSSIFTVPNVRLQPEAGESMRAFGKNNSYGKSLSNSKH

SEQ ID NO: 25295 - protein, 423 aa, Homo sapiens
MSTRNCQGMDSVIKPLDTIPEDKKVRVQRTQSTFDPFEKPANQVKRVHSENNACINFKTSSTGKESPKVRRHSSPSSPTSPKFGKADSYEKLEKLGEGSYATVYKGKSKVNGKLVALKVIRLQEEEGTPFTAIREASLLKGLKHANIVLLHDIIHTKETLTLVFEYVHTDLCQYMDKHPGGLHPDNVKLFLFQLLRGLSYIHQRYILHRDLKPQNLLISDTGELKLADFGLARAKSVPSHTYSNEVVTLWYRPPDVLLGSTEYSTCLDMWGVGCIFVEMIQGVAAFPGMKDIQDQLERIFLVLGTPNEDTWPGVHSLPHFKPERFTLYSSKNLRQAWNKLSYVNHAEDLASKLLQCSPKNRLSAQAALSHEYFSDLPPRLWELTDMSSIFTVPNVRLQPEAGESMRAFGKNNSYGKSLSNSKH

SEQ ID NO: 25296 - protein, 308 aa, Homo sapiens
MAVPWEEYFRLALQEKLSTKLPEQAEDHVPPVLRLLEKRQELVDADQALQAQKEVFRTKTAALKQRWEQLEQKERELKGSFIRFDKFLQDSEARRNRALRRAAEERHQAGRREVEALRLWTQLQELRREHARLQRRLKRLEPCARLLEQALELLPGFQEVPELVARFDGLAETQAALRLREREQLAELEAARARLQQLRDAWPDEVLAQGQRRAQLQERLEAARERTLQWESKWIQIQNTAAEKTLLLGRSRMAVLNLFQLVCQHQGQPPTLDIEDTEGQLEHVKLFMQDLSAMLAGLGQAEPAAPAS

SEQ ID NO: 25297 - protein, 292 aa, Homo sapiens
MPAALVENSQVICEVWASNLEEEMRKIREIVLSYSYIAMDTEFPGVVVRPIGEFRSSIDYQYQLLRCNVDLLKIIQLGLTFTNEKGEYPSGINTWQFNFKFNLTEDMYSQDSIDLLANSGLQFQKHEEEGIDTLHFAELLMTSGVVLCDNVKWLSFHSGYDFGYMVKLLTDSRLPEEEHEFFHILNLFFPSIYDVKYLMKSCKNLKGGLQEVADQLDLQRIGRQHQAGSDSLLTGMAFFRMKELFFEDSIDDAKYCGRLYGLGTGVAQKQNEDVDSAQEKMSILAIINNMQQ

SEQ ID NO: 25298 - protein, 186 aa, Homo sapiens
MYSQDSIDLLANSGLQFQKHEEEGIDTLHFAELLMTSGVVLCDNVKWLSFHSGYDFGYMVKLLTDSRLPEEEHEFFHILNLFFPSIYDVKYLMKSCKNLKGGLQEVADQLDLQRIGRQHQAGSDSLLTGMAFFRMKELFFEDSIDDAKYCGRLYGLGTGVAQKQNEDVDSAQEKMSILAIINNMQQ

SEQ ID NO: 25299 - protein, 238 aa, Homo sapiens
MPAALVENSQVICEVWASNLEEEMRKIREIVLSYSYIAMDTEFPGVVVRPIGEFRSSIDYQYQLLRCNVDLLKIIQLGLTFTNEKGEYPSGINTWQFNFKFNLTGYDFGYMVKLLTDSRLPEEEHEFFHILNLFFPSIYDVKYLMKSCKNLKGGLQEVADQLDLQRIGRQHQAGSDSLLTGMAFFRMKELFFEDSIDDAKYCGRLYGLGTGVAQKQNEDVDSAQEKMSILAIINNMQQ

SEQ ID NO: 25300 - protein, 486 aa, Homo sapiens
MYIKMATLANGQADNASLSTNGLGSSPGSAGHMNGLSHSPGNPSTIPMKDHDAIKLFIGQIPRNLDEKDLKPLFEEFGKIYELTVLKDRFTGMHKGCAFLTYCERESALKAQSALHEQKTLPGMNRPIQVKPADSESRGGSSCLRQPPSQDRKLFVGMLNKQQSEDDVRRLFEAFGNIEECTILRGPDGNSKGCAFVKYSSHAEAQAAINALHGSQTMPGASSSLVVKFADTDKERTMRRMQQMAGQMGMFNPMAIPFGAYGAYAQALMQQQAALMASVAQGGYLNPMAAFAAAQMQQMAALNMNGLAAAPMTPTSGGSTPPGITAPAVPSIPSPIGVNGFTGLPPQANGQPAAEAVFANGIHPYPAQSPTAADPLQQAYAGVQQYAGPAAYPAAYGQISQAFPQPPPMIPQQQREGPEGCNLFIYHLPQEFGDAELMQMFLPFGFVSFDNPASAQTAIQAMNGFQIGMKRLKVQLKRPKDANRPY

SEQ ID NO: 25301 - protein, 484 aa, Homo sapiens
MYIKMATLANGQADNASLSTNGLGSSPGSAGHMNGLSHSPGNPSTIPMKDHDAIKLFIGQIPRNLDEKDLKPLFEEFGKIYELTVLKDRFTGMHKGCAFLTYCERESALKAQSALHEQKTLPGMNRPIQVKPADSESRGGSSCLRQPPSHRKLFVGMLNKQQSEDDVRRLFEAFGNIEECTILRGPDGNSKGCAFVKYSSHAEAQAAINALHGSQTMPGASSSLVVKFADTDKERTMRRMQQMAGQMGMFNPMAIPFGAYGAYAQALMQQQAALMASVAQGGYLNPMAAFAAAQMQQMAALNMNGLAAAPMTPTSGGSTPPGITAPAVPSIPSPIGVNGFTGLPPQANGQPAAEAVFANGIHPYPAQSPTAADPLQQAYAGVQQYAAAAYPAAYGQISQAFPQPPPMIPQQQREGPEGCNLFIYHLPQEFGDAELMQMFLPFGFVSFDNPASAQTAIQAMNGFQIGMKRLKVQLKRPKDANRPY

SEQ ID NO: 25302 - protein, 484 aa, Homo sapiens
MYIKMATLANGQADNASLSTNGLGSSPGSAGHMNGLSHSPGNPSTIPMKDHDAIKLFIGQIPRNLDEKDLKPLFEEFGKIYELTVLKDRFTGMHKGCAFLTYCERESALKAQSALHEQKTLPGMNRPIQVKPADSESRGGSSCLRQPPSHRKLFVGMLNKQQSEDDVRRLFEAFGNIEECTILRGPDGNSKGCAFVKYSSHAEAQAAINALHGSQTMPGASSSLVVKFADTDKERTMRRMQQMAGQMGMFNPMAIPFGAYGAYAQAMQQQAALMASVAQGGYLNPMAAFAAAQMQQMAALNMNGLAAAPMTPTSGGSTPPGITAPAVPSIPSPIGVNGFTGLPPQANGQPAAEAVFANGIHPYPAQSPTAADPLQQAYAGVQQYAGPAAYPAAYGQISQAFPQPPPMIPQQQREGPEGCNLFIYHLPQEFGDAELMQMFLPFGFVSFDNPASAQTAIQAMNGFQIGMKRLKVQLKRPKDANRPY

SEQ ID NO: 25303 - protein, 485 aa, Homo sapiens
MYIKMATLANGQADNASLSTNGLGSSPGSAGHMNGLSHSPGNPSTIPMKDHDAIKLFIGQIPRNLDEKDLKPLFEEFGKIYELTVLKDRFTGMHKGCAFLTYCERESALKAQSALHEQKTLPGMNRPIQVKPADSESRGGSSCLRQPPSQDRKLFVGMLNKQQSEDDVRRLFEAFGNIEECTILRGPDGNSKGCAFVKYSSHAEAQAAINALHGSQTMPGASSSLVVKFADTDKERTMRRMQQMAGQMGMFNPMAIPFGAYGAYAQAMQQQAALMASVAQGGYLNPMAAFAAAQMQQMAALNMNGLAAAPMTPTSGGSTPPGITAPAVPSIPSPIGVNGFTGLPPQANGQPAAEAVFANGIHPYPAQSPTAADPLQQAYAGVQQYAGPAAYPAAYGQISQAFPQPPPMIPQQQREGPEGCNLFIYHLPQEFGDAELMQMFLPFGFVSFDNPASAQTAIQAMNGFQIGMKRLKVQLKRPKDANRPY

SEQ ID NO: 25304 - protein, 448 aa, Homo sapiens
MYIKMATLANGQADNASLSTNGLGSSPGSAGHMNGLSHSPGNPSTIPMKDHDAIKLFIGQIPRNLDEKDLKPLFEEFGKIYELTVLKDRFTGMHKGCAFLTYCERESALKAQSALHEQKTLPGMNRPIQVKPADSESRGEDRKLFVGMLNKQQSEDDVRRLFEAFGNIEECTILRGPDGNSKGCAFVKYSSHAEAQAAINALHGSQTMPGASSSLVVKFADTDKERTMRRMQQMAGQMGMFNPMAIPFGAYGAYAQALMQQQAALMASVAQGGYLNPMAAFAAAQMQQMAALNMNGLAAAPMTPTSGGSTPPGITAPAVPSIPSPIGVNGFTGLPPQANGQPAAEAVFANGIHPYPAQSPTAADPLQQAYAGVQQYAGPAAYPAAYGQISQAFPQPPPMIPQQQREGFVSFDNPASAQTAIQAMNGFQIGMKRLKVQLKRPKDANRPY

SEQ ID NO: 25305 - protein, 435 aa, Homo sapiens
MMDEPWWEGRVASDVHCTLREKELKLPTFRAHSPLLKSRRFFVDILTLLSSHCQLCPAARHLAVYLLDHFMDRYNVTTSKQLYTVAVSCLLLANGVSLLSPRLKCSGMISAHCNLHLPGSSNSPASAPHPPPTPPQVAETTGKFEDREDHVPKLEQINSTRILSSQNFTLTKKELLSTELLLLEAFSWNLCLPTPAHFLDYYLLASVSQKDHHCHTWPTTCPRKTKECLKEYAHYFLEVTLQDHIFYKFQPSVVAAACVGASRICLQLSPYWTRDLQRISSYSLEHLSTCIEILLVVYDNVLKDAVAVKSQALAMVPGTPPTPTQVLFQPPAYPALGQPATTLAQFQTPVQDLCLAYRDSLQAHRSGSLLSGSTGSSLHTPYQPLQPLDMCPVPVPASLSMHMAIAAEPRHCLATTYGSSYFSGSHMFPTGCFDR

SEQ ID NO: 25306 - protein, 166 aa, Homo sapiens
MRHTSKRKPQYYEAEMVLKYYKHLEEGSVSLCCPGWSAVAQSRLTAASTFGAQVILLFQLSEQLRLQELKLPTFRAHSPLLKSRRFFVDILTLLSSHCQLCPAARHLAVYLLDHFMDRYNVTTSKQLYTVAVSCLLLASRNKGSGSPVPTRSAQQCRQTWARGSPW

SEQ ID NO: 25307 - protein, 222 aa, Homo sapiens
MLWLLFFLVTAIHAELCQPGAENAFKVRLSIRTALGDKAYAWDTNEEYLFKAMVAFSMRKVPNREATEISHVLLCNVTQRVSFWFVVTDPSKNHTLPAVEVQSAIRMNKNRINNAFFLNDQTLEFLKIPSTLAPPMDPSVPIWIIIFGVIFCIIIVAIALLILSGIWQRRRKNKEPSEVDDAEDKCENMITIENGIPSDPLDMKGGHINDAFMTEDERLTPL

SEQ ID NO: 25308 - protein, 229 aa, Homo sapiens
MARLALSPVPSHWMVALLLLLSAEPVPAARSEDRYRNPKGSACSRIWQSPRFIARKRGFTVKMHCYMNSASGNVSWLWKQEMDENPQQLKLEKGRMEESQNESLATLTIQGIRFEDNGIYFCQQKCNNTSEVYQGCGTELRVMGFSTLAQLKQRNTLKDGIIMIQTLLIILFIIVPIFLLLDKDDSKAGMEEDHTYEGLDIDQTATYEDIVTLRTGEVKWSVGEHPGQE

SEQ ID NO: 25309 - protein, 125 aa, Homo sapiens
MARLALSPVPSHWMVALLLLLSAEPVPAARSEDRYRNPKGFSTLAQLKQRNTLKDGIIMIQTLLIILFIIVPIFLLLDKDDSKAGMEEDHTYEGLDIDQTATYEDIVTLRTGEVKWSVGEHPGQE

SEQ ID NO: 25310 - protein, 230 aa, Homo sapiens
MARLALSPVPSHWMVALLLLLSAAEPVPAARSEDRYRNPKGSACSRIWQSPRFIARKRGFTVKMHCYMNSASGNVSWLWKQEMDENPQQLKLEKGRMEESQNESLATLTIQGIRFEDNGIYFCQQKCNNTSEVYQGCGTELRVMGFSTLAQLKQRNTLKDGIIMIQTLLIILFIIVPIFLLLDKDDSKAGMEEDHTYEGLDIDQTATYEDIVTLRTGEVKWSVGEHPGQE

SEQ ID NO: 25311 - protein, 495 aa, Homo sapiens
MPMGSLQPLATLYLLGMLVASCLGRLSWYDPDFQARLTRSNSKCQGQLEVYLKDGWHMVCSQSWGRSSKQWEDPSQASKVCQRLNCGVPLSLGPFLVTYTPQSSIICYGQLGSFSNCSHSRNDMCHSLGLTCLEPQKTTPPTTRPPPTTTPEPTAPPRLQLVAQSGGQHCAGVVEFYSGSLGGTISYEAQDKTQDLENFLCNNLQCGSFLKHLPETEAGRAQDPGEPREHQPLPIQWKIQNSSCTSLEHCFRKIKPQKSGRVLALLCSGFQPKVQSRLVGGSSICEGTVEVRQGAQWAALCDSSSARSSLRWEEVCREQQCGSVNSYRVLDAGDPTSRGLFCPHQKLSQCHELWERNSYCKKVFVTCQDPNPAGLAAGTVASIILALVLLVVLLVVCGPLAYKKLVKKFRQKKQRQWIGPTGMNQNMSFHRNHTATVRSHAENPTASHVDNEYSQPPRNSHLSAYPALEGALHRSSMQPDNSSDSDYDLHGAQRL

SEQ ID NO: 25312 - protein, 372 aa, Homo sapiens
MELEGQWWRGQLAADIHQALRYKELKLPSYKGQSPQLSLRRYFADLIAIVSNRFTLCPSARHLAVYLLDLFMDRYDISIQQLHLVALSCLLLASKFEEKEDSVPKLEQLNSLGCMTNMNLVLTKQNLLHMELLLLETFQWNLCLPTAAHFIEYYLSEAVHETDLHDGWPMICLEKTKLYMAKYADYFLEVSLQVAAACVASSRIILRLSPTWPTRLHRLTAYSWDFLVQCIERLLIAHDNDVKEANKQRGQAGPQSAQLSVFQTASQPSRPVHFQQPQYLHQTHQTSLQYRHPTSEQPSCQQIVSTTHTSSYTLQTCPAGFQTSVQGLGHMQTGVGMSLAIPVEVKPCLSVSYNRSYQINEHYPCITPCFER

SEQ ID NO: 25313 - protein, 371 aa, Homo sapiens
MELEGQWWRGQLAADIHQALRYKELKLPSYKGQSPQLSLRRYFADLIAIVSNRFTLCPSARHLAVYLLDLFMDRYDISIQQLHLVALSCLLLASKFEEKEDSVPKLEQLNSLGCMTNMNLVLTKQNLLHMELLLLETFQWNLCLPTAAHFIEYYLSEAVHETDLHDGWPMICLEKTKLYMAKYADYFLEVSLQAAACVASSRIILRLSPTWPTRLHRLTAYSWDFLVQCIERLLIAHDNDVKEANKQRGQAGPQSAQLSVFQTASQPSRPVHFQQPQYLHQTHQTSLQYRHPTSEQPSCQQIVSTTHTSSYTLQTCPAGFQTSVQGLGHMQTGVGMSLAIPVEVKPCLSVSYNRSYQINEHYPCITPCFER

SEQ ID NO: 25314 - protein, 383 aa, Homo sapiens
MELEGQWWRGQLAADIHQALRYKELKLPSYKGQSPQLSLRRYFADLIAIVSNRFTLCPSARHLAVYLLDLFMDRYDISIQQLHLVALSCLLLASKFEEKEDSVPKLEQLNSLGCMTNMNLVLTKQNLLHMELLLLETFQWNLCLPTAAHFIEYYLSEAVHETDLHDGWPMICLEKTKLYMAKYADYFLEVSLQDYAFLNYAPSLVAAACVASSRIILRLSPTWPTRLHRLTAYSWDFLVQCIERLLIAHDNDVKEANKQRGQAGPQSAQLSVFQTASQPSRPVHFQQPQYLHQTHQTSLQYRHPTSEQPSCQQIVSTTHTSSYTLQTCPAGFQTSVQGLGHMQTGVGMSLAIPVEVKPCLSVSYNRSYQINEHYPCITPCFER

SEQ ID NO: 25315 - protein, 295 aa, Homo sapiens
MIEVLTTTDSQKLLHQLNALLEQESRCQPKVCGLRLIESAHDNGLRMTARLRDFEVKDLLSLTQFFGFDTETFSLAVNLLDRFLSKMKVQPKHLGCVGLSCFYLAVKSIEEERNVPLATDLIRISQYRFTVSDLMRMEKIVLEKVCWKVKATTAFQFLQLYYSLLQENLPLERRNSINFERLEAQLKACHCRIIFSKAKPSVLALSIIALEIQAQKCVELTEGIECLQKHSKINGRDLTFWQELVSKCLTEYSSNKCSKPNVQKLKWIVSGRTARQLKHSYYRITHLPTIPEMVP

SEQ ID NO: 25316 - protein, 161 aa, Homo sapiens
MRMEKIVLEKVCWKVKATTAFQFLQLYYSLLQENLPLERRNSINFERLEAQLKACHCRIIFSKAKPSVLALSIIALEIQAQKCVELTEGIECLQKHSKINGRDLTFWQELVSKCLTEYSSNKCSKPNVQKLKWIVSGRTARQLKHSYYRITHLPTIPEMVP

SEQ ID NO: 25317 - protein, 753 aa, Homo sapiens
MGRLQLVVLGLTCCWAVASAAKLGAVYTEGGFVEGVNKKLGLLGDSVDIFKGIPFAAPTKALENPQPHPGWQGTLKAKNFKKRCLQATITQDSTYGDEDCLYLNIWVPQGRKQVSRDLPVMIWIYGGAFLMGSGHGANFLNNYLYDGEEIATRGNVIVVTFNYRVGPLGFLSTGDANLPGNYGLRDQHMAIAWVKRNIAAFGGDPNNITLFGESAGGASVSLQTLSPYNKGLIRRAISQSGVALSPWVIQKNPLFWAKKVAEKVGCPVGDAARMAQCLKVTDPRALTLAYKVPLAGLEYPMLHYVGFVPVIDGDFIPADPINLYANAADIDYIAGTNNMDGHIFASIDMPAINKGNKKVTEEDFYKLVSEFTITKGLRGAKTTFDVYTESWAQDPSQENKKKTVVDFETDVLFLVPTEIALAQHRANAKSAKTYAYLFSHPSRMPVYPKWVGADHADDIQYVFGKPFATPTGYRPQDRTVSKAMIAYWTNFAKTGDPNMGDSAVPTHWEPYTTENSGYLEITKKMGSSSMKRSLRTNFLRYWTLTYLALPTVTDQEATPVPPTGDSEATPVPPTGDSETAPVPPTGDSGAPPVPPTGDSGAPPVPPTGDSGAPPVPPTGDSGAPPVPPTGDSGAPPVPPTGDSGAPPVPPTGDSGAPPVPPTGDSGAPPVPPTGDAGPPPVPPTGDSGAPPVPPTGDSGAPPVTPTGDSETAPVPPTGDSGAPPVPPTGDSEAAPVPPTDDSKEAQMPAVIRF

SEQ ID NO: 25318 - protein, 687 aa, Homo sapiens
MGRLQLVVLGLTCCWAVASAAKLGAVYTEGGFVEGVNKKLGLLGDSVDIFKGIPFAAPTKALENPQPHPGWQGTLKAKNFKKRCLQATITQDSTYGDEDCLYLNIWVPQGRKQVSRDLPVMIWIYGGAFLMGSGHGANFLNNYLYDGEEIATRGNVIVVTFNYRVGPLGFLSTGDANLPGNYGLRDQHMAIAWVKRNIAAFGGDPNNITLFGESAGGASVSLQTLSPYNKGLIRRAISQSGVALSPWVIQKNPLFWAKKVAEKVGCPVGDAARMAQCLKVTDPRALTLAYKVPLAGLEYPMLHYVGFVPVIDGDFIPADPINLYANAADIDYIAGTNNMDGHIFASIDMPAINKGNKKVTEEDFYKLVSEFTITKGLRGAKTTFDVYTESWAQDPSQENKKKTVVDFETDVLFLVPTEIALAQHRANAKDPNMGDSAVPTHWEPYTTENSGYLEITKKMGSSSMKRSLRTNFLRYWTLTYLALPTVTDQEATPVPPTGDSEATPVPPTGDSETAPVPPTGDSGAPPVPPTGDSGAPPVPPTGDSGAPPVPPTGDSGAPPVPPTGDSGAPPVPPTGDSGAPPVPPTGDSGAPPVPPTGDSGAPPVPPTGDAGPPPVPPTGDSGAPPVPPTGDSGAPPVTPTGDSETAPVPPTGDSGAPPVPPTGDSEAAPVPPTDDSKEAQMPAVIRF

SEQ ID NO: 25319 - protein, 177 aa, Homo sapiens
MPVKRSLKLDGLLEENSFDPSKITRKKSVITYSPTTGTCQMSLFASPTSSEEQKHRNGLSNEKRKKLNHPSLTESKESTTKDNDEFMMLLSKVEKLSEEIMEIMQNLSSIQALEGSRELENLIGISCASHFLKREMQKTKELMTKVNKQKLFEKSTGLPHKASRHLDSYEFLKAILN

SEQ ID NO: 25320 - protein, 170 aa, Homo sapiens
MPVKRSLKLDGLLEENSFDPSKITRKKSVITYSPTTGTCQMSLFASPTSSEEQKHRNGLSNEKRKKLNHPSLTESKESTTKDNDEFMMLLSKVEKLSEEIMEIMQNLSSIQALEGSRELENLIGISCASHFLKREMQKTKELMTKVNKQKLFEKSTGLPHKGQPQMSQPL

SEQ ID NO: 25321 - protein, 111 aa, Homo sapiens
MPVKRSLKLDGLLEENSFDPSKITRKKSVITYSPTTGTCQMSLFASPTSSEEQKHRNGLSNEKRKKLNHPSLTESKESTTKDNDEFMMLLSKVEKLSEEIMEIMQNLSSIQ

SEQ ID NO: 25322 - protein, 62 aa, Homo sapiens
MPVKRSLKLDGLLEENSFDPSKITRKKSVITYSPTTGTCQMSLFASPTSSEEQKHRNGLSNE

SEQ ID NO: 25323 - protein, 216 aa, Homo sapiens
MPFAPVAQARVQWHDFRSLQHLLPAFKRFSCLSLGSSWDYSVKRSLKLDGLLEENSFDPSKITRKKSVITYSPTTGTCQMSLFASPTSSEEQKHRNGLSNEKRKKLNHPSLTESKESTTKDNDEFMMLLSKVEKLSEEIMEIMQNLSSIQALEGSRELENLIGISCASHFLKREMQKTKELMTKVNKQKLFEKSTGLPHKASRHLDSYEFLKAILN

SEQ ID NO: 25324 - protein, 508 aa, Homo sapiens
MRCPKSAVTMRNEELLLSNGTANKMNGALDHSDQPDPDAIKMFVGQIPRSWSEKELKELFEPYGAVYQINVLRDRSQNPPQSKGCCFVTFYTRKAALEAQNALHNIKTLPGMHHPIQMKPADSEKSNAVEDRKLFIGMVSKKCNENDIRVMFSPFGQIEECRILRGPDGLSRGCAFVTFSTRAMAQNAIKAMHQSQTMEGCSSPIVVKFADTQKDKEQRRLQQQLAQQMQQLNTATWGNLTGLGGLTPQYLALLQQATSSSNLGAFSGIQQMAGMNALQLQNLATLAAAAAAAQTSATSTNANPLSTTSSALGALTSPVAASTPNSTAGAAMNSLTSLGTLQGLAGATVGLNNINALAGMAALNGGLGATGLTNGTAGTMDALTQAYSGIQQYAAAALPTLYSQSLLQQQSAAGSQKEGPEGANLFIYHLPQEFGDQDILQMFMPFGNVISAKVFIDKQTNLSKCFGFVSYDNPVSAQAAIQAMNGFQIGMKRLKVQLKRSKNDSKPY

SEQ ID NO: 25325 - protein, 490 aa, Homo sapiens
MNGALDHSDQPDPDAIKMFVGQIPRSWSEKELKELFEPYGAVYQINVLRDRSQNPPQSKGCCFVTFYTRKAALEAQNALHNIKTLPGMHHPIQMKPADSEKSNAVEDRKLFIGMVSKKCNENDIRVMFSPFGQIEECRILRGPDGLSRGCAFVTFSTRAMAQNAIKAMHQSQTMEGCSSPIVVKFADTQKDKEQRRLQQQLAQQMQQLNTATWGNLTGLGGLTPQYLALLQQATSSSNLGAFSGIQQMAGMNALQLQNLATLAAAAAAAQTSATSTNANPLSTTSSALGALTSPVAASTPNSTAGAAMNSLTSLGTLQGLAGATVGLNNINALAVAQMLSGMAALNGGLGATGLTNGTAGTMDALTQAYSGIQQYAAAALPTLYSQSLLQQQSAAGSQKEGPEGANLFIYHLPQEFGDQDILQMFMPFGNVISAKVFIDKQTNLSKCFGFVSYDNPVSAQAAIQAMNGFQIGMKRLKVQLKRSKNDSKPY

SEQ ID NO: 25326 - protein, 521 aa, Homo sapiens
MMVEGRLLVPDRINGTANKMNGALDHSDQPDPDAIKMFVGQIPRSWSEKELKELFEPYGAVYQINVLRDRSQNPPQSKGCCFVTFYTRKAALEAQNALHNIKTLPGMHHPIQMKPADSEKSNAVEDRKLFIGMVSKKCNENDIRVMFSPFGQIEECRILRGPDGLSRGCAFVTFSTRAMAQNAIKAMHQSQTMEGCSSPIVVKFADTQKDKEQRRLQQQLAQQMQQLNTATWGNLTGLGGLTPQYLALLQQATSSSNLGAFSGIQQMAGMNALQLQNLATLAAAAAAAQTSATSTNANPLSTTSSALGALTSPVAASTPNSTAGAAMNSLTSLGTLQGLAGATVGLNNINALAGTINTPRSKRLLLPKDNNGMAALNGGLGATGLTNGTAGTMDALTQAYSGIQQYAAAALPTLYSQSLLQQQSAAGSQKEGPEGANLFIYHLPQEFGDQDILQMFMPFGNVISAKVFIDKQTNLSKCFGFVSYDNPVSAQAAIQAMNGFQIGMKRLKVQLKRSKNDSKPY

SEQ ID NO: 25327 - protein, 509 aa, Homo sapiens
MMVEGRLLVPDRINGTANKMNGALDHSDQPDPDAIKMFVGQIPRSWSEKELKELFEPYGAVYQINVLRDRSQNPPQSKGCCFVTFYTRKAALEAQNALHNIKTLPGMHHPIQMKPADSEKSNAVEDRKLFIGMVSKKCNENDIRVMFSPFGQIEECRILRGPDGLSRGCAFVTFSTRAMAQNAIKAMHQSQTMEGCSSPIVVKFADTQKDKEQRRLQQQLAQQMQQLNTATWGNLTGLGGLTPQYLALLQQATSSSNLGAFSGIQQMAGMNALQLQNLATLAAAAAAAQTSATSTNANPLSTTSSALGALTSPVAASTPNSTAGAAMNSLTSLGTLQGLAGATVGLNNINALAVAQMLSGMAALNGGLGATGLTNGTAGTMDALTQAYSGIQQYAAAALPTLYSQSLLQQQSAAGSQKEGPEGANLFIYHLPQEFGDQDILQMFMPFGNVISAKVFIDKQTNLSKCFGFVSYDNPVSAQAAIQAMNGFQIGMKRLKVQLKRSKNDSKPY

SEQ ID NO: 25328 - protein, 488 aa, Homo sapiens
MNGALDHSDQPDPDAIKMFVGQIPRSWSEKELKELFEPYGAVYQINVLRDRSQNPPQSKGCCFVTFYTRKAALEAQNALHNIKTLPGMHHPIQMKPADSEKSNAVEDRKLFIGMVSKKCNENDIRVMFSPFGQIEECRILRGPDGLSRGCAFVTFSTRAMAQNAIKAMHQSQTMEGCSSPIVVKFADTQKDKEQRRLQQQLAQQMQQLNTATWGNLTGLGGLTPQYLALLQQATSSSNLGAFSGIQQMAGMNALQLQNLATLAAAAAAAQTSATSTNANPLSTTSSALGALTSPVAASTPNSTAGAAMNSLTSLGTLQGLAGATVGLNNINALAGTINSMAALNGGLGATGLTNGTAGTMDALTQAYSGIQQYAAAALPTLYSQSLLQQQSAAGSQKEGPEGANLFIYHLPQEFGDQDILQMFMPFGNVISAKVFIDKQTNLSKCFGFVSYDNPVSAQAAIQAMNGFQIGMKRLKVQLKRSKNDSKPY

SEQ ID NO: 25329 - protein, 620 aa, Homo sapiens
MNLERLRKRVRQYLDQQQYQSALFWADKVASLSREEPQDIYWLAQCLYLTAQYHRAAHALRSRKLDKLYEACRYLAARCHYAAKEHQQALDVLDMEEPINKRLFEKYLKDESGFKDPSSDWEMSQSSIKSSICLLRGKIYDALDNRTLATYSYKEALKLDVYCFEAFDLLTSHHMLTAQEEKELLESLPLSKLCNEEQELLRFLFENKLKKYNKPSETVIPESVDGLQENLDVVVSLAERHYYNCDFKMCYKLTSVVMEKDPFHASCLPVHIGTLVELNKANELFYLSHKLVDLYPSNPVSWFAVGCYYLMVGHKNEHARRYLSKATTLEKTYGPAWIAYGHSFAVESEHDQAMAAYFTAAQLMKGCHLPMLYIGLEYGLTNNSKLAERFFSQALSIAPEDPFVMHEVGVVAFQNGEWKTAEKWFLDALEKIKAIGNEVTVDKWEPLLNNLGHVCRKLKKYAEALDYHRQALVLIPQNASTYSAIGYIHSLMGNFENAVDYFHTALGLRRDDTFSVTMLGHCIEMYIGDSEAYIGADIKDKLKCYDFDVHTMKTLKNIISPPWDFREFEVEKQTAEETGLTPLETSRKTPDSRPSLEETFEIEMNESDMMLETSMSDHST

SEQ ID NO: 25330 - protein, 619 aa, Homo sapiens
MNLERLRKRVRQYLDQQQYQSALFWADKVASLSREPQDIYWLAQCLYLTAQYHRAAHALRSRKLDKLYEACRYLAARCHYAAKEHQQALDVLDMEEPINKRLFEKYLKDESGFKDPSSDWEMSQSSIKSSICLLRGKIYDALDNRTLATYSYKEALKLDVYCFEAFDLLTSHHMLTAQEEKELLESLPLSKLCNEEQELLRFLFENKLKKYNKPSETVIPESVDGLQENLDVVVSLAERHYYNCDFKMCYKLTSVVMEKDPFHASCLPVHIGTLVELNKANELFYLSHKLVDLYPSNPVSWFAVGCYYLMVGHKNEHARRYLSKATTLEKTYGPAWIAYGHSFAVESEHDQAMAAYFTAAQLMKGCHLPMLYIGLEYGLTNNSKLAERFFSQALSIAPEDPFVMHEVGVVAFQNGEWKTAEKWFLDALEKIKAIGNEVTVDKWEPLLNNLGHVCRKLKKYAEALDYHRQALVLIPQNASTYSAIGYIHSLMGNFENAVDYFHTALGLRRDDTFSVTMLGHCIEMYIGDSEAYIGADIKDKLKCYDFDVHTMKTLKNIISPPWDFREFEVEKQTAEETGLTPLETSRKTPDSRPSLEETFEIEMNESDMMLETSMSDHST

SEQ ID NO: 25331 - protein, 568 aa, Homo sapiens
MNLERLRKRVRQYLDQQQYQSALFWADKVASLSREPQDIYWLAQCLYLTAQYHRAAHALRSRKLDKLYEACRYLAARCHYAAKEHQQALDVLDMEEPINKRLFEKYLKDESGFKDPSSDWEMSQSSIKSSICLLRGKIYDALDNRTLATYSYKEALKLDVYCFEAFDLLTSHHMLTAQEEKELLESLPLSKLCNEEQELLRFLFENKLKKYNKPSETVIPESVDGLQENLDVVVSLAERHYYNCDFKMCYKLTSVVMEKDPFHASCLPVHIGTLVELNKANELFYLSHKLVDLYPSNPVSWFAVGCYYLMVGHKNEHARRYLSKATTLEKTYGPAWIAYGHSFAVESEHDQAMAAYFTAAQLMKGWKTAEKWFLDALEKIKAIGNEVTVDKWEPLLNNLGHVCRKLKKYAEALDYHRQALVLIPQNASTYSAIGYIHSLMGNFENAVDYFHTALGLRRDDTFSVTMLGHCIEMYIGDSEAYIGADIKDKLKCYDFDVHTMKTLKNIISPPWDFREFEVEKQTAEETGLTPLETSRKTPDSRPSLEETFEIEMNESDMMLETSMSDHST

SEQ ID NO: 25332 - protein, 526 aa, Homo sapiens
MEEPINKRLFEKYLKDESGFKDPSSDWEMSQSSIKSSICLLRGKIYDALDNRTLATYSYKEALKLDVYCFEAFDLLTSHHMLTAQEEKELLESLPLSKLCNEEQELLRFLFENKLKKYNKPSETVIPESVDGLQENLDVVVSLAERHYYNCDFKMCYKLTSVVMEKDPFHASCLPVHIGTLVELNKANELFYLSHKLVDLYPSNPVSWFAVGCYYLMVGHKNEHARRYLSKATTLEKTYGPAWIAYGHSFAVESEHDQAMAAYFTAAQLMKGCHLPMLYIGLEYGLTNNSKLAERFFSQALSIAPEDPFVMHEVGVVAFQNGEWKTAEKWFLDALEKIKAIGNEVTVDKWEPLLNNLGHVCRKLKKYAEALDYHRQALVLIPQNASTYSAIGYIHSLMGNFENAVDYFHTALGLRRDDTFSVTMLGHCIEMYIGDSEAYIGADIKDKLKCYDFDVHTMKTLKNIISPPWDFREFEVEKQTAEETGLTPLETSRKTPDSRPSLEETFEIEMNESDMMLETSMSDHST

SEQ ID NO: 25333 - protein, 350 aa, Homo sapiens
MVTPCPTSPSSPAARAGRRDNDQNLRAPVKKSRRPRLRRKQPLHPLNPCPLPGDSGICDLFESPSSGSDGAESPSAARGGSPLPGPAQPVAQLDLQTFRDYGQSCYAFRKAQESHFHPREALARQPQVTAESRCKLLSWLIPVHRQFGLSFESLCLTVNTLDRFLTTTPVAADCFQLLGVTSLLIACKQVEVHPPRVKQLLALCCGAFSRQQLCNLECIVLHKLHFTLGAPTISFFLEHFTHARVEAGQAEASEALEAQALARGVAELSLADYAFTSYSPSLLAICCLALADRMLRVSRPVDLRLGDHPEAALEDCMGKLQLLVAINSTSLTHMLPVQICEKCSLPPSSK

SEQ ID NO: 25334 - protein, 131 aa, Homo sapiens
MVTPCPTSPSSPAARAGRRDNDQNLRAPVKKSRRPRLRRKQPLHPLNPCPLPGDSGICDLFESPSSGSDGAESPSAARGGSPLPGPAQPVAQLDLQTFRDYGQSCYAFRKAQESHFHPREALARQPQVRCW

SEQ ID NO: 25335 - protein, 307 aa, Homo sapiens
MLVRGRDQGSGSRLGPIVRRWAPRPSPLQSLAASLDAEPSSAAVPDGFPAGPTVSPRRLARPPGLEEALSALGLQGEREYAGDIFAEVMVCRVLPLRALPRAVTPEMRALVVDWLVQVHEYLGLAGDTLYLAVHLLDSYLSAGRVRLHRLQLLGVACLFVACKMEECVLPEPAFLCLLSADSFSRAELLRAERRILSRLDFRLHHPGPLLCLGLLAALAGSSPQVMLLATYFLELSLLEAEAAGWEPGRRAAAALSLAHRLLDGAGSRLQPELYRCSLGGGSVWGHRSFRDLPSWSFLRSRRMRDNY

SEQ ID NO: 25336 - protein, 155 aa, Homo sapiens
MLVRGRDQGSGSRLGPIVRRWAPRPSPLQSLAASLDAEPSSAAVPDGFPAGPTVSPRRLARPPGLEEALSALGLQGEREYAGDIFAEVMEYLGLAGDTLYLAVHLLDSYLSAGRVRLHRLQLLGVACLFVACKMEECVLPEETEVRNLGPFQGRE

SEQ ID NO: 25337 - protein, 248 aa, Homo sapiens
MEAPEGGGGGPAARGPEGQPAPEARVHFRVARFIMEAGVKLGMRSIPIATACTIYHKFFCETNLDAYDPYLIAMSSIYLAGKVEEQHLRTRDIINVSNRYFNPSGEPLELDSRFWELRDSIVQCELLMLRVLRFQVSFQHPHKYLLHYLVSLQNWLNRHSWQRTPVAVTAWALLRDSYHGALCLRFQAQHIAVAVLYLALQVYGVEVPAEVEAEKPWWQVFNDDLTKPIIDNIVSDLIQIYTMDTEIP

SEQ ID NO: 25338 - protein, 228 aa, Homo sapiens
MEAPEGGGGGPAARGPEGQPAPEARVHFRVARFIMEAGVKLGMRSIPIATACTIYHKFFCETNLDAYDPYLIAMSSIYLAGKVEEQHLRTRDIINVSNRYFNPSGEPLELDSRFWELRDSIVQCELLMLRVLRFQVSFQHPHKYLLHYLVSLQNWLNRHSWQRTPVAVTAWALLRDSYHGALCLRFQAQHIAVAVLYLALQVYGVEVPAEVEAEKPWWQIYTMDTEIP

SEQ ID NO: 25339 - protein, 232 aa, Homo sapiens
MPSQQKKIIFCMAGVFSFACALGVVTALGTPLWIKATVLCKTGALLVNASGQELDKFMGEMQYGLFHGEGVRQCGLGARPFRFSFFPDLLKAIPVSIHVNVILFSAILIVLTMVGTAFFMYNAFGKPFETLHGPLGLYLLSFISGSCGCLVMILFASEVKIHHLSEKIANYKEGTYVYKTQSEKYTTSFWVIFFCFFVHFLNGLLIRLAGFQFPFAKSKDAETTNVAADLMY

SEQ ID NO: 25340 - protein, 120 aa, Homo sapiens
MQALQQQPVFPDLLKAIPVSIHVNVILFSAILIVLTMVGTAFFMYNAFGKPFETLHGPLGLYLLSFISGSCGCLVMILFASEVKIHHLSEKIANYKEGTYVYKTQSEKYTTSFWLTKGHS

SEQ ID NO: 25341 - protein, 245 aa, Homo sapiens
MPSQQKKIIFCMAGVFSFACALGVVTALGTPLWIKATVLCKTGALLVNASGQELDKFMGEMQYGLFHGEGVRQCGLGARPFRFSFFPDLLKAIPVSIHVNVILFSAILIVLTMVGTAFFMYNAFGKPFETLHGPLGLYLLSFISVALWLPATRHQAQGSCGCLVMILFASEVKIHHLSEKIANYKEGTYVYKTQSEKYTTSFWVIFFCFFVHFLNGLLIRLAGFQFPFAKSKDAETTNVAADLMY

SEQ ID NO: 25342 - protein, 87 aa, Homo sapiens
MNLEPPKAEFRSATRVAGGPVTPRKGPPKFKQRQTRQFKSKPPKKGVQGFGDDIPGMEGLGTDITVICPWEAFNHLELHELAQYGII

SEQ ID NO: 25343 - protein, 669 aa, Homo sapiens
MAAAQEADGARSAVVAAGGGSSGQVTSNGSIGRDPPAETQPQNPPAQPAPNAWQVIKGVLFRIFIIWAISSWFRRGPAPQDQAGPGGAPRVASRNLFPKDTLMNLHVYISEHEHFTDFNATSALFWEQHDLVYGDWTSGENSDGCYEHFAELDIPQSVQQNGSIYIHVYFTKSGFHPDPRQKALYRRLATVHMSRMINKYKRRRFQKTKNLLTGETEADPEMIKRAEDYGPVEVISHWHPNITINIVDDHTPWVKGSVPPPLDQYVKFDAVSGDYYPIIYFNDYWNLQKDYYPINESLASLPLRVSFCPLSLWRWQLYAAQSTKSPWNFLGDELYEQSDEEQDSVKVALLETNPYLLALTIIVSIVHSVFEFLAFKNDIQFWNSRQSLEGLSVRSVFFGVFQSFVVLLYILDNETNFVVQVSVFIGVLIDLWKITKVMDVRLDREHRVAGIFPRLSFKDKSTYIESSTKVYDDMAFRYLSWILFPLLGCYAVYSLLYLEHKGWYSWVLSMLYGFLLTFGFITMTPQLFINYKLKSVAHLPWRMLTYKALNTFIDDLFAFVIKMPVMYRIGCLRDDVVFFIYLYQRWIYRVDPTRVNEFGMSGEDPTAAAPVAEVPTAAGALTPTPAPTTTTATREEASTSLPTKPTQGASSASEPQEAPPKPAEDKKKD

SEQ ID NO: 25344 - protein, 567 aa, Homo sapiens
MNLHVYISEHEHFTDFNATSALFWEQHDLVYGDWTSGENSDGCYEHFAELDIPQSVQQNGSIYIHVYFTKSGFHPDPRQKALYRRLATVHMSRMINKYKRRRFQKTKNLLTGETEADPEMIKRAEDYGPVEVISHWHPNITINIVDDHTPWVKGSVPPPLDQYVKFDAVSGDYYPIIYFNDYWNLQKDYYPINESLASLPLRVSFCPLSLWRWQLYAAQSTKSPWNFLGDELYEQSDEEQDSVKVALLETNPYLLALTIIVSIVHSVFEFLAFKNDIQFWNSRQSLEGLSVRSVFFGVFQSFVVLLYILDNETNFVVQVSVFIGVLIDLWKITKVMDVRLDREHRVAGIFPRLSFKDKSTYIESSTKVYDDMAFRYLSWILFPLLGCYAVYSLLYLEHKGWYSWVLSMLYGFLLTFGFITMTPQLFINYKLKSVAHLPWRMLTYKALNTFIDDLFAFVIKMPVMYRIGCLRDDVVFFIYLYQRWIYRVDPTRVNEFGMSGEDPTAAAPVAEVPTAAGALTPTPAPTTTTATREEASTSLPTKPTQGASSASEPQEAPPKPAEDKKKD

SEQ ID NO: 25345 - protein, 655 aa, Homo sapiens
MSRKAHITEKVTSNGSIGRDPPAETQPQNPPAQPAPNAWQVIKGVLFRIFIIWAISSWFRRGPAPQDQAGPGGAPRVASRNLFPKDTLMNLHVYISEHEHFTDFNATSALFWEQHDLVYGDWTSGENSDGCYEHFAELDIPQSVQQNGSIYIHVYFTKSGFHPDPRQKALYRRLATVHMSRMINKYKRRRFQKTKNLLTGETEADPEMIKRAEDYGPVEVISHWHPNITINIVDDHTPWVKGSVPPPLDQYVKFDAVSGDYYPIIYFNDYWNLQKDYYPINESLASLPLRVSFCPLSLWRWQLYAAQSTKSPWNFLGDELYEQSDEEQDSVKVALLETNPYLLALTIIVSIVHSVFEFLAFKNDIQFWNSRQSLEGLSVRSVFFGVFQSFVVLLYILDNETNFVVQVSVFIGVLIDLWKITKVMDVRLDREHRVAGIFPRLSFKDKSTYIESSTKVYDDMAFRYLSWILFPLLGCYAVYSLLYLEHKGWYSWVLSMLYGFLLTFGFITMTPQLFINYKLKSVAHLPWRMLTYKALNTFIDDLFAFVIKMPVMYRIGCLRDDVVFFIYLYQRWIYRVDPTRVNEFGMSGEDPTAAAPVAEVPTAAGALTPTPAPTTTTATREEASTSLPTKPTQGASSASEPQEAPPKPAEDKKKD

SEQ ID NO: 25346 - protein, 564 aa, Homo sapiens
MAVFRSGLLVLTTPLASLAPRLASILTSAARLVNHTLYVHLQPGMSLEGPAQPQSSPVQATFEVLDFITHLYAGADVHRHLDVRILLTNIRTKSTFLPPLPTSVQNLAHPPEVVLTDFQTLDGSQYNPVKQQLVRYATSCYSCCPRLASVLLYSDYGIGEVPVEPLDVPLPSTIRPASPVAGSPKQPVRGYYRGAVGGTFDRLHNAHKVLLSVACILAQEQLVVGVADKDLLKSKLLPELLQPYTERVEHLSEFLVDIKPSLTFDVIPLLDPYGPAGSDPSLEFLVVSEETYRGGMAINRFRLENDLEELALYQIQLLKDLRHTENEEDKVSSSSFRQRMLGNLLRPPYERPELPTCLYVIGLTGISGSGKSSIAQRLKGLGAFVIDSDHLGHRAYAPGGPAYQPVVEAFGTDILHKDGIINRKVLGSRVFGNKKQLKILTDIMWPIIAKLAREEMDRAVAEGKRVCVIDAAVLLEAGWQNLVHEVWTAVIPETEAVRRIVERDGLSEAAAQSRLQSQMSGQQLVEQSHVVLSTLWEPHITQRQVEKAWALLQKRIPKTHQALD

SEQ ID NO: 25347 - protein, 593 aa, Homo sapiens
MRTPRLRAQPRGAVYQAPSPPPAPVGLGSMAVFRSGLLVLTTPLASLAPRLASILTSAARLVNHTLYVHLQPGMSLEGPAQPQSSPVQATFEVLDFITHLYAGADVHRHLDVRILLTNIRTKSTFLPPLPTSVQNLAHPPEVVLTDFQTLDGSQYNPVKQQLVRYATSCYSCCPRLASVLLYSDYGIGEVPVEPLDVPLPSTIRPASPVAGSPKQPVRGYYRGAVGGTFDRLHNAHKVLLSVACILAQEQLVVGVADKDLLKSKLLPELLQPYTERVEHLSEFLVDIKPSLTFDVIPLLDPYGPAGSDPSLEFLVVSEETYRGGMAINRFRLENDLEELALYQIQLLKDLRHTENEEDKVSSSSFRQRMLGNLLRPPYERPELPTCLYVIGLTGISGSGKSSIAQRLKGLGAFVIDSDHLGHRAYAPGGPAYQPVVEAFGTDILHKDGIINRKVLGSRVFGNKKQLKILTDIMWPIIAKLAREEMDRAVAEGKRVCVIDAAVLLEAGWQNLVHEVWTAVIPETEAVRRIVERDGLSEAAAQSRLQSQMSGQQLVEQSHVVLSTLWEPHITQRQVEKAWALLQKRIPKTHQALD

SEQ ID NO: 25348 - protein, 292 aa, Homo sapiens
MAAAAAAAVAGVGRGGGGAEPRQERSRARGWAGVERSEGRRMEPGEELEEEGSPGGREDGFTAEHLAAEAMAADMDPWLVFDARTTPATELDAWLAKYPPSQVTRYGDPGSPNSEPVGWIAVYGQGYSPNSGDVQGLQAAWEALQTSGRPITPGTLRQLAITHHVLSGKWLMHLAPGFKLDHAWAGIARAVVEGQLQVAKVSPRAKEGGRQVICVYTDDFTDRLGVLEADSAIRAAGIKCLLTYKPDVYTYLGIYRANRWHLCPTLYESRFQLGGSARGSRVLDRANNVELT

SEQ ID NO: 25349 - protein, 251 aa, Homo sapiens
MEPGEELEEEGSPGGREDGFTAEHLAAEAMAADMDPWLVFDARTTPATELDAWLAKYPPSQVTRYGDPGSPNSEPVGWIAVYGQGYSPNSGDVQGLQAAWEALQTSGRPITPGTLRQLAITHHVLSGKWLMHLAPGFKLDHAWAGIARAVVEGQLQVAKVSPRAKEGGRQVICVYTDDFTDRLGVLEADSAIRAAGIKCLLTYKPDVYTYLGIYRANRWHLCPTLYESRFQLGGSARGSRVLDRANNVELT

SEQ ID NO: 25350 - protein, 293 aa, Homo sapiens
MAAAAAAAVAGVGRGGGGAEPRQERSRARGWAGVERSEGRSRMEPGEELEEEGSPGGREDGFTAEHLAAEAMAADMDPWLVFDARTTPATELDAWLAKYPPSQVTRYGDPGSPNSEPVGWIAVYGQGYSPNSGDVQGLQAAWEALQTSGRPITPGTLRQLAITHHVLSGKWLMHLAPGFKLDHAWAGIARAVVEGQLQVAKVSPRAKEGGRQVICVYTDDFTDRLGVLEADSAIRAAGIKCLLTYKPDVYTYLGIYRANRWHLCPTLYESRFQLGGSARGSRVLDRANNVELT

SEQ ID NO: 25351 - protein, 467 aa, Homo sapiens
MESSTGPRMPLLKYCSVATSLKAPGWDGAAPPWDLSFTYPFALQAPWLTGHKPLARHASSCPCLHVADPAWQGPGWLGRAGDAANTWVLARREADGFYYRAQIKATPELERQGVLLVEFEAPLVAGPKLPAQQQRVVLEEDVIPLSPSVGYSLRPGDKVLALWEPGQQQYGPGTVLLGLEMRDPQRASKEKEITVHFWNGKAAKVPLGGVQSVSLTIWKKAVERLHKSFTREHPRPLHWAPCCSLLGPITGRITNELPPDAPFLCPLCHHHACCQLLCQGCLCGCPPCGTTWWPLTRTSEVMARELPELEPTAQLLPLEGPKEEKVAMHAPLAVSSSSSSSCEQDGVENDLEMGPPQRLMVNSAVNTDPIFLEMPLRQSGLCQPEWRYWKRNGPEPCLGKPGTRYSNICKEEKDHKQQRAQTAVVGTTKELVSKATHMKPPRTPPGEAEHRKRSQSLAICQWNKNSR

SEQ ID NO: 25352 - protein, 404 aa, Homo sapiens
MESSTGPRMPLLKYCSVATSLKAPGWDGAAPPWDLSFTYPFALQAPWLTGHKPLARHASSCPCLHVADPAWQGPGWLGRAGDAANTWVLARREADGFYYRAQIKATPELERQGVLLVEFEAPLVAGPKLPAQQQRVVLEEDVIPLSPSVGYSLRPGDKVLALWEPGQQQYGPGTVLLGLEMRDPQRASKEKEITVHFWNGKAAKVPLGGVQSVSLTIWKKAVERLHKSFTREHPRPLHWAPCCSLLGPITGRITNELPPDAPFLCPLCHHHACCQLLCQGCLCGCPPCGTTWWPLTRTSEVMARELPELEPTAQLLPLEGPKEEKVAMHAPLAVSSSSSSSCEQDGVENDLEMGPPQRLMVNSAVNTDPIFLEMPLRQSGLCQPEWRYWKRNGPEPCLGKPGKE

SEQ ID NO: 25353 - protein, 1202 aa, Homo sapiens
MNTKDTTEVAENSHHLKIFLPKKLLECLPRCPLLPPERLRWNTNEEIASYLITFEKHDEWLSCAPKTRPQNGSIILYNRKKVKYRKDGYLWKKRKDGKTTREDHMKLKVQGMECLYGCYVHSSIVPTFHRRCYWLLQNPDIVLVHYLNVPALEDCGKGCSPIFCSISSDRREWLKWSREELLGQLKPMFHGIKWSCGNGTEEFSVEHLVQQILDTHPTKPAPRTHACLCSGGLGSGSLTHKCSSTKHRIISPKVEPRALTLTSIPHAHPPEPPPLIAPLPPELPKAHTSPSSSSSSSSSGFAEPLEIRPSPPTSRGGSSRGGTAILLLTGLEQRAGGLTPTRHLAPQADPRPSMSLAVVVGTEPSAPPAPPSPAFDPDRFLNSPQRGQTYGGGQGVSPDFPEAEAAHTPCSALEPAAALEPQAAARGPPPQSVAGGRRGNCFFIQDDDSGEELKGHGAAPPIPSPPPSPPPSPAPLEPSSRVGRGEALFGGPVGASELEPFSLSSFPDLMGELISDEAPSIPAPTPQLSPALSTITDFSPEWSYPEGGVKVLITGPWTEAAEHYSCVFDHIAVPASLVQPGVLRCYCPAHEVGLVSLQVAGREGPLSASVLFEYRARRFLSLPSTQLDWLSLDDNQFRMSILERLEQMEKRMAEIAAAGQVPCQGPDAPPVQDEGQGPGFEARVVVLVESMIPRSTWKGPERLAHGSPFRGMSLLHLAAAQGYARLIETLSQWRSVETGSLDLEQEVDPLNVDHFSCTPLMWACALGHLEAAVLLFRWNRQALSIPDSLGRLPLSVAHSRGHVRLARCLEELQRQEPSVEPPFALSPPSSSPDTGLSSVSSPSELSDGTFSVTSAYSSAPDGSPPPAPLPASEMTMEDMAPGQLSSGVPEAPLLLMDYEATNSKGPLSSLPALPPASDDGAAPEDADSPQAVDVIPVDMISLAKQIIEATPERIKREDFVGLPEAGASMRERTGAVGLSETMSWLASYLENVDHFPSSTPPSELPFERGRLAVPSAPSWAEFLSASTSGKMESDFALLTLSDHEQRELYEAARVIQTAFRKYKGRRLKEQQEVAAAVIQRCYRKYKQLTWIALKFALYKKMTQAAILIQSKFRSYYEQKRFQQSRRAAVLIQQHYRSYRRRPGPPHRTSATLPARNKGSFLTKKQDQAARKIMRFLRRCRHRMRELKQNQELEGLPQPGLAT

SEQ ID NO: 25354 - protein, 1195 aa, Homo sapiens
MNTKDTTEVAENSHHLKIFLPKKLLECLPRCPLLPPERLRWNTNEEIASYLITFEKHDEWLSCAPKTRPQNGSIILYNRKKVKYRKDGYLWKKRKDGKTTREDHMKLKVQGMECLYGCYVHSSIVPTFHRRCYWLLQNPDIVLVHYLNVPALEDCGKGCSPIFCSISSDRREWLKWSREELLGQLKPMFHGIKWSCGNGTEEFSVEHLVQQILDTHPTKPAPRTHACLCSGGLGSGSLTHKCSSTKHRIISPKVEPRALTLTSIPHAHPPEPPPLIAPLPPELPKAHTSPSSSSSSSSSGFAEPLEIRPSPPTSRGGSSRGGTAILLLTGLEQRAGGLTPTRHLAPQADPRPSMSLAVVVGTEPSAPPAPPSPAFDPDRFLNSPQRGQTYGGGQGVSPDFPEAEAAHTPCSALEPAAALEPQAAARGPPPQSVAGGRRGNCFFIQDDDSGEELKGHGAAPPIPSPPPSPPPSPAPLEPSSRVGRGEALFGGPVGASELEPFSLSSFPDLMGELISDEAPSIPAPTPQLSPALSTITDFSPEWSYPEGGVKVLITGPWTEAAEHYSCVFDHIAVPASLVQPGVLRCYCPAHEVGLVSLQVAGREGPLSASVLFEYRARRFLSLPSTQLDWLSLDDNQFRMSILERLEQMEKRMAEIAAAGQVPCQGPDAPPVQDEGQGPGFEARVVVLVESMIPRSTWKGPERLAHGSPFRGMSLLHLAAAQGYARLIETLSQWRSVETGSLDLEQEVDPLNVDHFSCTPLMWACALGHLEAAVLLFRWNRQALSIPDSLGRLPLSVAHSRGHVRLARCLEELQRQEPSVEPPFALSPPSSSPDTGLSSVSSPSELSDGTFSVTSAYSSAPDGSPPPAPLPASEMTMEDMAPGQLSSGVPEAPLLLMDYEATNSKGPLSSLPALPPASDDGAAPEDADSPQAVDVIPVDMISLAKQIIEATPERIKREDFVGLPEAGASMRERTGAVGLSETMSWLASYLENVDHFPSSTPPSELPFERGRLAVPSAPSWAEFLSASTSGKMESDFALLTLSDHEQRELYEAARVIQTAFRKYKGRRLKEQQEVAAAVIQRCYRKYKQFALYKKMTQAAILIQSKFRSYYEQKRFQQSRRAAVLIQQHYRSYRRRPGPPHRTSATLPARNKGSFLTKKQDQAARKIMRFLRRCRHRMRELKQNQELEGLPQPGLAT

SEQ ID NO: 25355 - protein, 1197 aa, Homo sapiens
MAAAAVTRGTPGENSHHLKIFLPKKLLECLPRCPLLPPERLRWNTNEEIASYLITFEKHDEWLSCAPKTRPQNGSIILYNRKKVKYRKDGYLWKKRKDGKTTREDHMKLKVQGMECLYGCYVHSSIVPTFHRRCYWLLQNPDIVLVHYLNVPALEDCGKGCSPIFCSISSDRREWLKWSREELLGQLKPMFHGIKWSCGNGTEEFSVEHLVQQILDTHPTKPAPRTHACLCSGGLGSGSLTHKCSSTKHRIISPKVEPRALTLTSIPHAHPPEPPPLIAPLPPELPKAHTSPSSSSSSSSSGFAEPLEIRPSPPTSRGGSSRGGTAILLLTGLEQRAGGLTPTRHLAPQADPRPSMSLAVVVGTEPSAPPAPPSPAFDPDRFLNSPQRGQTYGGGQGVSPDFPEAEAAHTPCSALEPAAALEPQAAARGPPPQSVAGGRRGNCFFIQDDDSGEELKGHGAAPPIPSPPPSPPPSPAPLEPSSRVGRGEALFGGPVGASELEPFSLSSFPDLMGELISDEAPSIPAPTPQLSPALSTITDFSPEWSYPEGGVKVLITGPWTEAAEHYSCVFDHIAVPASLVQPGVLRCYCPAHEVGLVSLQVAGREGPLSASVLFEYRARRFLSLPSTQLDWLSLDDNQFRMSILERLEQMEKRMAEIAAAGQVPCQGPDAPPVQDEGQGPGFEARVVVLVESMIPRSTWKGPERLAHGSPFRGMSLLHLAAAQGYARLIETLSQWRSVETGSLDLEQEVDPLNVDHFSCTPLMWACALGHLEAAVLLFRWNRQALSIPDSLGRLPLSVAHSRGHVRLARCLEELQRQEPSVEPPFALSPPSSSPDTGLSSVSSPSELSDGTFSVTSAYSSAPDGSPPPAPLPASEMTMEDMAPGQLSSGVPEAPLLLMDYEATNSKGPLSSLPALPPASDDGAAPEDADSPQAVDVIPVDMISLAKQIIEATPERIKREDFVGLPEAGASMRERTGAVGLSETMSWLASYLENVDHFPSSTPPSELPFERGRLAVPSAPSWAEFLSASTSGKMESDFALLTLSDHEQRELYEAARVIQTAFRKYKGRRLKEQQEVAAAVIQRCYRKYKQFALYKKMTQAAILIQSKFRSYYEQKRFQQSRRAAVLIQQHYRSYRRRPGPPHRTSATLPARNKGSFLTKKQDQAARKIMRFLRRCRHRMRELKQNQELEGLPQPGLAT

SEQ ID NO: 25356 - protein, 1201 aa, Homo sapiens
MGTDSPSPRPLRPGVTLPPGALTMNTKDTTEVAENSHHLKIFLPKKLLECLPRCPLLPPERLRWNTNEEIASYLITFEKHDEWLSCAPKTRPQNGSIILYNRKKVKYRKDGYLWKKRKDGKTTREDHMKLKVQGMENPDIVLVHYLNVPALEDCGKGCSPIFCSISSDRREWLKWSREELLGQLKPMFHGIKWSCGNGTEEFSVEHLVQQILDTHPTKPAPRTHACLCSGGLGSGSLTHKCSSTKHRIISPKVEPRALTLTSIPHAHPPEPPPLIAPLPPELPKAHTSPSSSSSSSSSGFAEPLEIRPSPPTSRGGSSRGGTAILLLTGLEQRAGGLTPTRHLAPQADPRPSMSLAVVVGTEPSAPPAPPSPAFDPDRFLNSPQRGQTYGGGQGVSPDFPEAEAAHTPCSALEPAAALEPQAAARGPPPQSVAGGRRGNCFFIQDDDSGEELKGHGAAPPIPSPPPSPPPSPAPLEPSSRVGRGEALFGGPVGASELEPFSLSSFPDLMGELISDEAPSIPAPTPQLSPALSTITDFSPEWSYPEGGVKVLITGPWTEAAEHYSCVFDHIAVPASLVQPGVLRCYCPAHEVGLVSLQVAGREGPLSASVLFEYRARRFLSLPSTQLDWLSLDDNQFRMSILERLEQMEKRMAEIAAAGQVPCQGPDAPPVQDEGQGPGFEARVVVLVESMIPRSTWKGPERLAHGSPFRGMSLLHLAAAQGYARLIETLSQWRSVETGSLDLEQEVDPLNVDHFSCTPLMWACALGHLEAAVLLFRWNRQALSIPDSLGRLPLSVAHSRGHVRLARCLEELQRQEPSVEPPFALSPPSSSPDTGLSSVSSPSELSDGTFSVTSAYSSAPDGSPPPAPLPASEMTMEDMAPGQLSSGVPEAPLLLMDYEATNSKGPLSSLPALPPASDDGAAPEDADSPQAVDVIPVDMISLAKQIIEATPERIKREDFVGLPEAGASMRERTGAVGLSETMSWLASYLENVDHFPSSTPPSELPFERGRLAVPSAPSWAEFLSASTSGKMESDFALLTLSDHEQRELYEAARVIQTAFRKYKGRRLKEQQEVAAAVIQRCYRKYKQLTWIALKFALYKKMTQAAILIQSKFRSYYEQKRFQQSRRAAVLIQQHYRSYRRRPGPPHRTSATLPARNKGSFLTKKQDQAARKIMRFLRRCRHRMRELKQNQELEGLPQPGLAT

SEQ ID NO: 25357 - protein, 329 aa, Homo sapiens
MTMEDMAPGQLSSGVPEAPLLLMDYEATNSKGPLSSLPALPPASDDGAAPEDADSPQAVDVIPVDMISLAKQIIEATPERIKREDFVGLPEAGASMRERTGAVGLSETMSWLASYLENVDHFPSSTPPSELPFERGRLAVPSAPSWAEFLSASTSGKMESDFALLTLSDHEQRELYEAARVIQTAFRKYKGRRLKEQQEVAAAVIQRCYRKYKQLTWIALKFALYKKMTQAAILIQSKFRSYYEQKRFQQSRRAAVLIQQHYRSYRRRPGPPHRTSATLPARNKGSFLTKKQDQAARKIMRFLRRCRHRMRELKQNQELEGLPQPGLAT

SEQ ID NO: 25358 - protein, 1241 aa, Homo sapiens
MGTDSPSPRPLRPGVTLPPGALTMNTKDTTEVAENSHHLKIFLPKKLLECLPRCPLLPPERLRWNTNEEIASYLITFEKHDEWLSCAPKTRPQNGSIILYNRKKVKYRKDGYLWKKRKDGKTTREDHMKLKVQGMECLYGCYVHSSIVPTFHRRCYWLLQNPDIVLVHYLNVPALEDCGKGCSPIFCSISSDRREWLKWSREELLGQLKPMFHGIKWSCGNGTEEFSVEHLVQQILDTHPTKPAPRTHACLCSGGLGSGSLTHKCSSTKHRIISPKVEPRALTLTSIPHAHPPEPPPLIAPLPPELPKAHTSPSSSSSSSSSGFAEPLEIRPSPPTSRGGSSRGGTAILLLTGLEQRAGGLTPTRHLAPQADPRPSMSLAVVVGTEPSAPPAPPSPAFDPDRFLNSPQRGQTYGGGQGVSPDFPEAEAAHTPCSALEPAAALEPQAAARGPPPQSVAGGRRGNCFFIQDDDSGEELKGHGAAPPIPSPPPSPPPSPAPLEPSSRVGRGEALFGGPVGASELEPFSLSSFPDLMGELISDEAPSIPAPTPQLSPALSTITDFSPEWSYPEGGVKVLITGPWTEAAEHYSCVFDHIAVPASLVQPGVLRCYCPAHEVGLVSLQVAGREGPLSASVLFEYRARRFLSLPSTQLDWLSLDDNQFRMSILERLEQMEKRMAEIAAAGQVPCQGPDAPPVQDEGQGPGFEARVVVLVESMIPRSTWKGPERLAHGSPFRGMSLLHLAAAQGYARLIETLSQWRSVETGSLDLEQEVDPLNVDHFSCTPLMWACALGHLEAAVLLFRWNRQALSIPDSLGRLPLSVAHSRGHVRLARCLEELQRQEPSVEPPFALSPPSSSPDTGLSSVSSPSELSDGTFSVTSAYSSAPDGSPPPAPLPASEMTMEDMAPGQLSSGVPEAPLLLMDYEATNSKGPLSSLPALPPASDDGAAPEDADSPQAVDVIPVDMISLAKQIIEATPERIKREDFVGLPEAGASMRERTGAVGLSETMSWLASYLENVDHFPSSTPPSELPFERGRLAVPSAPSWAEFLSASTSGKMESDFALLTLSDHEQRELYEAARVIQTAFRKYKGRRLKEQQEVAAAVIQRCYRKYKQLTWIALKFALYKKMTQAAILIQSKFRSYYEQKRFQQSRRAAVLIQQHYRSYRRRPGPPHRTSATLPARNKLLSHQEAGPGSPEDHEIPAALPTQDEGTEAEPGAGRASPAGTGHMTWPPPFSPPWGRLVQS

SEQ ID NO: 25359 - protein, 193 aa, Homo sapiens
MPKGRRGSHSPTMSQRSAPPLYFPSLYDRGISSSPLSDFNIWKKLFVPLKAGGAPVGGAAGARSLSQALPAPAPPPPPPPGLGPSSERPWPSPWPSGLASIPYEPLRFFYSPPPGPEVVASPLVPCPSTPRLASASHPEELCELEIRIKELELLTITGDGFDSQSYTFLKALKDEKLQGLKTKQPGKKSASLS

SEQ ID NO: 25360 - protein, 184 aa, Homo sapiens
MPKGRRGSHSPTMSQRSAPPLYFPSLYDRGISSSPLSDFNIWKKLFVPLKAGGAPVGGAAGARSLSQALPAPAPPPPPPPGLGPSSERPWPSPWPSGLASIPYEPLRFFYSPPPGPEVVASPLVPCPSTPRLASASHPEELCELEIRIKELELLTITGDGFDSQSFLGLWTTCADAGRIPQPTS

SEQ ID NO: 25361 - protein, 325 aa, Homo sapiens
MFRKIHSIFNSSPQRKTAAESPFYEGASPAVKLIRSSSMYVVGDHGEKFSESLKKYKSTSSMDTSLYYLRQEEDRAWMYSRTQDCLQYLQELLALRKKYLSSFSDLKPHRTQGISSTSSKSSKGGKKTPVRSTPKEIKKATPKKYSQFSADVAEAIAFFDSIIAELDTERRPRAAEASLPNEDVDFDVATSSREHSLHSNWILRAPRRHSEDIAAHTVHTVDGQFRRSTEHRTVGTQRRLERHPIYLPKAVEGAFNTWKFKPKACKKDLGSSRQILFNFSGEDMEWDAELFALEPQLSPGEDYYETENPKGQWLLRERLWERTVP

SEQ ID NO: 25362 - protein, 435 aa, Homo sapiens
MGNKQPQKVTVPTGTALQGVVLIVSTLHQPGGWICGKDPCCSLRPLSNSVQNALACKSKQDYQAGILFKTRAFISRDCGSDAAEDSASKGETYTLTLEHKGAGEGDLRPRGQPGWCRLGDPRRDSARPVAAIEGPCPGAARASRVLRGRGFSRNPRGRGLPSGAGWRGAGGAGEGAVTFPERRGDVRRKGAGRARFKWHSLSSELRAVWAAAGYISREPGRRGADGDSSGGERLGARRNSAPRAPCPPTGPPARPPSRGAPARAREGRRHPAADLDPPPGEPPAAASRGAPAQRPPSESPGAPPPGPADAGGAMAAKPGELMGICSSYQAVMPHFVCLADEFPQPVRPAKLPKGRGRLRRPRQSRFKTQPVTFDEIQEVEEEGVSPMEEEKAKKSFLQSLECLRRSTQSLSLQREQLSSCKLRNSLDSSDSDSAL

SEQ ID NO: 25363 - protein, 330 aa, Homo sapiens
MDGPMRPRSASLVDFQFGVVATETIEDALLHLAQQNEQAVREASGRLGRFREPQIVEFVFLLSEQWCLEKSVSYQAVEILERFMVKQAENICRQATIQPRDNKRESQNWRALKQQLVNKFTLRLVSCVQLASKLSFRNKIISNITVLNFLQALGYLHTKEELLESELDVLKSLNFRINLPTPLAYVETLLEVLGYNGCLVPAMRLHATCLTLLDLVYLLHEPIYESLLRASIENSTPSQLQGEKFTSVKEDFMLLAVGIIAASAFIQNHECWSQVVGHLQSITGIALASIAEFSYAILTHGVGANTPGRQQSIPPHLAARALKTVASSNT

SEQ ID NO: 25364 - protein, 128 aa, Homo sapiens
MRLHATCLTLLDLVYLLHEPIYESLLRASIENSTPSQLQGEKFTSVKEDFMLLAVGIIAASAFIQNHECWSQVVGHLQSITGIALASIAEFSYAILTHGVGANTPGRQQSIPPHLAARALKTVASSNT

SEQ ID NO: 25365 - protein, 770 aa, Homo sapiens
MSKCRKTPVQQLASPASFSPDILADIFELFAKNFSYGKPLNNEWQLPDPSEIFTCDHTELNAFLDLKNSLNEVKNLLSDKKLDEWHEHTAFTNKAGKIISHVRKSVNAELCTQAWCKFHEILCSFPLIPQEAFQNGKLNSLHLCEAPGAFIASLNHYLKSHRFPCHWSWVANTLNPYHEANDDLMMIMDDRLIANTLHWWYFGPDNTGDIMTLKFLTGLQNFISSMATVHLVTADGSFDCQGNPGEQEALVSSLHYCEVVTALTTLGNGGSFVLKMFTMFEHCSINLMYLLNCCFDQVHVFKPATSKAGNSEVYVVCLHYKGREAIHPLLSKMTLNFGTEMKRKALFPHHVIPDSFLKRHEECCVFFHKYQLETISENIRLFECMGKAEQEKLNNLRDCAIQYFMQKFQLKHLSRNNWLVKKSSIGCSTNTKWFGQRNKYFKTYNERKMLEALSWKDKVAKGYFNSWAEEHGVYHPGQSSILEGTASNLECHLWHILEGKKLPKVKCSPFCNGEILKTLNEAIEKSLGGAFNLDSKFRPKQQYSCSCHVFSEELIFSELCSLTECLQDEQVVVPSNQIKCLLVGFSTLRNIKMHIPLEVRLLESAELTTFSCSLLHDGDPTYQRLFLDCLLHSLRELHTGDVMILPVLSCFTRFMAGLIFVLHSCFRFITFVCPTSSDPLRTCAVLLCVGYQDLPNPVFRYLQSVNELLSTLLNSDSPQQVLQFVPMEVLLKGALLDFLWDLNAAIAKRHLHFIIQREREEIINSLQLQN

SEQ ID NO: 25366 - protein, 601 aa, Homo sapiens
MHPLQCVLQVQRSLGWGPLASVSWLSLRMCRAHSSLSSTMCPSPERQEDGARKDFSSRLAAGPTFQHFLKSASAPQEKLSSEVEDPPPYLMMDELLGRQRKVYLETYGCQMNVNDTEIAWSILQKSGYLRTSNLQEADVILLVTCSIREKAEQTIWNRLHQLKALKTRRPRSRVPLRIGILGCMAERLKEEILNREKMVDILAGPDAYRDLPRLLAVAESGQQAANVLLSLDETYADVMPVQTSASATSAFVSIMRGCDNMCSYCIVPFTRGRERSRPIASILEEVKKLSEQVFLPPRPPKVLGLQGLKEVTLLGQNVNSFRDNSEVQFNSAVPTNLSRGFTTNYKTKQGGLRFAHLLDQVSRVDPEMRIRFTSPHPKDFPDEVLQLIHERDNICKQIHLPAQSGSSRVLEAMRRGYSREAYVELVHHIRESIPGVSLSSDFIAGFCGETEEDHVQTVSLLREVQYNMGFLFAYSMRQKTRAYHRLKDDVPEEVKLRRLEELITIFREEATKANQTSVGCTQLVLVEGLSKRSATDLCGRNDGNLKVIFPDAEMEDVNNPGLRVRAQPGDYVLVKITSASSQTLRGHVLCRTTLRDSSAYC

SEQ ID NO: 25367 - protein, 497 aa, Homo sapiens
MMDELLGRQRKVYLETYGCQMNVNDTEIAWSILQKSGYLRTSNLQEADVILLVTCSIREKAEQTIWNRLHQLKALKTRRPRSRVPLRIGILGCMAERLKEEILNREKMVDILAGPDAYRDLPRLLAVAESGQQAANVLLSLDETYADVMPVQTSASATSAFVSIMRGCDNMCSYCIVPFTRGRERSRPIASILEEVKKLSEQGLKEVTLLGQNVNSFRDNSEVQFNSAVPTNLSRGFTTNYKTKQGGLRFAHLLDQVSRVDPEMRIRFTSPHPKDFPDEVLQLIHERDNICKQIHLPAQSGSSRVLEAMRRGYSREAYVELVHHIRESIPGVSLSSDFIAGFCGETEEDHVQTVSLLREVQYNMGFLFAYSMRQKTRAYHRLKDDVPEEVKLRRLEELITIFREEATKANQTSVGCTQLVLVEGLSKRSATDLCGRNDGNLKVIFPDAEMEDVNNPGLRVRAQPGDYVLVKITSASSQTLRGHVLCRTTLRDSSAYC

SEQ ID NO: 25368 - protein, 587 aa, Homo sapiens
MHPLQCVLQVQRSLGWGPLASVSWLSLRMCRAHSSLSSTMCPSPERQEDGARKDFSSRLAAGPTFQHFLKSASAPQEKLSSEVEDPPPYLMMDELLGRQRKVYLETYGCQMNVNDTEIAWSILQKSGYLRTSNLQEADVILLVTCSIREKAEQTIWNRLHQLKALKTRRPRSRVPLRIGILGCMAERLKEEILNREKMVDILAGPDAYRDLPRLLAVAESGQQAANVLLSLDETYADVMPVQTSASATSAFVSIMRGCDNMCSYCIVPFTRGRERSRPIASILEEVKKLSEQGLKEVTLLGQNVNSFRDNSEVQFNSAVPTNLSRGFTTNYKTKQGGLRFAHLLDQVSRVDPEMRIRFTSPHPKDFPDEVLQLIHERDNICKQIHLPAQSGSSRVLEAMRRGYSREAYVELVHHIRESIPGVSLSSDFIAGFCGETEEDHVQTVSLLREVQYNMGFLFAYSMRQKTRAYHRLKDDVPEEVKLRRLEELITIFREEATKANQTSVGCTQLVLVEGLSKRSATDLCGRNDGNLKVIFPDAEMEDVNNPGLRVRAQPGDYVLVKITSASSQTLRGHVLCRTTLRDSSAYC

SEQ ID NO: 25369 - protein, 510 aa, Homo sapiens
MHPLQCVLQVQRSLGWGPLASVSWLSLRMCRAHSSLSSTMCPSPERQEDGARKDFSSRLAAGPTFQHFLKSASAPQEKLSSEVEDPPPYLMMDELLGRQRKVYLETYGCQMNVNDTEIAWSILQKSGYLRTSNLQEADVILLVTCSIREKAEQTIWNRLHQLKALKTRRPRSRVPLRIGILGCMAERLKEEILNREKMVDILAGPDAYRDLPRLLAVAESGQQAANVLLSLDETYADVMPVQTSASATSAFVSIMRGCDNMCSYCIVPFTRGRERSRPIASILEEVKKLSEQVLQLIHERDNICKQIHLPAQSGSSRVLEAMRRGYSREAYVELVHHIRESIPGVSLSSDFIAGFCGETEEDHVQTVSLLREVQYNMGFLFAYSMRQKTRAYHRLKDDVPEEVKLRRLEELITIFREEATKANQTSVGCTQLVLVEGLSKRSATDLCGRNDGNLKVIFPDAEMEDVNNPGLRVRAQPGDYVLVKITSASSQTLRGHVLCRTTLRDSSAYC

SEQ ID NO: 25370 - protein, 426 aa, Homo sapiens
MHPLQCVLQVQRSLGWGPLASVSWLSLRMCRAHSSLSSTMCPSPERQEDGARKDFSSRLAAGPTFQHFLKSASAPQEKLSSEVEDPPPYLMMDELLGRQRKVYLETYGCQMNVNDTEIAWSILQKSGYLRTSNLQEADVILLVTCSIREKAEQTIWNRLHQLKALKTRRPRSRVPLRIGILGCMAERLKEEILNREKMVDILAGPDAYRDLPRLLAVAESGQQAANVLLSLDETYADVMPVQTSASATSAFVSIMRGCDNMCSYCIVPFTRGRERSRPIASILEEVKKLSEQGLKEVTLLGQNVNSFRDNSEVQFNSAVPTNLSRGFTTNYKTKQGGLRFAHLLDQVSRVDPEMRIRFTSPHPKDFPDEVLQLIHERDNICKQIHLPAQSGSSRVLEAMRRGYSREAYVELVHHIRESIPEDTGIS

SEQ ID NO: 25371 - protein, 574 aa, Homo sapiens
MHPLQCVLQVQRSLGWGPLASVSWLSLRMCRAHSSLSSTMCPSPERQEDGARKDFSSRLAAGPTFQHFLKSASAPQEKLSSEVEDPPPYLMMDELLGRQRKVYLETYGCQMNVNDTEIAWSILQKSGYLRTSNLQEADVILLVTCSIREKAEQTIWNRLHQLKALKTRRPRSRVPLRIGILGCMAERLKEEILNREKMVDILAGPDAYRDLPRLLAVAESGQQAANVLLSLDETYADVMPVQTSASATSAFVSIMRGCDNMCSYCIVPFTRGRERSRPIASILEEVKKLSEQGLKEVTLLGQNVNSFRDNSEVQFNSAVPTNLSRGFTTNYKTKQGGLRFAHLLDQVSRVDPEMRIRFTSPHPKDFPDEVLQLIHERDNICKQIHLPAQSGSSRVLEAMRRGYSREAYVELVHHIRESIPGVSLSSDFIAGFCGETEEDHVQTVSLLREVQYNMGFLFAYSMRQKTRAYHRLKDDVPEEVKLRRLEELITIFREEATKANQTSVGCTQLVLVEGLSKRSATDLCGRNDGNLKVIFPDAEMEDVNNPGLRVRAQPGDYVLVKVRSPFGLLACTVK

SEQ ID NO: 25372 - protein, 1405 aa, Homo sapiens
MAARSPPSPHPSPPARQLGPRSPRVGRGAEVHAMRSEASGFAGAAREVVADESDKIWVGEEGSGGRRGPGGAAPAHAPLLSAPMGSRRLEGISVEEAMVTRTQLLEEELSSLKEELALCQADKEFVWSLWKRLQVTNPDLTQVVSLVVEREKQKSEAKDRKVLEILQVKDAKIQEFEQRESVLKQEINDLVKRKIAVDEENAFLRKEFSDLEKKFKDKSQEIKDTKECVQNKEEQNRLVIKNLEEENKKLSTRCTDLLNDLEKLRKQEAHLRKEKYSTDAKIKTFEDNLIEARKEVEVSQSKYNALSLQLSNKQTELIQKDMDITLVRKELQELQNLYKQNSTHTAQQAELIQQLQVLNMDTQKVLRNQEDVHTAESISYQKLYNELHICFETTKSNEAMLRQSVTNLQDQLLQKEQENAKLKEKLQESQGAPLPLPQESDPDYSAQVPHRPSLSSLETLMVSQKSEIEYLQEKLKIANEKLSENISANKGFSRKSIMTSAEGKHKEPPVKRSRSLSPKSSFTDSEELQKLRKAERKIENLEKALQLKSQENDELRDAHEKRKERLQMLQTNYRAVKEQLKQWEEGSGMTEIRKIKRADPQQLRQEDSDAVWNELAYFKRENQELMIQKMNLEEELDELKVHISIDKAAIQELNRCVAERREEQLFRSGEDDEVKRSTPEKNGKEMLEQTLQKVTELENRLKSFEKRSRKLKEGNKKLMKENDFLKSLLKQQQEDTETREKELEQIIKGSKDVEKENTELQVKISELETEVTSLRRQVAEANALRNENEELINPMEKSHQSADRAKSEMATMKVRSGRYDCKTTMTKVKFKAAKKNCSVGRHHTVLNHSIKVMSNVFENLSKDGWEDVSESSSDSEAQTSQTLGTIIVETSQKISPTEDGKDQKESDPTEDSQTQGKEIVQTYLNIDGKTPKDYFHDKNAKKPTFQKKNCKMQKSSHTAVPTRVNREKYKNITAQKSSSNIILLRERIISLQQQNSVLQNAKKTAELSVKEYKEVNEKLLHQQQVSDQRFQTSRQTIKKLNLDLAGLRKEKEDLLKKLESSSEITSLAEENSQVTFPRIQVTSLSPSRSMDLEMKQLQYKLKNATNELTKQSSNVKTLKFELLAKEEHIKEMHEKISRMERDITMKRHLIEDLKFRQKVNLESNKSFSEMLQNLDKKVKTLTEECSNKKVSIDSLKQRLNVAVKEKSQYEQMYQKSKEELEKKDLKLTLLVSRISETESAMAEIETAASKQLQELALQSEQVLEGAQKTLLLANEKVEEFTTFVKALAKELQNDVHVVRRQIRELKKMKKNRDACKTSTHKAQTLAASILNISRSDLEEILDTEDQVEIEKTKIDAENDKEWMLYIQKLLEGQSLTLSPRLKCNGAIVAHQNLRLPDSSSSASAS

SEQ ID NO: 25373 - protein, 1406 aa, Homo sapiens
MAARSPPSPHPSPPARQLGPRSPRVGRGAEVHAMRSEASGFAGAAREVVADESDKIWVGEEGSGGRRGPGGAAPAHAPLLSAPMGSRRLEGISVEEAMVTRTQLLEEELSSLKEELALCQADKEFVWSLWKRLQVTNPDLTQVVSLVVEREKQKSEAKDRKVLEILQVKDAKIQEFEQRESVLKQEINDLVKRKIAVDEENAFLRKEFSDLEKKFKDKSQEIKDTKECVQNKEEQNRLVIKNLEEENKKLSTRCTDLLNDLEKLRKQEAHLRKEKYSTDAKIKTFEDNLIEARKEVEVSQSKYNALSLQLSNKQTELIQKDMDITLVRKELQELQNLYKQNSTHTAQQAELIQQLQVLNMDTQKVLRNQEDVHTAESISYQKLYNELHICFETTKSNEAMLRQSVTNLQDQLLQKEQENAKLKEKLQESQGAPLPLPQESDPDYSAQVPHRPSLSSLETLMVSQKSEIEYLQEKLKIANEKLSENISANKGFSRKSIMTSAEGKHKEPPVKRSRSLSPKSSFTDSEELQKLRKAERKIENLEKALQLKSQENDELRDAHEKRKERLQMLQTNYRAVKEQLKQWEEGSGMTEIRKIKRADPQQLRQEDSDAVWNELAYFKRENQELMIQKMNLEEELDELKVHISIDKAAIQELNRCVAERREEQLFRSGEDDEVKRSTPEKNGKEMLEQTLQKVTELENRLKSFEKRSRKLKEGNKKLMKENDFLKSLLKQQQEDTETREKELEQIIKGSKDVEKENTELQVKISELETEVTSLRRQVAEANALRNENEELINPMEKSHQSADRAKSEMATMKVRSGRYDCKTTMTKVKFKAAKKNCSVGRHHTVLNHSIKVMSNVFENLSKDGWEDVSESSSDSEAQTSQTLGTIIVETSQKISPTEDGKDQKESDPTEDSQTQGKEIVQTYLNIDGKTPKDYFHDKNAKKPTFQKKNCKMQKSSHTAVPTRVNREKYKNITAQKSSSNIILLRERIISLQQQNSVLQNAKKTAELSVKEYKEVNEKLLHQQQVSDQRFQTSRQTIKKLNLDLAGLRKEKEDLLKKLESSSEITSLAEENSQVTFPRIQVTSLSPSRSMDLEMKQLQYKLKNATNELTKQSSNVKTLKFELLAKEEHIKEMHEKISRMERDITMKRHLIEDLKFRQKVNLESNKSFSEMLQNLDKKVKTLTEECSNKKVSIDSLKQRLNVAVKEKSQYEQMYQKSKEELEKKDLKLTLLVSRISETESAMAEIETAASKQLQELALQSEQVLEGAQKTLLLANEKVEEFTTFVKALAKELQNDVHVVRRQIRELKKMKKNRDACKTSTHKAQTLAASILNISRSDLEEILDTEDQVEIEKTKIDAENDKEWMLYIQKLLEGQLPFASYLLEAVLEKINEKKKLVEGYFTIMKDIR

SEQ ID NO: 25374 - protein, 391 aa, Homo sapiens
MAARSPPSPHPSPPARQLGPRSPRVGRGAEVHAMRSEASGFAGAAREVVADESDKIWVGEEGSGGRRGPGGAAPAHAPLLSAPMGSRRLEGISVEEAMVTRTQLLEEELSSLKEELALCQADKEFVWSLWKRLQVTNPDLTQVVSLVVEREKQKSEAKDRKVLEILQVKDAKIQEFEQRESVLKQEINDLVKRKIAVDEENAFLRKEFSDLEKKFKDKSQEIKDTKECVQNKEEQNRLVIKNLEEENKKLSTRCTDLLNDLEKLRKQEAHLRKEKYSTDAKIKTFEDNLIEARKEVEVSQSKYNALSLQLSNKQTELIQKDMDITLVRKELQELQNLYKQNSTHTAQQAELIQQLQVLNMDTQKVLRNQEDVHTAESISYQKVCFYSVIKM

SEQ ID NO: 25375 - protein, 251 aa, Homo sapiens
MSDIGDWFRSIPAITRYWFAATVAVPLVGKLGLISPAYLFLWPEAFLYRFQIWRPITATFYFPVGPGTGFLYLVNLYFLYQYSTRLETGAFDGRPADYLFMLLFNWICIVITGLAMDMQLLMIPLIMSVLYVWAQLNRDMIVSFWFGTRFKACYLPWVILGFNYIIGGSVINELIGNLVGHLYFFLMFRYPMDLGGRNFLSTPQFLYRWLPSRRGGVSGFGVPPASMRRAADQNGGGGRHNWGQGFRLGDQ

SEQ ID NO: 25376 - protein, 231 aa, Homo sapiens
MSDIGDWFRSIPAITRYWFAATVAVPLVGKLGLISPAYLFLWPEAFLYRFQIWRPITATFYFPVGPGTGFLYLVNLYFLYQYSTRLETGAFDGRPADYLFMLLFNWICIVITGLAMDMQLLMIPLIMSVLYVWAQLNRDMIVSFWFGTRFKACYLPWVILGFNYIIGGSYPMDLGGRNFLSTPQFLYRWLPSRRGGVSGFGVPPASMRRAADQNGGGGRHNWGQGFRLGDQ

SEQ ID NO: 25377 - protein, 795 aa, Homo sapiens
MSKRHRLDLGEDYPSGKKRAGTDGKDRDRDRDREDRSKDRDRERDRGDREREREKEKEKELRASTNAMLISAGLPPLKASHSAHSTHSAHSTHSTHSAHSTHAGHAGHTSLPQCINPFTNLPHTPRYYDILKKRLQLPVWEYKDRFTDILVRHQSFVLVGETGSGKTTQIPQWCVEYMRSLPGPKRGVACTQPRRVAAMSVAQRVADEMDVMLGQEVGYSIRFEDCSSAKTILKYMTDGMLLREAMNDPLLERYGVIILDEAHERTLATDILMGVLKEVVRQRSDLKVIVMSATLDAGKFQIYFDNCPLLTIPGRTHPVEIFYTPEPERDYLEAAIRTVIQIHMCEEEEGDLLLFLTGQEEIDEACKRIKREVDDLGPEVGDIKIIPLYSTLPPQQQQRIFEPPPPKKQNGAIGRKVVVSTNIAETSLTIDGVVFVIDPGFAKQKVYNPRIRVESLLVTAISKASAQQRAGRAGRTRPGKCFRLYTEKAYKTEMQDNTYPEILRSNLGSVVLQLKKLGIDDLVHFDFMDPPAPETLMRALELLNYLAALNDDGDLTELGSMMAEFPLDPQLAKMVIASCDYNCSNEVLSITAMLSVPQCFVRPTEAKKAADEAKMRFAHIDGDHLTLLNVYHAFKQNHESVQWCYDNFINYRSLMSADNVRQQLSRIMDRFNLPRRSTDFTSRDYYINIRKALVTGYFMQVAHLERTGHYLTVKDNQVVQLHPSTVLDHKPEWVLYNEFVLTTKNYIRTCTDIKPEWLVKIAPQYYDMSNFPQCEAKRQLDRIIAKLQSKEYSQY

SEQ ID NO: 25378 - protein, 4069 aa, Homo sapiens
MASRDSNHAGESFLGSDGDEEATRELETEEESEGEEDETAAESEEEPDSRLSDQDEEGKIKQEYIISDPSFSMVTVQREDSGITWETNSSRSSTPWASEESQTSGVCSREGSTVNSPPGNVSFIVDEVKKVRKRTHKSKHGSPSLRRKGNRKRNSFESQDVPTNKKGSPLTSASQVLTTEKEKSYTGIYDKARKKKTTSNTPPITGAIYKEHKPLVLRPVYIGTVQYKIKMFNSVKEELIPLQFYGTLPKGYVIKEIHYRKGKDASISLEPDLDNSGSNTVSKTRKLVAQSIEDKVKEVFPPWRGALSKGSESLTLMFSHEDQKKIYADSPLNATSALEHTVPSYSSSGRAEQGIQLRHSQSVPQQPEDEAKPHEVEPPSVTPDTPATMFLRTTKEECELASPGTAASENDSSVSPSFANEVKKEDVYSAHHSISLEAASPGLAASTQDGLDPDQEQPDLTSIERAEPVSAKLTPTHPSVKGEKEENMLEPSISLSEPLMLEEPEKEEIETSLPIAITPEPEDSNLVEEEIVELDYPESPLVSEKPFPPHMSPEVEHKEEELILPLLAASSPEHVALSEEEREEIASVSTGSAFVSEYSVPQDLNHELQEQEGEPVPPSNVEAIAEHAVLSEEENEEFEAYSPAAAPTSESSLSPSTTEKTSENQSPLFSTVTPEYMVLSGDEASESGCYTPDSTSASEYSVPSLATKESLKKTIDRKSPLILKGVSEYMIPSEEKEDTGSFTPAVAPASEPSLSPSTTEKTSECQSPLPSTATSEHVVPSEGEDLGSERFTPDSKLISKYAAPLNATQESQKKIINEASQFKPKGISEHTVLSVDGKEVIGPSSPDLVVASEHSFPPHTTEMTSECQAPPLSATPSEYVVLSDEEAVELERYTPSSTSASEFSVPPYATPEAQEEEIVHRSLNLKGASSPMNLSEEDQEDIGPFSPDSAFVSEFSFPPYATQEAEKREFECDSPICLTSPSEHTILSDEDTEEAELFSPDSASQVSIPPFRISETEKNELEPDSLLTAVSASGYSCFSEADEEDIGSTAATPVSEQFSSSQKQKAETFPLMSPLEDLSLPPSTDKSEKAEIKPEIPTTSTSVSEYLILAQKQKTQAYLEPESEDLIPSHLTSEVEKGEREASSSVAAIPAALPAQSSIVKEETKPASPHSVLPDSVPAIKKEQEPTAALTLKAADEQMALSKVRKEEIVPDSQEATAHVSQDQKMEPQPPNVPESEMKYSVLPDMVDEPKKGVKPKLVLNVTSELEQRKLSKNEPEVIKPYSPLKETSLSGPEALSAVKMEMKHDSKITTTPIVLHSASSGVEKQVEHGPPALAFSALSEEIKKEIEPSSSTTTASVTKLDSNLTRAVKEEIPTDSSLITPVDRPVLTKVGKGELGSGLPPLVTSADEHSVLAEEDKVAIKGASPIETSSKHLAWSEAEKEIKFDSLPSVSSIAEHSVLSEVEAKEVKAGLPVIKTSSSQHSDKSEEARVEDKQDLLFSTVCDSERLVSSQKKSLMSTSEVLEPEHELPLSLWGEIKKKETELPSSQNVSPASKHIIPKGKDEETASSSPELENLASGLAPTLLLLSDDKNKPAVEVSSTAQGDFPSEKQDVALAELSLEPEKKDKPHQPLELPNAGSEFSSDLGRQSGSIGTKQAKSPITETEDSVLEKGPAELRSREGKEENRELCASSTMPAISELSSLLREESQNEEIKPFSPKIISLESKEPPASVAEGGNPEEFQPFTFSLKGLSEEVSHPADFKKGGNQEIGPLPPTGNLKAQVMGDILDKLSEETGHPNSSQVLQSITEPSKIAPSDLLVEQKKTEKALHSDQTVKLPDVSTSSEDKQDLGIKQFSLMRENLPLEQSKSFMTTKPADVKETKMEEFFISPKDENWMLGKPENVASQHEQRIAGSVQLDSSSSNELRPGQLKAAVSSKDHTCEVRKQVLPHSAEESHLSSQEAVSALDTSSGNTETLSSKSYSSEEVKLAEEPKSLVLAGNVERNIAEGKEIHSLMESESLLLEKANTELSWPSKEDSQEKIKLPPERFFQKPVSGLSVEQVKSETISSSVKTAHFPAEGVEPALGNEKEAHRSTPPFPEEKPLEESKMVQSKVIDDADEGKKPSPEVKIPTQRKPISSIHAREPQSPESPEVTQNPPTQPKVAKPDLPEEKGKKGISSFKSWMSSLFFGSSTPDNKVAEQEDLETQPSPSVEKAVTVIDPEGTIPTNFNVAEKPADHSLSEVKLKTADEPRGTLVKSGDGQNVKEKSMILSNVEDLQQPKFISEVSREDYGKKEISGDSEEMNINSVVTSADGENLEIQSYSLIGEKLVMEEAKTIVPPHVTDSKRVQKPAIAPPSKWNISIFKEEPRSDQKQKSLLSFDVVDKVPQQPKSASSNFASKNITKESEKPESIILPVEESKGSLIDFSEDRLKKEMQNPTSLKISEEETKLRSVSPTEKKDNLENRSYTLAEKKVLAEKQNSVAPLELRDSNEIGKTQITLGSRSTELKESKADAMPQHFYQNEDYNERPKIIVGSEKEKGEEKENQVYVLSEGKKQQEHQPYSVNVAESMSRESDISLGHSLGETQSFSLVKATSVTEKSEAMLAEAHPEIREAKAVGTQPHPLEESKVLVEKTKTFLPVALSCRDEIENHSLSQEGNLVLEKSSRDMPDHSEEKEQFRESELSKGGSVDITKETVKQGFQEKAVGTQPRPLEESKVLVEKTKTFLPVVLSCHDEIENHSLSQEGNLVLEKSSRDMPDHSEEKEQFKESELWKGGSVDITKESMKEGFPSKESERTLARPFDETKSSETPPYLLSPVKPQTLASGASPEINAVKKKEMPRSELTPERHTVHTIQTSKDDTSDVPKQSVLVSKHHLEAAEDTRVKEPLSSAKSNYAQFISNTSASNADKMVSNKEMPKEPEDTYAKGEDFTVTSKPAGLSEDQKTAFSIISEGCEILNIHAPAFISSIDQEESEQMQDKLEYLEEKASFKTIPLPDDSETVACHKTLKSRLEDEKVTPLKENKQKETHKTKEEISTDSETDLSFIQPTIPSEEDYFEKYTLIDYNISPDPEKQKAPQKLNVEEKLSKEVTEETISFPVSSVESALEHEYDLVKLDESFYGPEKGHNILSHPETQSQNSADRNVSKDTKRDVDSKSPGMPLFEAEEGVLSRTQIFPTTIKVIDPEFLEEPPALAFLYKDLYEEAVGEKKKEEETASEGDSVNSEASFPSRNSDTDDGTGIYFEKYILKDDILHDTSLTQKDQGQGLEEKRVGKDDSYQPIAAEGEIWGKFGTICREKSLEEQKGVYGEGESVDHVETVGNVAMQKKAPITEDVRVATQKISYAVPFEDTHHVLERADEAGSHGNEVGNASPEVNLNVPVQVSFPEEEFASGATHVQETSLEEPKILVPPEPSEERLRNSPVQDEYEFTESLHNEVVPQDILSEELSSESTPEDVLSQGKESFEHISENEFASEAEQSTPAEQKELGSERKEEDQLSSEVVTEKAQKELKKSQIDTYCYTCKCPISATDKVFGTHKDHEVSTLDTAISAVKVQLAEFLENLQEKSLRIEAFVSEIESFFNTIEENCSKNEKRLEEQNEEMMKKVLAQYDEKAQSFEEVKKKKMEFLHEQMVHFLQSMDTAKDTLETIVREAEELDEAVFLTSFEEINERLLSAMESTASLEKMPAAFSLFEHYDDSSARSDQMLKQVAVPQPPRLEPQEPNSATSTTIAVYWSMNKEDVIDSFQVYCMEEPQDDQEVNELVEEYRLTVKESYCIFEDLEPDRCYQVWVMAVNFTGCSLPSERAIFRTAPSTPVIRAEDCTVCWNTATIRWRPTTPEATETYTLEYCRQHSPEGEGLRSFSGIKGLQLKVNLQPNDNYFFYVRAINAFGTSEQSEAALISTRGTRFLLLRETAHPALHISSSGTVISFGERRRLTEIPSVLGEELPSCGQHYWETTVTDCPAYRLGICSSSAVQAGALGQGETSWYMHCSEPQRYTFFYSGIVSDVHVTERPARVGILLDYNNQRLIFINAESEQLLFIIRHRFNEGVHPAFALEKPGKCTLHLGIEPPDSVRHK

SEQ ID NO: 25379 - protein, 239 aa, Homo sapiens
MAYQSLRLEYLQIPPVSRAYTTACVLTTAAVQLELITPFQLYFNPELIFKHFQIWRLITNFLFFGPVGFNFLFNMIFLYRYCRMLEEGSFRGRTADFVFMFLFGGFLMTLFGLFVSLVFLGQAFTIMLVYVWSRRNPYVRMNFFGLLNFQAPFLPWVLMGFSLLLGNSIIVDLLGIAVGHIYFFLEDVFPNQPGGIRILKTPSILKAIFDTPDEDPNYNPLPEERPGGFAWGEGQRLGG

SEQ ID NO: 25380 - protein, 1369 aa, Homo sapiens
MGGKNKKHKAPAAAVVRAAVSASRAKSAEAGIAGEAQSKKPVSRPATAAAAAAGSREPRVKQGPKIYSFNSTNDSSGPANLDKSILKVVINNKLEQRIIGVINEHKKQNNDKGMISGRLTAKKLQDLYMALQAFSFKTKDIEDAMTNTLLYGGDLHSALDWLCLNLSDDALPEGFSQEFEEQQPKSRPKFQSPQIQATISPPLQPKTKTYEEDPKSKPKKEEKNMEVNMKEWILRYAEQQNEEEKNENSKSLEEEEKFDPNERYLHLAAKLLDAKEQAATFKLEKNKQGQKEAQEKIRKFQREMETLEDHPVFNPAMKISHQQNERKKPPVATEGESALNFNLFEKSAAATEEEKDKKKEPHDVRNFDYTARSWTGKSPKQFLIDWVRKNLPKSPNPSFEKVPVGRYWKCRVRVIKSEDDVLVVCPTILTEDGMQAQHLGATLALYRLVKGQSVHQLLPPTYRDVWLEWSDAEKKREELNKMETNKPRDLFIAKLLNKLKQQQQQQQQHSENKRENSEDPEESWENLVSDEDFSALSLESANVEDLEPVRNLFRKLQSTPKYQKLLKERQQLPVFKHRDSIVETLKRHRVVVVAGETGSGKSTQVPHFLLEDLLLNEWEASKCNIVCTQPRRISAVSLANRVCDELGCENGPGGRNSLCGYQIRMESRACESTRLLYCTTGVLLRKLQEDGLLSNVSHVIVDEVHERSVQSDFLLIILKEILQKRSDLHLILMSATVDSEKFSTYFTHCPILRISGRSYPVEVFHLEDIIEETGFVLEKDSEYCQKFLEEEEEVTINVTSKAGGIKKYQEYIPVQTGAHADLNPFYQKYSSRTQHAILYMNPHKINLDLILELLAYLDKSPQFRNIEGAVLIFLPGLAHIQQLYDLLSNDRRFYSERYKVIALHSILSTQDQAAAFTLPPPGVRKIVLATNIAETGITIPDVVFVIDTGRTKENKYHESSQMSSLVETFVSKASALQRQGRAGRVRDGFCFRMYTRERFEGFMDYSVPEILRVPLEELCLHIMKCNLGSPEDFLSKALDPPQLQVISNAMNLLRKIGACELNEPKLTPLGQHLAALPVNVKIGKMLIFGAIFGCLDPVATLAAVMTEKSPFTTPIGRKDEADLAKSALAMADSDHLTIYNAYLGWKKARQEGGYRSEITYCRRNFLNRTSLLTLEDVKQELIKLVKAAGFSSSTTSTSWEGNRASQTLSFQEIALLKAVLVAGLYDNVGKIIYTKSVDVTEKLACIVETAQGKAQVHPSSVNRDLQTHGWLLYQEKIRYARVYLRETTLITPFPVLLFGGDIEVQHRERLLSIDGWIYFQAPVKIAVIFKQLRVLIDSVLRKKLENPKMSLENDKILQIITELIKTENN

SEQ ID NO: 25381 - protein, 201 aa, Homo sapiens
MDLSLLWVLLPLVTMAWGQYGDYGYPYQQYHDYSDDGWVNLNRQGFSYQCPQGQVIVAVRSIFSKKEGSDRQWNYACMPTPQSLGEPTECWWEEINRAGMEWYQTCSNNGLVAGFQSRYFESVLDREWQFYCCRYSKRCPYSCWLTTEYPGHYGEEMDMISYNYDYYIRGATTTFSAVERDRQWKFIMCRMTEYDCEFANV

SEQ ID NO: 25382 - protein, 1194 aa, Homo sapiens
MFSLDSFRKDRAQHRQRQCKLPPPRLPPMCVNPTPGGTISRASRDLLKEFPQPKNLLNSVIGRALGISHAKDKLVYVHTNGPKKKKVTLHIKWPKSVEVEGYGSKKIDAERQAAAAACQLFKGWGLLGPRNELFDAAKYRVLADRFGSPADSWWRPEPTMPPTSWRQLNPESIRPGGPGGLSRSLGREEEEDEEEELEEGTIDVTDFLSMTQQDSHAPLRDSRGSSFEMTDDDSAIRALTQFPLPKNLLAKVIQIATSSSTAKNLMQFHTVGTKTKLSTLTLLWPCPMTFVAKGRRKAEAENKAAALACKKLKSLGLVDRNNEPLTHAMYNLASLRELGETQRRPCTIQVPEPILRKIETFLNHYPVESSWIAPELRLQSDDILPLGKDSGPLSDPITGKPYVPLLEAEEVRLSQSLLELWRRRGPVWQEAPQLPVDPHRDTILNAIEQHPVVVISGDTGCGKTTRIPQLLLERYVTEGRGARCNVIITQPRRISAVSVAQRVSHELGPSLRRNVGFQVRLESKPPSRGGALLFCTVGILLRKLQSNPSLEGVSHVIVDEVHERDVNTDFLLILLKGLQRLNPALRLVLMSATGDNERFSRYFGGCPVIKVPGFMYPVKEHYLEDILAKLGKHQYLHRHRHHESEDECALDLDLVTDLVLHIDARGEPGGILCFLPGWQEIKGVQQRLQEALGMHESKYLILPVHSNIPMMDQKAIFQQPPVGVRKIVLATNIAETSITINDIVHVVDSGLHKEERYDLKTKVSCLETVWVSRANVIQRRGRAGRCQSGFAYHLFPRSRLEKMVPFQVPEILRTPLENLVLQAKIHMPEKTAVEFLSKAVDSPNIKAVDEAVILLQEIGVLDQREYLTTLGQRLAHISTDPRLAKAIVLAAIFRCLHPLLVVVSCLTRDPFSSSLQNRAEVDKVKALLSHDSGSDHLAFVRAVAGWEEVLRWQDRSSRENYLEENLLYAPSLRFIHGLIKQFSENIYEAFLVGKPSDCTLASAQCNEYSEEEELVKGVLMAGLYPNLIQVRQGKVTRQGKFKPNSVTYRTKSGNILLHKSTINREATRLRSRWLTYFMAVKSNGSVFVRDSSQVHPLAVLLLTDGDVHIRDDGRRATISLSDSDLLRLEGDSRTVRLLKELRRALGRMVERSLRSELAALPPSVQEEHGQLLALLAELLRGPCGSFDVRKTADD

SEQ ID NO: 25383 - protein, 1222 aa, Homo sapiens
MAAARRLMALAAGISPRLQPLGPRAAGRQGRSRGFSSSCAHPDHTKEAAEAESGMAPGGPGEGDGSLVNASRDLLKEFPQPKNLLNSVIGRALGISHAKDKLVYVHTNGPKKKKVTLHIKWPKSVEVEGYGSKKIDAERQAAAAACQLFKGWGLLGPRNELFDAAKYRVLADRFGSPADSWWRPEPTMPPTSWRQLNPESIRPGGPGGLSRSLGREEEEDEEEELEEGTIDVTDFLSMTQQDSHAPLRDSRGSSFEMTDDDSAIRALTQFPLPKNLLAKVIQIATSSSTAKNLMQFHTVGTKTKLSTLTLLWPCPMTFVAKGRRKAEAENKAAALACKKLKSLGLVDRNNEPLTHAMYNLASLRELGETQRRPCTIQVPEPILRKIETFLNHYPVESSWIAPELRLQSDDILPLGKDSGPLSDPITGKPYVPLLEAEEVRLSQSLLELWRRRGPVWQEAPQLPVDPHRDTILNAIEQHPVVVISGDTGCGKTTRIPQLLLERYVTEGRGARCNVIITQPRRISAVSVAQRVSHELGPSLRRNVGFQVRLESKPPSRGGALLFCTVGILLRKLQSNPSLEGVSHVIVDEVHERDVNTDFLLILLKGLQRLNPALRLVLMSATGDNERFSRYFGGCPVIKVPGFMYPVKEHYLEDILAKLGKHQYLHRHRHHESEDECALDLDLVTDLVLHIDARGEPGGILCFLPGWQEIKGVQQRLQEALGMHESKYLILPVHSNIPMMDQKAIFQQPPVGVRKIVLATNIAETSITINDIVHVVDSGLHKEERYDLKTKVSCLETVWVSRANVIQRRGRAGRCQSGFAYHLFPRSRLEKMVPFQVPEILRTPLENLVLQAKIHMPEKTAVEFLSKAVDSPNIKAVDEAVILLQEIGVLDQREYLTTLGQRLAHISTDPRLAKAIVLAAIFRCLHPLLVVVSCLTRDPFSSSLQNRAEVDKVKALLSHDSGSDHLAFVRAVAGWEEVLRWQDRSSRENYLEENLLYAPSLRFIHGLIKQFSENIYEAFLVGKPSDCTLASAQCNEYSEEEELVKGVLMAGLYPNLIQVRQGKVTRQGKFKPNSVTYRTKSGNILLHKSTINREATRLRSRWLTYFMAVKSNGSVFVRDSSQVHPLAVLLLTDGDVHIRDDGRRATISLSDSDLLRLEGDSRTVRLLKELRRALGRMVERSLRSELAALPPSVQEEHGQLLALLAELLRGPCGSFDVRKTADD

SEQ ID NO: 25384 - protein, 1155 aa, Homo sapiens
MAASRDLLKEFPQPKNLLNSVIGRALGISHAKDKLVYVHTNGPKKKKVTLHIKWPKSVEVEGYGSKKIDAERQAAAAACQLFKGWGLLGPRNELFDAAKYRVLADRFGSPADSWWRPEPTMPPTSWRQLNPESIRPGGPGGLSRSLGREEEEDEEEELEEGTIDVTDFLSMTQQDSHAPLRDSRGSSFEMTDDDSAIRALTQFPLPKNLLAKVIQIATSSSTAKNLMQFHTVGTKTKLSTLTLLWPCPMTFVAKGRRKAEAENKAAALACKKLKSLGLVDRNNEPLTHAMYNLASLRELGETQRRPCTIQVPEPILRKIETFLNHYPVESSWIAPELRLQSDDILPLGKDSGPLSDPITGKPYVPLLEAEEVRLSQSLLELWRRRGPVWQEAPQLPVDPHRDTILNAIEQHPVVVISGDTGCGKTTRIPQLLLERYVTEGRGARCNVIITQPRRISAVSVAQRVSHELGPSLRRNVGFQVRLESKPPSRGGALLFCTVGILLRKLQSNPSLEGVSHVIVDEVHERDVNTDFLLILLKGLQRLNPALRLVLMSATGDNERFSRYFGGCPVIKVPGFMYPVKEHYLEDILAKLGKHQYLHRHRHHESEDECALDLDLVTDLVLHIDARGEPGGILCFLPGWQEIKGVQQRLQEALGMHESKYLILPVHSNIPMMDQKAIFQQPPVGVRKIVLATNIAETSITINDIVHVVDSGLHKEERYDLKTKVSCLETVWVSRANVIQRRGRAGRCQSGFAYHLFPRSRLEKMVPFQVPEILRTPLENLVLQAKIHMPEKTAVEFLSKAVDSPNIKAVDEAVILLQEIGVLDQREYLTTLGQRLAHISTDPRLAKAIVLAAIFRCLHPLLVVVSCLTRDPFSSSLQNRAEVDKVKALLSHDSGSDHLAFVRAVAGWEEVLRWQDRSSRENYLEENLLYAPSLRFIHGLIKQFSENIYEAFLVGKPSDCTLASAQCNEYSEEEELVKGVLMAGLYPNLIQVRQGKVTRQGKFKPNSVTYRTKSGNILLHKSTINREATRLRSRWLTYFMAVKSNGSVFVRDSSQVHPLAVLLLTDGDVHIRDDGRRATISLSDSDLLRLEGDSRTVRLLKELRRALGRMVERSLRSELAALPPSVQEEHGQLLALLAELLRGPCGSFDVRKTADD

SEQ ID NO: 25385 - protein, 524 aa, Homo sapiens
MKEPRIFPRERPTPWTRAPLPPRGRLDGSLGPQGGPVLNTGHPLGVNSDPFLMAAGSLGGNLTPFPRNPSPFPASSGSLASNPAPFPAGARDPSMASFPRGMNPTGTGAVSFPRPGGLLGPGPGPGPTLNPRTGALPGPGPLSNPRLGGLPGPGPMSNPRAGGLLGAGPDPRGGGPMGPGSGPNLRAGVLLTSGNGPPNPRPVGLGPGPNPNLRSGFLGTNPAPRSGVFPGPGLGPNPRPSGLGPGPNLDARAGGLLGTGSGLNLRMAGPQGLDLAPILRAAGLLGANSASFSQASGNMGTSPSSMARVPGPMGPNSGPSSRGIGLPGPNPSPMSRAPGPIGPNSAHFSRPVGPMGVNANPFPRGAGSSAFSQSSGTLASNPATFQRSAGLQGSNPTIFPRASGPLGPNPANFPRATGLQGPSPTTFPRSTGPLGPGQVTFPRPAAGHLGPSPAGPVGINPAPFTRPTGTLGLNPASFPRMNGPAGKSFVPFPRVGSLPGTNPAAFPRPGGPMAAMYPNGMLPP

SEQ ID NO: 25386 - protein, 743 aa, Homo sapiens
MEEEGLECPNSSSEKRYFPESLDSSDGDEEEVLACEDLELNPFDGLPYSSRYYKLLKEREDLPIWKEKYSFMENLLQNQIVIVSGDAKCGKSAQVPQWCAEYCLSIHYQHGGVICTQVHKQTVVQLALRVADEMDVNIGHEVGYVIPFENCCTNETILRYCTDDMLQREMMSNPFLGSYGVIILDDIHERSIATDVLLGLLKDVLLARPELKLIINSSPHLISKLNSYYGNVPVIEVKNKHPVEVVYLSEAQKDSFESILRLIFEIHHSGEKGDIVVFLACEQDIEKVCETVYQGSNLNPDLGELVVVPLYPKEKCSLFKPLDETEKRCQVYQRRVVLTTSSGEFLIWSNSVRFVIDVGVERRKVYNPRIRANSLVMQPISQSQAEIRKQILGSSSSGKFFCLYTEEFASKDMTPLKPAEMQEANLTSMVLFMKRIDIAGLGHCDFMNRPAPESLMQALEDLDYLAALDNDGNLSEFGIIMSEFPLDPQLSKSILASCEFDCVDEVLTIAAMVTAPNCFSHVPHGAEEAALTCWKTFLHPEGDHFTLISIYKAYQDTTLNSSSEYCVEKWCRDYFLNCSALRMADVIRAELLEIIKRIELPYAEPAFGSKENTLNIKKALLSGYFMQIARDVDGSGNYLMLTHKQVAQLHPLSGYSITKKMPEWVLFHKFSISENNYIRITSEISPELFMQLVPQYYFSNLPPSESKDILQQVVDHLSPVSTMNKEQQMCETCPETEQRCTLQ

SEQ ID NO: 25387 - protein, 662 aa, Homo sapiens
MEEEGLECPNSSSEKRYFPESLDSSDGDEEEVLACEDLELNPFDGLPYSSRYYKLLKEREDLPIWKEKYSFMENLLQNQIVIVSGDAKCGKSAQVPQWCAEYCLSIHYQHGGVICTQVHKQTVVQLALRVADEMDVNIGHEVGYVIPFENCCTNETILRYCTDDMLQREMMSNPFLGSYGVIILDDIHERSIATDVLLGLLKDVLLARPELKLIINSSPHLISKLNSYYGNVPVIEVKNKHPVEVVYLSEAQKDSFESILRLIFEIHHSGEKGDIVVFLACEQVYNPRIRANSLVMQPISQSQAEIRKQILGSSSSGKFFCLYTEEFASKDMTPLKPAEMQEANLTSMVLFMKRIDIAGLGHCDFMNRPAPESLMQALEDLDYLAALDNDGNLSEFGIIMSEFPLDPQLSKSILASCEFDCVDEVLTIAAMVTAPNCFSHVPHGAEEAALTCWKTFLHPEGDHFTLISIYKAYQDTTLNSSSEYCVEKWCRDYFLNCSALRMADVIRAELLEIIKRIELPYAEPAFGSKENTLNIKKALLSGYFMQIARDVDGSGNYLMLTHKQVAQLHPLSGYSITKKMPEWVLFHKFSISENNYIRITSEISPELFMQLVPQYYFSNLPPSESKDILQQVVDHLSPVSTMNKEQQMCETCPETEQRCTLQ

SEQ ID NO: 25388 - protein, 707 aa, Homo sapiens
MPEEAGFPPAKRFRPGSGPPSRAGSFPPGRQVVMLLTAGSGGRGGGGGRRQQPPLAQPSASPYPEAVELQRRSLPIFQARGQLLAQLRNLDNAVLIGETGSGKTTQIPQYLYEGGISRQGIIAVTQPRRVAAISLATRVSDEKRTELGKLVGYTVRFDDVTSEDTRIKFLTDGMLLREAISDSLLRKYSCVILDEAHERTIHTDVLFGVVKAAQKRRKELGKLPLKVIVMSATMDVDLFSQYFNGAPVLYLEGRQHPIQVFYTKQPQNDYLHAALVSVFQIHQEAPSSQDILVFLTGQEEIEAMSKTCRDIAKHLPDGCPAMLVLPLYASLPYAQQLRVFQGAPKGYRKVIISTNIAETSITITGIKYVVDTGMVKAKKYNPDSGLEVLAVQRVSKTQAWQRTGRAGREDSGICYRLYTEDEFEKFDKMTVPEIQRCNLASVMLQLLAMKVPNVLTFDFMSKPSPDHIQAAIAQLDLLGALEHKDDQLTLTPMGRKMAAFPLEPKFAKTILMSPKFHCTEEILTIVSLLSVDSVLHNPPSRREEVQGVRKKFISSEGDHMTLLNIYRTFKNLGGNKDWCKENFVNSKNMTLVAEVRAQLRDICLKMSMPIASSRGDVESVRRCLAHSLFMSTAELQPDGTYATTDTHQPVAIHPSSVLFHCKPACVVYTELLYTNKCYMRDLCVIDAQWLYEAAPEYFRRKLRTARN

SEQ ID NO: 25389 - protein, 534 aa, Homo sapiens
MLLREAISDSLLRKYSCVILDEAHERTIHTDVLFGVVKAAQKRRKELGKLPLKVIVMSATMDVDLFSQYFNGAPVLYLEGRQHPIQVFYTKQPQNDYLHAALVSVFQIHQEAPSSQDILVFLTGQEEIEAMSKTCRDIAKHLPDGCPAMLVLPLYASLPYAQQLRVFQGAPKGYRKVIISTNIAETSITITGIKYVVDTGMVKAKKYNPDSGLEVLAVQRVSKTQAWQRTGRAGREDSGICYRLYTEDEFEKFDKMTVPEIQRCNLASVMLQLLAMKVPNVLTFDFMSKPSPDHIQAAIAQLDLLGALEHKDDQLTLTPMGRKMAAFPLEPKFAKTILMSPKFHCTEEILTIVSLLSVDSVLHNPPSRREEVQGVRKKFISSEGDHMTLLNIYRTFKNLGGNKDWCKENFVNSKNMTLVAEVRAQLRDICLKMSMPIASSRGDVESVRRCLAHSLFMSTAELQPDGTYATTDTHQPVAIHPSSVLFHCKPACVVYTELLYTNKCYMRDLCVIDAQWLYEAAPEYFRRKLRTARN

SEQ ID NO: 25390 - protein, 1143 aa, Homo sapiens
MPPPRTREGRDRRDHHRAPSEEEALEKWDWNCPETRRLLEDAFFREEDYIRQGSEECQKFWTFFERLQRFQNLKTSRKEEKDPGQPKHSIPALADLPRTYDPRYRINLSVLGPATRGSQGLGRHLPAERVAEFRRALLHYLDFGQKQAFGRLAKLQRERAALPIAQYGNRILQTLKEHQVVVVAGDTGCGKSTQVPQYLLAAGFSHVACTQPRRIACISLAKRVGFESLSQYGSQVGYQIRFESTRSAATKIVFLTVGLLLRQIQREPSLPQYEVLIVDEVHERHLHNDFLLGVLQRLLPTRPDLKVILMSATINISLFSSYFSNAPVVQVPGRLFPITVVYQPQEAEPTTSKSEKLDPRPFLRVLESIDHKYPPEERGDLLVFLSGMAEISAVLEAAQTYASHTQRWVVLPLHSALSVADQDKVFDVAPPGVRKCILSTNIAETSVTIDGIRFVVDSGKVKEMSYDPQAKLQRLQEFWISQASAEQRKGRAGRTGPGVCFRLYAESDYDAFAPYPVPEIRRVALDSLVLQMKSMSVGDPRTFPFIEPPPPASLETAILYLRDQGALDSSEALTPIGSLLAQLPVDVVIGKMLILGSMFSLVEPVLTIAAALSVQSPFTRSAQSSPECAAARRPLESDQGDPFTLFNVFNAWVQVKSERSRNSRKWCRRRGIEEHRLYEMANLRRQFKELLEDHGLLAGAQAAQVGDSYSRLQQRRERRALHQLKRQHEEGAGRRRKVLRLQEEQDGGSSDEDRAGPAPPGASDGVDIQDVKFKLRHDLAQLQAAASSAQDLSREQLALLKLVLGRGLYPQLAVPDAFNSSRKDSDQIFHTQAKQGAVLHPTCVFAGSPEVLHAQELEASNCDGSRDDKDKMSSKHQLLSFVSLLETNKPYLVNCVRIPALQSLLLFSRSLDTNGDCSRLVADGWLELQLADSESAIRLLAASLRLRARWESALDRQLAHQAQQQLEEEEEDTPVSPKEVATLSKELLQFTASKIPYSLRRLTGLEVQNMYVGPQTIPATPHLPGLFGSSTLSPHPTKGGYAVTDFLTYNCLTNDTDLYSDCLRTFWTCPHCGLHAPLTPLERIAHENTCPQAPQDGPPGAEEAALETLQKTSVLQRPYHCEACGKDFLFTPTEVLRHRKQHV

SEQ ID NO: 25391 - protein, 929 aa, Homo sapiens
MEGDGVPWGSEPVSGPGPGGGGMIRELCRGFGRYRRYLGRLRQNLRETQKFFRDIKCSHNHTCLSSLTGGGGAERGPAGDVAETGLQAGQLSCISFPPKEEKYLQQIVDCLPCILILGQDCNVKCQLLNLLLGVQVLPTTKLGSEESCKLRRLRFTYGTQTRVSLALPGQYELVHTLVAHQGNWETIPEEDLEVQENNEDAAHVLAELEVTMHHALLQEVDVVVAPCQGLRPTVDVLGDLVNDFLPVITYALHKDELSERDEQELQEIRKYFSFPVFFFKVPKLGSEIIDSSTRRMESERSPLYRQLIDLGYLSSSHWNCGAPGQDTKAQSMLVEQSEKLRHLSTFSHQVLQTRLVDAAKALNLVHCHCLDIFINQAFDMQRDLQITPKRLEYTRKKENELYESLMNIANRKQEEMKDMIVETLNTMKEELLDDATNMEFKDVIVPENGEPVGTREIKCCIRQIQELIISRLNQAVANKLISSVDYLRESFVGTLERCLQSLEKSQDVSVHITSNYLKQILNAAYHVEVTFHSGSSVTRMLWEQIKQIIQRITWVSPPAITLEWKRKVAQEAIESLSASKLAKSICSQFRTRLNSSHEAFAASLRQLEAGHSGRLEKTEDLWLRVRKDHAPRLARLSLESCSLQDVLLHRKPKLGQELGRGQYGVVYLCDNWGGHFPCALKSVVPPDEKHWNDLALEFHYMRSLPKHERLVDLHGSVIDYNYGGGSSIAVLLIMERLHRDLYTGLKAGLTLETRLQIALDVVEGIRFLHSQGLVHRDIKLKNVLLDKQNRAKITDLGFCKPEAMMSGSIVGTPIHMAPELFTGKYDNSVDVYAFGILFWYICSGSVKLPEAFERCASKDHLWNNVRRGARPERLPVFDEECWQLMEACWDGDPLKRPLLGIVQPMLQGIMNRLCKSNSEQPNRGLDDST

SEQ ID NO: 25392 - protein, 884 aa, Homo sapiens
MEGDGVPWGSEPVSGPGPGGGGMIRELCRGFGRYRRYLGRLRQNLRETQKFFRDIKCSHNHTCLSSLTGGGGAERGPAGDVAETGLQAGQLSCISFPPKEEKYLQQIVDCLPCILILGQDCNVKCQLLNLLLGVQVLPTTKLGSEESCKLRRLRFTYGTQTRVSLALPGQYELVHTLVAHQGNWETIPEEDLEVQENNEDAAHVLAELEVTMHHALLQEVDVVVAPCQGLRPTVDVLGDLVNDFLPVITYALHKDELSERDEQELQEIRKYFSFPVFFFKVPKLGSEIIDSSTRRMESERSPLYRQLIDLGYLSSSHWNCGAPGQDTKAQSMLVEQSEKLRHLSTFSHQVLQTRLVDAAKALNLVHCHCLDIFINQAFDMQRDLQITPKRLEYTRKKENELYESLMNIANRKQEEMKDMIVETLNTMKEELLDDATNMEFKDVIVPENGEPVGTREIKCCIRQIQELIISRLNQAVANKLISSVDYLRESFVGTLERCLQSLEKSQDVSVHITSNYLKQILNAAYHVEVTFHSGSSVTRMLWEQIKQIIQRITWVSPPAITLEWKRKVAQEAIESLSASKLAKSICSQFRTRLNSSHEAFAASLRQLEAGHSGRLEKTEDLWLRVRKDHAPRLARLSLESCSLQDVLLHRKPKLGQELGRGQYGVVYLCDNWGGHFPCALKSVVPPDEKHWNDLALEFHYMRSLPKHERLVDLHGSVIDYNYGGGSSIAVLLIMERLHRDLYTGLKAGLTLETRLQIALDVVEGIRFLHSQGLVHRDIKLKNVLLDKQNRAKITDLGFCKPEAMMSGSIVGTPIHMAPELFTGARPERLPVFDEECWQLMEACWDGDPLKRPLLGIVQPMLQGIMNRLCKSNSEQPNRGLDDST

SEQ ID NO: 25393 - protein, 587 aa, Homo sapiens
MEGDGVPWGSEPVSGPGPGGGGMIRELCRGFGRYRRYLGRLRQNLRETQKFFRDIKCSHNHTCLSSLTGGGGAERGPAGDVAETGLQAGQLSCISFPPKEEKYLQQIVDCLPCILILGQDCNVKCQLLNLLLGVQVLPTTKLGSEESCKLRRLRFTYGTQTRVSLALPGQYELVHTLVAHQGNWETIPEEDLEVQENNEDAAHVLAELEVTMHHALLQEVDVVVAPCQGLRPTVDVLGDLVNDFLPVITYALHKDELSERDEQELQEIRKYFSFPVFFFKVPKLGSEIIDSSTRRMESERSPLYRQLIDLGYLSSSHWNCGAPGQDTKAQSMLVEQSEKLRHLSTFSHQVLQTRLVDAAKALNLVHCHCLDIFINQAFDMQRDLQITPKRLEYTRKKENELYESLMNIANRKQEEMKDMIVETLNTMKEELLDDATNMEFKDVIVPENGEITDLGFCKPEAMMSGSIVGTPIHMAPELFTGKYDNSVDVYAFGILFWYICSGSVKLPEAFERCASKDHLWNNVRRGARPERLPVFDEECWQLMEACWDGDPLKRPLLGIVQPMLQGIMNRLCKSNSEQPNRGLDDST

SEQ ID NO: 25394 - protein, 179 aa, Homo sapiens
MLWEQIKQIIQRITWVSPPAITLEWKRKVAQEAIESLSASKLAKSICSQFRTRLNSSHEAFAASLRQLEAGHSGRLEKTEDLWLRVRKDHAPRLARLSLESCSLQDVLLHRKPKLGQELGRGQYGVVYLCDNWGGHFPCALKSVVPPDEKHWNDLALEFHYMRWVLASFISMRKIQRRI

SEQ ID NO: 25395 - protein, 630 aa, Homo sapiens
MQGGNSGVRKREEEGDGAGAVAAPPAIDFPAEGPDPEYDESDVPAEIQVLKEPLQQPTFPFAVANQLLLVSLLEHLSHVHEPNPLRSRQVFKLLCQTFIKMGLLSSFTCSDEFSSLRLHHNRAITHLMRSAKERVRQDPCEDISRIQKIRSREVALEAQTSRYLNEFEELAILGKGGYGRVYKVRNKLDGQYYAIKKILIKGATKTVCMKVLREVKVLAGLQHPNIVGYHTAWIEHVHVIQPRADRAAIELPSLEVLSDQEEDREQCGVKNDESSSSSIIFAEPTPEKEKRFGESDTENQNNKSVKYTTNLVIRESGELESTLELQENGLAGLSASSIVEQQLPLRRNSHLEESFTSTEESSEENVNFLGQTEAQYHLMLHIQMQLCELSLWDWIVERNKRGREYVDESACPYVMANVATKIFQELVEGVFYIHNMGIVHRDLKPRNIFLHGPDQQVKIGDFGLACTDILQKNTDWTNRNGKRTPTHTSRVGTCLYASPEQLEGSEYDAKSDMYSLGVVLLELFQPFGTEMERAEVLTGLRTGQLPESLRKRCPVQAKYIQHLTRRNSSQRPSAIQLLQSELFQNSGNVNLTLQMKIIEQEKEIAELKKQLNLLSQDKGVRDDGKDGGVG

SEQ ID NO: 25396 - protein, 629 aa, Homo sapiens
MQGGNSGVRKREEEGDGAGAVAAPPAIDFPAEGPDPEYDESDVPAEIQVLKEPLQQPTFPFAVANQLLLVSLLEHLSHVHEPNPLRSRQVFKLLCQTFIKMGLLSSFTCSDEFSSLRLHHNRAITHLMRSAKERVRQDPCEDISRIQKIRSREVALEAQTSRYLNEFEELAILGKGGYGRVYKVRNKLDGQYYAIKKILIKGATKTVCMKVLREVKVLAGLQHPNIVGYHTAWIEHVHVIQPRDRAAIELPSLEVLSDQEEDREQCGVKNDESSSSSIIFAEPTPEKEKRFGESDTENQNNKSVKYTTNLVIRESGELESTLELQENGLAGLSASSIVEQQLPLRRNSHLEESFTSTEESSEENVNFLGQTEAQYHLMLHIQMQLCELSLWDWIVERNKRGREYVDESACPYVMANVATKIFQELVEGVFYIHNMGIVHRDLKPRNIFLHGPDQQVKIGDFGLACTDILQKNTDWTNRNGKRTPTHTSRVGTCLYASPEQLEGSEYDAKSDMYSLGVVLLELFQPFGTEMERAEVLTGLRTGQLPESLRKRCPVQAKYIQHLTRRNSSQRPSAIQLLQSELFQNSGNVNLTLQMKIIEQEKEIAELKKQLNLLSQDKGVRDDGKDGGVG

SEQ ID NO: 25397 - protein, 644 aa, Homo sapiens
MEETMKLATMEDTVEYCLFLIPDESRDSDKHKEILQKYIERIITRFAPMLVPYIWQNQPFNLKYKPGKGGVPAHMFGVTKFGDNIEDEWFIVYVIKQITKEFPELVARIEDNDGEFLLIEAADFLPKWLDPENSTNRVFFCHGELCIIPAPRKSGAESWLPTTPPTIPQALNIITAHSEKILASESIRAAVNRRIRGYPEKIQASLHRAHCFLPAGIVAVLKQRPRLVAAAVQAFYLRDPIDLRACRVFKTFLPETRIMTSVTFTKCLYAQLVQQRFVPDRRSGYRLPPPSDPQYRAHELGMKLAHGFEILCSKCSPHFSDCKKSLVTASPLWASFLESLKKNDYFKGLIEGSAQYRERLEMAENYFQLSVDWPESSLAMSPGEEILTLLQTIPFDIEDLKKEAANLPPEDDDQWLDLSPDQLDQLLQEAVGKKESESVSKEEKEQNYDLTEVSESMKAFISKVSTHKGAELPREPSEAPITFDADSFLNYFDKILGPRPNESDSDDLDDEDFECLDSDDDLDFETHEPGEEASLKGTLDNLKSYMAQMDQELAHTCISKSFTTRNQVEPVSQTTDNNSDEEDSGTGESVMAPVDVDLNLVSNILESYSSQAGLAGPASNLLQSMGVQLPDNTDHRPTSKPTKN

SEQ ID NO: 25398 - protein, 601 aa, Homo sapiens
MEETMKLATMEDTVEYCLFLIPDESRDSDKHKEILQKYIERIITRFAPMLVPYIWQNQPFNLKYKPGKGGVPAHMFGVTKFGDNIEDEWFIVYVIKQITKEFPELVARIEDNDGEFLLIEAADFLPKWLDPENSTNRVFFCHGELCIIPAPRKSGAESWLPTTPPTIPQALNIITAHSEKILASESIRAAVNRRIRGYPEKIQASLHRAHCFLPAGIVAVLKQRPRLVAAAVQAFYLRDPIDLRACRVFKTFLPETRIMTSAHGFEILCSKCSPHFSDCKKSLVTASPLWASFLESLKKNDYFKGLIEGSAQYRERLEMAENYFQLSVDWPESSLAMSPGEEILTLLQTIPFDIEDLKKEAANLPPEDDDQWLDLSPDQLDQLLQEAVGKKESESVSKEEKEQNYDLTEVSESMKAFISKVSTHKGAELPREPSEAPITFDADSFLNYFDKILGPRPNESDSDDLDDEDFECLDSDDDLDFETHEPGEEASLKGTLDNLKSYMAQMDQELAHTCISKSFTTRNQVEPVSQTTDNNSDEEDSGTGESVMAPVDVDLNLVSNILESYSSQAGLAGPASNLLQSMGVQLPDNTDHRPTSKPTKN

SEQ ID NO: 25399 - protein, 677 aa, Homo sapiens
MEETMKLATMEDTVEYCLFLIPDESRDSDKHKEILQKYIERIITRFAPMLVPYIWQNQPFNLKYKPGKGGVPAHMFGVTKFGDNIEDEWFIVYVIKQITKEFPELVARIEDNDGEFLLIEAADFLPKWLDPENSTNRVFFCHGELCIIPAPRKSGAESWLPTTPPTIPQALNIITAHSEKILASESIRAAVNRRIRGYPEKIQASLHRAHCFLPAGIVAVLKQRPRLVAAAVQAFYLRDPIDLRACRVFKTFLPETRIMTSVTFTKCLYAQLVQQRFVPDRRSGYRLPPPSDPQYRAHELGMKLAHGFEILCSKCSPHFSDCKKSLVTASPLWASFLESLKKNDYFKGLIEGSAQYRERLEMAENYFQLSVDWPERLEVQWRDPGLLQAPPPGFTPFICLSLLSTWDNSSLAMSPGEEILTLLQTIPFDIEDLKKEAANLPPEDDDQWLDLSPDQLDQLLQEAVGKKESESVSKEEKEQNYDLTEVSESMKAFISKVSTHKGAELPREPSEAPITFDADSFLNYFDKILGPRPNESDSDDLDDEDFECLDSDDDLDFETHEPGEEASLKGTLDNLKSYMAQMDQELAHTCISKSFTTRNQVEPVSQTTDNNSDEEDSGTGESVMAPVDVDLNLVSNILESYSSQAGLAGPASNLLQSMGVQLPDNTDHRPTSKPTKN

SEQ ID NO: 25400 - protein, 770 aa, Homo sapiens
MRGVWPPPVSALLSALGMSTYKRATLDEEDLVDSLSEGDAYPNGLQVNFHSPRSGQRCWAARTQVEKRLVVLVVLLAAGLVACLAALGIQYQTRSPSVCLSEACVSVTSSILSSMDPTVDPCHDFFSYACGGWIKANPVPDGHSRWGTFSNLWEHNQAIIKHLLENSTASVSEAERKAQVYYRACMNETRIEELRAKPLMELIERLGGWNITGPWAKDNFQDTLQVVTAHYRTSPFFSVYVSADSKNSNSNVIQVDQSGLGLPSRDYYLNKTENEKVLTGYLNYMVQLGKLLGGGDEEAIRPQMQQILDFETALANITIPQEKRRDEELIYHKVTAAELQTLAPAINWLPFLNTIFYPVEINESEPIVVYDKEYLEQISTLINTTDRCLLNNYMIWNLVRKTSSFLDQRFQDADEKFMEVMYGTKKTCLPRWKFCVSDTENNLGFALGPMFVKATFAEDSKSIATEIILEIKKAFEESLSTLKWMDEETRKSAKEKADAIYNMIGYPNFIMDPKELDKVFNDYTAVPDLYFENAMRFFNFSWRVTADQLRKAPNRDQWSMTPPMVNAYYSPTKNEIVFPAGILQAPFYTRSSPKALNFGGIGVVVGHELTHAFDDQGREYDKDGNLRPWWKNSSVEAFKRQTECMVEQYSNYSVNGEPVNGRHTLGENIADNGGLKAAYRAYQNWVKKNGAEHSLPTLGLTNNQLFFLGFAQVWCSVRTPESSHEGLITDPHSPSRFRVIGSLSNSKEFSEHFRCPPGSPMNPPHKCEVW

SEQ ID NO: 25401 - protein, 758 aa, Homo sapiens
MPLQGLGLQRNPFLQGKRGPGLTSSPPLLPPSLQVNFHSPRSGQRCWAARTQVEKRLVVLVVLLAAGLVACLAALGIQYQTRSPSVCLSEACVSVTSSILSSMDPTVDPCHDFFSYACGGWIKANPVPDGHSRWGTFSNLWEHNQAIIKHLLENSTASVSEAERKAQVYYRACMNETRIEELRAKPLMELIERLGGWNITGPWAKDNFQDTLQVVTAHYRTSPFFSVYVSADSKNSNSNVIQVDQSGLGLPSRDYYLNKTENEKVLTGYLNYMVQLGKLLGGGDEEAIRPQMQQILDFETALANITIPQEKRRDEELIYHKVTAAELQTLAPAINWLPFLNTIFYPVEINESEPIVVYDKEYLEQISTLINTTDRCLLNNYMIWNLVRKTSSFLDQRFQDADEKFMEVMYGTKKTCLPRWKFCVSDTENNLGFALGPMFVKATFAEDSKSIATEIILEIKKAFEESLSTLKWMDEETRKSAKEKADAIYNMIGYPNFIMDPKELDKVFNDYTAVPDLYFENAMRFFNFSWRVTADQLRKAPNRDQWSMTPPMVNAYYSPTKNEIVFPAGILQAPFYTRSSPKALNFGGIGVVVGHELTHAFDDQGREYDKDGNLRPWWKNSSVEAFKRQTECMVEQYSNYSVNGEPVNGRHTLGENIADNGGLKAAYRAYQNWVKKNGAEHSLPTLGLTNNQLFFLGFAQVWCSVRTPESSHEGLITDPHSPSRFRVIGSLSNSKEFSEHFRCPPGSPMNPPHKCEVW

SEQ ID NO: 25402 - protein, 754 aa, Homo sapiens
MMSTYKRATLDEEDLVDSLSEGDAYPNGLQVNFHSPRSGQRCWAARTQVEKRLVVLVVLLAAGLVACLAALGIQYQTRSPSVCLSEACVSVTSSILSSMDPTVDPCHDFFSYACGGWIKANPVPDGHSRWGTFSNLWEHNQAIIKHLLENSTASVSEAERKAQVYYRACMNETRIEELRAKPLMELIERLGGWNITGPWAKDNFQDTLQVVTAHYRTSPFFSVYVSADSKNSNSNVIQVDQSGLGLPSRDYYLNKTENEKVLTGYLNYMVQLGKLLGGGDEEAIRPQMQQILDFETALANITIPQEKRRDEELIYHKVTAAELQTLAPAINWLPFLNTIFYPVEINESEPIVVYDKEYLEQISTLINTTDRCLLNNYMIWNLVRKTSSFLDQRFQDADEKFMEVMYGTKKTCLPRWKFCVSDTENNLGFALGPMFVKATFAEDSKSIATEIILEIKKAFEESLSTLKWMDEETRKSAKEKADAIYNMIGYPNFIMDPKELDKVFNDYTAVPDLYFENAMRFFNFSWRVTADQLRKAPNRDQWSMTPPMVNAYYSPTKNEIVFPAGILQAPFYTRSSPKALNFGGIGVVVGHELTHAFDDQGREYDKDGNLRPWWKNSSVEAFKRQTECMVEQYSNYSVNGEPVNGRHTLGENIADNGGLKAAYRAYQNWVKKNGAEHSLPTLGLTNNQLFFLGFAQVWCSVRTPESSHEGLITDPHSPSRFRVIGSLSNSKEFSEHFRCPPGSPMNPPHKCEVW

SEQ ID NO: 25403 - protein, 767 aa, Homo sapiens
MEALRESVLHLALQMSTYKRATLDEEDLVDSLSEGDAYPNGLQVNFHSPRSGQRCWAARTQVEKRLVVLVVLLAAGLVACLAALGIQYQTRSPSVCLSEACVSVTSSILSSMDPTVDPCHDFFSYACGGWIKANPVPDGHSRWGTFSNLWEHNQAIIKHLLENSTASVSEAERKAQVYYRACMNETRIEELRAKPLMELIERLGGWNITGPWAKDNFQDTLQVVTAHYRTSPFFSVYVSADSKNSNSNVIQVDQSGLGLPSRDYYLNKTENEKVLTGYLNYMVQLGKLLGGGDEEAIRPQMQQILDFETALANITIPQEKRRDEELIYHKVTAAELQTLAPAINWLPFLNTIFYPVEINESEPIVVYDKEYLEQISTLINTTDRCLLNNYMIWNLVRKTSSFLDQRFQDADEKFMEVMYGTKKTCLPRWKFCVSDTENNLGFALGPMFVKATFAEDSKSIATEIILEIKKAFEESLSTLKWMDEETRKSAKEKADAIYNMIGYPNFIMDPKELDKVFNDYTAVPDLYFENAMRFFNFSWRVTADQLRKAPNRDQWSMTPPMVNAYYSPTKNEIVFPAGILQAPFYTRSSPKALNFGGIGVVVGHELTHAFDDQGREYDKDGNLRPWWKNSSVEAFKRQTECMVEQYSNYSVNGEPVNGRHTLGENIADNGGLKAAYRAYQNWVKKNGAEHSLPTLGLTNNQLFFLGFAQVWCSVRTPESSHEGLITDPHSPSRFRVIGSLSNSKEFSEHFRCPPGSPMNPPHKCEVW

SEQ ID NO: 25404 - protein, 551 aa, Homo sapiens
MAGDLSAGFFMEELNTYRQKQGVVLKYQELPNSGPPHDRRFTFQVIIDGREFPEGEGRSKKEAKNAAAKLAVEILNKEKKAVSPLLLTTTNSSEGLSMGNYIGLINRIAQKKRLTVNYEQCASGVHGPEGFHYKCKMGQKEYSIGTGSTKQEAKQLAAKLAYLQILSEETSVKSDYLSSGSFATTCESQSNSLVTSTLASESSSEGDFSADTSEINSNSDSLNSSSLLMNGLRNNQRKAKRSLAPRFDLPDMKETKYTVDKRFGMDFKEIELIGSGGFGQVFKAKHRIDGKTYVIKRVKYNNEKAEREVKALAKLDHVNIVHYNGCWDGFDYDPETSDDSLESSDYDPENSKNSSRSKTKCLFIQMEFCDKGTLEQWIEKRRGEKLDKVLALELFEQITKGVDYIHSKKLIHRDLKPSNIFLVDTKQVKIGDFGLVTSLKNDGKRTRSKGTLRYMSPEQISSQDYGKEVDLYALGLILAELLHVCDTAFETSKFFTDLRDGIISDIFDKKEKTLLQKLLSKKPEDRPNTSEILRTLTVWKKSPEKNERHTC

SEQ ID NO: 25405 - protein, 510 aa, Homo sapiens
MAGDLSAGFFMEELNTYRQKQGVVLKYQELPNSGPPHDRRFTFQVIIDGREFPEGEGRSKKEAKNAAAKLAVEILNKEKKAVSPLLLTTTNSSEGLSMGNYIGLINRIAQKKRLTVNYEQCASGVHGPEGFHYKCKMGQKEYSIGTGSTKQEAKQLAAKLAYLQILSEETSVKSDYLSSGSFATTCESQSNSLVTSTLASESSSEGDFSADTSEINSNSDSLNSSSLLMNGLRNNQRKAKRSLAPRFDLPDMKETKYTVDKRKAEREVKALAKLDHVNIVHYNGCWDGFDYDPETSDDSLESSDYDPENSKNSSRSKTKCLFIQMEFCDKGTLEQWIEKRRGEKLDKVLALELFEQITKGVDYIHSKKLIHRDLKPSNIFLVDTKQVKIGDFGLVTSLKNDGKRTRSKGTLRYMSPEQISSQDYGKEVDLYALGLILAELLHVCDTAFETSKFFTDLRDGIISDIFDKKEKTLLQKLLSKKPEDRPNTSEILRTLTVWKKSPEKNERHTC

SEQ ID NO: 25406 - protein, 141 aa, Homo sapiens
MPVIPALGEAKGEVLPPGDTTTIIPLNWMLKSPPGHFGLLLLLSQQAKNGVMVLAGVTDPEYQDEISLLLHNEGHLKEVKMEGARLGLPGRAESLEHQVQSHLNMIAQSQRTFQKKDAGKAIILSKLTQEQKTKHCMFSLH

SEQ ID NO: 25407 - protein, 811 aa, Homo sapiens
MNVALQELGAGSNMVEYKRATLRDEDAPETPVEGGASPDAMEVGKGASPFSPGPSPGMTPGTPRSSGLFWRVTCPHLRSISGLCSRTMVGFQKGTRQLLGSRTQLELVLAGASLLLAALLLGCLVALGVQYHRDPSHSTCLTEACIRVAGKILESLDRGVSPCEDFYQFSCGGWIRRNPLPDGRSRWNTFNSLWDQNQAILKHLLENTTFNSSSEAEQKTQRFYLSCLQVERIEELGAQPLRDLIEKIGGWNITGPWDQDNFMEVLKAVAGTYRATPFFTVYISADSKSSNSNVIQVDQSGLFLPSRDYYLNRTANEKVLTAYLDYMEELGMLLGGRPTSTREQMQQVLELEIQLANITVPQDQRRDEEKIYHKMSISELQALAPSMDWLEFLSFLLSPLELSDSEPVVVYGMDYLQQVSELINRTEPSILNNYLIWNLVQKTTSSLDRRFESAQEKLLETLYGTKKSCVPRWQTCISNTDDALGFALGSLFVKATFDRQSKEIAEGMISEIRTAFEEALGQLVWMDEKTRQAAKEKADAIYDMIGFPDFILEPKELDDVYDGYEISEDSFFQNMLNLYNFSAKVMADQLRKPPSRDQWSMTPQTVNAYYLPTKNEIVFPAGILQAPFYARNHPKALNFGGIGVVMGHELTHAFDDQGREYDKEGNLRPWWQNESLAAFRNHTACMEEQYNQYQVNGERLNGRQTLGENIADNGGLKAAYNAYKAWLRKHGEEQQLPAVGLTNHQLFFVGFAQVWCSVRTPESSHEGLVTDPHSPARFRVLGTLSNSRDFLRHFGCPVGSPMNPGQLCEVW

SEQ ID NO: 25408 - protein, 765 aa, Homo sapiens
MNVALQELGAGSNMVEYKRATLRDEDAPETPVEGGASPDAMEVGFQKGTRQLLGSRTQLELVLAGASLLLAALLLGCLVALGVQYHRDPSHSTCLTEACIRVAGKILESLDRGVSPCEDFYQFSCGGWIRRNPLPDGRSRWNTFNSLWDQNQAILKHLLENTTFNSSSEAEQKTQRFYLSCLQVERIEELGAQPLRDLIEKIGGWNITGPWDQDNFMEVLKAVAGTYRATPFFTVYISADSKSSNSNVIQVDQSGLFLPSRDYYLNRTANEKVLTAYLDYMEELGMLLGGRPTSTREQMQQVLELEIQLANITVPQDQRRDEEKIYHKMSISELQALAPSMDWLEFLSFLLSPLELSDSEPVVVYGMDYLQQVSELINRTEPSILNNYLIWNLVQKTTSSLDRRFESAQEKLLETLYGTKKSCVPRWQTCISNTDDALGFALGSLFVKATFDRQSKEIAEGMISEIRTAFEEALGQLVWMDEKTRQAAKEKADAIYDMIGFPDFILEPKELDDVYDGYEISEDSFFQNMLNLYNFSAKVMADQLRKPPSRDQWSMTPQTVNAYYLPTKNEIVFPAGILQAPFYARNHPKALNFGGIGVVMGHELTHAFDDQGREYDKEGNLRPWWQNESLAAFRNHTACMEEQYNQYQVNGERLNGRQTLGENIADNGGLKAAYNAYKAWLRKHGEEQQLPAVGLTNHQLFFVGFAQVWCSVRTPESSHEGLVTDPHSPARFRVLGTLSNSRDFLRHFGCPVGSPMNPGQLCEVW

SEQ ID NO: 25409 - protein, 736 aa, Homo sapiens
MNVALQELGAGSNVGFQKGTRQLLGSRTQLELVLAGASLLLAALLLGCLVALGVQYHRDPSHSTCLTEACIRVAGKILESLDRGVSPCEDFYQFSCGGWIRRNPLPDGRSRWNTFNSLWDQNQAILKHLLENTTFNSSSEAEQKTQRFYLSCLQVERIEELGAQPLRDLIEKIGGWNITGPWDQDNFMEVLKAVAGTYRATPFFTVYISADSKSSNSNVIQVDQSGLFLPSRDYYLNRTANEKVLTAYLDYMEELGMLLGGRPTSTREQMQQVLELEIQLANITVPQDQRRDEEKIYHKMSISELQALAPSMDWLEFLSFLLSPLELSDSEPVVVYGMDYLQQVSELINRTEPSILNNYLIWNLVQKTTSSLDRRFESAQEKLLETLYGTKKSCVPRWQTCISNTDDALGFALGSLFVKATFDRQSKEIAEGMISEIRTAFEEALGQLVWMDEKTRQAAKEKADAIYDMIGFPDFILEPKELDDVYDGYEISEDSFFQNMLNLYNFSAKVMADQLRKPPSRDQWSMTPQTVNAYYLPTKNEIVFPAGILQAPFYARNHPKALNFGGIGVVMGHELTHAFDDQGREYDKEGNLRPWWQNESLAAFRNHTACMEEQYNQYQVNGERLNGRQTLGENIADNGGLKAAYNAYKAWLRKHGEEQQLPAVGLTNHQLFFVGFAQVWCSVRTPESSHEGLVTDPHSPARFRVLGTLSNSRDFLRHFGCPVGSPMNPGQLCEVW

SEQ ID NO: 25410 - protein, 775 aa, Homo sapiens
MEPPYSLTAHYDEFQEVKYVSRCGAGGARGASLPPGFPLGAARSATGARSGLPRWNRREVCLLSGLVFAAGLCAILAAMLALKYLGPVAAGGGACPEGCPERKAFARAARFLAANLDASIDPCQDFYSFACGGWLRRHAIPDDKLTYGTIAAIGEQNEERLRRLLARPGGGPGGAAQRKVRAFFRSCLDMREIERLGPRPMLEVIEDCGGWDLGGAEERPGVAARWDLNRLLYKAQGVYSAAALFSLTVSLDDRNSSRYVIRIDQDGLTLPERTLYLAQDEDSEKILAAYRVFMERVLSLLGADAVEQKAQEILQVEQQLANITVSEHDDLRRDVSSMYNKVTLGQLQKITPHLRWKWLLDQIFQEDFSEEEEVVLLATDYMQQVSQLIRSTPHRVLHNYLVWRVVVVLSEHLSPPFREALHELAQEMEGSDKPQELARVCLGQANRHFGMALGALFVHEHFSAASKAKVQQLVEDIKYILGQRLEELDWMDAETRAAARAKLQYMMVMVGYPDFLLKPDAVDKEYEFEVHEKTYFKNILNSIRFSIQLSVKKIRQEVDKSTWLLPPQALNAYYLPNKNQMVFPAGILQPTLYDPDFPQSLNYGGIGTIIGHELTHGYDDWGGQYDRSGNLLHWWTEASYSRFLRKAECIVRLYDNFTVYNQRVNGKHTLGENIADMGGLKLAYHAYQKWVREHGPEHPLPRLKYTHDQLFFIAFAQNWCIKRRSQSIYLQVLTDKHAPEHYRVLGSVSQFEEFGRAFHCPKDSPMNPAHKCSVW

SEQ ID NO: 25411 - protein, 773 aa, Homo sapiens
MEPPYSLTAHYDEFQEVKYVSRCGAGGARGASLPPGFPLGAARSATGARSGLPRWNRREVCLLSGLVFAAGLCAILAAMLALKYLGPVAAGGGACPEGCPERKAFARAARFLAANLDASIDPCQDFYSFACGGWLRRHAIPDDKLTYGTIAAIGEQNEERLRRLLARPGGGPGGAAQRKVRAFFRSCLDMREIERLGPRPMLEVIEDCGGWDLGGAEERPGVAARWDLNRLLYKAQGVYSAAALFSLTVSLDDRNSSRYVIRIDQDGLTLPERTLYLAQDEDSEKILAAYRVFMERVLSLLGADAVEQKAQEILQVEQQLANITVSEHDDLRRDVSSMYNKVTLGQLQKITPHLRWKWLLDQIFQEDFSEEEEVVLLATDYMQQVSQLIRSTPHRVLHNYLVWRVVVVLSEHLSPPFREALHELAQEMEGSDKPQELARVCLGQANRHFGMALGALFVHEHFSAASKAKVQQLVEDIKYILGQRLEELDWMDAETRAAARAKLQYMMVMVGYPDFLLKPDAVDKEYEFEVHEKTYFKNILNSIRFSIQLSVKKIRQEVDKWLLPPQALNAYYLPNKNQMVFPAGILQPTLYDPDFPQSLNYGGIGTIIGHELTHGYDDWGGQYDRSGNLLHWWTEASYSRFLRKAECIVRLYDNFTVYNQRVNGKHTLGENIADMGGLKLAYHAYQKWVREHGPEHPLPRLKYTHDQLFFIAFAQNWCIKRRSQSIYLQVLTDKHAPEHYRVLGSVSQFEEFGRAFHCPKDSPMNPAHKCSVW

SEQ ID NO: 25412 - protein, 1028 aa, Homo sapiens
MRLLWKLVILLPLINSSAGDGLLSRPIFTQEPHDVIFPLDLSKSEVILNCAANGYPSPHYRWKQNGTDIDFTMSYHYRLDGGSLAINSPHTDQDIGMYQCLATNLLGTILSRKAKLQFAYIEDFETKTRSTVSVREGQGVVLLCGPPPHFGDLSYAWTFNDNPLYVQEDNRRFVSQETGNLYIAKVEPSDVGNYTCFITNKEAQRSVQGPPTPLVQRTDGVMGEYEPKIEVRFPETIQAAKDSSVKLECFALGNPVPDISWRRLDGSPLPGKVKYSKSQAILEIPNFQQEDEGFYECIASNLRGRNLAKGQLIFYAPPEWEQKIQNTHLSIYDNLLWECKASGKPNPWYTWLKNGERLNPEERIQIENGTLIITMLNVSDSGVYQCAAENKYQIIYANAELRVLASAPDFSKSPVKKKSFVQVGGDIVIGCKPNAFPRAAISWKRGTETLRQSKRIFLLEDGSLKIYNITRSDAGSYTCIATNQFGTAKNTGSLIVKERTVITVPPSKMDVTVGESIVLPCQVSHDPSIEVVFVWFFNGDVIDLKKGVAHFERIGGESVGDLMIRNIQLHHSGKYLCTVQTTLESLSAVADIIVRGPPGPPEDVQVEDISSTTSQLSWRAGPDNNSPIQIFTIQTRTPFSVGWQAVATVPEILNGKTYNATVVGLSPWVEYEFRVVAGNSIGIGEPSEPSELLRTKASVPVVAPVNIHGGGGSRSELVITWESIPEELQNGEGFGYIIMFRPVGSTTWSKEKVSSVESSRFVYRNESIIPLSPFEVKVGVYNNEGEGSLSTVTIVYSGEDEPQLAPRGTSLQSFSASEMEVSWNAIAWNRNTGRVLGYEVLYWTDDSKESMIGKIRVSGNVTTKNITGLKANTIYFASVRAYNTAGTGPSSPPVNVTTKKSPPSQPPANIAWKLTNSKLCLNWEHVKTMENESEVLGYKILYRQNRQSKTHILETNNTSAELLVPFEEDYLIEIRTVSDGGDGSSSEEIRIPKMSSLSSRGIQFLEPSTHFLSIVIVIFHCFAIQPLI

SEQ ID NO: 25413 - protein, 1100 aa, Homo sapiens
MASSWKLMLFLSVTMCLSEYSKSLPGLSTSYAALLRIKKSSSSSLFGSKTRPRYSSPSLGTLSASSPSWLGAAQNYYSPINLYHSSDAFKQDESVDYGPVFVQEPDDIIFPTDSDEKKVALNCEVRGNPVPSYRWLRNGTEIDLESDYRYSLIDGTFIISNPSEAKDSGHYQCLATNTVGSILSREATLQFAYLGNFSGRTRSAVSVREGQGVVLMCSPPPHSPEIIYSWVFNEFPSFVAEDSRRFISQETGNLYISKVQTSDVGSYICLVKNTVTNARVLSPPTPLTLRNDGVMGEYEPKIEVHFPFTVTAAKGTTVKMECFALGNPVPTITWMKVNGYIPSKARLRKSQAVLEIPNVQLDDAGIYECRAENSRGKNSFRGQLQVYTYPHWVEKLNDTQLDSGSPLRWECKATGKPRPTYRWLKNGVPLSPQSRVEMVNGVLMIHNVNQSDAGMYQCLAENKYGAIYASAELKILASAPTFALNQLKKTIIVTKDQEVVIECKPQGSPKPTISWKKGDRAVRENKRIAILPDGSLRILNASKSDEGKYVCRGENVFGSAEIIASLSVKEPTRIELTPKRTELTVGESIVLNCKAIHDASLDVTFYWTLKGQPIDFEEEGGHFESIRAQASSADLMIRNILLMHAGRYGCRVQTTADSVSDEAELLVRGPPGPPGIVIVEEITESTATLSWSPAADNHSPISSYNLQARSPFSLGWQTVKTVPEIITGDMESAMAVDLNPWVEYEFRVVATNPIGTGDPSTPSRMIRTNEAVPKTAPTNVSGRSGRRHELVIAWEPVSEEFQNGEGFGYIVAFRPNGTRGWKEKMVTSSEASKFIYRDESVPPLTPFEVKVGVYNNKGDGPFSQIVVICSAEGEPSAAPTDVKATSVSVSEILVAWKHIKESLGRPQGFEVGYWKDMEQEDTAETVKTRGNESFVILTGLEGNTLYHFTVRAYNGAGYGPPSSEVSATTKKSPPSQAPSNLRWEQQGSQVSLGWEPVIPLANESEVVGYKVFYRQEGHSNSQVIETQKLQAVVPLPDAGVYIIEVRAYSEGGDGTASSQIRVPSYSGGKITSAQSTLHSLSTSSSSVTLLLALMIPSTSW

SEQ ID NO: 25414 - protein, 1026 aa, Homo sapiens
MASSWKLMLFLSVTMCLSESVDYGPVFVQEPDDIIFPTDSDEKKVALNCEVRGNPVPSYRWLRNGTEIDLESDYRYSLIDGTFIISNPSEAKDSGHYQCLATNTVGSILSREATLQFAYLGNFSGRTRSAVSVREGQGVVLMCSPPPHSPEIIYSWVFNEFPSFVAEDSRRFISQETGNLYISKVQTSDVGSYICLVKNTVTNARVLSPPTPLTLRNDGVMGEYEPKIEVHFPFTVTAAKGTTVKMECFALGNPVPTITWMKVNGYIPSKARLRKSQAVLEIPNVQLDDAGIYECRAENSRGKNSFRGQLQVYTYPHWVEKLNDTQLDSGSPLRWECKATGKPRPTYRWLKNGVPLSPQSRVEMVNGVLMIHNVNQSDAGMYQCLAENKYGAIYASAELKILASAPTFALNQLKKTIIVTKDQEVVIECKPQGSPKPTISWKKGDRAVRENKRIAILPDGSLRILNASKSDEGKYVCRGENVFGSAEIIASLSVKEPTRIELTPKRTELTVGESIVLNCKAIHDASLDVTFYWTLKGQPIDFEEEGGHFESIRAQASSADLMIRNILLMHAGRYGCRVQTTADSVSDEAELLVRGPPGPPGIVIVEEITESTATLSWSPAADNHSPISSYNLQARSPFSLGWQTVKTVPEIITGDMESAMAVDLNPWVEYEFRVVATNPIGTGDPSTPSRMIRTNEAVPKTAPTNVSGRSGRRHELVIAWEPVSEEFQNGEGFGYIVAFRPNGTRGWKEKMVTSSEASKFIYRDESVPPLTPFEVKVGVYNNKGDGPFSQIVVICSAEGEPSAAPTDVKATSVSVSEILVAWKHIKESLGRPQGFEVGYWKDMEQEDTAETVKTRGNESFVILTGLEGNTLYHFTVRAYNGAGYGPPSSEVSATTKKSPPSQAPSNLRWEQQGSQVSLGWEPVIPLANESEVVGYKVFYRQEGHSNSQVIETQKLQAVVPLPDAGVYIIEVRAYSEGGDGTASSQIRVPSYSGGKITSAQSTLHSLSTSSSSVTLLLALMIPSTSW

SEQ ID NO: 25415 - protein, 911 aa, Homo sapiens
MASSWKLMLFLSVTMCLSEYSKSLPGLSTSYAALLRIKKSSSSSLFGSKTRPRYSSPSLGTLSASSPSWLGAAQNYYSPINLYHSSDAFKQDESVDYGPVFVQEPDDIIFPTDSDEKKVALNCEVRGNPVPSYRWLRNGTEIDLESDYRYSLIDGTFIISNPSEAKDSGHYQCLATNTVGSILSREATLQFAYLGNFSGRTRSAVSVREGQGVVLMCSPPPHSPEIIYSWVFNEFPSFVAEDSRRFISQETGNLYISKVQTSDVGSYICLVKNTVTNARVLSPPTPLTLRNDGVMGEYEPKIEVHFPFTVTAAKGTTVKMECFALGNPVPTITWMKVNGYIPSKARLRKSQAVLEIPNVQLDDAGIYECRAENSRGKNSFRGQLQVYTYPHWVEKLNDTQLDSGSPLRWECKATGKPRPTYRWLKNGVPLSPQSRVEMVNGVLMIHNVNQSDAGMYQCLAENKYGAIYASAELKILASAPTFALNQLKKTIIVTKDQEVVIECKPQGSPKPTISWKKGDRAVRENKRIAILPDGSLRILNASKSDEGKYVCRGENVFGSAEIIASLSVKEPTRIELTPKRTELTVGESIVLNCKAIHDASLDVTFYWTLKGQPIDFEEEGGHFESIRAQASSADLMIRNILLMHAGRYGCRVQTTADSVSDEAELLVRGPPGPPGIVIVEEITESTATLSWSPAADNHSPISSYNLQARSPFSLGWQTVKTVPEIITGDMESAMAVDLNPWVEYEFRVVATNPIGTGDPSTPSRMIRTNEAVPKTAPTNVSGRSGRRHELVIAWEPVSEEFQNGEGFGYIVAFRPNGTRGWKEKMVTSSEASKFIYRDESVPPLTPFEVKVGVYNNKGDGPFSQIVVICSAEGEPSAAPTDVKATSVSVSEILVAWKHIKESLGRPQGFEV

SEQ ID NO: 25416 - protein, 247 aa, Homo sapiens
MLLLPLPLLLFLLCSRAEAGEIIGGTECKPHSRPYMAYLEIVTSNGPSKFCGGFLIRRNFVLTAAHCAGRSITVTLGAHNITEEEDTWQKLEVIKQFRHPKYNTSTLHHDIMLLKLKEKASLTLAVGTLPFPSQFNFVPPGRMCRVAGWGRTGVLKPGSDTLQEVKLRLMDPQACSHFRDFDHNLQLCVGNPRKTKSAFKGDSGGPLLCAGVAQGIVSYGRSDAKPPAVFTRISHYRPWINQILQAN

SEQ ID NO: 25417 - protein, 136 aa, Homo sapiens
MLLKLKEKASLTLAVGTLPFPSQFNFVPPGRMCRVAGWGRTGVLKPGSDTLQEVKLRLMDPQACSHFRDFDHNLQLCVGNPRKTKSAFKGDSGGPLLCAGVAQGIVSYGRSDAKPPAVFTRISHYRPWINQILQAN

SEQ ID NO: 25418 - protein, 437 aa, Homo sapiens
MALAGAPAGGPCAPALEALLGAGALRLLDSSQIVIISAAQDASAPPAPTGPAAPAAGPCDPDLLLFATPQAPRPTPSAPRPALGRPPVKRRLDLETDHQYLAESSGPARGRGRHPGKGVKSPGEKSRYETSLNLTTKRFLELLSHSADGVVDLNWAAEVLKVQKRRIYDITNVLEGIQLIAKKSKNHIQWLGSHTTVGVGGRLEGLTQDLRQLQESEQQLDHLMNICTTQLRLLSEDTDSQRLAYVTCQDLRSIADPAEQMVMVIKAPPETQLQAVDSSENFQISLKSKQGPIDVFLCPEETVGGISPGKTPSQEVTSEEENRATDSATIVSPPPSSPPSSLTTDPSQSLLSLEQEPLLSRMGSLRAPVDEDRLSPLVAADSLLEHVREDFSGLLPEEFISLSPPHEALDYHFGLEEGEGIRDLFDCDFGDLTPLDF

SEQ ID NO: 25419 - protein, 1331 aa, Homo sapiens
MQAAPRAGCGAALLLWIVSSCLCRAWTAPSTSQKCDEPLVSGLPHVAFSSSSSISGSYSPGYAKINKRGGAGGWSPSDSDHYQWLQVDFGNRKQISAIATQGRYSSSDWVTQYRMLYSDTGRNWKPYHQDGNIWAFPGNINSDGVVRHELQHPIIARYVRIVPLDWNGEGRIGLRIEVYGCSYWADVINFDGHVVLPYRFRNKKMKTLKDVIALNFKTSESEGVILHGEGQQGDYITLELKKAKLVLSLNLGSNQLGPIYGHTSVMTGSLLDDHHWHSVVIERQGRSINLTLDRSMQHFRTNGEFDYLDLDYEITFGGIPFSGKPSSSSRKNFKGCMESINYNGVNITDLARRKKLEPSNVGNLSFSCVEPYTVPVFFNATSYLEVPGRLNQDLFSVSFQFRTWNPNGLLVFSHFADNLGNVEIDLTESKVGVHINITQTKMSQIDISSGSGLNDGQWHEVRFLAKENFAILTIDGDEASAVRTNSPLQVKTGEKYFFGGFLNQMNNSSHSVLQPSFQGCMQLIQVDDQLVNLYEVAQRKPGSFANVSIDMCAIIDRCVPNHCEHGGKCSQTWDSFKCTCDETGYSGATCHNSIYEPSCEAYKHLGQTSNYYWIDPDGSGPLGPLKVYCNMTEDKVWTIVSHDLQMQTPVVGYNPEKYSVTQLVYSASMDQISAITDSAEYCEQYVSYFCKMSRLLNTPDGSPYTWWVGKANEKHYYWGGSGPGIQKCACGIERNCTDPKYYCNCDADYKQWRKDAGFLSYKDHLPVSQVVVGDTDRQGSEAKLSVGPLRCQGDRNYWNAASFPNPSSYLHFSTFQGETSADISFYFKTLTPWGVFLENMGKEDFIKLELKSATEVSFSFDVGNGPVEIVVRSPTPLNDDQWHRVTAERNVKQASLQVDRLPQQIRKAPTEGHTRLELYSQLFVGGAGGQQGFLGCIRSLRMNGVTLDLEERAKVTSGFISGCSGHCTSYGTNCENGGKCLERYHGYSCDCSNTAYDGTFCNKDVGAFFEEGMWLRYNFQAPATNARDSSSRVDNAPDQQNSHPDLAQEEIRFSFSTTKAPCILLYISSFTTDFLAVLVKPTGSLQIRYNLGGTREPYNIDVDHRNMANGQPHSVNITRHEKTIFLKLDHYPSVSYHLPSSSDTLFNSPKSLFLGKVIETGKIDQEIHKYNTPGFTGCLSRVQFNQIAPLKAALRQTNASAHVHIQGELVESNCGASPLTLSPMSSATDPWHLDHLDSASADFPYNPGQGQAIRNGVNRNSAIIGGVIAVVIFTILCTLVFLIRYMFRHKGTYHTNEAKGAESAESADAAIMNNDPNFTETIDESKKEWLI

SEQ ID NO: 25420 - protein, 108 aa, Homo sapiens
MSSATDPWHLDHLDSASADFPYNPGQGQAIRNGVNRNSAIIGGVIAVVIFTILCTLVFLIRYMFRHKGTYHTNEAKGAESAESADAAIMNNDPNFTETIDESKKEWLI

SEQ ID NO: 25421 - protein, 1308 aa, Homo sapiens
MGSVTGAVLKTLLLLSTQNWNRVEAGNSYDCDDPLVSALPQASFSSSSELSSSHGPGFARLNRRDGAGGWSPLVSNKYQWLQIDLGERMEVTAVATQGGYGSSNWVTSYLLMFSDSGWNWKQYRQEDSIWGFSGNANADSVVYYRLQPSIKARFLRFIPLEWNPKGRIGMRIEVFGCAYRSEVVDLDGKSSLLYRFDQKSLSPIKDIISLKFKTMQSDGILLHREGPNGDHITLQLRRARLFLLINSGEAKLPSTSTLVNLTLGSLLDDQHWHSVLIQRLGKQVNFTVDEHRHHFHARGEFNLMNLDYEISFGGIPAPGKSVSFPHRNFHGCLENLYYNGVDIIDLAKQQKPQIIAMGNVSFSCSQPQSMPVTFLSSRSYLALPDFSGEEEVSATFQFRTWNKAGLLLFSELQLISGGILLFLSDGKLKSNLYQPGKLPSDITAGVELNDGQWHSVSLSAKKNHLSVAVDGQMASAAPLLGPEQIYSGGTYYFGGCPDKSFGSKCKSPLGGFQGCMRLISISGKVVDLISVQQGSLGNFSDLQIDSCGISDRCLPNYCEHGGECSQSWSTFHCNCTNTGYRGATCHNSIYEQSCEAYKHRGNTSGFYYIDSDGSGPLEPFLLYCNMTETAWTIIQHNGSDLTRVRNTNPENPYAGFFEYVASMEQLQATINRAEHCEQEFTYYCKKSRLVNKQDGTPLSWWVGRTNETQTYWGGSSPDLQKCTCGLEGNCIDSQYYCNCDADRNEWTNDTGLLAYKEHLPVTKIVITDTGRLHSEAAYKLGPLLCQGDRSFWNSASFDTEASYLHFPTFHGELSADVSFFFKTTASSGVFLENLGIADFIRIELRSPTVVTFSFDVGNGPFEISVQSPTHFNDNQWHHVRVERNMKEASLQVDQLTPKTQPAPADGHVLLQLNSQLFVGGTATRQRGFLGCIRSLQLNGMTLDLEERAQVTPEVQPGCRGHCSSYGKLCRNGGKCRERPIGFFCDCTFSAYTGPFCSNEISAYFGSGSSVIYNFQENYLLSKNSSSHAASFHGDMKLSREMIKFSFRTTRTPSLLLFVSSFYKEYLSVIIAKNGSLQIRYKLNKYQEPDVVNFDFKNMADGQLHHIMINREEGVVFIEIDDNRRRQVHLSSGTEFSAVKSLVLGRILEHSDVDQDTALAGAQGFTGCLSAVQLSHVAPLKAALHPSHPDPVTVTGHVTESSCMAQPGTDATSRERTHSFADHSGTIDDREPLANAIKSDSAVIGGLIAVVIFILLCITAIAVRIYQQKRLYKRSEAKRSENVDSAEAVLKSELNIQNAVNENQKEYFF

SEQ ID NO: 25422 - protein, 1235 aa, Homo sapiens
MWNYDCDDPLVSALPQASFSSSSELSSSHGPGFARLNRRDGAGGWSPLVSNKYQWLQIDLGERMEVTAVATQGGYGSSNWVTSYLLMFSDSGWNWKQYRQEDSIWGFSGNANADSVVYYRLQPSIKARFLRFIPLEWNPKGRIGMRIEVFGCAYRSEVVDLDGKSSLLYRFDQKSLSPIKDIISLKFKTMQSDGILLHREGPNGDHITLQLRRARLFLLINSGEAKLPSTSTLVNLTLGSLLDDQHWHSVLIQRLGKQVNFTVDEHRHHFHARGEFNLMNLDYEGNVSFSCSQPQSMPVTFLSSRSYLALPDFSGEEEVSATFQFRTWNKAGLLLFSELQLISGGILLFLSDGKLKSNLYQPGKLPSDITAGVELNDGQWHSVSLSAKKNHLSVAVDGQMASAAPLLGPEQIYSGGTYYFGGCPDKSFGSKCKSPLGGFQGCMRLISISGKVVDLISVQQGSLGNFSDLQIDSCGISDRCLPNYCEHGGECSQSWSTFHCNCTNTGYRGATCHNSIYEQSCEAYKHRGNTSGFYYIDSDGSGPLEPFLLYCNMTETAWTIIQHNGSDLTRVRNTNPENPYAGFFEYVASMEQLQATINRAEHCEQEFTYYCKKSRLVNKQDGTPLSWWVGRTNETQTYWGGSSPDLQKCTCGLEGNCIDSQYYCNCDADRNEWTNDTGLLAYKEHLPVTKIVITDTGRLHSEAAYKLGPLLCQGDRSFWNSASFDTEASYLHFPTFHGELSADVSFFFKTTASSGVFLENLGIADFIRIELRSPTVVTFSFDVGNGPFEISVQSPTHFNDNQWHHVRVERNMKEASLQVDQLTPKTQPAPADGHVLLQLNSQLFVGGTATRQRGFLGCIRSLQLNGMTLDLEERAQVTPEVQPGCRGHCSSYGKLCRNGGKCRERPIGFFCDCTFSAYTGPFCSNEISAYFGSGSSVIYNFQENYLLSKNSSSHAASFHGDMKLSREMIKFSFRTTRTPSLLLFVSSFYKEYLSVIIAKNGSLQIRYKLNKYQEPDVVNFDFKNMADGQLHHIMINREEGVVFIEIDDNRRRQVHLSSGTEFSAVKSLVLGRILEHSDVDQDTALAGAQGFTGCLSAVQLSHVAPLKAALHPSHPDPVTVTGHVTESSCMAQPGTDATSRERTHSFADHSGTIDDREPLANAIKSDSAVIGGLIAVVIFILLCITAIAVRIYQQKRLYKRSEAKRSENVDSAEAVLKSELNIQNAVNENQKEYFF

SEQ ID NO: 25423 - protein, 501 aa, Homo sapiens
MDENNGLLLLELNPPNPWDLQPRSPEELAFGEVQITYLTHACMDLKLGDKRMVFDPWLIGPAFARGWWLLHEPPSDWLERLCQADLIYISHLHSDHLSYPTLKKLAGRRPDIPIYVGNTERPVFWNLNQSGVQLTNINVVPFGIWQQVDKNLRFMILMDGVHPEMDTCIIVEYKGHKILNIVDCTRPNGGRLPMKVALMMSDFAGGASGFPMTFSGGKFTEEWKAQFIKTERKKLLNYKARLVKNLQPRIYCPFAGYFVESHPSDKYIKETNTKNDPNELNNLIKKNSDVITWTPRPGATLDLGRMLKDRTDSKGIIEPPEGTKIYKDSWDFEPYLEILNAALGDEIFLHSSWIKEYFTWAGFKDYNLVVRMIETDEDFNPFPGGYDYLVDFLDLSFPKERPQREHPYEEIHSRVDVIRHVVKNGLLWDELYIGFQTRLQRDPDIYHHLFWNHFQIKLPLTPPNWKSFLMCCEQNGPVILQFSTERTNEPNRNKFSVENKA

SEQ ID NO: 25424 - protein, 486 aa, Homo sapiens
MDENNGLLLLELNPPNPWDLQPRSPEELAFGEVQITYLTHACMDLKLGDKRMVFDPWLIGPAFARGWWLLHEPPSDWLERLCQADLIYISHLHSDHLSYPTLKKLAGRRPDIPIYVGNTERPVFWNLNQSGVQLTNINVVPFGIWQQVDKNLRFMILMDGVHPEMDTCIIVEYKGHKILNIVDCTRPNGGRLPMKVALMMSDFAGGASGFPMTFSGGKFTEEWKAQFIKTERKKLLNYKARLVKNLQPRIYCPFAGYFVESHPSDKYIKETNTKNDPNELNNLIKKNSDVITWTPRPGATLDLGRMLKDRTDSKGIIEPPEGTKIYKDSWDFEPYLEILNAALGDEIFLHSSWIKEYFTWAGFKDYNLVVRMIETDEDFNPFPGGYDYLVDFLDLSFPKERPQREHPYEEIHSRVDVIRHVVKNGLLWDELYIGFQTRLQRDPDIYHHLFWNHFQIKLPLTPPNWKSFLMCCEQNGPAILQECKTT

SEQ ID NO: 25425 - protein, 1288 aa, Homo sapiens
MASVAWAVLKVLLLLPTQTWSPVGAGNPPDCDAPLASALPRSSFSSSSELSSSHGPGFSRLNRRDGAGGWTPLVSNKYQWLQIDLGERMEVTAVATQGGYGSSDWVTSYLLMFSDGGRNWKQYRREESIWGFPGNTNADSVVHYRLQPPFEARFLRFLPLAWNPRGRIGMRIEVYGCAYKSEVVYFDGQSALLYRLDKKPLKPIRDVISLKFKAMQSNGILLHREGQHGNHITLELIKGKLVFFLNSGNAKLPSTIAPVTLTLGSLLDDQHWHSVLIELLDTQVNFTVDKHTHHFQAKGDSSYLDLNFEISFGGIPTPGRSRAFRRKSFHGCLENLYYNGVDVTELAKKHKPQILMMGNVSFSCPQPQTVPVTFLSSRSYLALPGNSGEDKVSVTFQFRTWNRAGHLLFGELRRGSGSFVLFLKDGKLKLSLFQPGQSPRNVTAGAGLNDGQWHSVSFSAKWSHMNVVVDDDTAVQPLVAVLIDSGDTYYFGGCLDNSSGSGCKSPLGGFQGCLRLITIGDKAVDPILVQQGALGSFRDLQIDSCGITDRCLPSYCEHGGECSQSWDTFSCDCLGTGYTGETCHSSLYEQSCEAHKHRGNPSGLYYIDADGSGPLGPFLVYCNMTADAAWTVVQHGGPDAVTLRGAPSGHPRSAVSFAYAAGAGQLRSAVNLAERCEQRLALRCGTARRPDSRDGTPLSWWVGRTNETHTSWGGSLPDAQKCTCGLEGNCIDSQYYCNCDAGRNEWTSDTIVLSQKEHLPVTQIVMTDAGRPHSEAAYTLGPLLCRGDQSFWNSASFNTETSYLHFPAFHGELTADVCFFFKTTVSSGVFMENLGITDFIRIELRAPTEVTFSFDVGNGPCEVTVQSPTPFNDNQWHHVRAERNVKGASLQVDQLPQKMQPAPADGHVRLQLNSQLFIGGTATRQRGFLGCIRSLQLNGVALDLEERATVTPGVEPGCAGHCSTYGHLCRNGGRCREKRRGVTCDCAFSAYDGPFCSNEISAYFATGSSMTYHFQEHYTLSENSSSLVSSLHRDVTLTREMITLSFRTTRTPSLLLYVSSFYEEYLSVILANNGSLQIRYKLDRHQNPDAFTFDFKNMADGQLHQVKINREEAVVMVEVNQSTKKQVILSSGTEFNAVKSLILGKVLEAAGADPDTRRAATSGFTGCLSAVRFGRAAPLKAALRPSGPSRVTVRGHVAPMARCAAGAASGSPARELAPRLAGGAGRSGPADEGEPLVNADRRDSAVIGGVIAVVIFILLCITAIAIRIYQQRKLRKENESKVSKKEEC

SEQ ID NO: 25426 - protein, 1127 aa, Homo sapiens
MASVAWAVLKVLLLLPTQTWSPVGAGNPPDCDAPLASALPRSSFSSSSELSSSHGPGFSRLNRRDGAGGWTPLVSNKYQWLQIDLGERMEVTAVATQGGYGSSDWVTSYLLMFSDGGRNWKQYRREESIWGFPGNTNADSVVHYRLQPPFEARFLRFLPLAWNPRGRIGMRIEVYGCAYKSEVVYFDGQSALLYRLDKKPLKPIRDVISLKFKAMQSNGILLHREGQHGNHITLELIKGKLVFFLNSGNAKLPSTIAPVTLTLGSLLDDQHWHSVLIELLDTQVNFTVDKHTHHFQAKGDSSYLDLNFEISFGGIPTPGRSRAFRRKSFHGCLENLYYNGVDVTELAKKHKPQILMMGNVSFSCPQPQTVPVTFLSSRSYLALPGNSGEDKVSVTFQFRTWNRAGHLLFGELRRGSGSFVLFLKDGKLKLSLFQPGQSPRNVTAGAGLNDGQWHSVSFSAKWSHMNVVVDDDTAVQPLVAVLIDSGDTYYFGGCLDNSSGSGCKSPLGGFQGCLRLITIGDKAVDPILVQQGALGSFRDLQIDSCGITDRCLPSYCEHGGECSQSWDTFSCDCLGTGYTGETCHSSLYEQSCEAHKHRGNPSGLYYIDADGSGPLGPFLVYCNMTADAAWTVVQHGGPDAVTLRGAPSGHPRSAVSFAYAAGAGQLRSAVNLAERCEQRLALRCGTARRPDSRDGTPLSWWVGRTNETHTSWGGSLPDAQKCTCGLEGNCIDSQYYCNCDAGRNEWTSDTIVLSQKEHLPVTQIVMTDAGRPHSEAAYTLGPLLCRGDQSFWNSASFNTETSYLHFPAFHGELTADVCFFFKTTVSSGVFMENLGITDFIRIELRAPTEVTFSFDVGNGPCEVTVQSPTPFNDNQWHHVRAERNVKGASLQVDQLPQKMQPAPADGHVRLQLNSQLFIGGTATRQRGFLGCIRSLQLNGVALDLEERATVTPGVEPGCAGHCSTYGHLCRNGGRCREKRRGVTCDCAFSAYDGPFCSNEISAYFATGSSMTYHFQEHYTLSENSSSLVSSLHRDVTLTREMITLSFRTTRTPSLLLYVSSFYEEYLSVILANNGSLQIRYKLDRHQNPDAFTFDFKNMADGQLHQVKINREEAVVMVEVIPQMQKSN

SEQ ID NO: 25427 - protein, 474 aa, Homo sapiens
MTILTYPFKNLPTASKWALRFSIRPLSCSSQLRAAPAVQTKTKKTLAKPNIRNVVVVDGVRTPFLLSGTSYKDLMPHDLARAALTGLLHRTSVPKEVVDYIIFGTVIQEVKTSNVAREAALGAGFSDKTPAHTVTMACISANQAMTTGVGLIASGQCDVIVAGGVELMSDVPIRHSRKMRKLMLDLNKAKSMGQRLSLISKFRFNFLAPELPAVSEFSTSETMGHSADRLAAAFAVSRLEQDEYALRSHSLAKKAQDEGLLSDVVPFKVPGKDTVTKDNGIRPSSLEQMAKLKPAFIKPYGTVTAANSSFLTDGASAMLIMAEEKALAMGYKPKAYLRDFMYVSQDPKDQLLLGPTYATPKVLEKAGLTMNDIDAFEFHEAFSGQILANFKAMDSDWFAENYMGRKTKVGLPPLEKFNNWGGSLSLGHPFGATGCRLVMAAANRLRKEGGQYGLVAACAAGGQGHAMIVEAYPK

SEQ ID NO: 25428 - protein, 452 aa, Homo sapiens
MTLVSGWLLYGWIIAVQTKTKKTLAKPNIRNVVVVDGVRTPFLLSGTSYKDLMPHDLARAALTGLLHRTSVPKEVVDYIIFGTVIQEVKTSNVAREAALGAGFSDKTPAHTVTMACISANQAMTTGVGLIASGQCDVIVAGGVELMSDVPIRHSRKMRKLMLDLNKAKSMGQRLSLISKFRFNFLAPELPAVSEFSTSETMGHSADRLAAAFAVSRLEQDEYALRSHSLAKKAQDEGLLSDVVPFKVPGKDTVTKDNGIRPSSLEQMAKLKPAFIKPYGTVTAANSSFLTDGASAMLIMAEEKALAMGYKPKAYLRDFMYVSQDPKDQLLLGPTYATPKVLEKAGLTMNDIDAFEFHEAFSGQILANFKAMDSDWFAENYMGRKTKVGLPPLEKFNNWGGSLSLGHPFGATGCRLVMAAANRLRKEGGQYGLVAACAAGGQGHAMIVEAYPK

SEQ ID NO: 25429 - protein, 184 aa, Homo sapiens
MADHLMLAEGYRLVQRPPSAAAAHGPHALRTLPPYAGPGLDSGLRPRGAPLGPPPPRQPGALAYGAFGPPSSFQPFPAVPPPAAGIAHLQPVATPYPGRAAAPPNAPGGPPGPQPAPSAAAPPPPAHALGGMDAELIDEEALTSLELELGLHRVRELPELFLGQSEFDCFSDLGSAPPAGSVSC

SEQ ID NO: 25430 - protein, 316 aa, Homo sapiens
MTRTYENFQYLENKVKVQGFKNGPLPLQSLLQRLCSGPCHLLLSLGLGLLLLVIICVVGFQNSKFQRDLVTLRTDFSNFTSNTVAEIQALTSQGSSLEETIASLKAEVEGFKQERQAGVSELQEHTTQKAHLGHCPHCPSVCVPVHSEMLLRVQQLVQDLKKLTCQVATLNNNASTEGTCCPVNWVEHQDSCYWFSHSGMSWAEAEKYCQLKNAHLVVINSREEQNFVQKYLGSAYTWMGLSDPEGAWKWVDGTDYATGFQNWKPGQPDDWQGHGLGGGEDCAHFHPDGRWNDDVCQRPYHWVCEAGLGQTSQESH

SEQ ID NO: 25431 - protein, 292 aa, Homo sapiens
MTRTYENFQYLENKVKVQGFKNGPLPLQSLLQRLCSGPCHLLLSLGLGLLLLVIICVVGFQNSKFQRDLVTLRTDFSNFTSNTVAEIQALTSQGSSLEETIASLKAEVEGFKQERQAVHSEMLLRVQQLVQDLKKLTCQVATLNNNGEEASTEGTCCPVNWVEHQDSCYWFSHSGMSWAEAEKYCQLKNAHLVVINSREEQNFVQKYLGSAYTWMGLSDPEGAWKWVDGTDYATGFQNWKPGQPDDWQGHGLGGGEDCAHFHPDGRWNDDVCQRPYHWVCEAGLGQTSQESH

SEQ ID NO: 25432 - protein, 256 aa, Homo sapiens
MTRTYENFQYLENKVKVQGFKNGPLPLQSLLQRLCSGPCHLLLSLGLGLLLLVIICVVGFQNSKFQRDLVTLRTDFSNFTSNTVAEIQALTSQGSSLEETIASLKAEVEGFKQERQAVHSEMLLRVQQLVQDLKKLTCQVATLNNNASTEGTCCPVNWVEHQDSCYWFSHSGMSWAEAEKYCQLKNAHLVVINSREEQVRASGTQFLRHVPFREMVLKLGRTLESSGSFQNDCHLCHTLRDLIGLSIQRNISKLLS

SEQ ID NO: 25433 - protein, 490 aa, Homo sapiens
MRPAFALCLLWQALWPGPGGGEHPTADRAGCSASGACYSLHHATMKRQAAEEACILRGGALSTVRAGAELRAVLALLRAGPGPGGGSKDLLFWVALERRRSHCTLENEPLRGFSWLSSDPGGLESDTLQWVEEPQRSCTARRCAVLQATGGVEPAGWKEMRCHLRANGYLCKYQFEVLCPAPRPGAASNLSYRAPFQLHSAALDFSPPGTEVSALCRGQLPISVTCIADEIGARWDKLSGDVLCPCPGRYLRAGKCAELPNCLDDLGGFACECATGFELGKDGRSCVTSGEGQPTLGGTGVPTRRPPATATSPVPQRTWPIRVDEKLGETPLVPEQDNSVTSIPEIPRWGSQSTMSTLQMSLQAESKATITPSGSVISKFNSTTSSATPQAFDSSSAVVFIFVSTAVVVLVILTMTVLGLVKLCFHESPSSQPRKESMGPPGLESDPEPAALGSSSAHCTNNGVKVGDCDLRDRAEGALLAESPLGSSDA

SEQ ID NO: 25434 - protein, 720 aa, Homo sapiens
MEPVETWTPGKVATWLRGLDDSLQDYPFEDWQLPGKNLLQLCPQSLEALAVRSLGHQELILGGVEQLQALSSRLQTENLQSLTEGLLGATHDFQSIVQGCLGDCAKTPIDVLCAAVELLHEADALLFWLSRYLFSHLNDFSACQEIRDLLEELSQVLHEDGPAAEKEGTVLRICSHVAGICHNILVCCPKELLEQKAVLEQVQLDSPLGLEIHTTSNCQHFVSQVDTQVPTDSRLQIQPGDEVVQINEQVVVREERDMVGWPRKNMVRELLREPAGLSLVLKKIPIPETPPQTPPQVLDSPHQRSPSLSLAPLSPRAPSEDVFAFDLSSNPSPGPSPAWTDSASLGPEPLPIPPEPPAILPAGVAGTPGLPESPDKSPVGRKKSKGLATRLSRRRVSCRELGRPDCDGWLLLRKAPGGFMGPRWRRRWFVLKGHTLYWYRQPQDEKAEGLINVSNYSLESGHDQKKKYVFQLTHDVYKPFIFAADTLTDLSMWVRHLITCISKYQSPGRAPPPREEDCYSETEAEDPDDEAGSHSASPSPAQAGSPLHGDTSPAATPTQRSPRTSFGSLTDSSEEALEGMVRGLRQGGVSLLGQPQPLTQEQWRSSFMRRNRDPQLNERVHRVRALQSTLKAKLQELQVLEEVLGDPELTGEKFRQWKEQNRELYSEGLGAWGVAQAEGSSHILTSDSTEQSPHSLPSDPEEHSHLCPLTSESSLRPPDL

SEQ ID NO: 25435 - protein, 713 aa, Homo sapiens
MEPVETWTPGKVATWLRGLDDSLQDYPFEDWQLPGKNLLQLCPQSLEALAVRSLGHQELILGGVEQLQALSSRLQTENLQSLTEGLLGATHDFQSIVQGCLGDCAKTPIDVLCAAVELLHEADALLFWLSRYLFSHLNDFSACQEIRDLLEELSQVLHEDGPAAEKEGTVLRICSHVAGICHNILVCCPKELLEQKAVLEQVQLDSPLGLEIHTTSNCQHFVSQVDTQVPTDSRLQIQPGDEVVQINEQVVVGWPRKNMVRELLREPAGLSLVLKKIPIPETPPQTPPQVLDSPHQRSPSLSLAPLSPRAPSEDVFAFDLSSNPSPGPSPAWTDSASLGPEPLPIPPEPPAILPAGVAGTPGLPESPDKSPVGRKKSKGLATRLSRRRVSCRELGRPDCDGWLLLRKAPGGFMGPRWRRRWFVLKGHTLYWYRQPQDEKAEGLINVSNYSLESGHDQKKKYVFQLTHDVYKPFIFAADTLTDLSMWVRHLITCISKYQSPGRAPPPREEDCYSETEAEDPDDEAGSHSASPSPAQAGSPLHGDTSPAATPTQRSPRTSFGSLTDSSEEALEGMVRGLRQGGVSLLGQPQPLTQEQWRSSFMRRNRDPQLNERVHRVRALQSTLKAKLQELQVLEEVLGDPELTGEKFRQWKEQNRELYSEGLGAWGVAQAEGSSHILTSDSTEQSPHSLPSDPEEHSHLCPLTSESSLRPPDL

SEQ ID NO: 25436 - protein, 1261 aa, Homo sapiens
MDAPRASAAKPPTGRKMKARAPPPPGKAATLHVHSDQKPPHDGALGSQQNLVRMKEALRASTMDVTVVLPSGLEKRSVLNGSHAMMDLLVELCLQNHLNPSHHALEIRSSETQQPLSFKPNTLIGTLNVHTVFLKEKVPEEKVKPGPPKVPEKSVRLVVNYLRTQKAVVRVSPEVPLQNILPVICAKCEVSPEHVVLLRDNIAGEELELSKSLNELGIKELYAWDNRRETFRKSSLGNDETDKEKKKFLGFFKVNKRSNSKGCLTTPNSPSMHSRSLTLGPSLSLGSISGVSVKSEMKKRRAPPPPGSGPPVQDKASEKVSLGSQIDLQKKKRRAPAPPPPQPPPPSPLIPNRTEDKEENRKSTMVSLPLGSGSHCSPDGAPQVLSEAEETVSVGSCFASEDTTEDSGVMSSPSDIVSLDSQQDSMKYKDKWATDQEDCSDQDLAGTPDLGPQKSPLWEKNGSENSHLRTEKAVTASNDEEDLLIAGEFRKTLAELDEDLEEMEDSYETDTSSLTSSIHGASNHCPQDAMIPHGDTDAIPVTFIGEVSDDPVDSGLFSNRNNNAGSFDSEGVASRRDSLAPLQAEHSQPHEKAREEVPALHPASHDVGKGIRVALSNISKDGNLMETAPRVTSFASNLHTDNLNAKVKDKVYGCADGERTQATERVNSQPVNEKDSNDKNAALAPTSWHQRGQNPGKSYRLKHGLTTYKIIPPKSEMRCYDRDVSLSTGAIKIDELGNLVSPHATGIRIISLSSSVPEAESQPIGKVREFWRCNSVEKHLGRPSESSARGPPSTPVPTQTQNPESRLQADPKPISPQQKSAHHEGRNPLGEGRNQPPTMGMGHVRVPAAHTTEVTFLKPQRRTSSQYVASAIAKRIGAPKVHADVVRPHGYAEKGYAGKAPVLAAPPVTVKDDRTSSPHSETQGWKDGAQWPCVTPPNNHGEDLAVGAPPRGEVIGPHRKLSTQDRPAAIHRSSCFSLVQSSQRDRVSVGQSCGFSGKQSTSSQEASSASEPRRAPDGTDPPPPHTSDTQACSRELVNGSVRAPGHGEPSHPPGGSGTESHILLEREEKPSVFSTDGNETDSIWPPSIFGPKKKFKPVVQRPVPKDTSLHSALMEAIHSAGGKDRLRKTAEHTGEGRPAKLSYTEAEGERSALLAAIRGHSGTCSLRKVASSASEELQSFRDAALSAQGSESPLLEDLGLLSPPAIPPPPPPPSQALSAPRTASRFSTGTLSNTADARQALMDAIRSGTGAARLRKVPLLV

SEQ ID NO: 25437 - protein, 1343 aa, Homo sapiens
MDAPRASAAKPPTGRKMKARAPPPPGKAATLHVHSDQKPPHDGALGSQQNLVRMKEALRASTMDVTVVLPSGLEKRSVLNGSHAMMDLLVELCLQNHLNPSHHALEIRSSETQQPLSFKPNTLIGTLNVHTVFLKEKVPEEKVKPGPPKVPEKSVRLVVNYLRTQKAVVRVSPEVPLQNILPVICAKCEVSPEHVVLLRDNIAGEELELSKSLNELGIKELYAWDNRRETFRKSSLGNDETDKEKKKFLGFFKVNKRSNSKAEQLVLSGADSDEDTSRAAPGRGLNGCLTTPNSPSMHSRSLTLGPSLSLGSISGVSVKSEMKKRRAPPPPGSGPPVQDKASEKVSLGSQIDLQKKKRRAPAPPPPQPPPPSPLIPNRTEDKEENRKSTMGGGRQVPQKPPRGTARGPPQLVLPPPPPYPPPDTDVVEPLSFPGEGAGSEASDPIPKLSLPLGSGSHCSPDGAPQVLSEAEETVSVGSCFASEDTTEDSGVMSSPSDIVSLDSQQDSMKYKDKWATDQEDCSDQDLAGTPDLGPQKSPLWEKNGSENSHLRTEKAVTASNDEEDLLIAGEFRKTLAELDEDLEEMEDSYETDTSSLTSSIHGASNHCPQDAMIPHGDTDAIPVTFIGEVSDDPVDSGLFSNRNNNAGSFDSEGVASRRDSLAPLQAEHSQPHEKAREEVPALHPASHDVGKGIRVALSNISKDGNLMETAPRVTSFASNLHTDNLNAKVKDKVYGCADGERTQATERVNSQPVNEKDSNDKNAALAPTSWHQRGQNPGKSYRLKHGLTTYKIIPPKSEMRCYDRDVSLSTGAIKIDELGNLVSPHATGIRIISLSSSVPEAESQPIGKVREFWRCNSVEKHLGRPSESSARGPPSTPVPTQTQNPESRLQADPKPISPQQKSAHHEGRNPLGEGRNQPPTMGMGHVRVPAAHTTEVTFLKPQRRTSSQYVASAIAKRIGAPKVHADVVRPHGYAEKGYAGKAPVLAAPPVTVKDDRTSSPHSETQGWKDGAQWPCVTPPNNHGEDLAVGAPPRGEVIGPHRKLSTQDRPAAIHRSSCFSLVQSSQRDRVSVGQSCGFSGKQSTSSQEASSASEPRRAPDGTDPPPPHTSDTQACSRELVNGSVRAPGHGEPSHPPGGSGTESHILLEREEKPSVFSTDGNETDSIWPPSIFGPKKKFKPVVQRPVPKDTSLHSALMEAIHSAGGKDRLRKTAEHTGEGRPAKLSYTEAEGERSALLAAIRGHSGTCSLRKVASSASEELQSFRDAALSAQGSESPLLEDLGLLSPPAIPPPPPPPSQALSAPRTASRFSTGTLSNTADARQALMDAIRSGTGAARLRKVPLLV

SEQ ID NO: 25438 - protein, 1214 aa, Homo sapiens
MDAPRASAAKPPTGRKMKARAPPPPGKAATLHVHSDQKPPHDGALGSQQNLVRMKEALRASTMDVTVVLPSGLEKRSVLNGSHAMMDLLVELCLQNHLNPSHHALEIRSSETQQPLSFKPNTLIGTLNVHTVFLKEKVPEEKVKPGPPKVPEKSVRLVVNYLRTQKAVVRVSPEVPLQNILPVICAKCEVSPEHVVLLRDNIAGEELELSKSLNELGIKELYAWDNRRETFRKSSLGNDETDKEKKKFLGFFKVNKRSNSKGCLTTPNSPSMHSRSLTLGPSLSLGSISGVSVKSEMKKRRAPPPPGSGPPVQDKASEKVSLGSQIDLQKKKRRAPAPPPPQPPPPSPLIPNRTEDKEENRKSTMVSLPLGSGSHCSPDGAPQVLSEAEETVSVGSCFASEDTTEDSGVMSSPSDIVSLDSQQDSMKYKDKWATDQEDCSDQDLAGTPDLGPQKSPLWEKNGSENSHLRTEKAVTASNDEEDLLIAGEFRKTLAELDEDLEEMEDSYETDTSSLTSSIHGASNHCPQDAMIPHGDTDAIPVTFIGEVSDDPVDSGLFSNRNNNAGSFDSEGVASRRDSLAPLQAEHSQPHEKAREEVPALHPASHDVGKGIRVALSNISKDGNLMETAPRVTSFASNLHTDNLNAKVKDKVYGCADGERTQATERVNSQPVNEKDSNDKNAALAPTSWHQRGQNPGKSYRLKHGLTTYKIIPPKSEMRCYDRDVSLSTGAIKIDELGNLVSPHATGIRIISLSSSVPEAESQPIGKVREFWRCNSVEKHLGRPSESSARGPPSTPVPTQTQNPESRLQADPKPISPQQKSAHHEGRNPLGEGRNQPPTMGMGHVRVPAAHTTEVTFLKPQRRTSSQYVASAIAKRIGAPKVHADVVRPHGYAEKGYAGKAPVLAAPPVTVKDDRTSSPHSETQGWKDGAQWPCVTPPNNHGEDLAVGAPPRGEVIGPHRKLSTQDRPAAIHRSSCFSLVQSSQRDRVSVGQSCGFSGKQSTSSQEASSASEPRRAPDGTDPPPPHTSDTQACSRELVNGSVRAPGHGEPSHPPGGSGTESHILLEREEKPSVFSTDGNETDSIWPPSIFGPKKKFKPVVQRPVPKDTSLHSALMEAIHSAGGKDRLRKTAEHTGEGRPAKLSYTEAEGERSALLAAIRGHSGTCSLRKALSAPRTASRFSTGTLSNTADARQALMDAIRSGTGAARLRKVPLLV

SEQ ID NO: 25439 - protein, 469 aa, Homo sapiens
MDAPRASAAKPPTGRKMKARAPPPPGKAATLHVHSDQKPPHDGALGSQQNLVRMKEALRASTMDVTVVLPSGLEKRSVLNGSHAMMDLLVELCLQNHLNPSHHALEIRSSETQQPLSFKPNTLIGTLNVHTVFLKEKVPEEKVKPGPPKVPEKSVRLVVNYLRTQKAVVRVSPEVPLQNILPVICAKCEVSPEHVVLLRDNIAGEELELSKSLNELGIKELYAWDNRRETFRKSSLGNDETDKEKKKFLGFFKVNKRSNSKGCLTTPNSPSMHSRSLTLGPSLSLGSISGVSVKSEMKKRRAPPPPGSGPPVQDKASEKVSLGSQIDLQKKKRRAPAPPPPQPPPPSPLIPNRTEDKEENRKSTMVYGAAEAVIRLLSLLLNTTAPGTAKPRTLWMSEGRSSLHNPEIKCSCFSSSSPFPQSLLSLLLGLSSICECMCTLRHTHAHTHNPSCVLPTSEILAFGRQSLIS

SEQ ID NO: 25440 - protein, 379 aa, Homo sapiens
MDAPRASAAKPPTGRKMKARAPPPPGKAATLHVHSDQKPPHDGALGSQQNLVRMKEALRASTMDVTVVLPSGLEKRSVLNGSHAMMDLLVELCLQNHLNPSHHALEIRSSETQQPLSFKPNTLIGTLNVHTVFLKEKVPEEKVKPGPPKVPEKSVRLVVNYLRTQKAVVRVSPEVPLQNILPVICAKCEVSPEHVVLLRDNIAGEELELSKSLNELGIKELYAWDNRRETFRKSSLGNDETDKEKKKFLGFFKVNKRSNSKGCLTTPNSPSMHSRSLTLGPSLSLGSISGVSVKSEMKKRRAPPPPGSGPPVQDKASEKVSLGSQIDLQKKKRRAPAPPPPQPPPPSPLIPNRTEDKEENRKSTMVYCCASFPTQAKRF

SEQ ID NO: 25441 - protein, 803 aa, Homo sapiens
MSAPFSLVFPRTEKAVTASNDEEDLLIAGEFRKTLAELDEDLEEMEDSYETDTSSLTSSIHGASNHCPQDAMIPHGDTDAIPVTFIGEVSDDPVDSGLFSNRNNNAGSFDSEGVASRRDSLAPLQAEHSQPHEKAREEVPALHPASHDVGKGIRVALSNISKDGNLMETAPRVTSFASNLHTDNLNAKVKDKVYGCADGERTQATERVNSQPVNEKDSNDKNAALAPTSWHQRGQNPGKSYRLKHGLTTYKIIPPKSEMRCYDRDVSLSTGAIKIDELGNLVSPHATGIRIISLSSSVPEAESQPIGKVREFWRCNSVEKHLGRPSESSARGPPSTPVPTQTQNPESRLQADPKPISPQQKSAHHEGRNPLGEGRNQPPTMGMGHVRVPAAHTTEVTFLKPQRRTSSQYVASAIAKRIGAPKVHADVVRPHGYAEKGYAGKAPVLAAPPVTVKDDRTSSPHSETQGWKDGAQWPCVTPPNNHGEDLAVGAPPRGEVIGPHRKLSTQDRPAAIHRSSCFSLVQSSQRDRVSVGQSCGFSGKQSTSSQEASSASEPRRAPDGTDPPPPHTSDTQACSRELVNGSVRAPGHGEPSHPPGGSGTESHILLEREEKPSVFSTDGNETDSIWPPSIFGPKKKFKPVVQRPVPKDTSLHSALMEAIHSAGGKDRLRKTAEHTGEGRPAKLSYTEAEGERSALLAAIRGHSGTCSLRKVASSASEELQSFRDAALSAQGSESPLLEDLGLLSPPAIPPPPPPPSQALSAPRTASRFSTGTLSNTADARQALMDAIRSGTGAARLRKVPLLV

SEQ ID NO: 25442 - protein, 1271 aa, Homo sapiens
MDAPRASAAKPPTGRKMKARAPPPPGKAATLHVHSDQKPPHDGALGSQQNLVRMKEALRASTMDVTVVLPSGLEKRSVLNGSHAMMDLLVELCLQNHLNPSHHALEIRSSETQQPLSFKPNTLIGTLNVHTVFLKEKVPEEKVKPGPPKVPEKSVRLVVNYLRTQKAVVRVSPEVPLQNILPVICAKCEVSPEHVVLLRDNIAGEELELSKSLNELGIKELYAWDNRRETFRKSSLGNDETDKEKKKFLGFFKVNKRSNSKGCLTTPNSPSMHSRSLTLGPSLSLGSISGVSVKSEMKKRRAPPPPGSGPPVQDKASEKVSLGSQIDLQKKKRRAPAPPPPQPPPPSPLIPNRTEDKEENRKSTMGGGRQVPQKPPRGTARGPPQLVLPPPPPYPPPDTDVVEPLSFPGEGAGSEASDPIPKLSLPLGSGSHCSPDGAPQVLSEAEETVSVGSCFASEDTTEDSGVMSSPSDIVSLDSQQDSMKYKDKWATDQEDCSDQDLAGTPDLGPQKSPLWEKNGSENSHLRTEKAVTASNDEEDLLIAGEFRKTLAELDEDLEEMEDSYETDTSSLTSSIHGASNHCPQDAMIPHGDTDAIPVTFIGEVSDDPVDSGLFSNRNNNAGSFDSEGVASRRDSLAPLQAEHSQPHEKAREEVPALHPASHDVGKGIRVALSNISKDGNLMETAPRVTSFASNLHTDNLNAKVKDKVYGCADGERTQATERVNSQPVNEKDSNDKNAALAPTSWHQRGQNPGKSYRLKHGLTTYKIIPPKSEMRCYDRDVSLSTGAIKIDELGNLVSPHATGIRIISLSSSVPEAESQPIGKVREFWRCNSVEKHLGRPSESSARGPPSTPVPTQTQNPESRLQADPKPISPQQKSAHHEGRNPLGEGRNQPPTMGMGHVRVPAAHTTEVTFLKPQRRTSSQYVASAIAKRIGAPKVHADVVRPHGYAEKGYAGKAPVLAAPPVTVKDDRTSSPHSETQGWKDGAQWPCVTPPNNHGEDLAVGAPPRGEVIGPHRKLSTQDRPAAIHRSSCFSLVQSSQRDRVSVGQSCGFSGKQSTSSQEASSASEPRRAPDGTDPPPPHTSDTQACSRELVNGSVRAPGHGEPSHPPGGSGTESHILLEREEKPSVFSTDGNETDSIWPPSIFGPKKKFKPVVQRPVPKDTSLHSALMEAIHSAGGKDRLRKTAEHTGEGRPAKLSYTEAEGERSALLAAIRGHSGTCSLRKALSAPRTASRFSTGTLSNTADARQALMDAIRSGTGAARLRKVPLLV

SEQ ID NO: 25443 - protein, 919 aa, Homo sapiens
MGLFRGFVFLLVLCLLHQSNTSFIKLNNNGFEDIVIVIDPSVPEDEKIIEQIEDMVTTASTYLFEATEKRFFFKNVSILIPENWKENPQYKRPKHENHKHADVIVAPPTLPGRDEPYTKQFTECGEKGEYIHFTPDLLLGKKQNEYGPPGKLFVHEWAHLRWGVFDEYNEDQPFYRAKSKKIEATRCSAGISGRNRVYKCQGGSCLSRACRIDSTTKLYGKDCQFFPDKVQTEKASIMFMQSIDSVVEFCNEKTHNQEAPSLQNIKCNFRSTWEVISNSEDFKNTIPMVTPPPPPVFSLLKISQRIVCLVLDKSGSMGGKDRLNRMNQAAKHFLLQTVENGSWVGMVHFDSTATIVNKLIQIKSSDERNTLMAGLPTYPLGGTSICSGIKYAFQVIGELHSQLDGSEVLLLTDGEDNTASSCIDEVKQSGAIVHFIALGRAADEAVIEMSKITGGSHFYVSDEAQNNGLIDAFGALTSGNTDLSQKSLQLESKGLTLNSNAWMNDTVIIDSTVGKDTFFLITWNSLPPSISLWDPSGTIMENFTVDATSKMAYLSIPGTAKVGTWAYNLQAKANPETLTITVTSRAANSSVPPITVNAKMNKDVNSFPSPMIVYAEILQGYVPVLGANVTAFIESQNGHTEVLELLDNGAGADSFKNDGVYSRYFTAYTENGRYSLKVRAHGGANTARLKLRPPLNRAAYIPGWVVNGEIEANPPRPEIDEDTQTTLEDFSRTASGGAFVVSQVPSLPLPDQYPPSQITDLDATVHEDKIILTWTAPGDNFDVGKVQRYIIRISASILDLRDSFDDALQVNTTDLSPKEANSKESFAFKPENISEENATHIFIAIKSIDKSNLTSKVSNIAQVTLFIPQANPDDIDPTPTPTPTPTPDKSHNSGVNISTLVLSVIGSVVIVNFILSTTI

SEQ ID NO: 25444 - protein, 237 aa, Homo sapiens
MVTPPPPPVFSLLKISQRIVCLVLDKSGSMGGKDRLNRMNQAAKHFLLQTVENGSWVGMVHFDSTATIVNKLIQIKSSDERNTLMAGLPTYPLGGTSICSGIKYAFQVIGELHSQLDGSEVLLLTDGEDNTASSCIDEVKQSGAIVHFIALGRAADEAVIEMSKITGGSHFYVSDEAQNNGLIDAFGALTSGNTDLSQKSLQVRVLIPWVFMFTFATRKNHLVVISFEFHIFLKVNF

SEQ ID NO: 25445 - protein, 540 aa, Homo sapiens
MVRTDGHTLSEKRNYQVTNSMFGASRKKFVEGVDSDYHDENMYYSQSSMFPHRSEKDMLASPSTSGQLSQFGASLYGQQSALGLPMRGMSNNTPQLNRSLSQGTQLPSHVTPTTGVPTMSLHTPPSPSRGILPMNPRNMMNHSQVGQGIGIPSRTNSMSSSGLGSPNRSSPSIICMPKQQPSRQPFTVNSMSGFGMNRNQAFGMNNSLSSNIFNGTDGSENVTGLDLSDFPALADRNRREGSGNPTPLINPLAGRAPYVGMVTKPANEQSQDFSIHNEDFPALPGSSYKDPTSSNDDSKSNLNTSGKTTSSTDGPKFPGDKSSTTQNNNQQKKGIQVLPDGRVTNIPQGMVTDQFGMIGLLTFIRAAETDPGMVHLALGSDLTTLGLNLNSPENLYPKFASPWASSPCRPQDIDFHVPSEYLTNIHIRDKLAAIKLGRYGEDLLFYLYYMNGGDVLQLLAAVELFNRDWRYHKEERVWITRAPGMEPTMKTNTYERGTYYFFDCLNWRKVAKEFHLEYDKLEERPHLPSTFNYNPAQQAF

SEQ ID NO: 25446 - protein, 365 aa, Homo sapiens
MPKQQPSRQPFTVNSMSGFGMNRNQAFGMNNSLSSNIFNGTDGSENVTGLDLSDFPALADRNRREGSGNPTPLINPLAGRAPYVGMVTKPANEQSQDFSIHNEDFPALPGSSYKDPTSSNDDSKSNLNTSGKTTSSTDGPKFPGDKSSTTQNNNQQKKGIQVLPDGRVTNIPQGMVTDQFGMIGLLTFIRAAETDPGMVHLALGSDLTTLGLNLNSPENLYPKFASPWASSPCRPQDIDFHVPSEYLTNIHIRDKLAAIKLGRYGEDLLFYLYYMNGGDVLQLLAAVELFNRDWRYHKEERVWITRAPGMEPTMKTNTYERGTYYFFDCLNWRKVAKEFHLEYDKLEERPHLPSTFNYNPAQQAF

SEQ ID NO: 25447 - protein, 191 aa, Homo sapiens
MVTDQFGMIGLLTFIRAAETDPGMVHLALGSDLTTLGLNLNSPENLYPKFASPWASSPCRPQDIDFHVPSEYLTNIHIRDKLAAIKLGRYGEDLLFYLYYMNGGDVLQLLAAVELFNRDWRYHKEERVWITRAPGMEPTMKTNTYERGTYYFFDCLNWRKVAKEFHLEYDKLEERPHLPSTFNYNPAQQAF

SEQ ID NO: 25448 - protein, 475 aa, Homo sapiens
MVRTDGHTLSEKRNYQVTNSMFGASRKKFVEGVDSDYHDENMYYSQSSMFPHRSEKDMLASPSTSGQLSQFGASLYGQQSALGLPMRGMSNNTPQLNRSLSQGTQLPSHVTPTTGVPTMSLHTPPSPSRGILPMNPRNMMNHSQVGQGIGIPSRTNSMSSSGLGSPNRSSPSIICMPKQQPSRQPFTVNSMSGFGMNRNQAFGMNNSLSSNIFNGTDGSENVTGLDLSDFPALADRNRREGSGNPTPLINPLAGRAPYVGMVTKPANEQSQDFSIHNEDFPALPGSSYKDPTSSNDDSKSNLNTSGKTTSSTDGPKFPGDKSSTTQNNNQQKKGIQVLPDGRVTNIPQGMVTDQFGMIGLLTFIRAAETDPGMVHLALGSDLTTLGLNLNSPENLYPKFASPWASSPCRPQDIDFHVPSEYLTNIHIRDKLAAIKLGRYGEDLLFYLYYMNGGDVLQLLAAVELYVQSILITFVL

SEQ ID NO: 25449 - protein, 490 aa, Homo sapiens
MVRTDGHTLSEKRNYQVTNSMFGASRKKFVEGVDSDYHDENMYYSQSSMFPHRSEKDMLASPSTSGQLSQFGASLYGQQSALGLPMRGMSNNTPQLNRSLSQGTQLPSHVTPTTGVPTMSLHTPPSPSRGILPMNPRNMMNHSQVGQGIGIPSRTNSMSSSGLGSPNRSSPSIICMPKQQPSRQPFTVNSMSGFGMNRNQAFGMNNSLSSNIFNGTDGSENVTGLDLSDFPALPGSSYKDPTSSNDDSKSNLNTSGKTTSSTDGPKFPGDKSSTTQNNNQQKKGIQVLPDGRVTNIPQGMVTDQFGMIGLLTFIRAAETDPGMVHLALGSDLTTLGLNLNSPENLYPKFASPWASSPCRPQDIDFHVPSEYLTNIHIRDKLAAIKLGRYGEDLLFYLYYMNGGDVLQLLAAVELFNRDWRYHKEERVWITRAPGMEPTMKTNTYERGTYYFFDCLNWRKVAKEFHLEYDKLEERPHLPSTFNYNPAQQAF

SEQ ID NO: 25450 - protein, 601 aa, Homo sapiens
MDWGTELWDQFEVLERHTQWGLDLLDRYVKFVKERTEVEQAYAKQLRSLVKKYLPKRPAKDDPESKFSQQQSFVQILQEVNDFAGQRELVAENLSVRVCLELTKYSQEMKQERKMHFQEGRRAQQQLENGFKQLENSKRKFERDCREAEKAAQTAERLDQDINATKADVEKAKQQAHLRSHMAEESKNEYAAQLQRFNRDQAHFYFSQMPQIFDKLQDMDERRATRLGAGYGLLSEAELEVVPIIAKCLEGMKVAANAVDPKNDSHVLIELHKSGFARPGDVEFEDFSQPMNRAPSDSSLGTPSDGRPELRGPGRSRTKRWPFGKKNKPRPPPLSPLGGPVPSALPNGPPSPRSGRDPLAILSEISKSVKPRLASFRSLRGSRGTVVTEDFSHLPPEQQRKRLQQQLEERSRELQKEVDQREALKKMKDVYEKTPQMGDPASLEPQIAETLSNIERLKLEVQKYEAWLAEAESRVLSNRGDSLSRHARPPDPPASAPPDSSSNSASQDTKESSEEPPSEESQDTPIYTEFDEDFEEEPTSPIGHCVAIYHFEGSSEGTISMAEGEDLSLMEEDKGDGWTRVRRKEGGEGYVPTSYLRVTLN

SEQ ID NO: 25451 - protein, 545 aa, Homo sapiens
MDWGTELWDQFEVLERHTQWGLDLLDRYVKFVKERTEVEQAYAKQLRSLVKKYLPKRPAKDDPESKFSQQQSFVQILQEVNDFAGQRELVAENLSVRVCLELTKYSQEMKQERKMHFQEGRRAQQQLENGFKQLENSKRKFERDCREAEKAAQTAERLDQDINATKADVEKAKQQAHLRSHMAEESKNEYAAQLQRFNRDQAHFYFSQMPQIFDKLQDMDERRATRLGAGYGLLSEAELEVVPIIAKCLEGMKVAANAVDPKNDSHVLIELHKSGFARPGDVEFEDFSQPMNRAPSDSSLGTPSDGRPELRGPGRSRTKRWPFGKKNKTVVTEDFSHLPPEQQRKRLQQQLEERSRELQKEVDQREALKKMKDVYEKTPQMGDPASLEPQIAETLSNIERLKLEVQKYEAWLAEAESRVLSNRGDSLSRHARPPDPPASAPPDSSSNSASQDTKESSEEPPSEESQDTPIYTEFDEDFEEEPTSPIGHCVAIYHFEGSSEGTISMAEGEDLSLMEEDKGDGWTRVRRKEGGEGYVPTSYLRVTLN

SEQ ID NO: 25452 - protein, 593 aa, Homo sapiens
MDWGTELWDQFEVLERHTQWGLDLLDRYVKFVKERTEVEQAYAKQLRSLVKKYLPKRPAKDDPESKFSQQQSFVQILQEVNDFAGQRELVAENLSVRVCLELTKYSQEMKQERKMHFQEGRRAQQQLENGFKQLENSKRKFERDCREAEKAAQTAERLDQDINATKADVEKAKQQAHLRSHMAEESKNEYAAQLQRFNRDQAHFYFSQMPQIFDKLQDMDERRATRLGAGYGLLSEAELEVVPIIAKCLEGMKVAANAVDPKNDSHVLIELHKSGFARPGDVEFEDFSQPMNRAPSDSSLGTPSDGRPELRGPGRSRTKRWPFGKKNKTVVTEDFSHLPPEQQRKRLQQQLEERSRELQKEVDQREALKKMKDVYEKTPQMGDPASLEPQIAETLSNIERLKLEVQKYEAWLAEAESRVLSNRGDSLSRHARPPDPPASAPPDSSSNSASQDTKESSEEPPSEESQDTPIYTEFDEDFEEEPTSPIGHCVAIYHFEDLGPPPPPSQGPARALSLWPRVKTSVLWKKTKGTAGPGSGGKREARATCPPPTSESRSIEPCQRREEGGCRLLLLGHGGSQDLGTLFLTPWLRLRPV

SEQ ID NO: 25453 - protein, 456 aa, Homo sapiens
MDWGTELWDQFEVLERHTQWGLDLLDRYVKFVKERTEVEQAYAKQLRSLVKKYLPKRPAKDDPESKFSQQQSFVQILQEVNDFAGQRELVAENLSVRVCLELTKYSQEMKQERKMHFQEGRRAQQQLENGFKQLENSKRKFERDCREAEKAAQTAERLDQDINATKADVEKAKQQAHLRSHMAEESKNEYAAQLQRFNRDQAHFYFSQMPQIFDKLQDMDERRATRLGAGYGLLSEAELEVVPIIAKCLEGMKVAANAVDPKNDSHVLIELHKSGFARPGDVEFEDFSQPMNRAPSDSSLGTPSDGRPELRGPGRSRTKRWPFGKKNKTVVTEDFSHLPPEQQRKRLQQQLEERSRELQKEVDQREALKKMKDVYEKTPQMGDPASLEPQIAETLSNIERLKLEVQKYEAWLAEAESRVLSNRGDSLSRHARPPDPPASAPPDSSSNSASQDTKER

SEQ ID NO: 25454 - protein, 341 aa, Homo sapiens
MDWGTELWDQFEVLERHTQWGLDLLDRYVKFVKERTEVEQAYAKQLRSLVKKYLPKRPAKDDPESKFSQQQSFVQILQEVNDFAGQRELVAENLSVRVCLELTKYSQEMKQERKMHFQEGRRAQQQLENGFKQLENSKRKFERDCREAEKAAQTAERLDQDINATKADVEKAKQQAHLRSHMAEESKNEYAAQLQRFNRDQAHFYFSQMPQIFDKLQDMDERRATRLGAGYGLLSEAELEVVPIIAKCLEGMKVAANAVDPKNDSHVLIELHKSGFARPGDVEFEDFSQPMNRAPSDSSLGTPSDGRPELRGPGRSRTKRWPFGKKNKPSRQPWDSGDRGF

SEQ ID NO: 25455 - protein, 349 aa, Homo sapiens
MAGPAIHTAPMLFLVLLLPLELSLAGALAPGTPARNLPENHIDLPGPALWTPQASHHRRRGPGKKEWGPGLPSQAQDGAVVTATRQASRLPEAEGLLPEQSPAGLLQDKDLLLGLALPYPEKENRPPGWERTRKRSREHKRRRDRLRLHQGRALVRGPSSLMKKAELSEAQVLDAAMEESSTSLAPTMFFLTTFEAAPATEESLILPVTSLRPQQAQPRSDGEVMPTLDMALFDWTDYEDLKPDGWPSAKKKEKHRGKLSSDGNETSPAEGEPCDHHQDCLPGTCCDLREHLCTPHNRGLNNKCFDDCMCVEGLRCYAKFHRNRRVTRRKGRCVEPETANGDQGSFINV

SEQ ID NO: 25456 - protein, 101 aa, Homo sapiens
MFLTGDTSPAEDNREATLPQCSLPELYACIENFNKESKKSNLLKMHGISLNEAQEVLARNLNVMSFTRGADVRGDLQPVISVNKMNKPGKHRKTPSPKINK

SEQ ID NO: 25457 - protein, 95 aa, Homo sapiens
MFLTGDTSPAEDNREATLPQCSLPELYACIENFNKESKKSNLLKMHGISLNEAQEVLARNLNVMSFTRGADVRGDLQPVIRKTIHESKGSGMEIF

SEQ ID NO: 25458 - protein, 108 aa, Homo sapiens
MSLTSSSSVRVEWIAAVTIAAGTAAIGYLAYKRFYVKDHRNKAMINLHIQKDNPKIVHAFDMEDLGDKAVYCRCWRSKKFPFCDGAHTKHNEETGDNVGPLIIKKKET

SEQ ID NO: 25459 - protein, 203 aa, Homo sapiens
MPGPLTCTPAWQGQGRAAAFLCCSFQRAGAVVGVPARWHRGRLSSQQRLRSSLGGSHPCPQLGRRLVREGVISVPRQQGRRRCRESFSPADVAPGPICSANICLSGVRFLTCLNRVREHVVGPSPSPAAPICFFPVVEALCTLRGRRCHCLPFPKRGMQRWMLPLRRGARLLPLASSKNPRARSPGLDPLGSSETLWSHRGGH

SEQ ID NO: 25460 - protein, 172 aa, Homo sapiens
MASDEGKLFVGGLSFDTNEQSLEQVFSKYGQISEVVVVKDRETQRSRGFGFVTFENIDDAKDAMMAMNGKSVDGRQIRVDQAGKSSDNRSRGYRGGSAGGRGFFRGGRGRGRGFSRGGGDRGYGGNRFESRSGGYGGSRDYYSSRSQSGGYSDRSSGGSYRDSYDSYATHNE

SEQ ID NO: 25461 - protein, 263 aa, Homo sapiens
MASDEGKLFVGGLSFDTNEQSLEQVFSKYGQISEVVVVKDRETQRSRGFGFVTFENIDDAKDAMMAMNGKSVDGRQIRVDQAGGGDRGYGGNRFESRSGGYGGSRDYYSSRSQSGGYSDRSSGGSYRDSYDSYGKSHSEGATLLWPAVGARFTLVPSPSTLGWTLRPCHCACPEEAHLSSQSHFYRRTQKPNETDQKGKGERGPAGQSARCMCGRRPASLGCGGWLLPGRRPRPGLASGVKLPLVASVPLHCACFLSSATHNE

SEQ ID NO: 25462 - protein, 244 aa, Homo sapiens
MSSRWSRSSQSTDRSLKSVDGRQIRVDQAGKSSDNRSRGYRGGSAGGRGFFRGGRGRGRGFSRGGGDRGYGGNRFESRSGGYGGSRDYYSSRSQSGGYSDRSSGGSYRDSYDSYGKSHSEGATLLWPAVGARFTLVPSPSTLGWTLRPCHCACPEEAHLSSQSHFYRRTQKPNETDQKGKGERGPAGQSARCMCGRRPASLGCGGWLLPGRRPRPGLASGVKLPLVASVPLHCACFLSSATHNE

SEQ ID NO: 25463 - protein, 339 aa, Homo sapiens
MKDSLVLLGRVPAHPDSRCWFLAWNPAGTLLASCGGDRRIRIWGTEGDSWICKSVLSEGHQRTVRKVAWSPCGNYLASASFDATTCIWKKNQDDFECVTTLEGHENEVKSVAWAPSGNLLATCSRDKSVWVWEVDEEDEYECVSVLNSHTQDVKHVVWHPSQELLASASYDDTVKLYREEEDDWVCCATLEGHESTVWSLAFDPSGQRLASCSDDRTVRIWRQYLPGNEQGVACSGSDPSWKCICTLSGFHSRTIYDIAWCQLTGALATACGDDAIRVFQEDPNSDPQQPTFSLTAHLHQAHSQDVNCVAWNPKEPGLLASCSDDGEVAFWKYQRPEGL

SEQ ID NO: 25464 - protein, 89 aa, Homo sapiens
MCDRKAVIKNADMSEEMQQDSVECATQALEKYNIEKDIAAHIKKEFDKKYNPTWHCIVGRNFGSYVTHETKHFIYFYLGQVAILLFKSG

SEQ ID NO: 25465 - protein, 1690 aa, Homo sapiens
MWSLHIVLMRCSFRLTKSLATGPWSLILILFSVQYVYGSGKKYIGPCGGRDCSVCHCVPEKGSRGPPGPPGPQGPIGPLGAPGPIGLSGEKGMRGDRGPPGAAGDKGDKGPTGVPGFPGLDGIPGHPGPPGPRGKPGMSGHNGSRGDPGFPGGRGALGPGGPLGHPGEKGEKGNSVFILGAVKGIQGDRGDPGLPGLPGSWGAGGPAGPTGYPGEPGLVGPPGQPGRPGLKGNPGVGVKGQMGDPGEVGQQGSPGPTLLVEPPDFCLYKGEKGIKGIPGMVGLPGPPGRKGESGIGAKGEKGIPGFPGPRGDPGSYGSPGFPGLKGELGLVGDPGLFGLIGPKGDPGNRGHPGPPGVLVTPPLPLKGPPGDPGFPGRYGETGDVGPPGPPGLLGRPGEACAGMIGPPGPQGFPGLPGLPGEAGIPGRPDSAPGKPGKPGSPGLPGAPGLQGLPGSSVIYCSVGNPGPQGIKGKVGPPGGRGPKGEKGNEGLCACEPGPMGPPGPPGLPGRQGSKGDLGLPGWLGTKGDPGPPGAEGPPGLPGKHGASGPPGNKGAKGDMVVSRVKGHKGERGPDGPPGFPGQPGSHGRDGHAGEKGDPGPPGDHEDATPGGKGFPGPLGPPGKAGPVGPPGLGFPGPPGERGHPGVPGHPGVRGPDGLKGQKGDTISCNVTYPGRHGPPGFDGPPGPKGFPGPQGAPGLSGSDGHKGRPGTPGTAEIPGPPGFRGDMGDPGFGGEKGSSPVGPPGPPGSPGVNGQKGIPGDPAFGHLGPPGKRGLSGVPGIKGPRGDPGCPGAEGPAGIPGFLGLKGPKGREGHAGFPGVPGPPGHSCERGAPGIPGQPGLPGYPGSPGAPGGKGQPGDVGPPGPAGMKGLPGLPGRPGAHGPPGLPGIPGPFGDDGLPGPPGPKGPRGLPGFPGFPGERGKPGAEGCPGAKGEPGEKGMSGLPGDRGLRGAKGAIGPPGDEGEMAIISQKGTPGEPGPPGDDGFPGERGDKGTPGMQGRRGEPGRYGPPGFHRGEPGEKGQPGPPGPPGPPGSTGLRGFIGFPGLPGDQGEPGSPGPPGFSGIDGARGPKGNKGDPASHFGPPGPKGEPGSPGCPGHFGASGEQGLPGIQGPRGSPGRPGPPGSSGPPGCPGDHGMPGLRGQPGEMGDPGPRGLQGDPGIPGPPGIKGPSGSPGLNGLHGLKGQKGTKGASGLHDVGPPGPVGIPGLKGERGDPGSPGISPPGPRGKKGPPGPPGSSGPPGPAGATGRAPKDIPDPGPPGDQGPPGPDGPRGAPGPPGLPGSVDLLRGEPGDCGLPGPPGPPGPPGPPGYKGFPGCDGKDGQKGPVGFPGPQGPHGFPGPPGEKGLPGPPGRKGPTGLPGPRGEPGPPADVDDCPRIPGLPGAPGMRGPEGAMGLPGMRGPSGPGCKGEPGLDGRRGVDGVPGSPGPPGRKGDTGEDGYPGGPGPPGPIGDPGPKGFGPGYLGGFLLVLHSQTDQEPTCPLGMPRLWTGYSLLYLEGQEKAHNQDLGLAGSCLPVFSTLPFAYCNIHQVCHYAQRNDRSYWLASAAPLPMMPLSEEAIRPYVSRCAVCEAPAQAVAVHSQDQSIPPCPQTWRSLWIGYSFLMHTGAGDQGGGQALMSPGSCLEDFRAAPFLECQGRQGTCHFFANKYSFWLTTVKADLQFSSAPAPDTLKESQAQRQKISRCQVCVKYS

SEQ ID NO: 25466 - protein, 1712 aa, Homo sapiens
MGRDQRAVAGPALRRWLLLGTVTVGFLAQSVLAGVKKFDVPCGGRDCSGGCQCYPEKGGRGQPGPVGPQGYNGPPGLQGFPGLQGRKGDKGERGAPGVTGPKGDVGARGVSGFPGADGIPGHPGQGGPRGRPGYDGCNGTQGDSGPQGPPGSEGFTGPPGPQGPKGQKGEPYALPKEERDRYRGEPGEPGLVGFQGPPGRPGHVGQMGPVGAPGRPGPPGPPGPKGQQGNRGLGFYGVKGEKGDVGQPGPNGIPSDTLHPIIAPTGVTFHPDQYKGEKGSEGEPGIRGISLKGEEGIMGFPGLRGYPGLSGEKGSPGQKGSRGLDGYQGPDGPRGPKGEAGDPGPPGLPAYSPHPSLAKGARGDPGFPGAQGEPGSQGEPGDPGLPGPPGLSIGDGDQRRGLPGEMGPKGFIGDPGIPALYGGPPGPDGKRGPPGPPGLPGPPGPDGFLFGLKGAKGRAGFPGLPGSPGARGPKGWKGDAGECRCTEGDEAIKGLPGLPGPKGFAGINGEPGRKGDRGDPGQHGLPGFPGLKGVPGNIGAPGPKGAKGDSRTITTKGERGQPGVPGVPGMKGDDGSPGRDGLDGFPGLPGPPGDGIKGPPGDPGYPGIPGTKGTPGEMGPPGLGLPGLKGQRGFPGDAGLPGPPGFLGPPGPAGTPGQIDCDTDVKRAVGGDRQEAIQPGCIGGPKGLPGLPGPPGPTGAKGLRGIPGFAGADGGPGPRGLPGDAGREGFPGPPGFIGPRGSKGAVGLPGPDGSPGPIGLPGPDGPPGERGLPGEVLGAQPGPRGDAGVPGQPGLKGLPGDRGPPGFRGSQGMPGMPGLKGQPGLPGPSGQPGLYGPPGLHGFPGAPGQEGPLGLPGIPGREGLPGDRGDPGDTGAPGPVGMKGLSGDRGDAGFTGEQGHPGSPGFKGIDGMPGTPGLKGDRGSPGMDGFQGMPGLKGRPGFPGSKGEAGFFGIPGLKGLAGEPGFKGSRGDPGPPGPPPVILPGMKDIKGEKGDEGPMGLKGYLGAKGIQGMPGIPGLSGIPGLPGRPGHIKGVKGDIGVPGIPGLPGFPGVAGPPGITGFPGFIGSRGDKGAPGRAGLYGEIGATGDFGDIGDTINLPGRPGLKGERGTTGIPGLKGFFGEKGTEGDIGFPGITGVTGVQGPPGLKGQTGFPGLTGPPGSQGELGRIGLPGGKGDDGWPGAPGLPGFPGLRGIRGLHGLPGTKGFPGSPGSDIHGDPGFPGPPGERGDPGEANTLPGPVGVPGQKGDQGAPGERGPPGSPGLQGFPGITPPSNISGAPGDKGAPGIFGLKGYRGPPGPPGSAALPGSKGDTGNPGAPGTPGTKGWAGDSGPQGRPGVFGLPGEKGPRGEQGFMGNTGPTGAVGDRGPKGPKGDPGFPGAPGTVGAPGIAGIPQKIAVQPGTVGPQGRRGPPGAPGEMGPQGPPGEPGFRGAPGKAGPQGRGGVSAVPGFRGDEGPIGHQGPIGQEGAPGRPGSPGLPGMPGRSVSIGYLLVKHSQTDQEPMCPVGMNKLWSGYSLLYFEGQEKAHNQDLGLAGSCLARFSTMPFLYCNPGDVCYYASRNDKSYWLSTTAPLPMMPVAEDEIKPYISRCSVCEAPAIAIAVHSQDVSIPHCPAGWRSLWIGYSFLMHTAAGDEGGGQSLVSPGSCLEDFRATPFIECNGGRGTCHYYANKYSFWLTTIPEQSFQGSPSADTLKAGLIRTHISRCQVCMKNL

SEQ ID NO: 25467 - protein, 258 aa, Homo sapiens; identical to SEQ ID NO: 263

SEQ ID NO: 25468 - protein, 264 aa, Homo sapiens
MGPPLTAHPLPSRPRPLLAVERTGQRPLWAPSLELPKPVMQPLPAGAFLEEVAEGTPAQTESEPKVLDPEEDLLCIAKTFSYLRESGWYWGSITASEARQHLQKMPEGTFLVRDSTHPSYLFTLSVKTTRGPTNVRIEYADSSFRLDSNCLSRPRILAFPDVVSLVQHYVASCTADTRSDSPDPAPTPALPMPKEDAPSDPALPAPPPATAVHLKLVQPFVRRSSARSLQHLCRLVINRLVADVDCLPLPRRMADYLRQYPFQL

SEQ ID NO: 25469 - protein, 275 aa, Homo sapiens
MYLEHTSHCPHHDDDTAMDTPLPRPRPLLAVERTGQRPLWAPSLELPKPVMQPLPAGAFLEEVAEGTPAQTESEPKVLDPEEDLLCIAKTFSYLRESGWYWGSITASEARQHLQKMPEGTFLVRDSTHPSYLFTLSVKTTRGPTNVRIEYADSSFRLDSNCLSRPRILAFPDVVSLVQHYVASCTADTRSDSPDPAPTPALPMPKEDAPSDPALPAPPPATAVHLKLVQPFVRRSSARSLQHLCRLVINRLVADVDCLPLPRRMADYLRQYPFQL

SEQ ID NO: 25470 - protein, 385 aa, Homo sapiens
MDSPSSVSSYSSYSLSSSFPTSPVNSDFGFPSDSEREDKGAHGPRPDTVGQRGGSRPSPGPIRCRHRSKVSGNQHTPSHPKQRGSASPMAGSGAKRSRDGELETSLNTQGCTTEGDLLFAQKCKELQGFIPPLTDLLNGLKMGRFERGLSSFQQSVAMDRIQRIVGVLQKPQMGERYLGTLLQVEGMLKTWFPQIAAQKSSLGGGKHQLTKHFPSHHSDSAASSPASPMEKMDQTQLGHLALKPKQPWHLTQWPAMNLTWIHTTPICNPPLSSPGTISFSHGPLGTGTGIGVILFLQHGVQPFTHSAPTTPVPPTTASPVIPGEPMKLSGEGPRCYSLPVTLPSDWSYTLSPPSLPTLARKMTIGHREQQRSHPPVAADAHLLNL

SEQ ID NO: 25471 - protein, 123 aa, Homo sapiens
MDSPSSVSSYSSYSLSSSFPTSPVNSDFGFPSDSEREDKGAHGPRPDTVGQRGGSRPSPGPIRCRHRSKVSGNQHTPSHPKQRGSASPMAGSGAKRSRDGELETSLNTQGCTTEGDLLFAQKD

SEQ ID NO: 25472 - protein, 610 aa, Homo sapiens
MHFQAFWLCLGLLFISINAEFMDDDVETEDFEENSEEIDVNESELSSEIKYKTPQPIGEVYFAETFDSGRLAGWVLSKAKKDDMDEEISIYDGRWEIEELKENQVPGDRGLVLKSRAKHHAISAVLAKPFIFADKPLIVQYEVNFQDGIDCGGAYIKLLADTDDLILENFYDKTSYIIMFGPDKCGEDYKLHFIFRHKHPKTGVFEEKHAKPPDVDLKKFFTDRKTHLYTLVMNPDDTFEVLVDQTVVNKGSLLEDVVPPIKPPKEIEDPNDKKPEEWDERAKIPDPSAVKPEDWDESEPAQIEDSSVVKPAGWLDDEPKFIPDPNAEKPDDWNEDTDGEWEAPQILNPACRIGCGEWKPPMIDNPKYKGVWRPPLVDNPNYQGIWSPRKIPNPDYFEDDHPFLLTSFSALGLELWSMTSDIYFDNFIICSEKEVADHWAADGWRWKIMIANANKPGVLKQLMAAAEGHPWLWLIYLVTAGVPIALITSFCWPRKVKKKHKDTEYKKTDICIPQTKGVLEQEEKEEKAALEKPMDLEEEKKQNDGEMLEKEEESEPEEKSEEEIEIIEGQEESNQSNKSGSEDEMKEADESTGSGDGPIKSVRKRRVRKD

SEQ ID NO: 25473 - protein, 405 aa, Homo sapiens
MHFQAFWLCLGLLFISINAEFMDDDVETEDFEENSEEIDVNESELSSEIKYKTPPDVDLKKFFTDRKTHLYTLVMNPDDTFEVLVDQTVVNKGSLLEDVVPPIKPPKEIEDPNDKKPEEWDERAKIPDPSAVKPEDWDESEPAQIEDSSVVKPAGWLDDEPKFIPDPNAEKPDDWNEDTDGEWEAPQILNPACRIGCGEWKPPMIDNPKYKGVWRPPLVDNFIICSEKEVADHWAADGWRWKIMIANANKPGVLKQLMAAAEGHPWLWLIYLVTAGVPIALITSFCWPRKVKKKHKDTEYKKTDICIPQTKGVLEQEEKEEKAALEKPMDLEEEKKQNDGEMLEKEEESEPEEKSEEEIEIIEGQEESNQSNKSGSEDEMKEADESTGSGDGPIKSVRKRRVRKD

SEQ ID NO: 25474 - protein, 622 aa, Homo sapiens
MASPLPSGFPARRNSRLDVFLRRHLPPEVYDAVRAYEPCIVVSNSENHILKYVVLSDRLVYLTENPPKSIRRVVALRDVVAIDLIDDYPEFLSSPDREISQHIRIIYSSTVLKKECKKSNSVRKFLFPFHHTKANNKKVKEEKNGLAFWRSKESRSLKESPLRDQQESSTPSKDSTLCPRPGLKKLSLHGQGAFRPLPSPSRRSSQSAPTTGKAVSEPSCTTNTKEPQGLPDHNSISEIPFKCNGNGNEFYLGNSLLDSPSQSNSNLEKKESELHLYVISTTSSIFLHLKSSWNNYIIKATLLQDPFYASEFSPAIGSQKPYRSEEKIKHFSQLKSELFLKDNSLRRILSLLMELKVAAQKNFILKRLFWKTSDLFYFIVNKLHEYLPESRDKNALQNQSQRVDELVACIEIIQTLVLMFRETETESSRLNTLAAKKGALFNLLVILISEPQIPKSCPVFDIQLVADSALVRMSFDAELQKLILEYTNTATALLYEILLVFQQGNLGLGSTKFAISWIMSFLQSCPPIITFVASIVKQVVRGLSASFQLLSPCQAVLLYQQFYILKSCLRHSRTLAEYIRNNYREEFRYFIHMPALQKRLPLCYPITQPTIQLFHEVLKLVE

SEQ ID NO: 25475 - protein, 462 aa, Homo sapiens
MASPLPSGFPARRNSRLDVFLRRHLPPEVYDAVRAYEPCIVVSNSENHILKYVVLSDRLVYLTENPPKSIRRVVALRDVVAIDLIDDYPEFLSSPDREISQHIRIIYSSTVLKKECKKSNSVRKFLFPFHHTKANNKKVKEEKNGLAFWRSKESRSLKESPLRSEEKIKHFSQLKSELFLKDNSLRRILSLLMELKVAAQKNFILKRLFWKTSDLFYFIVNKLHEYLPESRDKNALQNQSQRVDELVACIEIIQTLVLMFRETETESSRLNTLAAKKGALFNLLVILISEPQIPKSCPVFDIQLVADSALVRMSFDAELQKLILEYTNTATALLYEILLVFQQGNLGLGSTKFAISWIMSFLQSCPPIITFVASIVKQVVRGLSASFQLLSPCQAVLLYQQFYILKSCLRHSRTLAEYIRNNYREEFRYFIHMPALQKRLPLCYPITQPTIQLFHEVLKLVE

SEQ ID NO: 25476 - protein, 116 aa, Homo sapiens
MGTLPARRHIPPWVKVPEDLKDPEVFQVQTRLLKAIFGPDGSRIPYIEQVSKAMLELKALESSDLTEVVVYGSYLYKLRTKWMLQSMAEWHRQRQERGMLKLAEAMNALELGPWMK

SEQ ID NO: 25477 - protein, 870 aa, Homo sapiens
MGNRGMEELIPLVNKLQDAFSSIGQSCHLDLPQIAVVGGQSAGKSSVLENFVGRDFLPRGSGIVTRRPLILQLIFSKTEHAEFLHCKSKKFTDFDEVRQEIEAETDRVTGTNKGISPVPINLRVYSPHVLNLTLIDLPGITKVPVGDQPPDIEYQIKDMILQFISRESSLILAVTPANMDLANSDALKLAKEVDPQGLRTIGVITKLDLMDEGTDARDVLENKLLPLRRGYIGVVNRSQKDIEGKKDIRAALAAERKFFLSHPAYRHMADRMGTPHLQKTLNQQLTNHIRESLPALRSKLQSQLLSLEKEVEEYKNFRPDDPTRKTKALLQMVQQFGVDFEKRIEGSGDQVDTLELSGGARINRIFHERFPFELVKMEFDEKDLRREISYAIKNIHGVRTGLFTPDLAFEAIVKKQVVKLKEPCLKCVDLVIQELINTVRQCTSKLSSYPRLREETERIVTTYIREREGRTKDQILLLIDIEQSYINTNHEDFIGFANAQQRSTQLNKKRAIPNQGEILVIRRGWLTINNISLMKGGSKEYWFVLTAESLSWYKDEEEKEKKYMLPLDNLKIRDVEKGFMSNKHVFAIFNTEQRNVYKDLRQIELACDSQEDVDSWKASFLRAGVYPEKDQAENEDGAQENTFSMDPQLERQVETIRNLVDSYVAIINKSIRDLMPKTIMHLMINNTKAFIHHELLAYLYSSADQSSLMEESADQAQRRDDMLRMYHALKEALNIIGDISTSTVSTPVPPPVDDTWLQSASSHSPTPQRRPVSSIHPPGRPPAVRGPTPGPPLIPVPVGAAASFSAPPIPSRPGPQSVFANSDLFPAPPQIPSRPVRIPPGIPPGVPSRRPPAAPSRPTIIRPAEPSLLD

SEQ ID NO: 25478 - protein, 866 aa, Homo sapiens
MGNRGMEELIPLVNKLQDAFSSIGQSCHLDLPQIAVVGGQSAGKSSVLENFVGRDFLPRGSGIVTRRPLILQLIFSKTEHAEFLHCKSKKFTDFDEVRQEIEAETDRVTGTNKGISPVPINLRVYSPHVLNLTLIDLPGITKVPVGDQPPDIEYQIKDMILQFISRESSLILAVTPANMDLANSDALKLAKEVDPQGLRTIGVITKLDLMDEGTDARDVLENKLLPLRRGYIGVVNRSQKDIEGKKDIRAALAAERKFFLSHPAYRHMADRMGTPHLQKTLNQQLTNHIRESLPALRSKLQSQLLSLEKEVEEYKNFRPDDPTRKTKALLQMVQQFGVDFEKRIEGSGDQVDTLELSGGARINRIFHERFPFELVKMEFDEKDLRREISYAIKNIHGVRTGLFTPDLAFEAIVKKQVVKLKEPCLKCVDLVIQELINTVRQCTSKLSSYPRLREETERIVTTYIREREGRTKDQILLLIDIEQSYINTNHEDFIGFANAQQRSTQLNKKRAIPNQVIRRGWLTINNISLMKGGSKEYWFVLTAESLSWYKDEEEKEKKYMLPLDNLKIRDVEKGFMSNKHVFAIFNTEQRNVYKDLRQIELACDSQEDVDSWKASFLRAGVYPEKDQAENEDGAQENTFSMDPQLERQVETIRNLVDSYVAIINKSIRDLMPKTIMHLMINNTKAFIHHELLAYLYSSADQSSLMEESADQAQRRDDMLRMYHALKEALNIIGDISTSTVSTPVPPPVDDTWLQSASSHSPTPQRRPVSSIHPPGRPPAVRGPTPGPPLIPVPVGAAASFSAPPIPSRPGPQSVFANSDLFPAPPQIPSRPVRIPPGIPPGVPSRRPPAAPSRPTIIRPAEPSLLD

SEQ ID NO: 25479 - protein, 866 aa, Homo sapiens
MGNRGMEELIPLVNKLQDAFSSIGQSCHLDLPQIAVVGGQSAGKSSVLENFVGRDFLPRGSGIVTRRPLILQLIFSKTEHAEFLHCKSKKFTDFDEVRQEIEAETDRVTGTNKGISPVPINLRVYSPHVLNLTLIDLPGITKVPVGDQPPDIEYQIKDMILQFISRESSLILAVTPANMDLANSDALKLAKEVDPQGLRTIGVITKLDLMDEGTDARDVLENKLLPLRRGYIGVVNRSQKDIEGKKDIRAALAAERKFFLSHPAYRHMADRMGTPHLQKTLNQQLTNHIRESLPALRSKLQSQLLSLEKEVEEYKNFRPDDPTRKTKALLQMVQQFGVDFEKRIEGSGDQVDTLELSGGARINRIFHERFPFELVKMEFDEKDLRREISYAIKNIHGVRTGLFTPDMAFEAIVKKQIVKLKEPSLKCVDLVVSELATVIKKCAEKLSSYPRLREETERIVTTYIREREGRTKDQILLLIDIEQSYINTNHEDFIGFANAQQRSTQLNKKRAIPNQVIRRGWLTINNISLMKGGSKEYWFVLTAESLSWYKDEEEKEKKYMLPLDNLKIRDVEKGFMSNKHVFAIFNTEQRNVYKDLRQIELACDSQEDVDSWKASFLRAGVYPEKDQAENEDGAQENTFSMDPQLERQVETIRNLVDSYVAIINKSIRDLMPKTIMHLMINNTKAFIHHELLAYLYSSADQSSLMEESADQAQRRDDMLRMYHALKEALNIIGDISTSTVSTPVPPPVDDTWLQSASSHSPTPQRRPVSSIHPPGRPPAVRGPTPGPPLIPVPVGAAASFSAPPIPSRPGPQSVFANSDLFPAPPQIPSRPVRIPPGIPPGVPSRRPPAAPSRPTIIRPAEPSLLD

SEQ ID NO: 25480 - protein, 870 aa, Homo sapiens
MGNRGMEELIPLVNKLQDAFSSIGQSCHLDLPQIAVVGGQSAGKSSVLENFVGRDFLPRGSGIVTRRPLILQLIFSKTEHAEFLHCKSKKFTDFDEVRQEIEAETDRVTGTNKGISPVPINLRVYSPHVLNLTLIDLPGITKVPVGDQPPDIEYQIKDMILQFISRESSLILAVTPANMDLANSDALKLAKEVDPQGLRTIGVITKLDLMDEGTDARDVLENKLLPLRRGYIGVVNRSQKDIEGKKDIRAALAAERKFFLSHPAYRHMADRMGTPHLQKTLNQQLTNHIRESLPALRSKLQSQLLSLEKEVEEYKNFRPDDPTRKTKALLQMVQQFGVDFEKRIEGSGDQVDTLELSGGARINRIFHERFPFELVKMEFDEKDLRREISYAIKNIHGVRTGLFTPDMAFEAIVKKQIVKLKEPSLKCVDLVVSELATVIKKCAEKLSSYPRLREETERIVTTYIREREGRTKDQILLLIDIEQSYINTNHEDFIGFANAQQRSTQLNKKRAIPNQGEILVIRRGWLTINNISLMKGGSKEYWFVLTAESLSWYKDEEEKEKKYMLPLDNLKIRDVEKGFMSNKHVFAIFNTEQRNVYKDLRQIELACDSQEDVDSWKASFLRAGVYPEKDQAENEDGAQENTFSMDPQLERQVETIRNLVDSYVAIINKSIRDLMPKTIMHLMINNTKAFIHHELLAYLYSSADQSSLMEESADQAQRRDDMLRMYHALKEALNIIGDISTSTVSTPVPPPVDDTWLQSASSHSPTPQRRPVSSIHPPGRPPAVRGPTPGPPLIPVPVGAAASFSAPPIPSRPGPQSVFANSDLFPAPPQIPSRPVRIPPGIPPGVPSRRPPAAPSRPTIIRPAEPSLLD

SEQ ID NO: 25481 - protein, 869 aa, Homo sapiens
MGNRGMEELIPLVNKLQDAFSSIGQSCHLDLPQIAVVGGQSAGKSSVLENFVGRDFLPRGSGIVTRRPLILQLIFSKTEHAEFLHCKSKKFTDFDEVRQEIEAETDRVTGTNKGISPVPINLRVYSPHVLNLTLIDLPGITKVPVGDQPPDIEYQIKDMILQFISRESSLILAVTPANMDLANSDALKLAKEVDPQGLRTIGVITKLDLMDEGTDARDVLENKLLPLRRGYIGVVNRSQKDIEGKKDIRAALAAERKFFLSHPAYRHMADRMGTPHLQKTLNQQLTNHIRESLPALRSKLQSQLLSLEKEVEEYKNFRPDDPTRKTKALLQMVQQFGVDFEKRIEGSGDQVDTLELSGGARINRIFHERFPFELVKMEFDEKDLRREISYAIKNIHGVRTGLFTPDLAFEAIVKKQVVKLKEPCLKCVDLVIQELINTVRQCTSKLSSYPRLREETERIVTTYIREREGRTKDQILLLIDIEQSYINTNHEDFIGFANAQQRSTQLNKKRAIPNQGEILVIRRGWLTINNISLMKGGSKEYWFVLTAESLSWYKDEEEKEKKYMLPLDNLKIRDVEKGFMSNKHVFAIFNTEQRNVYKDLRQIELACDSQEDVDSWKASFLRAGVYPEKDQAENEDGAQENTFSMDPQLERQVETIRNLVDSYVAIINKSIRDLMPKTIMHLMINNTKAFIHHELLAYLYSSADQSSLMEESADQAQRRDDMLRMYHALKEALNIIGDISTSTVSTPVPPPVDDTWLQSASSHSPTPQRRPVSSIHPPGRPPAVRGPTPGPPLIPVPVGAAASFSAPPIPSRPGPQSVFANSDLFPAPPQIPSRPVRIPPGIPPGVPRRPPAAPSRPTIIRPAEPSLLD

SEQ ID NO: 25482 - protein, 123 aa, Homo sapiens
MTDRILYIVSNMSSVPWEGSAAAAVPATSPPTPGHYHVLYRGCGETQVGWHGETYCLVGGYRVHGDAPLATPTKAEAEKPAPRRAPKRRQATIESDKDLGCSSPKIRRLEHRGRRLTPQKLAG

SEQ ID NO: 25483 - protein, 93 aa, Homo sapiens
MQVSTAALAVLLCTMALCNQVLSAPLAADTPTACCFSYTSRQIPQNFIADYFETSSQCSKPSVIFLTKRGRQVCADPSEEWVQKYVSDLELSA

SEQ ID NO: 25484 - protein, 410 aa, Homo sapiens
MNDEDYSTIYDTIQNERTYEVPDQPEENESPHYDDVHEYLRPENDLYATQLNTHEYDFVSVYTIKGEETSLASVQSEDRGYLLPDEIYSELQEAHPGEPQEDRGISMEGLYSSTQDQQLCAAELQENGSVMKEDLPSPSSFTIQHSKAFSTTKYSCYSDAEGLEEKEGAHMNPEIYLFVKAGIDGESIGNCPFSQRLFMILWLKGVVFNVTTVDLKRKPADLHNLAPGTHPPFLTFNGDVKTDVNKIEEFLEETLTPEKYPKLAAKHRESNTAGIDIFSKFSAYIKNTKQQNNAALERGLTKALKKLDDYLNTPLPEEIDANTCGEDKGSRRKFLDGDELTLADCNLLPKLHVVKIVAKKYRNYDIPAEMTGLWRYLKNAYARDEFTNTCAADSEIELAYADVAKRLSRS

SEQ ID NO: 25485 - protein, 251 aa, Homo sapiens
MTDSATANGDDRDPEIELFVKAGIDGESIGNCPFSQRLFMILWLKGVVFNVTTVDLKRKPADLHNLAPGTHPPFLTFNGDVKTDVNKIEEFLEETLTPEKYPKLAAKHRESNTAGIDIFSKFSAYIKNTKQQNNAALERGLTKALKKLDDYLNTPLPEEIDANTCGEDKGSRRKFLDGDELTLADCNLLPKLHVVKIVAKKYRNYDIPAEMTGLWRYLKNAYARDEFTNTCAADSEIELAYADVAKRLSRS

SEQ ID NO: 25486 - protein, 205 aa, Homo sapiens
MTDSATANGDDRDPEIELFVKAGIDGESIGNCPFSQRLFMILWLKGVVFNVTTVDLKRKPADLHNLAPGTHPPFLTFNGDVKTDVNKIEEFLEETLTPEKYPKLAAKHRESNTAGIDIFSKFSAYIKNTKQQNNAALERGLTKALKKLDDYLNTPLPEEIDANTCGEDKGSRRKFLDGDELTLADCNLLPKLHVVKEQVPLKGMI

SEQ ID NO: 25487 - protein, 1676 aa, Homo sapiens
MGLLGILCFLIFLGKTWGQEQTYVISAPKIFRVGASENIVIQVYGYTEAFDATISIKSYPDKKFSYSSGHVHLSSENKFQNSAILTIQPKQLPGGQNPVSYVYLEVVSKHFSKSKRMPITYDNGFLFIHTDKPVYTPDQSVKVRVYSLNDDLKPAKRETVLTFIDPEGSEVDMVEEIDHIGIISFPDFKIPSNPRYGMWTIKAKYKEDFSTTGTAYFEVKEYVLPHFSVSIEPEYNFIGYKNFKNFEITIKARYFYNKVVTEADVYITFGIREDLKDDQKEMMQTAMQNTMLINGIAQVTFDSETAVKELSYYSLEDLNNKYLYIAVTVIESTGGFSEEAEIPGIKYVLSPYKLNLVATPLFLKPGIPYPIKVQVKDSLDQLVGGVPVTLNAQTIDVNQETSDLDPSKSVTRVDDGVASFVLNLPSGVTVLEFNVKTDAPDLPEENQAREGYRAIAYSSLSQSYLYIDWTDNHKALLVGEHLNIIVTPKSPYIDKITHYNYLILSKGKIIHFGTREKFSDASYQSINIPVTQNMVPSSRLLVYYIVTGEQTAELVSDSVWLNIEEKCGNQLQVHLSPDADAYSPGQTVSLNMATGMDSWVALAAVDSAVYGVQRGAKKPLERVFQFLEKSDLGCGAGGGLNNANVFHLAGLTFLTNANADDSQENDEPCKEILRPRRTLQKKIEEIAAKYKHSVVKKCCYDGACVNNDETCEQRAARISLGPRCIKAFTECCVVASQLRANISHKDMQLGRLHMKTLLPVSKPEIRSYFPESWLWEVHLVPRRKQLQFALPDSLTTWEIQGVGISNTGICVADTVKAKVFKDVFLEMNIPYSVVRGEQIQLKGTVYNYRTSGMQFCVKMSAVEGICTSESPVIDHQGTKSSKCVRQKVEGSSSHLVTFTVLPLEIGLHNINFSLETWFGKEILVKTLRVVPEGVKRESYSGVTLDPRGIYGTISRRKEFPYRIPLDLVPKTEIKRILSVKGLLVGEILSAVLSQEGINILTHLPKGSAEAELMSVVPVFYVFHYLETGNHWNIFHSDPLIEKQKLKKKLKEGMLSIMSYRNADYSYSVWKGGSASTWLTAFALRVLGQVNKYVEQNQNSICNSLLWLVENYQLDNGSFKENSQYQPIKLQGTLPVEARENSLYLTAFTVIGIRKAFDICPLVKIDTALIKADNFLLENTLPAQSTFTLAISAYALSLGDKTHPQFRSIVSALKREALVKGNPPIYRFWKDNLQHKDSSVPNTGTARMVETTAYALLTSLNLKDINYVNPVIKWLSEEQRYGGGFYSTQDTINAIEGLTEYSLLVKQLRLSMDIDVSYKHKGALHNYKMTDKNFLGRPVEVLLNDDLIVSTGFGSGLATVHVTTVVHKTSTSEEVCSFYLKIDTQDIEASHYRGYGNSDYKRIVACASYKPSREESSSGSSHAVMDISLPTGISANEEDLKALVEGVDQLFTDYQIKDGHVILQLNSIPSSDFLCVRFRIFELFEVGFLSPATFTVYEYHRPDKQCTMFYSTSNIKIQKVCEGAACKCVEADCGQMQEELDLTISAETRKQTACKPEIAYAYKVSITSITVENVFVKYKATLLDIYKTGEAVAEKDSEITFIKKVTCTNAELVKGRQYLIMGKEALQIKYNFSFRYIYPLDSLTWIEYWPRDTTCSSCQAFLANLDEFAEDIFLNGC

SEQ ID NO: 25488 - protein, 202 aa, Homo sapiens
MLPPGTATLLTLLLAAGSLGQKPQRPRRPASPISTIQPKANFDAQQFAGTWLLVAVGSACRFLQEQGHRAEATTLHVAPQGTAMAVSTFRKLDGICWQVRQLYGDTGVLGRFLLQARDARGAVHVVVAETDYQSFAVLYLERAGQLSVKLYARSLPVSDSVLSGFEQRVQEAHLTEDQIFYFPKYGFCEAADQFHVLDEVRR

SEQ ID NO: 25489 - protein, 325 aa, Homo sapiens
MQGRRELGGEPLSDLQEEAASASLRVAPERLSDDSLEWRRTCPDLLLSDGKASISMPREGGSTCTARCPDPGEHSSTWGEFEGFRESSAKSGQFSQSLELLEGPTEPQPPRTTSAPKECSSHQPCQGGPWVTGTSAVPPSEPILSYENILKCAFQEITVQQAAEDVSTIDHFLEISSEEKPGVERVHKLCNESRKLWRALQSIHTTSTSQRLWSESRCQENFFLVLGIDAAQKNLSGGQGHIMEDCDLKEPEGLLTVSSFCLQHCKALIQTKLSGPPGSKQGRLMTCSRFLKTPSCGGGQHITIPRKRMFTPRKLKLTLFNSDVC

SEQ ID NO: 25490 - protein, 689 aa, Homo sapiens
MAAATASPRSLLVLLQVVVLALAQIRGPPGERGPPGPPGPPGVPGSDGIDGDNGPPGKAGPPGPKGEPGKAGPDGPDGKPGIDGLTGAKGEPGPMGIPGVKGQPGLPGPPGLPGPGFAGPPGPPGPVGLPGEIGIRGPKGDPGPDGPSGPPGPPGKPGRPGTIQGLEGSADFLCPTNCPPGMKGPPGLQGVKGHAGKRGILGDPGHQGKPGPKGDVGASGEQGIPGPPGPQGIRGYPGMAGPKGETGPHGYKGMVGAIGATGPPGEEGPRGPPGRAGEKGDEGSPGIRGPQGITGPKGATGPPGINGKDGTPGTPGMKGSAGQAGQPGSPGHQGLAGVPGQPGTKGGPGDQGEPGPQGLPGFSGPPGKEGEPGPRGEIGPQGIMGQKGDQGERGPVGQPGPQGRQGPKGEQGPPGIPGPQGLPGVKGDKGSPGKTGPRGKVGDPGVAGLPGEKGEKGESGEPGPKGQQGVRGEPGYPGPSGDAGAPGVQGYPGPPGPRGLAGNRGVPGQPGRQGVEGRDATDQHIVDVALKMLQEQLAEVAVSAKREALGAVGMMGPPGPPGPPGYPGKQGPHGHPGPRGVPGIVGAVGQIGNTGPKGKRGEKGDPGEVGRGHPGMPGPPGIPGLPGRPGQAINGKDGDRGSPGAPGEAGRPGLPGPVGLPGFCEPAACLGASAYASARLTEPGSIKGP

SEQ ID NO: 25491 - protein, 1294 aa, Homo sapiens
MAMGDDKSFDDEESVDGNRPSSAASAFKVPAPKTSGNPANSARKPGSAGGPKVGGASKEGGAGAVDEDDFIKAFTDVPSIQIYSSRELEETLNKIREILSDDKHDWDQRANALKKIRSLLVAGAAQYDCFFQHLRLLDGALKLSAKDLRSQVVREACITVAHLSTVLGNKFDHGAEAIVPTLFNLVPNSAKVMATSGCAAIRFIIRHTHVPRLIPLITSNCTSKSVPVRRRSFEFLDLLLQEWQTHSLERHAAVLVETIKKGIHDADAEARVEARKTYMGLRNHFPGEAETLYNSLEPSYQKSLQTYLKSSGSVASLPQSDRSSSSSQESLNRPFSSKWSTANPSTVAGRVSAGSSKASSLPGSLQRSRSDIDVNAAAGAKAHHAAGQSVRSGRLGAGALNAGSYASLEDTSDKLDGTASEDGRVRAKLSAPLAGMGNAKADSRGRSRTKMVSQSQPGSRSGSPGRVLTTTALSTVSSGVQRVLVNSASAQKRSKIPRSQGCSREASPSRLSVARSSRIPRPSVSQGCSREASRESSRDTSPVRSFQPLASRHHSRSTGALYAPEVYGASGPGYGISQSSRLSSSVSAMRVLNTGSDVEEAVADALKKPARRRYESYGMHSDDDANSDASSACSERSYSSRNGSIPTYMRQTEDVAEVLNRCASSNWSERKEGLLGLQNLLKNQRTLSRVELKRLCEIFTRMFADPHGKRVFSMFLETLVDFIQVHKDDLQDWLFVLLTQLLKKMGADLLGSVQAKVQKALDVTRESFPNDLQFNILMRFTVDQTQTPSLKVKVAILKYIETLAKQMDPGDFINSSETRLAVSRVITWTTEPKSSDVRKAAQSVLISLFELNTPEFTMLLGALPKTFQDGATKLLHNHLRNTGNGTQSSMGSPLTRPTPRSPANWSSPLTSPTNTSQNTLSPSAFDYDTENMNSEDIYSSLRGVTEAIQNFSFRSQEDMNEPLKRDSKKDDGDSMCGGPGMSDPRAGGDATDSSQTALDNKASLLHSMPTHSSPRSRDYNPYNYSDSISPFNKSALKEAMFDDDADQFPDDLSLDHSDLVAELLKELSNHNERVEERKIALYELMKLTQEESFSVWDEHFKTILLLLLETLGDKEPTIRALALKVLREILRHQPARFKNYAELTVMKTLEAHKDPHKEVVRSAEEAASVLATSISPEQCIKVLCPIIQTADYPINLAAIKMQTKVIERVSKETLNLLLPEIMPGLIQGYDNSESSVRKACVFCLVAVHAVIGDELKPHLSQLTGSKMKLLNLYIKRAQTGSGGADPTTDVSGQS

SEQ ID NO: 25492 - protein, 431 aa, Homo sapiens
MRRLICKRICDYKSFDDEESVDGNRPSSAASAFKVPAPKTSGNPANSARKPGSAGGPKVGGASKEGGAGAVDEDDFIKAFTDVPSIQIYSSRELEETLNKIREILSDDKHDWDQRANALKKIRSLLVAGAAQYDCFFQHLRLLDGALKLSAKDLRSQVVREACITVAHLSTVLGNKFDHGAEAIVPTLFNLVPNSAKVMATSGCAAIRFIIRHTHVPRLIPLITSNCTSKSVPVRRRSFEFLDLLLQEWQTHSLERHAAVLVETIKKGIHDADAEARVEARKTYMGLRNHFPGEAETLYNSLEPSYQKSLQTYLKSSGSVASLPQSDRSSSSSQESLNRPFSSKWSTANPSTVAGRVSAGSSKASSLPGSLQRSRSDIDVNAAAGAKAHHAAGQSVRSGRLGAGALNAGSYASLECEAFWRSGRTAKLYSV

SEQ ID NO: 25493 - protein, 1515 aa, Homo sapiens
MEPRSMEYFCAQVQQKDVGGRLQVGQELLLYLGAPGAISDLEEDLGRLGKTVDALTGWVGSSNYRVSLMGLEILSAFVDRLSTRFKSYVAMVIVALIDRMGDAKDKVRDEAQTLILKLMDQVAPPMYIWEQLASGFKHKNFRSREGVCLCLIETLNIFGAQPLVISKLIPHLCILFGDSNSQVRDAAILAIVEIYRHVGEKVRMDLYKRGIPPARLEMIFAKFDEVQSSGGMILSVCKDKSFDDEESVDGNRPSSAASAFKVPAPKTSGNPANSARKPGSAGGPKVGAGASKEGGAGAVDEDDFIKAFTDVPSIQIYSSRELEETLNKIREILSDDKHDWDQRANALKKIRSLLVAGAAQYDCFFQHLRLLDGALKLSAKDLRSQVVREACITVAHLSTVLGNKFDHGAEAIVPTLFNLVPNSAKVMATSGCAAIRFIIRHTHVPRLIPLITSNCTSKSVPVRRRSFEFLDLLLQEWQTHSLERHAAVLVETIKKGIHDADAEARVEARKTYMGLRNHFPGEAETLYNSLEPSYQKSLQTYLKSSGSVASLPQSDRSSSSSQESLNRPFSSKWSTANPSTVAGRVSAGSSKASSLPGSLQRSRSDIDVNAAAGAKAHHAAGQSVRSGRLGAGALNAGSYASLEDTSDKLDGTASEDGRVRAKLSAPLAGMGNAKADSRGRSRTKMVSQSQPGSRSGSPGRVLTTTALSTVSSGVQRVLVNSASAQKRSKIPRSQGCSREASPSRLSVARSSRIPRPSVSQGCSREASRESSRDTSPVRSFQPLGPGYGISQSSRLSSSVSAMRVLNTGSDVEEAVADALLLGDIRTKKKPARRRYESYGMHSDDDANSDASSACSERSYSSRNGSIPTYMRQTEDVAEVLNRCASSNWSERKEGLLGLQNLLKNQRTLSRVELKRLCEIFTRMFADPHGKRVFSMFLETLVDFIQVHKDDLQDWLFVLLTQLLKKMGADLLGSVQAKVQKALDVTRESFPNDLQFNILMRFTVDQTQTPSLKVKVAILKYIETLAKQMDPGDFINSSETRLAVSRVITWTTEPKSSDVRKAAQSVLISLFELNTPEFTMLLGALPKTFQDGATKLLHNHLRNTGNGTQSSMGSPLTRPTPRSPANWSSPLTSPTNTSQNTLSPSAFDYDTENMNSEDIYSSLRGVTEAIQNFSFRSQEDMNEPLKRDSKKDDGDSMCGGPGMSDPRAGGDATDSSQTALDNKASLLHSMPTHSSPRSRDYNPYNYSDSISPFNKSALKEAMFDDDADQFPDDLSLDHSDLVAELLKELSNHNERVEERKIALYELMKLTQEESFSVWDEHFKTILLLLLETLGDKEPTIRALALKVLREILRHQPARFKNYAELTVMKTLEAHKDPHKEVVRSAEEAASVLATSISPEQCIKVLCPIIQTADYPINLAAIKMQTKVIERVSKETLNLLLPEIMPGLIQGYDNSESSVRKACVFCLVAVHAVIGDELKPHLSQLTGSKMKLLNLYIKRAQTGSGGADPTTDVSGQS

SEQ ID NO: 25494 - protein, 559 aa, Homo sapiens
MSACRSFAVAICILEISILTAQYTTSYDPELTESSGSASHIDCRMSPWSEWSQCDPCLRQMFRSRSIEVFGQFNGKRCTDAVGDRRQCVPTEPCEDAEDDCGNDFQCSTGRCIKMRLRCNGDNDCGDFSDEDDCESEPRPPCRDRVVEESELARTAGYGINILGMDPLSTPFDNEFYNGLCNRDRDGNTLTYYRRPWNVASLIYETKGEKNFRTEHYEEQIEAFKSIIQEKTSNFNAAISLKFTPTETNKAEQCCEETASSISLHGKGSFRFSYSKNETYQLFLSYSSKKEKMFLHVKGEIHLGRFVMRNRDVVLTTTFVDDIKALPTTYEKGEYFAFLETYGTHYSSSGSLGGLYELIYVLDKASMKRKGVELKDIKRCLGYHLDVSLAFSEISVGAEFNKDDCVKRGEGRAVNITSENLIDDVVSLIRGGTRKYAFELKEKLLRGTVIDVTDFVNWASSINDAPVLISQKLSPIYNLVPVKMKNAHLKKQNLERAIEDYINEFSVRKCHTCQNGGTVILMDGKCLCACPFKFEGIACEISKQKISEGLPALEFPNEK

SEQ ID NO: 25495 - protein, 2465 aa, Homo sapiens
MNTEELELLSDSKYRNYVAAIDKALKNFEYSSEWADLISALGKLNKVLQNNAKYQVVPKKLTIGKRLAQCLHPALPGGVHRKALETYEIIFKIIGPKRLAKDLFLYSSGLFPLLANAAMSVKPTLLSLYEIYYLPLGKTLKPGLQGLLTGILPGLEEGSEYYERTNMLLEKVAAAVDQSAFYSALWGSLLTSPAVRLPGITYVLAHLNRKLSMEDQLYIIGSDIELMVEAVSTSVQDSSVLVQRSTLDLILFCFPFHMSQATRPDMIRILSAALHVVLRRDMSLNRRLYAWLLGFDNNGAIIGPRSTRHSNPEEHATYYFTTFSKELLVQAMVGILQVNGFGEENTLMQDLKPFRILISLLDKPELGPVILEDVLIEVFRTLYSQCKAELDLQTEPPFSKDHAQLSSKLRENKKTAELIKTANLLFNSFEPYYMWDYVARWFEECCRRTLHVRLQIGPGDSNDSSELQLTNFCLLVDFLLDIVSLPTRSMRVLCQETYIEIQTEHLPQLLLRMISALTSHLQTLHLSELTDSLRLCSKILSKVQPPLLSASTGGVLQFPSGQNNSVKEWEDKKVSSVSHENPTEVFEDGENPPSSRSSESGFTEFIQYQADRTDDIDRELSEGQGAAAIPIGSTSSETETASTVGSEETIIQTPSVVTQGTATRSRKTAQKTAMQCCLEYVQQFLTRLINLYIIQNNSFSQSLATEHQGDLGREQGETSKWDRNSQGDVKEKNISKQKTSKEYLSAFLAACQLFLECSSFPVYIAEGNHTSELRSEKLETDCEHVQPPQWLQTLMNACSQASDFSVQSVAISLVMDLVGLTQSVAMVTGENINSVEPAQPLSPNQGRVAVVIRPPLTQGNLRYIAEKTEFFKHVALTLWDQLGDGTPQHHQKSVELFYQLHNLVPSSSICEDVISQQLTHKDKKIRMEAHAKFAVLWHLTRDLHINKSSSFVRSFDRSLFIMLDSLNSLDGSTSSVGQAWLNQVLQRHDIARVLEPLLLLLLHPKTQRVSVQRVQAERYWNKSPCYPGEESDKHFMQNFACSNVSQVQLITSKGNGEKPLTMDEIENFSLTVNPLSDRLSLLSTSSETIPMVVSDFDLPDQQIEILQSSDSGCSQSSAGDNLSYEVDPETVNAQEDSQMPKESSPDDDVQQVVFDLICKVVSGLEVESASVTSQLEIEAMPPKCSDIDPDEETIKIEDDSIQQSQNALLSNESSQFLSVSAEGGHECVANGISRNSSSPCISGTTHTLHDSSVASIETKSRQRSHSSIQFSFKEKLSEKVSEKETIVKESGKQPGAKPKVKLARKKDDDKKKSSNEKLKQTSVFFSDGLDLENWYSCGEGDISEIESDMGSPGSRKSPNFNIHPLYQHVLLYLQLYDSSRTLYAFSAIKAILKTNPIAFVNAISTTSVNNAYTPQLSLLQNLLARHRISVMGKDFYSHIPVDSNHNFRSSMYIEILISLCLYYMRSHYPTHVKVTAQDLIGNRNMQMMSIEILTLLFTELAKVIESSAKGFPSFISDMLSKCKVQKVILHCLLSSIFSAQKWHSEKMAGKNLVAVEEGFSEDSLINFSEDEFDNGSTLQSQLLKVLQRLIVLEHRVMTIPEENETGFDFVVSDLEHISPHQPMTSLQYLHAQPITCQGMFLCAVIRALHQHCACKMHPQWIGLITSTLPYMGKVLQRVVVSVTLQLCRNLDNLIQQYKYETGLSDSRPLWMASIIPPDMILTLLEGITAIIHYCLLDPTTQYHQLLVSVDQKHLFEARSGILSILHMIMSSVTLLWSILHQADSSEKMTIAASASLTTINLGATKNLRQQILELLGPISMNHGVHFMAAIAFVWNERRQNKTTTRTKVIPAASEEQLLLVELVRSISVMRAETVIQTVKEVLKQPPAIAKDKKHLSLEVCMLQFFYAYIQRIPVPNLVDSWASLLILLKDSIQLSLPAPGQFLILGVLNEFIMKNPSLENKKDQRDLQDVTHKIVDAIGAIAGSSLEQTTWLRRNLEVKPSPKIMVDGTNLESDVEDMLSPAMETANITPSVYSVHALTLLSEVLAHLLDMVFYSDEKERVIPLLVNIMHYVVPYLRNHSAHNAPSYRACVQLLSSLSGYQYTRRAWKKEAFDLFMDPSFFQMDASCVNHWRAIMDNLMTHDKTTFRDLMTRVAVAQSSSLNLFANRDVELEQRAMLLKRLAFAIFSSEIDQYQKYLPDIQERLVESLRLPQVPTLHSQVFLFFRVLLLRMSPQHLTSLWPTMITELVQVFLLMEQELTADEDISRTSGPSVAGLETTYTGGNGFSTSYNSQRWLNLYLSACKFLDLALALPSENLPQFQMYRWAFIPEASDDSGLEVRRQGIHQREFKPYVVRLAKLLRKRAKKNPEEDNSGRTLGWEPGHLLLTICTVRSMEQLLPFFNVLSQVFNSKVTSRCGGHSGSPILYSNAFPNKDMKLENHKPCSSKARQKIEEMVEKDFLEGMIKT

SEQ ID NO: 25496 - protein, 584 aa, Homo sapiens
MFAVVFFILSLMTCQPGVTAQEKVNQRVRRAATPAAVTCQLSNWSEWTDCFPCQDKKYRHRSLLQPNKFGGTICSGDIWDQASCSSSTTCVRQAQCGQDFQCKETGRCLKRHLVCNGDQDCLDGSDEDDCEDVRAIDEDCSQYEPIPGSQKAALGYNILTQEDAQSVYDASYYGGQCETVYNGEWRELRYDSTCERLYYGDDEKYFRKPYNFLKYHFEALADTGISSEFYDNANDLLSKVKKDKSDSFGVTIGIGPAGSPLLVGVGVSHSQDTSFLNELNKYNEKKFIFTRIFTKVQTAHFKMRKDDIMLDEGMLQSLMELPDQYNYGMYAKFINDYGTHYITSGSMGGIYEYILVIDKAKMESLGITSRDITTCFGGSLGIQYEDKINVGGGLSGDHCKKFGGGKTERARKAMAVEDIISRVRGGSSGWSGGLAQNRSTITYRSWGRSLKYNPVVIDFEMQPIHEVLRHTSLGPLEAKRQNLRRALDQYLMEFNACRCGPCFNNGVPILEGTSCRCQCRLGSLGAACEQTQTEGAKADGSWSCWSSWSVCRAGIQERRRECDNPAPQNGGASCPGRKVQTQAC

SEQ ID NO: 25497 - protein, 178 aa, Homo sapiens
MLRTALRGAPRLLSRVQPRAPCLRRLWGRGARPEVAGRRRAWAWGWRRSSSEQGPGPAAALGRVEAAHYQLVYTCKVCGTRSSKRISKLAYHQGVVIVTCPGCQNHHIIADNLGWFSDLNGKRNIEEILTARGEQVHRVAGEGALELVLEAAGAPTSTAAPEAGEDEGPPSPGKTEPS

SEQ ID NO: 25498 - protein, 748 aa, Homo sapiens
MGLRTAKKRGLGGGGKWKREEGGGTRGRREVRPACFLQSGGRGDPGDVGGPAGNPGCSPHPRAATRPPPLPAHTPAHTPEWCGAASAEAAEPRRAGPHLCIPAPGLTKTPILEKVPRKMAAKTPSSEESGLPKLPVPPLQQTLATYLQCMRHLVSEEQFRKSQAIVQQFGAPGGLGETLQQKLLERQEKTANWVSEYWLNDMYLNNRLALPVNSSPAVIFARQHFPGTDDQLRFAASLISGVLSYKALLDSHSIPTDCAKGQLSGQPLCMKQYYGLFSSYRLPGHTQDTLVAQNSSIMPEPEHVIVACCNQFFVLDVVINFRRLSEGDLFTQLRKIVKMASNEDERLPPIGLLTSDGRSEWAEARTVLVKDSTNRDSLDMIERCICLVCLDAPGGVELSDTHRALQLLHGGGYSKNGANRWYDKSLQFVVGRDGTCGVVCEHSPFDGIVLVQCTEHLLKHVTQSSRKLIRADSVSELPAPRRLRWKCSPEIQGHLASSAEKLQRIVKNLDFIVYKFDNYGKTFIKKQKCSPDAFIQVALQLAFYRLHRRLVPTYESASIRRFQEGRVDNIRSATPEALAFVRAVTDHKAAVPASEKLLLLKDAIRAQTAYTVMAITGMAIDNHLLALRELARAMCKELPEMFMDETYLMSNRFVLSTSQVPTTTEMFCCYGPVVPNGYGACYNPQPETILFCISSFHSCKETSSSKFAKAVEESLIDMRDLCSLLPPTESKPLATKEKATRPSQGHQP

SEQ ID NO: 25499 - protein, 666 aa, Homo sapiens
MWPECRDEALSTVGPHLCIPAPGLTKTPILEKVPRKMAAKTPSSEESGLPKLPVPPLQQTLATYLQCMRHLVSEEQFRKSQAIVQQFGAPGGLGETLQQKLLERQEKTANWVSEYWLNDMYLNNRLALPVNSSPAVIFARQHFPGTDDQLRFAASLISGVLSYKALLDSHSIPTDCAKGQLSGQPLCMKQYYGLFSSYRLPGHTQDTLVAQNSSIMPEPEHVIVACCNQFFVLDVVINFRRLSEGDLFTQLRKIVKMASNEDERLPPIGLLTSDGRSEWAEARTVLVKDSTNRDSLDMIERCICLVCLDAPGGVELSDTHRALQLLHGGGYSKNGANRWYDKSLQFVVGRDGTCGVVCEHSPFDGIVLVQCTEHLLKHVTQSSRKLIRADSVSELPAPRRLRWKCSPEIQGHLASSAEKLQRIVKNLDFIVYKFDNYGKTFIKKQKCSPDAFIQVALQLAFYRLHRRLVPTYESASIRRFQEGRVDNIRSATPEALAFVRAVTDHKAAVPASEKLLLLKDAIRAQTAYTVMAITGMAIDNHLLALRELARAMCKELPEMFMDETYLMSNRFVLSTSQVPTTTEMFCCYGPVVPNGYGACYNPQPETILFCISSFHSCKETSSSKFAKAVEESLIDMRDLCSLLPPTESKPLATKEKATRPSQGHQP

SEQ ID NO: 25500 - protein, 630 aa, Homo sapiens
MAAKTPSSEESGLPKLPVPPLQQTLATYLQCMRHLVSEEQFRKSQAIVQQFGAPGGLGETLQQKLLERQEKTANWVSEYWLNDMYLNNRLALPVNSSPAVIFARQHFPGTDDQLRFAASLISGVLSYKALLDSHSIPTDCAKGQLSGQPLCMKQYYGLFSSYRLPGHTQDTLVAQNSSIMPEPEHVIVACCNQFFVLDVVINFRRLSEGDLFTQLRKIVKMASNEDERLPPIGLLTSDGRSEWAEARTVLVKDSTNRDSLDMIERCICLVCLDAPGGVELSDTHRALQLLHGGGYSKNGANRWYDKSLQFVVGRDGTCGVVCEHSPFDGIVLVQCTEHLLKHVTQSSRKLIRADSVSELPAPRRLRWKCSPEIQGHLASSAEKLQRIVKNLDFIVYKFDNYGKTFIKKQKCSPDAFIQVALQLAFYRLHRRLVPTYESASIRRFQEGRVDNIRSATPEALAFVRAVTDHKAAVPASEKLLLLKDAIRAQTAYTVMAITGMAIDNHLLALRELARAMCKELPEMFMDETYLMSNRFVLSTSQVPTTTEMFCCYGPVVPNGYGACYNPQPETILFCISSFHSCKETSSSKFAKAVEESLIDMRDLCSLLPPTESKPLATKEKATRPSQGHQP

SEQ ID NO: 25501 - protein, 236 aa, Homo sapiens
MEASDGQGGEGDKPLEQVTNVSCLETSSSASPARDSLMRHAKGLDQDTFKTCKEYLRPLKKFLRKLHLPRDLPQKKKLKYMKQSLVVLGDHINTFLQHYCQAWEIKHWRKMLWRFISLFSELEAKQLRRLYKYTKSSQPAKFLVTFCASDAPERSLLADREDSLPKLCHAWGLHSNISGMKERLSNMQTPGQGSPLPGQPRSQDHVKKDSLRELSQKPKLKRKRIKEAPETPETEP

SEQ ID NO: 25502 - protein, 1577 aa, Homo sapiens
MEAGSVVRAIFDFCPSVSEELPLFVGDIIEVLAVVDEFWLLGKKEDVTGQFPSSFVEIVTIPSLKEGERLFVCICEFTSQELDNLPLHRGDLVILDGIPTAGWLQGRSCWGARGFFPSSCVRELCLSSQSRQWHSQSALFQIPEYSMGQARALMGLSAQLDEELDFREGDVITIIGVPEPGWFEGELEGRRGIFPEGFVELLGPLRTVDESVSSGNQDDCIVNGEVDTPVGEEEIGPDEDEEEPGTYGVALYRFQALEPNELDFEVGDKIRILATLEDGWLEGSLKGRTGIFPYRFVKLCPDTRVEETMALPQEGSLARIPETSLDCLENTLGVEEQRHETSDHEAEEPDCIISEAPTSPLGHLTSEYDTDRNSYQDEDTAGGPPRSPGVEWEMPLATDSPTSDPTEVVNGISSQPQVPFHPNLQKSQYYSTVGGSHPHSEQYPDLLPLEARTRDYASLPPKRMYSQLKTLQKPVLPLYRGSSVSASRVVKPRQSSPQLHNLASYTKKHHTSSVYSISERLEMKPGPQAQGLVMEAATHSQGDGSTDLDSKLTQQLIEFEKSLAGPGTEPDKILRHFSIMDFNSEKDIVRGSSKLITEQELPERRKALRPPPPRPCTPVSTSPHLLVDQNLKPAPPLVVRPSRPAPLPPSAQQRTNAVSPKLLSRHRPTCETLEKEGPGHMGRSLDQTSPCPLVLVRIEEMERDLDMYSRAQEELNLMLEEKQDESSRAETLEDLKFCESNIESLNMELQQLREMTLLSSQSSSLVAPSGSVSAENPEQRMLEKRAKVIEELLQTERDYIRDLEMCIERIMVPMQQAQVPNIDFEGLFGNMQMVIKVSKQLLAALEISDAVGPVFLGHRDELEGTYKIYCQNHDEAIALLEIYEKDEKIQKHLQDSLADLKSLYNEWGCTNYINLGSFLIKPVQRVMRYPLLLMELLNSTPESHPDKVPLTNAVLAVKEINVNINEYKRRKDLVLKYRKGDEDSLMEKISKLNIHSIIKKSNRVSSHLKHLTGFAPQIKDEVFEETEKNFRMQERLIKSFIRDLSLYLQHIRESACVKVVAAVSMWDVCMERGHRDLEQFERVHRYISDQLFTNFKERTERLVISPLNQLLSMFTGPHKLVQKRFDKLLDFYNCTERAEKLKDKKTLEELQSARNNYEALNAQLLDELPKFHQYAQGLFTNCVHGYAEAHCDFVHQALEQLKPLLSLLKVAGREGNLIAIFHEEHSRVLQQLQVFTFFPESLPATKKPFERKTIDRQSARKPLLGLPSYMLQSEELRASLLARYPPEKLFQAERNFNAAQDLDVSLLEGDLVGVIKKKDPMGSQNRWLIDNGVTKGFVYSSFLKPYNPRRSHSDASVGSHSSTESEHGSSSPRFPRQNSGSTLTFNPSSMAVSFTSGSCQKQPQDASPPPKECDQGTLSASLNPSNSESSPSRCPSDPDSTSQPRSGDSADVARDVKQPTATPRSYRNFRHPEIVGYSVPGRNGQSQDLVKGCARTAQAPEDRSTEPDGSEAEGNQVYFAVYTFKARNPNELSVSANQKLKILEFKDVTGNTEWWLAEVNGKKGYVPSNYIRKTEYT

SEQ ID NO: 25503 - protein, 823 aa, Homo sapiens
MTLLSSQSSSLVAPSGSVSAENPEQRMLEKRAKVIEELLQTERDYIRDLEMCIERIMVPMQQAQVPNIDFEGLFGNMQMVIKVSKQLLAALEISDAVGPVFLGHRDELEGTYKIYCQNHDEAIALLEIYEKDEKIQKHLQDSLADLKSLYNEWGCTNYINLGSFLIKPVQRVMRYPLLLMELLNSTPESHPDKVPLTNAVLAVKEINVNINEYKRRKDLVLKYRKGDEDSLMEKISKLNIHSIIKKSNRVSSHLKHLTGFAPQIKDEVFEETEKNFRMQERLIKSFIRDLSLYLQHIRESACVKVVAAVSMWDVCMERGHRDLEQFERVHRYISDQLFTNFKERTERLVISPLNQLLSMFTGPHKLVQKRFDKLLDFYNCTERAEKLKDKKTLEELQSARNNYEALNAQLLDELPKFHQYAQGLFTNCVHGYAEAHCDFVHQALEQLKPLLSLLKVAGREGNLIAIFHEEHSRVLQQLQVFTFFPESLPATKKPFERKTIDRQSARKPLLGLPSYMLQSEELRASLLARYPPEKLFQAERNFNAAQDLDVSLLEGDLVGVIKKKDPMGSQNRWLIDNGVTKGFVYSSFLKPYNPRRSHSDASVGSHSSTESEHGSSSPRFPRQNSGSTLTFNPSSMAVSFTSGSCQKQPQDASPPPKECDQGTLSASLNPSNSESSPSRCPSDPDSTSQPRSGDSADVARDVKQPTATPRSYRNFRHPEIVGYSVPGRNGQSQDLVKGCARTAQAPEDRSTEPDGSEAEGNQVYFAVYTFKARNPNELSVSANQKLKILEFKDVTGNTEWWLAEVNGKKGYVPSNYIRKTEYT

SEQ ID NO: 25504 - protein, 491 aa, Homo sapiens
MELSVLLFLALLTGLLLLLVQRHPNTHDRLPPGPRPLPLLGNLLQMDRRGLLKSFLRFREKYGDVFTVHLGPRPVVMLCGVEAIREALVDKAEAFSGRGKIAMVDPFFRGYGVIFANGNRWKVLRRFSVTTMRDFGMGKRSVEERIQEEAQCLIEELRKSKGALMDPTFLFQSITANIICSIVFGKRFHYQDQEFLKMLNLFYQTFSLISSVFGQLFELFSGFLKYFPGAHRQVYKNLQEINAYIGHSVEKHRETLDPSAPKDLIDTYLLHMEKEKSNAHSEFSHQNLNLNTLSLFFAGTETTSTTLRYGFLLMLKYPHVAERVYREIEQVIGPHRPPELHDRAKMPYTEAVIYEIQRFSDLLPMGVPHIVTQHTSFRGYIIPKDTEVFLILSTALHDPHYFEKPDAFNPDHFLDANGALKKTEAFIPFSLGKRICLGEGIARAELFLFFTTILQNFSMASPVAPEDIDLTPQECGVGKIPPTYQIRFLPR

SEQ ID NO: 25505 - protein, 291 aa, Homo sapiens
MRCMLTNSHPWCGCDWQFREKYGDVFTVHLGPRPVVMLCGVEAIREALVDKAEAFSGRGKIAMVDPFFRGYGVIFANGNRWKVLRRFSVTTMRDFGMGKRSVEERIQEEAQCLIEELRKSKERVYREIEQVIGPHRPPELHDRAKMPYTEAVIYEIQRFSDLLPMGVPHIVTQHTSFRGYIIPKDTEVFLILSTALHDPHYFEKPDAFNPDHFLDANGALKKTEAFIPFSLGKRICLGEGIARAELFLFFTTILQNFSMASPVAPEDIDLTPQECGVGKIPPTYQIRFLPR

SEQ ID NO: 25506 - protein, 57 aa, Homo sapiens
MGWEGPNSRVDDTFWASWRAFAQIGPARSGFRLETLAGLRSRRLKQPKAFCLRDVAP

SEQ ID NO: 25507 - protein, 154 aa, Homo sapiens
MAYLSECRLRLEKGFILDGVAVSTAARAYGRSRPKLWSAIPPYNAQQDYHARSYFQSHVVPPLLRKTDQDHGGTGRDGWIVDYIHIFGQGQRYLNRRNWAGTGHSLQQVTGHDHYNADLKPIDGFNGRFGYRRNTPALRQSTSVFGEVTHFPLF

SEQ ID NO: 25508 - protein, 443 aa, Homo sapiens
MAASPHTLSSRLLTGCVGGSVWYLERRTIQDSPHKFLHLLRNVNKQWITFQHFSFLKRMYVTQLNRSHNQQVRPKPEPVASPFLEKTSSGQAKAEIYEMRPLSPPSLSLSRKPNEKELIELEPDSVIEDSIDVGKETKEEKRWKEMKLQVYDLPGILARLSKIKLTALVVSTTAAGFALAPGPFDWPCFLLTSVGTGLASCAANSINQFFEVPFDSNMNRTKNRPLVRGQISPLLAVSFATCCAVPGVAILTLGVNPLTGALGLFNIFLYTCCYTPLKRISIANTWVGAVVGAIPPVMGWTAATGSLDAGAFLLGGILYSWQFPHFNALSWGLREDYSRGGYCMMSVTHPGLCRRVALRHCLALLVLSAAAPVLDITTWTFPIMALPINAYISYLGFRFYVDADRRSSRRLFFCSLWHLPLLLLLMLTCKRPSGGGDAGPPPS

SEQ ID NO: 25509 - protein, 251 aa, Homo sapiens
MICQEFWLDYPKSNSQFFEVPFDSNMNRTKNRPLVRGQISPLLAVSFATCCAVPGVAILTLGVNPLTGALGLFNIFLYTCCYTPLKRISIANTWVGAVVGAIPPVMGWTAATGSLDAGAFLLGGILYSWQFPHFNALSWGLREDYSRGGYCMMSVTHPGLCRRVALRHCLALLVLSAAAPVLDITTWTFPIMALPINAYISYLGFRFYVDADRRSSRRLFFCSLWHLPLLLLLMLTCKRPSGGGDAGPPPS

SEQ ID NO: 25510 - protein, 1616 aa, Homo sapiens
MPARTAPARVPTLAVPAISLPDDVRRRLKDLERDSLTEKECVKEKLNLLHEFLQTEIKNQLCDLETKLRKEELSEEGYLAKVKSLLNKDLSLENGAHAYNREVNGRLENGNQARSEARRVGMADANSPPKPLSKPRTPRRSKSDGEAKPEPSPSPRITRKSTRQTTITSHFAKGPAKRKPQEESERAKSDESIKEEDKDQDEKRRRVTSRERVARPLPAEEPERAKSGTRTEKEEERDEKEEKRLRSQTKEPTPKQKLKEEPDREARAGVQADEDEDGDEKDEKKHRSQPKDLAAKRRPEEKEPEKVNPQISDEKDEDEKEEKRRKTTPKEPTEKKMARAKTVMNSKTHPPKCIQCGQYLDDPDLKYGQHPPDAVDEPQMLTNEKLSIFDANESGFESYEALPQHKLTCFSVYCKHGHLCPIDTGLIEKNIELFFSGSAKPIYDDDPSLEGGVNGKNLGPINEWWITGFDGGEKALIGFSTSFAEYILMDPSPEYAPIFGLMQEKIYISKIVVEFLQSNSDSTYEDLINKIETTVPPSGLNLNRFTEDSLLRHAQFVVEQVESYDEAGDSDEQPIFLTPCMRDLIKLAGVTLGQRRAQARRQTIRHSTREKDRGPTKATTTKLVYQIFDTFFAEQIEKDDREDKENAFKRRRCGVCEVCQQPECGKCKACKDMVKFGGSGRSKQACQERRCPNMAMKEADDDEEVDDNIPEMPSPKKMHQGKKKKQNKNRISWVGEAVKTDGKKSYYKKVCIDAETLEVGDCVSVIPDDSSKPLYLARVTALWEDSSNGQMFHAHWFCAGTDTVLGATSDPLELFLVDECEDMQLSYIHSKVKVIYKAPSENWAMEGGMDPESLLEGDDGKTYFYQLWYDQDYARFESPPKTQPTEDNKFKFCVSCARLAEMRQKEIPRVLEQLEDLDSRVLYYSATKNGILYRVGDGVYLPPEAFTFNIKLSSPVKRPRKEPVDEDLYPEHYRKYSDYIKGSNLDAPEPYRIGRIKEIFCPKKSNGRPNETDIKIRVNKFYRPENTHKSTPASYHADINLLYWSDEEAVVDFKAVQGRCTVEYGEDLPECVQVYSMGGPNRFYFLEAYNAKSKSFEDPPNHARSPGNKGKGKGKGKGKPKSQACEPSEPEIEIKLPKLRTLDVFSGCGGLSEGFHQAGISDTLWAIEMWDPAAQAFRLNNPGSTVFTEDCNILLKLVMAGETTNSRGQRLPQKGDVEMLCGGPPCQGFSGMNRFNSRTYSKFKNSLVVSFLSYCDYYRPRFFLLENVRNFVSFKRSMVLKLTLRCLVRMGYQCTFGVLQAGQYGVAQTRRRAIILAAAPGEKLPLFPEPLHVFAPRACQLSVVVDDKKFVSNITRLSSGPFRTITVRDTMSDLPEVRNGASALEISYNGEPQSWFQRQLRGAQYQPILRDHICKDMSALVAARMRHIPLAPGSDWRDLPNIEVRLSDGTMARKLRYTHHDRKNGRSSSGALRGVCSCVEAGKACDPAARQFNTLIPWCLPHTGNRHNHWAGLYGRLEWDGFFSTTVTNPEPMGKQGRVLHPEQHRVVSVRECARSQGFPDTYRLFGNILDKHRQVGNAVPPPLAKAIGLEIKLCMLAKARESASAKIKEEEAAKD

SEQ ID NO: 25511 - protein, 1632 aa, Homo sapiens
MPARTAPARVPTLAVPAISLPDDVRRRLKDLERDSLTEKECVKEKLNLLHEFLQTEIKNQLCDLETKLRKEELSEEGYLAKVKSLLNKDLSLENGAHAYNREVNGRLENGNQARSEARRVGMADANSPPKPLSKPRTPRRSKSDGEAKRSRDPPASASQVTGIRAEPSPSPRITRKSTRQTTITSHFAKGPAKRKPQEESERAKSDESIKEEDKDQDEKRRRVTSRERVARPLPAEEPERAKSGTRTEKEEERDEKEEKRLRSQTKEPTPKQKLKEEPDREARAGVQADEDEDGDEKDEKKHRSQPKDLAAKRRPEEKEPEKVNPQISDEKDEDEKEEKRRKTTPKEPTEKKMARAKTVMNSKTHPPKCIQCGQYLDDPDLKYGQHPPDAVDEPQMLTNEKLSIFDANESGFESYEALPQHKLTCFSVYCKHGHLCPIDTGLIEKNIELFFSGSAKPIYDDDPSLEGGVNGKNLGPINEWWITGFDGGEKALIGFSTSFAEYILMDPSPEYAPIFGLMQEKIYISKIVVEFLQSNSDSTYEDLINKIETTVPPSGLNLNRFTEDSLLRHAQFVVEQVESYDEAGDSDEQPIFLTPCMRDLIKLAGVTLGQRRAQARRQTIRHSTREKDRGPTKATTTKLVYQIFDTFFAEQIEKDDREDKENAFKRRRCGVCEVCQQPECGKCKACKDMVKFGGSGRSKQACQERRCPNMAMKEADDDEEVDDNIPEMPSPKKMHQGKKKKQNKNRISWVGEAVKTDGKKSYYKKVCIDAETLEVGDCVSVIPDDSSKPLYLARVTALWEDSSNGQMFHAHWFCAGTDTVLGATSDPLELFLVDECEDMQLSYIHSKVKVIYKAPSENWAMEGGMDPESLLEGDDGKTYFYQLWYDQDYARFESPPKTQPTEDNKFKFCVSCARLAEMRQKEIPRVLEQLEDLDSRVLYYSATKNGILYRVGDGVYLPPEAFTFNIKLSSPVKRPRKEPVDEDLYPEHYRKYSDYIKGSNLDAPEPYRIGRIKEIFCPKKSNGRPNETDIKIRVNKFYRPENTHKSTPASYHADINLLYWSDEEAVVDFKAVQGRCTVEYGEDLPECVQVYSMGGPNRFYFLEAYNAKSKSFEDPPNHARSPGNKGKGKGKGKGKPKSQACEPSEPEIEIKLPKLRTLDVFSGCGGLSEGFHQAGISDTLWAIEMWDPAAQAFRLNNPGSTVFTEDCNILLKLVMAGETTNSRGQRLPQKGDVEMLCGGPPCQGFSGMNRFNSRTYSKFKNSLVVSFLSYCDYYRPRFFLLENVRNFVSFKRSMVLKLTLRCLVRMGYQCTFGVLQAGQYGVAQTRRRAIILAAAPGEKLPLFPEPLHVFAPRACQLSVVVDDKKFVSNITRLSSGPFRTITVRDTMSDLPEVRNGASALEISYNGEPQSWFQRQLRGAQYQPILRDHICKDMSALVAARMRHIPLAPGSDWRDLPNIEVRLSDGTMARKLRYTHHDRKNGRSSSGALRGVCSCVEAGKACDPAARQFNTLIPWCLPHTGNRHNHWAGLYGRLEWDGFFSTTVTNPEPMGKQGRVLHPEQHRVVSVRECARSQGFPDTYRLFGNILDKHRQVGNAVPPPLAKAIGLEIKLCMLAKARESASAKIKEEEAAKD

SEQ ID NO: 25512 - protein, 1280 aa, Homo sapiens
MARAKTVMNSKTHPPKCIQCGQYLDDPDLKYGQHPPDAVDEPQMLTNEKLSIFDANESGFESYEALPQHKLTCFSVYCKHGHLCPIDTGLIEKNIELFFSGSAKPIYDDDPSLEGGVNGKNLGPINEWWITGFDGGEKALIGFSTSFAEYILMDPSPEYAPIFGLMQEKIYISKIVVEFLQSNSDSTYEDLINKIETTVPPSGLNLNRFTEDSLLRHAQFVVEQVESYDEAGDSDEQPIFLTPCMRDLIKLAGVTLGQRRAQARRQTIRHSTREKDRGPTKATTTKLVYQIFDTFFAEQIEKDDREDKENAFKRRRCGVCEVCQQPECGKCKACKDMVKFGGSGRSKQACQERRCPNMAMKEADDDEEVDDNIPEMPSPKKMHQGKKKKQNKNRISWVGEAVKTDGKKSYYKKVCIDAETLEVGDCVSVIPDDSSKPLYLARVTALWEDSSNGQMFHAHWFCAGTDTVLGATSDPLELFLVDECEDMQLSYIHSKVKVIYKAPSENWAMEGGMDPESLLEGDDGKTYFYQLWYDQDYARFESPPKTQPTEDNKFKFCVSCARLAEMRQKEIPRVLEQLEDLDSRVLYYSATKNGILYRVGDGVYLPPEAFTFNIKLSSPVKRPRKEPVDEDLYPEHYRKYSDYIKGSNLDAPEPYRIGRIKEIFCPKKSNGRPNETDIKIRVNKFYRPENTHKSTPASYHADINLLYWSDEEAVVDFKAVQGRCTVEYGEDLPECVQVYSMGGPNRFYFLEAYNAKSKSFEDPPNHARSPGNKGKGKGKGKGKPKSQACEPSEPEIEIKLPKLRTLDVFSGCGGLSEGFHQAGISDTLWAIEMWDPAAQAFRLNNPGSTVFTEDCNILLKLVMAGETTNSRGQRLPQKGDVEMLCGGPPCQGFSGMNRFNSRTYSKFKNSLVVSFLSYCDYYRPRFFLLENVRNFVSFKRSMVLKLTLRCLVRMGYQCTFGVLQAGQYGVAQTRRRAIILAAAPGEKLPLFPEPLHVFAPRACQLSVVVDDKKFVSNITRLSSGPFRTITVRDTMSDLPEVRNGASALEISYNGEPQSWFQRQLRGAQYQPILRDHICKDMSALVAARMRHIPLAPGSDWRDLPNIEVRLSDGTMARKLRYTHHDRKNGRSSSGALRGVCSCVEAGKACDPAARQFNTLIPWCLPHTGNRHNHWAGLYGRLEWDGFFSTTVTNPEPMGKQGRVLHPEQHRVVSVRECARSQGFPDTYRLFGNILDKHRQVGNAVPPPLAKAIGLEIKLCMLAKARESASAKIKEEEAAKD

SEQ ID NO: 25513 - protein, 806 aa, Homo sapiens
MSASPDDLSTGGRLQNMTVDECFQSRNTVLQGQPFGGVPTVLCLNIALWVLVLVVYSFLRKAAWDYGRLALLIHNDSLTSLIYGEQSEKTSPSETSLEMERRDKGFCSWFFNSITMKDEDLINKCGDDARIYIVFQYHLIIFVLIICIPSLGIILPINYTGSVLDWSSHFARTTIVNVSTESKLLWLHSLLSFFYFITNFMFMAHHCLGFAPRNSQKVTRTLMITYVPKDIEDPELIIKHFHEAYPGSVVTRVHFCYDVRNLIDLDDQRRHAMRGRLFYTAKAKKTGKVMIRIHPCARLCFCKCWTCFKEVDAEQYYSELEEQLTDEFNAELNRVPLKRLDLIFVTFQDSRMAKRVRKDYKYVQCGVQPQQSSVTTIVKSYYWRVTMAPHPKDIIWKHLSVRRFFWWARFIAINTFLFFLFFFLTTPAIIMNTIDMYNVTRPIEKLQNPIVTQFFPSVMLWGFTVILPLIVYFSAFLEAHWTRSSQNLVMVHKCYIFLVFMVVILPSMGLTSLDVFLRWLFDIYYLEQASIRFQCVFLPDNGAFFVNYVITAALLGTGMELLRLGSLFCYSTRLFFSRSEPERVNIRKNQAIDFQFGREYAWMMNVFSVVMAYSITCPIIVPFGLLYLCMKHLTDRYNMYYSFAPTKLNEQIHMAAVSQAIFAPLLGLFWMLFFSILRLGSLHAITIFSLSTLLIAMVIAFVGIFLGKLRMVADYEPEEEEIQTVFDMEPSSTSSTPTSLLYVATVLQEPELNLTPASSPARHTYGTMNNQPEEGEEESGLRGFARELDSAQFQEGLELEGQNQYH

SEQ ID NO: 25514 - protein, 497 aa, Homo sapiens [sequence omitted]

SEQ ID NO: 25515 - protein, 446 aa, Homo sapiens
MGLEALVPLAVIVAIFLLLVDLMHRRQRWAARYPPGPLPLPGLGNLLHVDFQNTPYCFDQLRRRFGDVFSLQLAWTPVVVLNGLAAVREALVTHGEDTADRPPVPITQILGFGPRSQGRPFRPNGLLDKAVSNVIASLTCGRRFEYDDPRFLRLLDLAQEGLKEESGFLREVLNAVPVLLHIPALAGKVLRFQKAFLTQLDELLTEHRMTWDPAQPPRDLTEAFLAEMEKAKGNPESSFNDENLRIVVADLFSAGMVTTSTTLAWGLLLMILHPDVQRRVQQEIDDVIGQVRRPEMGDQAHMPYTTAVIHEVQRFGDIVPLGVTHMTSRDIEVQGFRIPKGTTLITNLSSVLKDEAVWEKPFRFHPEHFLDAQGHFVKPEAFLPFSAGRRACLGEPLARMELFLFFTSLLQHFSFSVPTGQPRPSHHGVFAFLVSPSPYELCAVPR

SEQ ID NO: 25516 - protein, 1388 aa, Homo sapiens
MAPRRNNGQCWCLLMLLSVSTPLPAVTQTRGATETASQGHLDLTQLIGVPLPSSVSFVTGYGGFPAYSFGPGANVGRPARTLIPSTFFRDFAISVVVKPSSTRGGVLFAITDAFQKVIYLGLRLSGVEDGHQRIILYYTEPGSHVSQEAAAFSVPVMTHRWNRFAMIVQGEEVTLLVNCEEHSRIPFQRSSQALAFESSAGIFMGNAGATGLERFTGSLQQLTVHPDPRTPEELCDPEESSASGETSGLQEADGVAEILEAVTYTQASPKEAKVEPINTPPTPSSPFEDMELSGEPVPEGTLETTNMSIIQHSSPKQGSGEILNDTLEGVHSVDGDPITDSGSGAGAFLDIAEEKNLAATAAGLAEVPISTAGEAEASSVPTGGPTLSMSTENPEEGVTPGPDNEERLAATAAGEAEALASMPGEVEASGVAPGELDLSMSAQSLGEEATVGPSSEDSLTTAAAATEVSLSTFEDEEASGVPTDGLAPLTATMAPERAVTSGPGDEEDLAAATTEEPLITAGGEESGSPPPDGPPLPLPTVAPERWITPAQREHVGMKGQAGPKGEKGDAGEELPGPPEPSGPVGPTAGAEAEGSGLGWGSDVGSGSGDLVGSEQLLRGPPGPPGPPGLPGIPGKPGTDVFMGPPGSPGEDGPAGEPGPPGPEGQPGVDGATGLPGMKGEKGARGPNGSVGEKGDPGNRGLPGPPGKKGQAGPPGVMGPPGPPGPPGPPGPGCTMGLGFEDTEGSGSTQLLNEPKLSRPTAAIGLKGEKGDRGPKGERGMDGASIVGPPGPRGPPGHIKVLSNSLINITHGFMNFSDIPELVGPPGPDGLPGLPGFPGPRGPKGDTGLPGFPGLKGEQGEKGEPGAILTEDIPLERLMGKKGEPGMHGAPGPMGPKGPPGHKGEFGLPGRPGRPGLNGLKGTKGDPGVIMQGPPGLPGPPGPPGPPGAVINIKGAIFPIPVRPHCKMPVDTAHPGSPELITFHGVKGEKGSWGLPGSKGEKGDQGAQGPPGPPLDLAYLRHFLNNLKGENGDKGFKGEKGEKGDINGSFLMSGPPGLPGNPGPAGQKGETVVGPQGPPGAPGLPGPPGFGRPGDPGPPGPPGPPGPPAILGAAVALPGPPGPPGQPGLPGSRNLVTAFSNMDDMLQKAHLVIEGTFIYLRDSTEFFIRVRDGWKKLQLGELIPIPADSPPPPALSSNPHQLLPPPNPISSANYEKPALHLAALNMPFSGDIRADFQCFKQARAAGLLSTYRAFLSSHLQDLSTIVRKAERYSLPIVNLKGQVLFNNWDSIFSGHGGQFNMHIPIYSFDGRDIMTDPSWPQKVIWHGSSPHGVRLVDNYCEAWRTADTAVTGLASPLSTGKILDQKAYSCANRLIVLCIENSFMTDARK

SEQ ID NO: 25517 - protein, 524 aa, Homo sapiens
MSLLSLPWLGLRPVATSPWLLLLLVVGSWLLARILAWTYAFYNNCRRLQCFPQPPKRNWFWGHLGLITPTEEGLKNSTQMSATYSQGFTVWLGPIIPFIVLCHPDTIRSITNASAAIAPKDNLFIRFLKPWLGEGILLSGGDKWSRHRRMLTPAFHFNILKSYITIFNKSANIMLDKWQHLASEGSSRLDMFEHISLMTLDSLQKCIFSFDSHCQERPSEYIATILELSALVEKRSQHILQHMDFLYYLSHDGRRFHRACRLVHDFTDAVIRERRRTLPTQGIDDFFKDKAKSKTLDFIDVLLLSKDEDGKALSDEDIRAEADTFMFGGHDTTASGLSWVLYNLARHPEYQERCRQEVQELLKDRDPKEIEWDDLAQLPFLTMCVKESLRLHPPAPFISRCCTQDIVLPDGRVIPKGITCLIDIIGVHHNPTVWPDPEVYDPFRFDPENSKGRSPLAFIPFSAGPRNCIGQAFAMAEMKVVLALMLLHFRFLPDHTEPRRKLELIMRAEGGLWLRVEPLNVSLQ

SEQ ID NO: 25518 - protein, 102 aa, Homo sapiens
MSLLSLPWLGLRPVATSPWLLLLLVVGSWLLARILAWTYAFYNNCRRLQCFPQPPKRNWFWGHLGLITPTEEGLKNSTQMSATYSQGFTLPLHPRIISSSGS

SEQ ID NO: 25519 - protein, 1207 aa, Homo sapiens
MLLTLIILLPVVSKFSFVSLSAPQHWSCPEGTLAGNGNSTCVGPAPFLIFSHGNSIFRIDTEGTNYEQLVVDAGVSVIMDFHYNEKRIYWVDLERQLLQRVFLNGSRQERVCNIEKNVSGMAINWINEEVIWSNQQEGIITVTDMKGNNSHILLSALKYPANVAVDPVERFIFWSSEVAGSLYRADLDGVGVKALLETSEKITAVSLDVLDKRLFWIQYNREGSNSLICSCDYDGGSVHISKHPTQHNLFAMSLFGDRIFYSTWKMKTIWIANKHTGKDMVRINLHSSFVPLGELKVVHPLAQPKAEDDTWEPEQKLCKLRKGNCSSTVCGQDLQSHLCMCAEGYALSRDRKYCEDVNECAFWNHGCTLGCKNTPGSYYCTCPVGFVLLPDGKRCHQLVSCPRNVSECSHDCVLTSEGPLCFCPEGSVLERDGKTCSGCSSPDNGGCSQLCVPLSPVSWECDCFPGYDLQLDEKSCAASGPQPFLLFANSQDIRHMHFDGTDYGTLLSQQMGMVYALDHDPVENKIYFAHTALKWIERANMDGSQRERLIEEGVDVPEGLAVDWIGRRFYWTDRGKSLIGRSDLNGKRSKIITKENISQPRGIAVHPMAKRLFWTDTGINPRIESSSLQGLGRLVIASSDLIWPSGITIDFLTDKLYWCDAKQSVIEMANLDGSKRRRLTQNDVGHPFAVAVFEDYVWFSDWAMPSVMRVNKRTGKDRVRLQGSMLKPSSLVVVHPLAKPGADPCLYQNGGCEHICKKRLGTAWCSCREGFMKASDGKTCLALDGHQLLAGGEVDLKNQVTPLDILSKTRVSEDNITESQHMLVAEIMVSDQDDCAPVGCSMYARCISEGEDATCQCLKGFAGDGKLCSDIDECEMGVPVCPPASSKCINTEGGYVCRCSEGYQGDGIHCLDIDECQLGEHSCGENASCTNTEGGYTCMCAGRLSEPGLICPDSTPPPHLREDDHHYSVRNSDSECPLSHDGYCLHDGVCMYIEALDKYACNCVVGYIGERCQYRDLKWWELRHAGHGQQQKVIVVAVCVVVLVMLLLLSLWGAHYYRTQKLLSKNPKNPYEESSRDVRSRRPADTEDGMSSCPQPWFVVIKEHQDLKNGGQPVAGEDGQAADGSMQPTSWRQEPQLCGMGTEQGCWIPVSSDKGSCPQVMERSFHMPSYGTQTLEGGVEKPHSLLSANPLWQQRALDPPHQMELTQ

SEQ ID NO: 25520 - protein, 1165 aa, Homo sapiens
MLLTLIILLPVVSKFSFVSLSAPQHWSCPEGTLAGNGNSTCVGPAPFLIFSHGNSIFRIDTEGTNYEQLVVDAGVSVIMDFHYNEKRIYWVDLERQLLQRVFLNGSRQERVCNIEKNVSGMAINWINEEVIWSNQQEGIITVTDMKGNNSHILLSALKYPANVAVDPVERFIFWSSEVAGSLYRADLDGVGVKALLETSEKITAVSLDVLDKRLFWIQYNREGSNSLICSCDYDGGSVHISKHPTQHNLFAMSLFGDRIFYSTWKMKTIWIANKHTGKDMVRINLHSSFVPLGELKVVHPLAQPKAEDDTWEPDVNECAFWNHGCTLGCKNTPGSYYCTCPVGFVLLPDGKRCHQLVSCPRNVSECSHDCVLTSEGPLCFCPEGSVLERDGKTCSGCSSPDNGGCSQLCVPLSPVSWECDCFPGYDLQLDEKSCAASGPQPFLLFANSQDIRHMHFDGTDYGTLLSQQMGMVYALDHDPVENKIYFAHTALKWIERANMDGSQRERLIEEGVDVPEGLAVDWIGRRFYWTDRGKSLIGRSDLNGKRSKIITKENISQPRGIAVHPMAKRLFWTDTGINPRIESSSLQGLGRLVIASSDLIWPSGITIDFLTDKLYWCDAKQSVIEMANLDGSKRRRLTQNDVGHPFAVAVFEDYVWFSDWAMPSVMRVNKRTGKDRVRLQGSMLKPSSLVVVHPLAKPGADPCLYQNGGCEHICKKRLGTAWCSCREGFMKASDGKTCLALDGHQLLAGGEVDLKNQVTPLDILSKTRVSEDNITESQHMLVAEIMVSDQDDCAPVGCSMYARCISEGEDATCQCLKGFAGDGKLCSDIDECEMGVPVCPPASSKCINTEGGYVCRCSEGYQGDGIHCLDIDECQLGEHSCGENASCTNTEGGYTCMCAGRLSEPGLICPDSTPPPHLREDDHHYSVRNSDSECPLSHDGYCLHDGVCMYIEALDKYACNCVVGYIGERCQYRDLKWWELRHAGHGQQQKVIVVAVCVVVLVMLLLLSLWGAHYYRTQKLLSKNPKNPYEESSRDVRSRRPADTEDGMSSCPQPWFVVIKEHQDLKNGGQPVAGEDGQAADGSMQPTSWRQEPQLCGMGTEQGCWIPVSSDKGSCPQVMERSFHMPSYGTQTLEGGVEKPHSLLSANPLWQQRALDPPHQMELTQ

SEQ ID NO: 25521 - protein, 1166 aa, Homo sapiens
MLLTLIILLPVVSKFSFVSLSAPQHWSCPEGTLAGNGNSTCVGPAPFLIFSHGNSIFRIDTEGTNYEQLVVDAGVSVIMDFHYNEKRIYWVDLERQLLQRVFLNGSRQERVCNIEKNVSGMAINWINEEVIWSNQQEGIITVTDMKGNNSHILLSALKYPANVAVDPVERFIFWSSEVAGSLYRADLDGVGVKALLETSEKITAVSLDVLDKRLFWIQYNREGSNSLICSCDYDGGSVHISKHPTQHNLFAMSLFGDRIFYSTWKMKTIWIANKHTGKDMVRINLHSSFVPLGELKVVHPLAQPKAEDDTWEPEQKLCKLRKGNCSSTVCGQDLQSHLCMCAEGYALSRDRKYCEDVNECAFWNHGCTLGCKNTPGSYYCTCPVGFVLLPDGKRCHQLVSCPRNVSECSHDCVLTSEGPLCFCPEGSVLERDGKTCSGCSSPDNGGCSQLCVPLSPVSWECDCFPGYDLQLDEKSCAASGPQPFLLFANSQDIRHMHFDGTDYGTLLSQQMGMVYALDHDPVENKIYFAHTALKWIERANMDGSQRERLIEEGVDVPEGLAVDWIGRRFYWTDRGKSLIGRSDLNGKRSKIITKENISQPRGIAVHPMAKRLFWTDTGINPRIESSSLQGLGRLVIASSDLIWPSGITIDFLTDKLYWCDAKQSVIEMANLDGSKRRRLTQNDVGHPFAVAVFEDYVWFSDWAMPSVMRVNKRTGKDRVRLQGSMLKPSSLVVVHPLAKPGADPCLYQNGGCEHICKKRLGTAWCSCREGFMKASDGKTCLALDGHQLLAGGEVDLKNQVTPLDILSKTRVSEDNITESQHMLVAEIMVSDQDDCAPVGCSMYARCISEGEDATCQCLKGFAGDGKLCSDIDECEMGVPVCPPASSKCINTEGGYVCRCSEGYQGDGIHCLDSTPPPHLREDDHHYSVRNSDSECPLSHDGYCLHDGVCMYIEALDKYACNCVVGYIGERCQYRDLKWWELRHAGHGQQQKVIVVAVCVVVLVMLLLLSLWGAHYYRTQKLLSKNPKNPYEESSRDVRSRRPADTEDGMSSCPQPWFVVIKEHQDLKNGGQPVAGEDGQAADGSMQPTSWRQEPQLCGMGTEQGCWIPVSSDKGSCPQVMERSFHMPSYGTQTLEGGVEKPHSLLSANPLWQQRALDPPHQMELTQ

SEQ ID NO: 25522 - protein, 322 aa, Homo sapiens
MSSLGGGSQDAGGSSSSSTNGSGGSGSSGPKAGAADKSAVVAAAAPASVADDTPPPERRNKSGIISEPLNKSLRRSRPLSHYSSFGSSGGSGGGSMMGGESADKATAAAAAASLLANGHDLAAAMAVDKSNPTSKHKSGAVASLLSKAERATELAAEGQLTLQQFAQSTEMLKRVVQEHLPLMSEAGAGLPDMEAVAGAEALNGQSDFPYLGAFPINPGLFIMTPAGVFLAESALHMAGLAEYPMQGELASAISSGKKKRKRCGMCAPCRRRINCEQCSSCRNRKTGHQICKFRKCEELKKKPSAALEKVMLPTGAAFRWFQ

SEQ ID NO: 25523 - protein, 227 aa, Homo sapiens
MMGGESADKATAAAAAASLLANGHDLAAAMAVDKSNPTSKHKSGAVASLLSKAERATELAAEGQLTLQQFAQSTEMLKRVVQEHLPLMSEAGAGLPDMEAVAGAEALNGQSDFPYLGAFPINPGLFIMTPAGVFLAESALHMAGLAEYPMQGELASAISSGKKKRKRCGMCAPCRRRINCEQCSSCRNRKTGHQICKFRKCEELKKKPSAALEKVMLPTGAAFRWFQ

SEQ ID NO: 25524 - protein, 323 aa, Homo sapiens
MGNLLKVLTREIENYPHFFLDFENAQPTEGEREIWNQISAVLQDSESILADLQAYKGAGPEIRDAIQNPNDIQLQEKAWNAVCPLVVRLKRFYEFSIRLEKALQSLLESLTCPPYTPTQHLEREQALAKEFAEILHFTLRFDELKMRNPAIQNDFSYYRRTISRNRINNMHLDIENEVNNEMANRMSLFYAEATPMLKTLSNATMHFVSENKTLPIENTTDCLSTMTSVCKVMLETPEYRSRFTSEETLMFCMRVMVGVIILYDHVHPVGAFCKTSKIDMKGCIKVLKEQAPDSVEGLLNALRFTTKHLNDESTSKQIRAMLQ

SEQ ID NO: 25525 - protein, 710 aa, Homo sapiens
MGGKQRDEDDEAYGKPVKYDPSFRGPIKNRSCTDVICCVLFLLFILGYIVVGIVAWLYGDPRQVLYPRNSTGAYCGMGENKDKPYLLYFNIFSCILSSNIISVAENGLQCPTPQVCVSSCPEDPWTVGKNEFSQTVGEVFYTKNRNFCLPGVPWNMTVITSLQQELCPSFLLPSAPALGRCFPWTNVTPPALPGITNDTTIQQGISGLIDSLNARDISVKIFEDFAQSWYWILVALGVALVLSLLFILLLRLVAGPLVLVLILGVLGVLAYGIYYCWEEYRVLRDKGASISQLGFTTNLSAYQSVQETWLAALIVLAVLEAILLLMLIFLRQRIRIAIALLKEASKAVGQMMSTMFYPLVTFVLLLICIAYWAMTALYLATSGQPQYVLWASNISSPGCEKVPINTSCNPTAHLVNSSCPGLMCVFQGYSSKGLIQRSVFNLQIYGVLGLFWTLNWVLALGQCVLAGAFASFYWAFHKPQDIPTFPLISAFIRTLRYHTGSLAFGALILTLVQIARVILEYIDHKLRGVQNPVARCIMCCFKCCLWCLEKFIKFLNRNAYIMIAIYGKNFCVSAKNAFMLLMRNIVRVVVLDKVTDLLLFFGKLLVVGGVGVLSFFFFSGRIPGLGKDFKSPHLNYYWLPIMTSILGAYVIASGFFSVFGMCVDTLFLCFLEDLERNNGSLDRPYYMSKSLLKILGKKNEAPPDNKKRKK

SEQ ID NO: 25526 - protein, 288 aa, Homo sapiens
MCVFQGYSSKGLIQRSVFNLQIYGVLGLFWTLNWVLALGQCVLAGAFASFYWAFHKPQDIPTFPLISAFIRTLRYHTGSLAFGALILTLVQIARVILEYIDHKLRGVQNPVARCIMCCFKCCLWCLEKFIKFLNRNAYIMIAIYGKNFCVSAKNAFMLLMRNIVRVVVLDKVTDLLLFFGKLLVVGGVGVLSFFFFSGRIPGLGKDFKSPHLNYYWLPIMTSILGAYVIASGFFSVFGMCVDTLFLCFLEDLERNNGSLDRPYYMSKSLLKILGKKNEAPPDNKKRKK

SEQ ID NO: 25527 - protein, 634 aa, Homo sapiens
MGENKDKPYLLYFNIFSCILSSNIISVAENGLQCPTPQVCVSSCPEDPWTVGKNEFSQTVGEVFYTKNRNFCLPGVPWNMTVITSLQQELCPSFLLPSAPALGRCFPWTNVTPPALPGITNDTTIQQGISGLIDSLNARDISVKIFEDFAQSWYWILVALGVALVLSLLFILLLRLVAGPLVLVLILGVLGVLAYGIYYCWEEYRVLRDKGASISQLGFTTNLSAYQSVQETWLAALIVLAVLEAILLLMLIFLRQRIRIAIALLKEASKAVGQMMSTMFYPLVTFVLLLICIAYWAMTALYLATSGQPQYVLWASNISSPGCEKVPINTSCNPTAHLVNSSCPGLMCVFQGYSSKGLIQRSVFNLQIYGVLGLFWTLNWVLALGQCVLAGAFASFYWAFHKPQDIPTFPLISAFIRTLRYHTGSLAFGALILTLVQIARVILEYIDHKLRGVQNPVARCIMCCFKCCLWCLEKFIKFLNRNAYIMIAIYGKNFCVSAKNAFMLLMRNIVRVVVLDKVTDLLLFFGKLLVVGGVGVLSFFFFSGRIPGLGKDFKSPHLNYYWLPIMTSILGAYVIASGFFSVFGMCVDTLFLCFLEDLERNNGSLDRPYYMSKSLLKILGKKNEAPPDNKKRKK

SEQ ID NO: 25528 - protein, 668 aa, Homo sapiens
MGGKQRDEDDEAYGKPVKYDPSFRGPIKNRSCTDVICCVLFLLFILGYIVVGIVAWLYGDPRQVLYPRNSTGAYCGMGENKDKPYLLYFNIFSCILSSNIISVAENGLQCPTPQTVITSLQQELCPSFLLPSAPALGRCFPWTNVTPPALPGITNDTTIQQGISGLIDSLNARDISVKIFEDFAQSWYWILVALGVALVLSLLFILLLRLVAGPLVLVLILGVLGVLAYGIYYCWEEYRVLRDKGASISQLGFTTNLSAYQSVQETWLAALIVLAVLEAILLLMLIFLRQRIRIAIALLKEASKAVGQMMSTMFYPLVTFVLLLICIAYWAMTALYLATSGQPQYVLWASNISSPGCEKVPINTSCNPTAHLVNSSCPGLMCVFQGYSSKGLIQRSVFNLQIYGVLGLFWTLNWVLALGQCVLAGAFASFYWAFHKPQDIPTFPLISAFIRTLRYHTGSLAFGALILTLVQIARVILEYIDHKLRGVQNPVARCIMCCFKCCLWCLEKFIKFLNRNAYIMIAIYGKNFCVSAKNAFMLLMRNIVRVVVLDKVTDLLLFFGKLLVVGGVGVLSFFFFSGRIPGLGKDFKSPHLNYYWLPIMTSILGAYVIASGFFSVFGMCVDTLFLCFLEDLERNNGSLDRPYYMSKSLLKILGKKNEAPPDNKKRKK

SEQ ID NO: 25529 - protein, 325 aa, Homo sapiens
MAAAAASLRGVVLGPRGAGLPGARARGLLCSARPGQLPLRTPQAVALSSKSGLSRGRKVMLSALGMLAAGGAGLAMALHSAVSASDLELHPPSYPWSHRGLLSSLDHTSIRRGFQVYKQVCASCHSMDFVAYRHLVGVCYTEDEAKELAAEVEVQDGPNEDGEMFMRPGKLFDYFPKPYPNSEAARAANNGALPPDLSYIVRARHGGEDYVFSLLTGYCEPPTGVSLREGLYFNPYFPGQAIAMAPPIYTDVLEFDDGTPATMSQIAKDVCTFLRWASEPEHDHRKRMGLKMLMMMALLVPLVYTIKRHKWSVLKSRKLAYRPPK

SEQ ID NO: 25530 - protein, 570 aa, Homo sapiens
MGNWAVNEGLSIFVILVWLGLNVFLFVWYYRVYDIPPKFFYTRKLLGSALALARAPAACLNFNCMLILLPVCRNLLSFLRGSSACCSTRVRRQLDRNLTFHKMVAWMIALHSAIHTIAHLFNVEWCVNARVNNSDPYSVALSELGDRQNESYLNFARKRIKNPEGGLYLAVTLLAGITGVVITLCLILIITSSTKTIRRSYFEVFWYTHHLFVIFFIGLAIHGAERIVRGQTAESLAVHNITVCEQKISEWGKIKECPIPQFAGNPPMTWKWIVGPMFLYLCERLVRFWRSQQKVVITKVVTHPFKTIELQMKKKGFKMEVGQYIFVKCPKVSKLEWHPFTLTSAPEEDFFSIHIRIVGDWTEGLFNACGCDKQEFQDAWKLPKIAVDGPFGTASEDVFSYEVVMLVGAGIGVTPFASILKSVWYKYCNNATNLKLKKIYFYWLCRDTHAFEWFADLLQLLESQMQERNNAGFLSYNIYLTGWDESQANHFAVHHDEEKDVITGLKQKTLYGRPNWDNEFKTIASQHPNTRIGVFLCGPEALAETLSKQSISNSESGPRGVHFIFNKENF

SEQ ID NO: 25531 - protein, 780 aa, Homo sapiens
MATSNLLKNKGSLQFEDKWDFMRPIVLKLLRQESVTKQQWFDLFSDVHAVCLWDDKGPAKIHQALKEDILEFIKQAQARVLSHQDDTALLKAYIVEWRKFFTQCDILPKPFCQLEITLMGKQGSNKKSNVEDSIVRKLMLDTWNESIFSNIKNRLQDSAMKLVHAERLGEAFDSQLVIGVRESYVNLCSNPEDKLQIYRDNFEKAYLDSTERFYRTQAPSYLQQNGVQNYMKYADAKLKEEEKRALRYLETRRECNSVEALMECCVNALVTSFKETILAECQGMIKRNETEKLHLMFSLMDKVPNGIEPMLKDLEEHIISAGLADMVAAAETITTDSEKYVEQLLTLFNRFSKLVKEAFQDDPRFLTARDKAYKAVVNDATIFKLELPLKQKGVGLKTQPESKCPELLANYCDMLLRKTPLSKKLTSEEIEAKLKEVLLVLKYVQNKDVFMRYHKAHLTRRLILDISADSEIEENMVEWLREVGMPADYVNKLARMFQDIKVSEDLNQAFKEMHKNNKLALPADSVNIKILNAGAWSRSSEKVFVSLPTELEDLIPEVEEFYKKNHSGRKLHWHHLMSNGIITFKNEVGQYDLEVTTFQLAVLFAWNQRPREKISFENLKLATELPDAELRRTLWSLVAFPKLKRQVLLYEPQVNSPKDFTEGTLFSVNQEFSLIKNAKVQKRGKINLIGRLQLTTERMREEENEGIVQLRILRTQEAIIQIMKMRKKISNAQLQTELVEILKNMFLPQKKMIKEQIEWLIEHKYIRRDESDINTFIYMA

SEQ ID NO: 25532 - protein, 107 aa, Homo sapiens
MAHATLSAAPSNPRLLRVALLLLLLVAASRRAAGASVVTELRCQCLQTLQGIHLKNIQSVNVRSPGPHCAQTEVIATLKNGKKACLNPASPMVQKIIEKILNKGSTN

SEQ ID NO: 25533 - protein, 1173 aa, Homo sapiens
MSRGSIEIPLRDTDEVIELDFDQLPEGDEVISILKQEHTQLHIWIALALEYYKQGKTEEFVKLLEAARIDGNLDYRDHEKDQMTCLDTLAAYYVQQARKEKNKDNKKDLITQATLLYTMADKIIMYDQNHLLGRACFCLLEGDKMDQADAQFHFVLNQSPNNIPALLGKACISFNKKDYRGALAYYKKALRTNPGCPAEVRLGMGHCFVKLNKLEKARLAFSRALELNSKCVGALVGLAVLELNNKEADSIKNGVQLLSRAYTIDPSNPMVLNHLANHFFFKKDYSKVQHLALHAFHNTEVEAMQAESCYQLARSFHVQEDYDQAFQYYYQATQFASSSFVLPFFGLGQMYIYRGDKENASQCFEKVLKAYPNNYETMKILGSLYAASEDQEKRDIAKGHLKKVTEQYPDDVEAWIELAQILEQTDIQGALSAYGTATRILQEKVQADVPPEILNNVGALHFRLGNLGEAKKYFLASLDRAKAEAEHDEHYYNAISVTTSYNLARLYEAMCEFHEAEKLYKNILREHPNYVDCYLRLGAMARDKGNFYEASDWFKEALQINQDHPDAWSLIGNLHLAKQEWGPGQKKFERILKQPSTQSDTYSMLALGNVWLQTLHQPTRDREKEKRHQDRALAIYKQVLRNDAKNLYAANGIGAVLAHKGYFREARDVFAQVREATADISDVWLNLAHIYVEQKQYISAVQMYENCLRKFYKHQNTEVVLYLARALFKCGKLQECKQTLLKARHVAPSDTVLMFNVALVLQRLATSVLKDEKSNLKEVLNAVKELELAHRYFSYLSKVGDKMRFDLALAATEARQCSDLLSQAQYHVARARKQDEEERELRAKQEQEKELLRQKLLKEQEEKRLREKEEQKKLLEQRAQYVEKTKNILMFTGETEATKEKKRGGGGGRRSKKGGEFDEFVNDDTDDDLPISKKKKRRKGSGSEQEGEDEEGGERKKKKRRRHPKGEEGSDDDETENGPKPKKRRPPKAEKKKAPKPERLPPSMKGKIKSKAIISSSDDSSDEDKLKIADEGHPRNSNSNSDSDEDEQRKKCASSESDSDENQNKSGSEAGSPRRPRRQRSDQDSDSDQPSRKRRPSGSEQSDNESVQSGRSHSGVSENDSRPASPSAESDHESERGSDNEGSGQGSGNESEPEGSNNEASDRGSEHGSDDSD

SEQ ID NO: 25534 - protein, 55 aa, Homo sapiens
MEDSSLSSGVDVDKGFAIAFVVLLFLFLIVMIFRCAKLVKNPYKASSTTTEPSLS

SEQ ID NO: 25535 - protein, 190 aa, Homo sapiens
MEKVPGEMEIERRERSEELSEAERKAVQAMWARLYANCEDVGVAILVRFFVNFPSAKQYFSQFKHMEDPLEMERSPQLRKHACRVMGALNTVVENLHDPDKVSSVLALVGKAHALKHKVEPVYFKILSGVILEVVAEEFASDFPPETQRAWAKLRGLIYSHVTAAYKEVGWVQQVPNATTPPATLPSSGP

SEQ ID NO: 25536 - protein, 294 aa, Homo sapiens
MGEWAFLGSLLDAVQLQSPLVGRLWLVVMLIFRILVLATVGGAVFEDEQEEFVCNTLQPGCRQTCYDRAFPVSHYRFWLFHILLLSAPPVLFVVYSMHRAGKEAGGAEAAAQCAPGLPEAQCAPCALRARRARRCYLLSVALRLLAELTFLGGQALLYGFRVAPHFACAGPPCPHTVDCFVSRPTEKTVFVLFYFAVGLLSALLSVAELGHLLWKGRPRAGERDNRCNRAHEEAQKLLPPPPPPPPPPALPSRRPGPEPCAPPAYAHPAPASLRECGSGRGKASPATGRRDLAI

SEQ ID NO: 25537 - protein, 295 aa, Homo sapiens
MGEWAFLGSLLDAVQLQSPLVGRLWLVVMLIFRILVLATVGGAVFEDEQEEFVCNTLQPGCRQTCYDRAFPVSHYRFWLFHILLLSAPPVLFVVYSMHRAGKEAGGAEAAAQCAPGLPEAQCAPCALRARRARRCYLLSVALRLLAELTFLGGQALLYGFRVAPHFACAGPPCPHTVDCFVSRPTEKTVFVLFYFAVGLLSALLSVAELGHLLWKGRPRAGERDNRCNRAHEEAQKLLPPPPPPPIVVTWEENRHLQGEGSPGSPHPKTELDAPRFRRESTSPAGWHCSLPFHGT

SEQ ID NO: 25538 - protein, 205 aa, Homo sapiens
MSLNYIKNFYEGCVKPPTVIGQFHTLFFGSIRIFFLGVLGFAVYGNEALHFICDPDKREVNLFCYNQFRPITPQVSFSALQLVIVLVPGALFHLYAACKSINQECILQKPIYTIIYILSVLLRISLAAIAFWLQIYLFGFQVKSLYLCDARSLGENMIIRCMVPEHFEKTIFLIAINTFTTITILLFVAEIFEIIFRRLYFPFRQ

SEQ ID NO: 25539 - protein, 138 aa, Homo sapiens
MMAEPWQALQLLLAILLTLMALPYQARKKTFLSVHEVMAVENYAKDSLQWITDQYNKESDDKYHFRIFRVLKVQRQVTDHLEYHLNVEMQWTTCQKPETTNCVPQERELHKQVNCFFSVFAVPWFEQYKILNKSCSSD

SEQ ID NO: 25540 - protein, 103 aa, Homo sapiens
MMAEPWQALQLLLAILLTLMALPYQARKKTFLSVHEVMAVENYAKDSLQWITDQYNKESDDKYHFRIFRVLKVQRQQVNCFFSVFAVPWFEQYKILNKSCSSD

SEQ ID NO: 25541 - protein, 616 aa, Homo sapiens
MSSLAVRDPAMDRSLRSVFVGNIPYEATEEQLKDIFSEVGSVVSFRLVYDRETGKPKGYGFCEYQDQETALSAMRNLNGREFSGRALRVDNAASEKNKEELKSLGPAAPIIDSPYGDPIDPEDAPESITRAVASLPPEQMFELMKQMKLCVQNSHQEARNMLLQNPQLAYALLQAQVVMRIMDPEIALKILHRKIHVTPLIPGKSQSVSVSGPGPGPGPGLCPGPNVLLNQQNPPAPQPQHLARRPVKDIPPLMQTPIQGGIPAPGPIPAAVPGAGPGSLTPGGAMQPQLGMPGVGPVPLERGQVQMSDPRAPIPRGPVTPGGLPPRGLLGDAPNDPRGGTLLSVTGEVEPRGYLGPPHQGPPMHHASGHDTRGPSSHEMRGGPLGDPRLLIGEPRGPMIDQRGLPMDGRGGRDSRAMETRAMETEVLETRVMERRGMETCAMETRGMEARGMDARGLEMRGPVPSSRGPMTGGIQGPGPINIGAGGPPQGPRQVPGISGVGNPGAGMQGTGIQGTGMQGAGIQGGGMQGAGIQGVSIQGGGIQGGGIQGASKQGGSQPSSFSPGQSQVTPQDQEKAALIMQVLQLTADQIAMLPPEQRQSILILKEQIQKSTGAS

SEQ ID NO: 25542 - protein, 189 aa, Homo sapiens; identical to SEQ ID NO: 14928

SEQ ID NO: 25543 - protein, 137 aa, Homo sapiens
MAQKPLSTAAAERMNLVGQDEIWKYRLKAESEARQNWPQNWGFLTTPFEELIKCEEDLPTPKPKIELPERFRIRPVTPVEKYIKVFPSPPVPQTTQGFIGWRSAVPGLNKCLELDDAIRSCKGAFARELCWPKQGVH

SEQ ID NO: 25544 - protein, 367 aa, Homo sapiens
MKSLVLLLCLAQLWGCHSAPHGPGLIYRQPNCDDPETEEAALVAIDYINQNLPWGYKHTLNQIDEVKVWPQQPSGELFEIEIDTLETTCHVLDPTPVARCSVRQLKEHAVEGDCDFQLLKLDGKFSVVYAKCDSSPDSAEDVRKVCQDCPLLAPLNDTRVVHAAKAALAAFNAQNNGSNFQLEEISRAQLVPLPPSTYVEFTVSGTDCVAKEATEAAKCNLLAEKQYGFCKATLSEKLGGAEVAVTCMVFQTQPVSSQPQPEGANEAVPTPVVDPDAPPSPPLGAPGLPPAGSPPDSHVLLAAPPGHQLHRAHYDLRHTFMGVVSLGSPSGEVSHPRKTRTVVQPSVGAAAGPVVPPCPGRIRHFKV

SEQ ID NO: 25545 - protein, 2647 aa, Homo sapiens
MSSSHSRAGQSAAGAAPGGGVDTRDAEMPATEKDLAEDAPWKKIQQNTFTRWCNEHLKCVSKRIANLQTDLSDGLRLIALLEVLSQKKMHRKHNQRPTFRQMQLENVSVALEFLDRESIKLVSIDSKAIVDGNLKLILGLIWTLILHYSISMPMWDEEEDEEAKKQTPKQRLLGWIQNKLPQLPITNFSRDWQSGRALGALVDSCAPGLCPDWDSWDASKPVTNAREAMQQADDWLGIPQVITPEEIVDPNVDEHSVMTYLSQFPKAKLKPGAPLRPKLNPKKARAYGPGIEPTGNMVKKRAEFTVETRSAGQGEVLVYVEDPAGHQEEAKVTANNDKNRTFSVWYVPEVTGTHKVTVLFAGQHIAKSPFEVYVDKSQGDASKVTAQGPGLEPSGNIANKTTYFEIFTAGAGTGEVEVVIQDPMGQKGTVEPQLEARGDSTYRCSYQPTMEGVHTVHVTFAGVPIPRSPYTVTVGQACNPSACRAVGRGLQPKGVRVKETADFKVYTKGAGSGELKVTVKGPKGEERVKQKDLGDGVYGFEYYPMVPGTYIVTITWGGQNIGRSPFEVKVGTECGNQKVRAWGPGLEGGVVGKSADFVVEAIGDDVGTLGFSVEGPSQAKIECDDKGDGSCDVRYWPQEAGEYAVHVLCNSEDIRLSPFMADIRDAPQDFHPDRVKARGPGLEKTGVAVNKPAEFTVDAKHGGKAPLRVQVQDNEGCPVEALVKDNGNGTYSCSYVPRKPVKHTAMVSWGGVSIPNSPFRVNVGAGSHPNKVKVYGPGVAKTGLKAHEPTYFTVDCAEAGQGDVSIGIKCAPGVVGPAEADIDFDIIRNDNDTFTVKYTPRGAGSYTIMVLFADQATPTSPIRVKVEPSHDASKVKAEGPGLSRTGVELGKPTHFTVNAKAAGKGKLDVQFSGLTKGDAVRDVDIIDHHDNTYTVKYTPVQQGPVGVNVTYGGDPIPKSPFSVAVSPSLDLSKIKVSGLGEKVDVGKDQEFTVKSKGAGGQGKVASKIVGPSGAAVPCKVEPGLGADNSVVRFLPREEGPYEVEVTYDGVPVPGSPFPLEAVAPTKPSKVKAFGPGLQGGSAGSPARFTIDTKGAGTGGLGLTVEGPCEAQLECLDNGDGTCSVSYVPTEPGDYNINILFADTHIPGSPFKAHVVPCFDASKVKCSGPGLERATAGEVGQFQVDCSSAGSAELTIEICSEAGLPAEVYIQDHGDGTHTITYIPLCPGAYTVTIKYGGQPVPNFPSKLQVEPAVDTSGVQCYGPGIEGQGVFREATTEFSVDARALTQTGGPHVKARVANPSGNLTETYVQDRGDGMYKVEYTPYEEGLHSVDVTYDGSPVPSSPFQVPVTEGCDPSRVRVHGPGIQSGTTNKPNKFTVETRGAGTGGLGLAVEGPSEAKMSCMDNKDGSCSVEYIPYEAGTYSLNVTYGGHQVPGSPFKVPVHDVTDASKVKCSGPGLSPGMVRANLPQSFQVDTSKAGVAPLQVKVQGPKGLVEPVDVVDNADGTQTVNYVPSREGPYSISVLYGDEEVPRSPFKVKVLPTHDASKVKASGPGLNTTGVPASLPVEFTIDAKDAGEGLLAVQITDPEGKPKKTHIQDNHDGTYTVAYVPDVTGRYTILIKYGGDEIPFSPYRVRAVPTGDASKCTVTVSIGGHGLGAGIGPTIQIGEETVITVDTKAAGKGKVTCTVCTPDGSEVDVDVVENEDGTFDIFYTAPQPGKYVICVRFGGEHVPNSPFQVTALAGDQPSVQPPLRSQQLAPQYTYAQGGQQTWAPERPLVGVNGLDVTSLRPFDLVIPFTIKKGEITGEVRMPSGKVAQPTITDNKDGTVTVRYAPSEAGLHEMDIRYDNMHIPGSPLQFYVDYVNCGHVTAYGPGLTHGVVNKPATFTVNTKDAGEGGLSLAIEGPSKAEISCTDNQDGTCSVSYLPVLPGDYSILVKYNEQHVPGSPFTARVTGDDSMRMSHLKVGSAADIPINISETDLSLLTATVVPPSGREEPCLLKRLRNGHVGISFVPKETGEHLVHVKKNGQHVASSPIPVVISQSEIGDASRVRVSGQGLHEGHTFEPAEFIIDTRDAGYGGLSLSIEGPSKVDINTEDLEDGTCRVTYCPTEPGNYIINIKFADQHVPGSPFSVKVTGEGRVKESITRRRRAPSVANVGSHCDLSLKIPEISIQDMTAQVTSPSGKTHEAEIVEGENHTYCIRFVPAEMGTHTVSVKYKGQHVPGSPFQFTVGPLGEGGAHKVRAGGPGLERAEAGVPAEFSIWTREAGAGGLAIAVEGPSKAEISFEDRKDGSCGVAYVVQEPGDYEVSVKFNEEHIPDSPFVVPVASPSGDARRLTVSSLQESGLKVNQPASFAVSLNGAKGAIDAKVHSPSGALEECYVTEIDQDKYAVRFIPRENGVYLIDVKFNGTHIPGSPFKIRVGEPGHGGDPGLVSAYGAGLEGGVTGNPAEFVVNTSNAGAGALSVTIDGPSKVKMDCQECPEGYRVTYTPMAPGSYLISIKYGGPYHIGGSPFKAKVTGPRLVSNHSLHETSSVFVDSLTKATCAPQHGAPGPGPADASKVVAKGLGLSKAYVGQKSSFTVDCSKAGNNMLLVGVHGPRTPCEEILVKHVGSRLYSVSYLLKDKGEYTLVVKWGDEHIPGSPYRVVVP

SEQ ID NO: 25546 - protein, 2639 aa, Homo sapiens
MSSSHSRAGQSAAGAAPGGGVDTRDAEMPATEKDLAEDAPWKKIQQNTFTRWCNEHLKCVSKRIANLQTDLSDGLRLIALLEVLSQKKMHRKHNQRPTFRQMQLENVSVALEFLDRESIKLVSIDSKAIVDGNLKLILGLIWTLILHYSISMPMWDEEEDEEAKKQTPKQRLLGWIQNKLPQLPITNFSRDWQSGRALGALVDSCAPGLCPDWDSWDASKPVTNAREAMQQADDWLGIPQVITPEEIVDPNVDEHSVMTYLSQFPKAKLKPGAPLRPKLNPKKARAYGPGIEPTGNMVKKRAEFTVETRSAGQGEVLVYVEDPAGHQEEAKVTANNDKNRTFSVWYVPEVTGTHKVTVLFAGQHIAKSPFEVYVDKSQGDASKVTAQGPGLEPSGNIANKTTYFEIFTAGAGTGEVEVVIQDPMGQKGTVEPQLEARGDSTYRCSYQPTMEGVHTVHVTFAGVPIPRSPYTVTVGQACNPSACRAVGRGLQPKGVRVKETADFKVYTKGAGSGELKVTVKGPKGEERVKQKDLGDGVYGFEYYPMVPGTYIVTITWGGQNIGRSPFEVKVGTECGNQKVRAWGPGLEGGVVGKSADFVVEAIGDDVGTLGFSVEGPSQAKIECDDKGDGSCDVRYWPQEAGEYAVHVLCNSEDIRLSPFMADIRDAPQDFHPDRVKARGPGLEKTGVAVNKPAEFTVDAKHGGKAPLRVQVQDNEGCPVEALVKDNGNGTYSCSYVPRKPVKHTAMVSWGGVSIPNSPFRVNVGAGSHPNKVKVYGPGVAKTGLKAHEPTYFTVDCAEAGQGDVSIGIKCAPGVVGPAEADIDFDIIRNDNDTFTVKYTPRGAGSYTIMVLFADQATPTSPIRVKVEPSHDASKVKAEGPGLSRTGVELGKPTHFTVNAKAAGKGKLDVQFSGLTKGDAVRDVDIIDHHDNTYTVKYTPVQQGPVGVNVTYGGDPIPKSPFSVAVSPSLDLSKIKVSGLGEKVDVGKDQEFTVKSKGAGGQGKVASKIVGPSGAAVPCKVEPGLGADNSVVRFLPREEGPYEVEVTYDGVPVPGSPFPLEAVAPTKPSKVKAFGPGLQGGSAGSPARFTIDTKGAGTGGLGLTVEGPCEAQLECLDNGDGTCSVSYVPTEPGDYNINILFADTHIPGSPFKAHVVPCFDASKVKCSGPGLERATAGEVGQFQVDCSSAGSAELTIEICSEAGLPAEVYIQDHGDGTHTITYIPLCPGAYTVTIKYGGQPVPNFPSKLQVEPAVDTSGVQCYGPGIEGQGVFREATTEFSVDARALTQTGGPHVKARVANPSGNLTETYVQDRGDGMYKVEYTPYEEGLHSVDVTYDGSPVPSSPFQVPVTEGCDPSRVRVHGPGIQSGTTNKPNKFTVETRGAGTGGLGLAVEGPSEAKMSCMDNKDGSCSVEYIPYEAGTYSLNVTYGGHQVPGSPFKVPVHDVTDASKVKCSGPGLSPGMVRANLPQSFQVDTSKAGVAPLQVKVQGPKGLVEPVDVVDNADGTQTVNYVPSREGPYSISVLYGDEEVPRSPFKVKVLPTHDASKVKASGPGLNTTGVPASLPVEFTIDAKDAGEGLLAVQITDPEGKPKKTHIQDNHDGTYTVAYVPDVTGRYTILIKYGGDEIPFSPYRVRAVPTGDASKCTVTGAGIGPTIQIGEETVITVDTKAAGKGKVTCTVCTPDGSEVDVDVVENEDGTFDIFYTAPQPGKYVICVRFGGEHVPNSPFQVTALAGDQPSVQPPLRSQQLAPQYTYAQGGQQTWAPERPLVGVNGLDVTSLRPFDLVIPFTIKKGEITGEVRMPSGKVAQPTITDNKDGTVTVRYAPSEAGLHEMDIRYDNMHIPGSPLQFYVDYVNCGHVTAYGPGLTHGVVNKPATFTVNTKDAGEGGLSLAIEGPSKAEISCTDNQDGTCSVSYLPVLPGDYSILVKYNEQHVPGSPFTARVTGDDSMRMSHLKVGSAADIPINISETDLSLLTATVVPPSGREEPCLLKRLRNGHVGISFVPKETGEHLVHVKKNGQHVASSPIPVVISQSEIGDASRVRVSGQGLHEGHTFEPAEFIIDTRDAGYGGLSLSIEGPSKVDINTEDLEDGTCRVTYCPTEPGNYIINIKFADQHVPGSPFSVKVTGEGRVKESITRRRRAPSVANVGSHCDLSLKIPEISIQDMTAQVTSPSGKTHEAEIVEGENHTYCIRFVPAEMGTHTVSVKYKGQHVPGSPFQFTVGPLGEGGAHKVRAGGPGLERAEAGVPAEFSIWTREAGAGGLAIAVEGPSKAEISFEDRKDGSCGVAYVVQEPGDYEVSVKFNEEHIPDSPFVVPVASPSGDARRLTVSSLQESGLKVNQPASFAVSLNGAKGAIDAKVHSPSGALEECYVTEIDQDKYAVRFIPRENGVYLIDVKFNGTHIPGSPFKIRVGEPGHGGDPGLVSAYGAGLEGGVTGNPAEFVVNTSNAGAGALSVTIDGPSKVKMDCQECPEGYRVTYTPMAPGSYLISIKYGGPYHIGGSPFKAKVTGPRLVSNHSLHETSSVFVDSLTKATCAPQHGAPGPGPADASKVVAKGLGLSKAYVGQKSSFTVDCSKAGNNMLLVGVHGPRTPCEEILVKHVGSRLYSVSYLLKDKGEYTLVVKWGDEHIPGSPYRVVVP

SEQ ID NO: 25547 - protein, 71 aa, Homo sapiens
MTQLLLFLVALLVLGHVPSGRSEFKRCWKGQGACQTYCTRQETYMHLCPDASLCCLSYALKPPPVPKHEYE

SEQ ID NO: 25548 - protein, 259 aa, Homo sapiens
MNKLKSSQKDKVRQFMIFTQSSEKTAVSCLSQNDWKLDVATDNFFQNPELYIRESVKGSLDRKKLEQLYNRYKDPQDENKIGIDGIQQFCDDLALDPASISVLIIAWKFRAATQCEFSKQEFMDGMTELGCDSIEKLKAQIPKMEQELKEPGRFKDFYQFTFNFAKNPGQKGLDLEMAIAYWNLVLNGRFKFLDLWNKFLLEHHKRSIPKDTWNLLLDFSTMIADDMSNYDEEGAWPVLIDDFVEFARPQIAGTKSTTV

SEQ ID NO: 25549 - protein, 152 aa, Homo sapiens
MEAVLNELVSVEDLLKFEKKFQSEKAAGSVSKSTQFEYAWCLVRSKYNDDIRKGIVLLEELLPKGSKEEQRDYVFYLAVGNYRLKEYEKALKYVRGLLQTEPQNNQAKELERLIDKAMKKDGLVGMAIVGGMALGVAGLAGLIGLAVSKSKS

SEQ ID NO: 25550 - protein, 93 aa, Homo sapiens
MKLFLVLIILLFEVLTDGARLKKCFNKVTGYCRKKCKVGERYEIGCLSGKLCCANDEEEKKHVSFKKPHQHSGEKLSVLQDYIILPTITIFTV

SEQ ID NO: 25551 - protein, 193 aa, Homo sapiens
MVATGSLSSKNPASISELLDCGYHPESLLSDFDYWDYVVPEPNLNEVIFEESTCQNLVKMLENCLSKSKQTKLGCSKVLVPEKLTQRIAQDVLRLSSTEPCGLRGCVMHVNLEIENVCKKLDRIVCDSSVVPTFELTLVFKQENCSWTSFRDFFFSRGRFSSGFRRTLILSSGFRLVKKKLYSLIGTTVIEGS

SEQ ID NO: 25552 - protein, 183 aa, Homo sapiens
MKLLFPIFASLMLQYQVNTEFIGLRRCLMGLGRCRDHCNVDEKEIQKCKMKKCCVGPKVVKLIKNYLQYGTPNVLNEDVQEMLKPAKNSSAVIQRKHILSVLPQIKSTSFFANTNFVIIPNATPMNSATISTMTPGQITYTATSTKSNTKESRDSATASPPPAPPPPNILPTPSLELEEAEEQ

SEQ ID NO: 25553 - protein, 244 aa, Homo sapiens
MHYGAATHIQNSRSHGLETVPGHQRLERGAGGETPEFPGCHSPAPPENFGNELLPLSAPLQGLSEGLYPPGRNKTLPAGVLREGAVQFLHRGLCNSNLSSEASARPSGTQDELHSSRRKTGQTRREGARKHLVCSFRLYPFTVHTVSPGNSHLALYQVFKAVKLCPSETSFFLSRKSLKSSDPWHPPSLSPNSWNRQAGFRAWSSHLISLSLTCSDSQSRRVSSSQQPPLHSLSSHRRAAHVPE

SEQ ID NO: 25554 - protein, 95 aa, Homo sapiens
MKFLLLVLAALGFLTQVIPASAGGSKCVSNTPGYCRTCCHWGETALFMCNASRKCCISYSFLPKPDLPQLIGNHWQSRRRNTQRKDKKQQTTVTS

SEQ ID NO: 25555 - protein, 134 aa, Homo sapiens
MPFLELDTNLPANRVPAGLEKRLCAAAASILGKPADRVNVTVRPGLAMALSGSTEPCAQLSISSIGVVGTAEDNRSHSAHFFEFLTKELALGQDRFPTVLSTSPAAHGGPRCPGEIIEGKKSCLNEEALFIYFI

SEQ ID NO: 25556 - protein, 260 aa, Homo sapiens [sequence omitted]

SEQ ID NO: 25557 - protein, 570 aa, Homo sapiens
MALKKSSPSLDSGDSDSEELPTFAFLKKEPSSTKRRQPEREEKIVVVDISDCEASCPPAPELFSPPVPEIAETVTQTQPVRLLSSESEDEEEFIPLAQRLTCKFLTHKQLSPEDSSSPVKSVLDHQNNEGASCDWKKPFPKIPEVPLHDTPERSAADNKDLILDPCCQLPAYLSTCPGQSSSLAVTKTNSDILPPQKKTKPSQKVQGRGSHGCRQQRQARQKESTLRRQERKNAALVTRMKAQRPEECLKHIIVVLDPVLLQMEGGGQLLGALQTMECRCVIEAQAVPCSVTWRRRAGPSEDREDWVEEPTVLVLLRAEAFVSMIDNGKQGSLDSTMKGKETLQGFVTDITAKTAGKALSLVIVDQEKCFSAQNPPRRGKQGANKQTKKQQQRQPEASIGSMVSRVDAEEALVDLQLHTEAQAQIVQSWKELADFTCAFTKAVAEAPFKKLRDETTFSFCLESDWAGGVKVDLAGRGLALVWRRQIQQLNRVSLEMASAVVNAYPSPQLLVQAYQQCFSDKERQNLLADIQVRRGEGVTSTSRRIGPELSRRIYLQMTTLQPHLSLDSAD

SEQ ID NO: 25558 - protein, 583 aa, Homo sapiens
MALKKSSPSLDSGDSDSEELPTFAFLKKEPSSTKRRQPEREEKIVVVDISDCEASCPPAPELFSPPVPEIAETVTQTQPVRLLSSESEDEEEFIPLAQRLTCKFLTHKQLSPEDSSSPVKSVLDHQNNEGASCDWKKPFPKIPEVPLHDTPERSAADNKDLILDPCCQLPAYLSTCPGQSSSLAVTKTNSDILPPQKKTKPSQKVQGRGSHGCRQQRQARQKESTLRRQERKNAALVTRMKAQRPEECLKHIIVVLDPVLLQMEGGGQLLGALQTMECRCVIEAQAVPCSVTWRRRAGPSEDREDWVEEPTVLVLLRAEAFVSMIDNGKQGSLDSTMKGKETLQGFVTDITAKTAGKALSLVIVDQEKCFSLELLFFDFLPCTSAQNPPRRGKQGANKQTKKQQQRQPEASIGSMVSRVDAEEALVDLQLHTEAQAQIVQSWKELADFTCAFTKAVAEAPFKKLRDETTFSFCLESDWAGGVKVDLAGRGLALVWRRQIQQLNRVSLEMASAVVNAYPSPQLLVQAYQQCFSDKERQNLLADIQVRRGEGVTSTSRRIGPELSRRIYLQMTTLQPHLSLDSAD

SEQ ID NO: 25559 - protein, 131 aa, Homo sapiens
MAPSLWKGLVGIGLFALAHAAFSAAQHRSYMRLTEKEDESLPIDIVLQTLLAFAVTCYGIVHIAGEFKDMDATSELKNKTFDTLRNHPSFYVFNHRGRVLFRPSDTANSSNQDALSSNTSLKLRKLESLRR

SEQ ID NO: 25560 - protein, 196 aa, Homo sapiens
MTPLGSGPPREASIAQPSGFSTTETLCAQDFSDVIFLRRADTRRWKKKQLRRPSLLLLGCCSFGIMAPSLWKGLVGIGLFALAHAAFSAAQHRSYMRLTEKEDESLPIDIVLQTLLAFAVTCYGIVHIAGEFKDMDATSELKNKTFDTLRNHPSFYVFNHRGRVLFRPSDTANSSNQDALSSNTSLKLRKLESLRR

SEQ ID NO: 25561 - protein, 431 aa, Homo sapiens
MDSAITLWQFLLQLLQKPQNKHMICWTSNDGQFKLLQAEEVARLWGIRKNKPNMNYDKLSRALRYYYVKNIIKKVNGQKFVYKFVSYPEILNMDPMTVGRIEGDCESLNFSEVSSSSKDVENGGKDKPPQPGAKTSSRNDYIHSGLYSSFTLNSLNSSNVKLFKLIKTENPAEKLAEKKSPQEPTPSVIKFVTTPSKKPPVEPVAATISIGPSISPSSEETIQALETLVSPKLPSLEAPTSASNVMTAFATTPPISSIPPLQEPPRTPSPPLSSHPDIDTDIDSVASQPMELPENLSLEPKDQDSVLLEKDKVNNSSRSKKPKGLELAPTLVITSSDPSPLGILSPSLPTASLTPAFFSQTPIILTPSPLLSSIHFWSTLSPVAPLSPARLQGANTLFQFPSVLNSHGPFTLSGLDGPSTPGPFSPDLQKT

SEQ ID NO: 25562 - protein, 405 aa, Homo sapiens
MDSAITLWQFLLQLLQKPQNKHMICWTSNDGQFKLLQAEEVARLWGIRKNKPNMNYDKLSRALRYYYVKNIIKKVNGQKFVYKFVSYPEILNMDPMTVGRIEGDCESLNFSEVSSSSKDVENGGKDKPPQPGAKTSSRNDYIHSGLYSSFTLNSLNSSNVKLFKLIKTENPAEKLAEKKSPQEPTPSVIKFVTTPSKKPPVEPVAATISIGPSISPSSEETIQALETLVSPKLPSLEAPTSASNVMTAFATTPPISSIPPLQEPPRTPSPPLSSHPDIDTDIDSVASQPMELPENLSLEPKDQDSVLLEKDKVNNSSRSKKPKGLELAPTLVITSSDPSPLGILSPSLPTASLTPAFFSQVACSLFMVSPLLSFICPFKQIQNLYTQVCFLLLRFVLERLCVTVM

SEQ ID NO: 25563 - protein, 2047 aa, Homo sapiens
MAASERRAFAHKINRTVAAEVRKQVSRERSGSPHSSRRCSSSLGVPLTEVVEPLDFEDVLLSRPPDAEPGPLRDLVEFPADDLELLLQPRECRTTEPGIPKDEKLDAQVRAAVEMYIEDWVIVHRRYQYLSAAYSPVTTDTQRERQKGLPRQVFEQDASGDERSGPEDSNDSRRGSGSPEDTPRSSGASSIFDLRNLAADSLLPSLLERAAPEDVDRRNETLRRQHRPPALLTLYPAPDEDEAVERCSRPEPPREHFGQRILVKCLSLKFEIEIEPIFGILALYDVREKKKISENFYFDLNSDSMKGLLRAHGTHPAISTLARSAIFSVTYPSPDIFLVIKLEKVLQQGDISECCEPYMVLKEVDTAKNKEKLEKLRLAAEQFCTRLGRYRMPFAWTAVHLANIVSSAGQLDRDSDSEGERRPAWTDRRRRGPQDRASSGDDACSFSGFRPATLTVTNFFKQEAERLSDEDLFKFLADMRRPSSLLRRLRPVTAQLKIDISPAPENPHFCLSPELLHIKPYPDPRGRPTKEILEFPAREVYAPHTSYRNLLYVYPHSLNFSSRQGSVRNLAVRVQYMTGEDPSQALPVIFGKSSCSEFTREAFTPVVYHNKSPEFYEEFKLHLPACVTENHHLLFTFYHVSCQPRPGTALETPVGFTWIPLLQHGRLRTGPFCLPVSVDQPPPSYSVLTPDVALPGMRWVDGHKGVFSVELTAVSSVHPQDPYLDKFFTLVHVLEEGAFPFRLKDTVLSEGNVEQELRASLAALRLASPEPLVAFSHHVLDKLVRLVIRPPIISGQIVNLGRGAFEAMAHVVSLVHRSLEAAQDARGHCPQLAAYVHYAFRLPGTEPSLPDGAPPVTVQAATLARGSGRPASLYLARSKSISSSNPDLAVAPGSVDDEVSRILASKLLHEELALQWVVSSSAVREAILQHAWFFFQLMVKSMALHLLLGQRLDTPRKLRFPGRFLDDITALVGSVGLEVITRVHKDVELAEHLNASLAFFLSDLLSLVDRGFVFSLVRAHYKQVATRLQSSPNPAALLTLRMEFTRILCSHEHYVTLNLPCCPLSPPASPSPSVSSTTSQSSTFSSQAPDPKVTSMFELSGPFRQQHFLAGLLLTELALALEPEAEGAFLLHKKAISAVHSLLCGHDTDPRYAEATVKARVAELYLPLLSIARDTLPRLHDFAEGPGQRSRLASMLDSDTEGEGDIAGTINPSVAMAIAGGPLAPGSRASISQGPPTASRAGCALSAESSRTLLACVLWVLKNTEPALLQRWATDLTLPQLGRLLDLLYLCLAAFEYKGKKAFERINSLTFKKSLDMKARLEEAILGTIGARQEMVRRSRERSPFGNPENVRWRKSVTHWKQTSDRVDKTKDEMEHEALVEGNLATEASLVVLDTLEIIVQTVMLSEARESVLGAVLKVVLYSLGSAQSALFLQHGLATQRALVSKFPELLFEEDTELCADLCLRLLRHCGSRISTIRTHASASLYLLMRQNFEIGHNFARVKMQVTMSLSSLVGTTQNFSEEHLRRSLKTILTYAEEDMGLRDSTFAEQVQDLMFNLHMILTDTVKMKEHQEDPEMLIDLMYRIARGYQGSPDLRLTWLQNMAGKHAELGNHAEAAQCMVHAAALVAEYLALLEDHRHLPVGCVSFQNISSNVLEESAISDDILSPDEEGFCSGKHFTELGLVGLLEQAAGYFTMGGLYEAVNEVYKNLIPILEAHRDYKKLAAVHGKLQEAFTKIMHQSSGWERVFGTYFRVGFYGAHFGDLDEQEFVYKEPSITKLAEISHRLEEFYTERFGDDVVEIIKDSNPVDKSKLDSQKAYIQITYVEPYFDTYELKDRVTYFDRNYGLRTFLFCTPFTPDGRAHGELPEQHKRKTLLSTDHAFPYIKTRIRVCHREETVLTPVEVAIEDMQKKTRELAFATEQDPPDAKMLQMVLQGSVGPTVNQGPLEVAQVFLAEIPEDPKLFRHHNKLRLCFKDFCKKCEDALRKNKALIGPDQKEYHRELERNYCRLREALQPLLTQRLPQLMAPTPPGLRNSLNRASFRKADL

SEQ ID NO: 25564 - protein, 293 aa, Homo sapiens
MFISLWEFFYGHFFRFWMKWLLRQMTGKCELQRIFDTYVGAQRTHRIENSLTYSKNKVLQKATHVVQSEVDKYVDDIMKEKNINPEKDASFKICMKMCLLQITGYKQLYLDVESVRKRPYDSDNLQHEELLMKLWNLLMPTKKLNARISKQWAEIGFQGDDPKTDFRGMGILGLINLVYFSENYTSEAHQILSRSNHPKLGYSYAIVGINLTEMAYSLLKSEALKFHLYNLVPGIPTMEHFHQFYCYLVYEFDKFWFEEEPESIMYFNLYREKFHEKIKGLLLDCNVALTLKV

SEQ ID NO: 25565 - protein, 573 aa, Homo sapiens
MEEEQDLPEQPVKKAKMQESGEQTISQVSNPDVSDQKPETSSLASNLPMSEEIMTCTDYIPRSSNDYTSQMYSAKPYAHILSVPVSETAYPGQTQYQTLQQTQPYAVYPQATQTYGLPPFGALWPGMKPESGLIQTPSPSQHSVLTCTTGLTTSQPSPAHYSYPIQASSTNASLISTSSTIANIPAAAVASISNQDYPTYTILGQNQYQACYPSSSFGVTGQTNSDAESTTLAATTYQSEKPSVMAPAPAAQRLSSGDPSTSPSLSQTTPSKDTDDQSRKNMTSKNRGKRKADATSSQDSELERVFLWDLDETIIIFHSLLTGSYAQKYGKDPTVVIGSGLTMEEMIFEVADTHLFFNDLEECDQVHVEDVASDDNGQDLSNYSFSTDGFSGSGGSGSHGSSVGVQGGVDWMRKLAFRYRKVREIYDKHKSNVGGLLSPQRKEALQRLRAEIEVLTDSWLGTALKSLLLIQSRKNCVNVLITTTQLVPALAKVLLYGLGEIFPIENIYSATKIGKESCFERIVSRFGKKVTYVVIGDGRDEEIAAKQHNMPFWRITNHGDLVSLHQALELDFL

SEQ ID NO: 25566 - protein, 447 aa, Homo sapiens
MKPESGLIQTPSPSQHSVLTCTTGLTTSQPSPAHYSYPIQASSTNASLISTSSTIANIPAAAVASISNQDYPTYTILGQNQYQACYPSSSFGVTGQTNSDAESTTLAATTYQSEKPSVMAPAPAAQRLSSGDPSTSPSLSQTTPSKDTDDQSRKNMTSKNRGKRKADATSSQDSELERVFLWDLDETIIIFHSLLTGSYAQKYGKDPTVVIGSGLTMEEMIFEVADTHLFFNDLEECDQVHVEDVASDDNGQDLSNYSFSTDGFSGSGGSGSHGSSVGVQGGVDWMRKLAFRYRKVREIYDKHKSNVGGLLSPQRKEALQRLRAEIEVLTDSWLGTALKSLLLIQSRKNCVNVLITTTQLVPALAKVLLYGLGEIFPIENIYSATKIGKESCFERIVSRFGKKVTYVVIGDGRDEEIAAKQHNMPFWRITNHGDLVSLHQALELDFL

SEQ ID NO: 25567 - protein, 536 aa, Homo sapiens
MEEEQDLPEQPVKKAKMQESGEQTISQVSNPDVSDQKPETSSLASNLPMSEEIMTCTDYIPRSSNDYTSQMYSAKPYAHILSVPVSETAYPGQTQYQTLQQTQPYAVYPQATQTYGLPPFASSTNASLISTSSTIANIPAAAVASISNQDYPTYTILGQNQYQACYPSSSFGVTGQTNSDAESTTLAATTYQSEKPSVMAPAPAAQRLSSGDPSTSPSLSQTTPSKDTDDQSRKNMTSKNRGKRKADATSSQDSELERVFLWDLDETIIIFHSLLTGSYAQKYGKDPTVVIGSGLTMEEMIFEVADTHLFFNDLEECDQVHVEDVASDDNGQDLSNYSFSTDGFSGSGGSGSHGSSVGVQGGVDWMRKLAFRYRKVREIYDKHKSNVGGLLSPQRKEALQRLRAEIEVLTDSWLGTALKSLLLIQSRKNCVNVLITTTQLVPALAKVLLYGLGEIFPIENIYSATKIGKESCFERIVSRFGKKVTYVVIGDGRDEEIAAKQQLYFLDMEALGCQLEPTALILFIQLSGNLSNYNKL

SEQ ID NO: 25568 - protein, 520 aa, Homo sapiens
MTCTDYIPRSSNDYTSQMYSAKPYAHILSVPVSETAYPGQTQYQTLQQTQPYAVYPQATQTYGLPPFGALWPGMKPESGLIQTPSPSQHSVLTCTTGLTTSQPSPAHYSYPIQASSTNASLISTSSTIANIPAAAVASISNQDYPTYTILGQNQYQACYPSSSFGVTGQTNSDAESTTLAATTYQSEKPSVMAPAPAAQRLSSGDPSTSPSLSQTTPSKDTDDQSRKNMTSKNRGKRKADATSSQDSELERVFLWDLDETIIIFHSLLTGSYAQKYGKDPTVVIGSGLTMEEMIFEVADTHLFFNDLEECDQVHVEDVASDDNGQDLSNYSFSTDGFSGSGGSGSHGSSVGVQGGVDWMRKLAFRYRKVREIYDKHKSNVGGLLSPQRKEALQRLRAEIEVLTDSWLGTALKSLLLIQSRKNCVNVLITTTQLVPALAKVLLYGLGEIFPIENIYSATKIGKESCFERIVSRFGKKVTYVVIGDGRDEEIAAKQHNMPFWRITNHGDLVSLHQALELDFL

SEQ ID NO: 25569 - protein, 527 aa, Homo sapiens
MEEEQDLPEQPVKKAKMQESGEQTISQVSNPDVSDQKPETSSLASNLPMSEEIMTCTDYIPRSSNDYTSQMYSAKPYAHILSVPVSETAYPGQTQYQTLQQTQPYAVYPQATQTYGLPPFASSTNASLISTSSTIANIPAAAVASISNQDYPTYTILGQNQYQACYPSSSFGVTGQTNSDAESTTLAATTYQSEKPSVMAPAPAAQRLSSGDPSTSPSLSQTTPSKDTDDQSRKNMTSKNRGKRKADATSSQDSELERVFLWDLDETIIIFHSLLTGSYAQKYGKDPTVVIGSGLTMEEMIFEVADTHLFFNDLEECDQVHVEDVASDDNGQDLSNYSFSTDGFSGSGGSGSHGSSVGVQGGVDWMRKLAFRYRKVREIYDKHKSNVGGLLSPQRKEALQRLRAEIEVLTDSWLGTALKSLLLIQSRKNCVNVLITTTQLVPALAKVLLYGLGEIFPIENIYSATKIGKESCFERIVSRFGKKVTYVVIGDGRDEEIAAKQHNMPFWRITNHGDLVSLHQALELDFL

SEQ ID NO: 25570 - protein, 331 aa, Homo sapiens
MRFRFGVVVPPAVAGARPELLVVGSRPELGRWEPRGAVRLRPAGTAAGDGALALQEPGLWLGEVELAAEEAAQDGAEPGRVDTFWYKFLKREPGGELSWEGNGPHHDRCCTYNENNLVDGVYCLPIGHWIEATGHTNEMKHTTDFYFNIAGHQAMHYSRILPNIWLGSCPRQVEHVTIKLKHELGITAVMNFQTEWDIVQNSSGCNRYPEPMTPDTMIKLYREEGLAYIWMPTPDMSTEGRVQMLPQAVCLLHALLEKGHIVYVHCNAGVGRSTAAVCGWLQYVMGWNLRKVQYFLMAKRPAVYIDEEALARAQEDFFQKFGKVRSSVCSL

SEQ ID NO: 25571 - protein, 317 aa, Homo sapiens
MRFRFGVVVPPAVAGARPELLVVGSRPELGRWEPRGAVRLRPAGTAAGDGALALQEPGLWLGEVELAAEEAAQDGAEPGRVDTFWYKFLKREPGGELSWEGNGPHHDRCCTYNENNLVDGVYCLPIGHWIEATGHTNEMKHTTDFYFNIAGHQAMHYSRILPNIWLGSCPRQVEHVTIKLKHELGITAVMNFQTEWDIVQNSSGCNRYPEPMTPDTMIKLYREEGLAYIWMPTPDMSTEGRVQMLPQAVCLLHALLEKGHIVYVHCNAGVGRSTAAVCGWLQYVMGWNLRKVQYFLMAKRPAVYIDEEAASQDTFPL

SEQ ID NO: 25572 - protein, 152 aa, Homo sapiens
MRFRFGVVVPPAVAGARPELLVVGSRPELGRWEPRGAVRLRPAGTAAGDGALALQEPGLWLGEVELAAEEAAQDGAEPGRVDTFWYKFLKREPGGELSWEGIASRRLPPAQSGSSGPHPQPGPRPRAGPAGPGGARPGLFARVPAHSPGDLG

SEQ ID NO: 25573 - protein, 224 aa, Homo sapiens
MRFRFGVVVPPAVAGARPELLVVGSRPELGRWEPRGAVRLRPAGTAAGDGALALQEPGLWLGEVELAAEEAAQDGAEPGRVDTFWYKFLKREPGGELSWEGNGPHHDRCCTYNENNLVDGVYCLPIGHWIEATGHTNEMKHTTDFYFNIAGHQAMHYSRPSTDAAPGGVPAACAAGEGTHRVRALQRWGGPLHRGCLRLAPVCDGLESEEGAVFPHGQEAGCLH

SEQ ID NO: 25574 - protein, 88 aa, Homo sapiens
MLPQAVCLLHALLEKGHIVYVHCNAGVGRSTAAVCGWLQYVMGWNLRKVQYFLMAKRPAVYIDEEALARAQEDFFQKFGKVRSSVCSL

SEQ ID NO: 25575 - protein, 177 aa, Homo sapiens
MIFNKILPNIWLGSCPRQVEHVTIKLKHELGITAVMNFQTEWDIVQNSSGCNRYPEPMTPDTMIKLYREEGLAYIWMPTPDMSTEGRVQMLPQAVCLLHALLEKGHIVYVHCNAGVGRSTAAVCGWLQYVMGWNLRKVQYFLMAKRPAVYIDEEALARAQEDFFQKFGKVRSSVCSL

SEQ ID NO: 25576 - protein, 193 aa, Homo sapiens
MKHTTDFYFNIAGHQAMHYSRILPNIWLGSCPRQVEHVTIKLKHELGITAVMNFQTEWDIVQNSSGCNRYPEPMTPDTMIKLYREEGLAYIWMPTPDMSTEGRVQMLPQAVCLLHALLEKGHIVYVHCNAGVGRSTAAVCGWLQYVMGWNLRKVQYFLMAKRPAVYIDEEALARAQEDFFQKFGKVRSSVCSL

SEQ ID NO: 25577 - protein, 893 aa, Homo sapiens
MEKDDPPQLVTPTSVKAIILRIEAAQLTRAQEDISTQLSDILDNVNCVINRFQEELGYDLKENAKSQQRDPKGKKRFILLEKIASFSKDAMMKEKHLYDILRWLGDWGDTLTYEIGPRKSEEEAAALDEWIEVTEKVLPLSLIATKRGIESLTALCSTLIEGQKKRSQVSKRTFWQGWQGRSPQTSPSHPQPLSPEQMLQDQHTMNTKASEVTSMLQELLDSTMFSKGEVRAIRYMATVVENLNKALILQHKENRSLETKYRHLQMQATKELSSQRLHFQQFMEVLESRRDALLKQVEILGGRYHDLLLMKQALEFQLKKAQNATGQAEDLAEVSVDSPGPSERETLPRKETVMEESQQEPMKEEQLFSPLPPSPMAMIRDSGAIAAGHQPLSTMTVRSRVADVFGSKDTESLEPVLLPLVDRRFPKKWERPVAESLGHKDKDQEDYFQKGGLQIKFHCSKQLSLESSRQVTSESQEEPWEEEFGREMRRQLWLEEEEMWQQRQKKWALLEQEHQEKLRQWNLEDLAREQQRRWVQLEKEQESPRREPEQLGEDVERRIFTPTSRWRDLEKAELSLVPAPSRTQSAHQSRRPHLPMSPSTQQPALGKQRPMSSVEFTYRPRTRRVPTKPKKSASFPVTGTSIRRLTWPSLQISPANIKKKVYHMDMEAQRKNLQLLSEESELRLPHYLRSKALELTTTTMELGALRLQYLCHKYIFYRRLQSLRQEAINHVQIMKETEASYKAQNLYIFLENIDRLQSLRLQAWTDKQKGLEEKHRECLSSMVTMFPKLQLEWNVHLNIPEVTSPKPKKCKLPAASPRHIRPSGPTYKQPFLSRHRACVPLQMARQQGKQMEAVWKTEVASSSYAIEKKTPASLPRDQLRGHPDIPRLLTLDV

SEQ ID NO: 25578 - protein, 781 aa, Homo sapiens
MMKEKHLYDILRWLGDWGDTLTYEIGPRKSEEEAAALDEWIEVTEKVLPLSLIATKRGIESLTALCSTLIEGQKKRSQVSKRTFWQGWQGRSPQTSPSHPQPLSPEQMLQDQHTMNTKASEVTSMLQELLDSTMFSKGEVRAIRYMATVVENLNKALILQHKENRSLETKYRHLQMQATKELSSQRLHFQQFMEVLESRRDALLKQVEILGGRYHDLLLMKQALEFQLKKAQNATGQAEDLAEVSVDSPGPSERETLPRKETVMEESQQEPMKEEQLFSPLPPSPMAMIRDSGAIAAGHQPLSTMTVRSRVADVFGSKDTESLEPVLLPLVDRRFPKKWERPVAESLGHKDKDQEDYFQKGGLQIKFHCSKQLSLESSRQVTSESQEEPWEEEFGREMRRQLWLEEEEMWQQRQKKWALLEQEHQEKLRQWNLEDLAREQQRRWVQLEKEQESPRREPEQLGEDVERRIFTPTSRWRDLEKAELSLVPAPSRTQSAHQSRRPHLPMSPSTQQPALGKQRPMSSVEFTYRPRTRRVPTKPKKSASFPVTGTSIRRLTWPSLQISPANIKKKVYHMDMEAQRKNLQLLSEESELRLPHYLRSKALELTTTTMELGALRLQYLCHKYIFYRRLQSLRQEAINHVQIMKETEASYKAQNLYIFLENIDRLQSLRLQAWTDKQKGLEEKHRECLSSMVTMFPKLQLEWNVHLNIPEVTSPKPKKCKLPAASPRHIRPSGPTYKQPFLSRHRACVPLQMARLLALCLRGLVAELALVMEDFDLLHVL

SEQ ID NO: 25579 - protein, 437 aa, Homo sapiens
MADDPSAADRNVEIWKIKKLIKSLEAARGNGTSMISLIIPPKDQISRVAKMLADEFGTASNIKSRVNRLSVLGAITSVQQRLKLYNKVPPNGLVVYCGTIVTEEGKEKKVNIDFEPFKPINTSLYLCDNKFHTEALTALLSDDSKFGFIVIDGSGALFGTLQGNTREVLHKFTVDLPKKHGRGGQSALRFARLRMEKRHNYVRKVAETAVQLFISGDKVNVAGLVLAGSADFKTELSQSDMFDQRLQSKVLKLVDISYGGENGFNQAIELSTEVLSNVKFIQEKKLIGRYFDEISQDTGKYCFGVEDTLKALEMGAVEILIVYENLDIMRYVLHCQGTEEEKILYLTPEQEKDKSHFTDKETGQEHELIESMPLLEWFANNYKKFGATLEIVTDKSQEGSQFVKGFGGIGGILRYRVDFQGMEYQGGDDEFFDLDDY

SEQ ID NO: 25580 - protein, 404 aa, Homo sapiens
MISLIIPPKDQISRVAKMLADEFGTASNIKSRVNRLSVLGAITSVQQRLKLYNKVPPNGLVVYCGTIVTEEGKEKKVNIDFEPFKPINTSLYLCDNKFHTEALTALLSDDSKFGFIVIDGSGALFGTLQGNTREVLHKFTVDLPKKHGRGGQSALRFARLRMEKRHNYVRKVAETAVQLFISGDKVNVAGLVLAGSADFKTELSQSDMFDQRLQSKVLKLVDISYGGENGFNQAIELSTEVLSNVKFIQEKKLIGRYFDEISQDTGKYCFGVEDTLKALEMGAVEILIVYENLDIMRYVLHCQGTEEEKILYLTPEQEKDKSHFTDKETGQEHELIESMPLLEWFANNYKKFGATLEIVTDKSQEGSQFVKGFGGIGGILRYRVDFQGMEYQGGDDEFFDLDDY

SEQ ID NO: 25581 - protein, 668 aa, Homo sapiens
MMPSPSDSSRSLTSRPSTRGLTHLRLHRPWLQALLTLGLVQVLLGILVVTFSMVASSVTTTESIKRSCPSWAGFSLAFSGVVGIVSWKRPFTLVISFFSLLSVLCVMLSMAGSVLSCKNAQLARDFQQCSLEGKVCVCCPSVPLLRPCPESGQELKVAPNSTCDEARGALKNLLFSVCGLTICAAIICTLSAIVCCIQIFSLDLVHTLAPERSVSGPLGPLGCTSPPPAPLLHTMLDLEEFVPPVPPPPYYPPEYTCSSETDAQSITYNGSMDSPVPLYPTDCPPSYEAVMGLRGDSQATLFDPQLHDGSCICERVASIVDVSMDSGSLVLSAIGDLPGGSSPSEDSCLLELQGSVRSVDYVLFRSIQRSRAGYCLSLDCGLRGPFEESPLPRRPPRAARSYSCSAPEAPPPLGAPTAARSCHRLEGWPPWVGPCFPELRRRVPRGGGRPAAAPPTRAPTRRFSDSSGSLTPPGHRPPHPASPPPLLLPRSHSDPGITTSSDTADFRDLYTKVLEEEAASVSSADTGLCSEACLFRLARCPSPKLLRARSAEKRRPVPTFQKVPLPSGPAPAHSLGDLKGSWPGRGLVTRFLQISRKAPDPSGTGAHGHKQVPRSLWGRPGRESLHLRSCGDLSSSSSLRRLLSGRRLERGTRPHSLSLNGGSRETGL

SEQ ID NO: 25582 - protein, 572 aa, Homo sapiens
MMPSPSDSSRSLTSRPSTRGLTHLRLHRPWLQALLTLGLVQVLLGILVVTFSMVASSVTTTESIKRSCPSWAGFSNLLFSVCGLTICAAIICTLSAIVCCIQIFSLDLVHTLAPERSVSGPLGPLGCTSPPPAPLLHTMLDLEEFVPPVPPPPYYPPEYTCSSETDAQSITYNGSMDSPVPLYPTDCPPSYEAVMGLRGDSQATLFDPQLHDGSCICERVASIVDVSMDSGSLVLSAIGDLPGGSSPSEDSCLLELQGSVRSVDYVLFRSIQRSRAGYCLSLDCGLRGPFEESPLPRRPPRAARSYSCSAPEAPPPLGAPTAARSCHRLEGWPPWVGPCFPELRRRVPRGGGRPAAAPPTRAPTRRFSDSSGSLTPPGHRPPHPASPPPLLLPRSHSDPGITTSSDTADFRDLYTKVLEEEAASVSSADTGLCSEACLFRLARCPSPKLLRARSAEKRRPVPTFQKVPLPSGPAPAHSLGDLKGSWPGRGLVTRFLQISRKAPDPSGTGAHGHKQVPRSLWGRPGRESLHLRSCGDLSSSSSLRRLLSGRRLERGTRPHSLSLNGGSRETGL

SEQ ID NO: 25583 - protein, 650 aa, Homo sapiens
MMPSPSDSSRSLTSRPSTRGLTHLRLHRPWLQALLTLGLVQVLLGILVVTFSMVASSVTTTESIKRSCPSWAGFSISFFSLLSVLCVMLSMAGSVLSCKNAQLARDFQQCSLEGKVCVCCPSVPLLRPCPESGQELKVAPNSTCDEARGALKNLLFSVCGLTICAAIICTLSAIVCCIQIFSLDLVHTQLAPERSVSGPLGPLGCTSPPPAPLLHTMLDLEEFVPPVPPPPYYPPEYTCSSETDAQSITYNGSMDSPVPLYPTDCPPSYEAVMGLRGDSQATLFDPQLHDGSCICERVASIVDVSMDSGSLVLSAIGDLPGGSSPSEDSCLLELQGSVRSVDYVLFRSIQRSRAGYCLSLDCGLRGPFEESPLPRRPPRAARSYSCSAPEAPPPLGAPTAARSCHRLEGWPPWVGPCFPELRRRVPRGGGRPAAAPPTRAPTRRFSDSSGSLTPPGHRPPHPASPPPLLLPRSHSDPGITTSSDTADFRDLYTKVLEEEAASVSSADTGLCSEACLFRLARCPSPKLLRARSAEKRRPVPTFQKVPLPSGPAPAHSLGDLKGSWPGRGLVTRFLQISRKAPDPSGTGAHGHKQVPRSLWGRPGRESLHLRSCGDLSSSSSLRRLLSGRRLERGTRPHSLSLNGGSRETGL

SEQ ID NO: 25584 - protein, 669 aa, Homo sapiens
MMPSPSDSSRSLTSRPSTRGLTHLRLHRPWLQALLTLGLVQVLLGILVVTFSMVASSVTTTESIKRSCPSWAGFSLAFSGVVGIVSWKRPFTLVISFFSLLSVLCVMLSMAGSVLSCKNAQLARDFQQCSLEGKVCVCCPSVPLLRPCPESGQELKVAPNSTCDEARGALKNLLFSVCGLTICAAIICTLSAIVCCIQIFSLDLVHTQLAPERSVSGPLGPLGCTSPPPAPLLHTMLDLEEFVPPVPPPPYYPPEYTCSSETDAQSITYNGSMDSPVPLYPTDCPPSYEAVMGLRGDSQATLFDPQLHDGSCICERVASIVDVSMDSGSLVLSAIGDLPGGSSPSEDSCLLELQGSVRSVDYVLFRSIQRSRAGYCLSLDCGLRGPFEESPLPRRPPRAARSYSCSAPEAPPPLGAPTAARSCHRLEGWPPWVGPCFPELRRRVPRGGGRPAAAPPTRAPTRRFSDSSGSLTPPGHRPPHPASPPPLLLPRSHSDPGITTSSDTADFRDLYTKVLEEEAASVSSADTGLCSEACLFRLARCPSPKLLRARSAEKRRPVPTFQKVPLPSGPAPAHSLGDLKGSWPGRGLVTRFLQISRKAPDPSGTGAHGHKQVPRSLWGRPGRESLHLRSCGDLSSSSSLRRLLSGRRLERGTRPHSLSLNGGSRETGL

SEQ ID NO: 25585 - protein, 325 aa, Homo sapiens
MAQYKGTMREAGRAMHLLKKRERQREQMEVLKQRIAEETILKSQVDKRFSAHYDAVEAELKSSTVGLVTLNDMKARQEALVRERERQLAKRQHLEEQRLQQERQREQEQRRERKRKISCLSFALDDLDDQADAAEARRAGNLGKNPDVDTSFLPDRDREEEENRLREELRQEWEAQREKVKDEEMEVTFSYWDGSGHRRTVRVRKGNTVQQFLKKALQGLRKDFLELRSAGVEQLMFIKEDLILPHYHTFYDFIIARARGKSGPLFSFDVHDDVRLLSDATMEKDESHAGKVVLRSWYEKNKHIFPASRWEAYDPEKKWDKYTIR

SEQ ID NO: 25586 - protein, 192 aa, Homo sapiens
MAGLLALLGPAGRVGARVRPRATWLLGATAPCAPPPLALALLPPRLDARLLRTARGDCRGHQDPSQATGTTGSSVSCTEEKKQSKSQQLKKIFQEYGTVGVSLHIGISLISLGIFYMVVSSGVDMPAILLKLGFKESLVQSKMAAGTSTFVVAYAIHKLFAPVRISITLVSVPLIVRYFRKVGFFKPPAAKP

SEQ ID NO: 25587 - protein, 469 aa, Homo sapiens
MNDFGIKNMDQVAPVANSYRGTLKRQPAFDTFDGSLFAVFPSLNEEQTLQEVPTGLDSISHDSANCELPLLTPCSKAVMSQALKATFSGFKKEQRRLGIPKNPWLWSEQQVCQWLLWATNEFSLVNVNLQRFGMNGQMLCNLGKERFLELAPDFVGDILWEHLEQMIKENQEKTEDQYEENSHLTSVPHWINSNTLGFGTEQAPYGMQTQNYPKGGLLDSMCPASTPSVLSSEQEFQMFPKSRLSSVSVTYCSVSQDFPGSNLNLLTNNSGTPKDHDSPENGADSFESSDSLLQSWNSQSSLLDVQRVPSFESFEDDCSQSLCLNKPTMSFKDYIQERSDPVEQGKPVIPAAVLAGFTGSGPIQLWQFLLELLSDKSCQSFISWTGDGWEFKLADPDEVARRWGKRKNKPKMNYEKLSRGLRYYYDKNIIHKTSGKRYVYRFVCDLQNLLGFTPEELHAILGVQPDTED

SEQ ID NO: 25588 - protein, 157 aa, Homo sapiens
MEGCAVRRGSCPLLPGPSAWRASPAGWAGRAKLRSWCRASGLPNRPYTLTGGRHGSVSLLRHPGTTTFVQQRSLHQSWEKRIVFSACPVSRSWCPERNFSGSIPAVTPPKLPGHSKSEGPPGKVRKRTTIRSQPLFVTRTRGFGSAVGWLPLGSPVL

SEQ ID NO: 25589 - protein, 310 aa, Homo sapiens
MVDKDTERDIEMKRQLRRLRELHLYSTWKKYQEAMKTSLGVPQCERDEGSLGKPLCPPEILSETLPGSVKKRVCFPSEDHLEEFIAEHLPEASNQSLLTVAHADAGTQTNGDLEDLEEHGPGQTVSEEATEVHTMEGDPDTLAEFLIRDVLQELSSYNGEEEDPEEVKTSLGVPQRGDLEDLEEHVPGQTVSEEATGVHMMQVDPATLAKSDLEDLEEHVPEQTVSEEATGVHMMQVDPATLAKQLEDSTITGSHQQMSASPSSAPAEEATEKTKVEEEVKTRKPKKKTRKPSKKSRWNVLKCWDIFNIF

SEQ ID NO: 25590 - protein, 585 aa, Homo sapiens
MVCREQLSKNQVKWVFAGITCVSVVVIAAIVLAITLRRPGCELEACSPDADMLDYLLSLGQISRRDALEVTWYHAANSKKAMTAALNSNITVLEADVNVEGLGTANETGVPIMAHPPTIYSDNTLEQWLDAVLGSSQKGIKLDFKNIKAVGPSLDLLRQLTEEGKVRRPIWINADILKGPNMLISTEVNATQFLALVQEKYPKATLSPGWTTFYMSTSPNRTYTQAMVEKMHELVGGVPQRVTFPVRSSMVRAAWPHFSWLLSQSERYSLTLWQAASDPMSVEDLLYVRDNTAVHQVYYDIFEPLLSQFKQLALNATRKPMYYTGGSLIPLLQLPGDDGLNVEWLVPDVQGSGKTATMTLPDTEGMILLNTGLEGTVAENPVPIVHTPSGNILTLESCLQQLATHPGHWGIHLQIAEPAALRPSLALLARLSSLGLLHWPVWVGAKISHGSFSVPGHVAGRELLTAVAEVFPHVTVAPGWPEEVLGSGYREQLLTDMLELCQGLWQPVSFQMQAMLLGHSTAGAIGRLLASSPRATVTVEHNPAGGDYASVRTALLAARAVDRTRVYYRLPQGYHKDLLAHVGRN

SEQ ID NO: 25591 - protein, 398 aa, Homo sapiens
MVCREQLSKNQVKWVFAGITCVSVVVIAAIVLAITLRRPGCELEACSPDADMLDYLLSLGQISRRDALEVTWYHAANSKKAMTAALNSNITVLEADVNVEGLGTANETGVPIMAHPPTIYSDNTLEQWLDAVLGSSQKGIKLDFKNIKAVGPSLDLLRQLTEEGKVRRPIWINADILKGPNMLISTEVNATQFLALVQEKYPKATLSPGWTTFYMSTSPNRTYTQAMVEKMHELVGGVPQRVTFPVRSSMVRAAWPHFSWLLSQSERYSLTLWQAASDPMSVEDLLYVRDNTAVHQVYYDIFEPLLLTDMLELCQGLWQPVSFQMQAMLLGHSTAGAIGRLLASSPRATVTVEHNPAGGDYASVRTALLAARAVDRTRVYYRLPQGYHKDLLAHVGRN

SEQ ID NO: 25592 - protein, 2033 aa, Homo sapiens
MFKGLSKGSQGKGSPKGSPAKGSPKGSPSRHSRAATQELALLISRMQANADQVERDILETQKRLQQDRLNSEQSQALQHQQETGRSLKEAEVLLKDLFLDVDKARRLKHPQAEEIEKDIKQLHERVTQECAEYRALYEKMVLPPDVGPRVDWARVLEQKQKQVCAGQYGPGMAELEQQIAEHNILQKEIDAYGQQLRSLVGPDAATIRSQYRDLLKAASWRGQSLGSLYTHLQGCTRQLSALAEQQRRILQQDWSDLMADPAGVRREYEHFKQHELLSQEQSVNQLEDDGERMVELRHPAVGPIQAHQEALKMEWQNFLNLCICQETQLQHVEDYRRFQEEADSVSQTLAKLNSNLDAKYSPAPGGPPGAPTELLQQLEAEEKRLAVTERATGDLQRRSRDVAPLPQRRNPPQQPLHVDSICDWDSGEVQLLQGERYKLVDNTDPHAWVVQGPGGETKRAPAACFCIPAPDPDAVARASRLASELQALKQKLATVQSRLKASAVESLRPSQQAPSGSDLANPQAQKLLTQMTRLDGDLGQIERQVLAWARAPLSRPTPLEDLEGRIHSHEGTAQRLQSLGTEKETAQKECEAFLSTRPVGPAALQLPVALNSVKNKFSDVQVLCSLYGEKAKAALDLERQIQDADRVIRGFEATLVQEAPIPAEPGALQERVSELQRQRRELLEQQTCVLRLHRALKASEHACAALQNNFQEFCQDLPRQQRQVRALTDRYHAVGDQLDLREKVVQDAALTYQQFKNCKDNLSSWLEHLPRSQVRPSDGPSQIAYKLQAQKRLTQEIQSRERDRATASHLSQALQAALQDYELQADTYRCSLEPTLAVSAPKRPRVAPLQESIQAQEKNLAKAYTEVAAAQQQLLQQLEFARKMLEKKELSEDIRRTHDAKQGSESPAQAGRESEALKAQLEEERKRVARVQHELEAQRSQLLQLRTQRPLERLEEKEVVEFYRDPQLEGSLSRVKAQVEEEGKRRAGLQADLEVAAQKVVQLESKRKTMQPHLLTKEVTQVERDPGLDSQAAQLRIQIQQLRGEDAVISARLEGLKKELLALEKREVDVKEKVVVKEVVKVEKNLEMVKAAQALRLQMEEDAARRKQAEEAVAKLQARIEDLERAISSVEPKVIVKEVKKVEQDPGLLQESSRLRSLLEEERTKNATLARELSDLHSKYSVVEKQRPKVQLQERVHEIFQVDPETEQEITRLKAKLQEMAGKRSGVEKEVEKLLPDLEVLRAQKPTVEYKEVTQEVVRHERSPEVLREIDRLKAQLNELVNSHGRSQEQLIRLQGERDEWRRERAKVETKTVSKEVVRHEKDPVLEKEAERLRQEVREAAQKRRAAEDAVYELQSKRLLLERRKPEEKVVVQEVVVTQKDPKLREEHSRLSGSLDEEVGRRRQLELEVQQLRAGVEEQEGLLSFQEDRSKKLAVERELRQLTLRIQELEKRPPTVQEKIIMEEVVKLEKDPDLEKSTEALRWDLDQEKTQVTELNRECKNLQVQIDVLQKAKSQEKTIYKEVIRVQKDRVLEDERARVWEMLNRERTARQAREEEARRLRERIDRAETLGRTWSREESELQRARDQADQECGRLQQELRALERQKQQQTLQLQEESKLLSQKTESERQKAAQRGQELSRLEAAILREKDQIYEKERTLRDLHAKVSREELSQETQTRETNLSTKISILEPETGKDMSPYEAYKRGIIDRGQYLQLQELECDWEEVTTSGPCGEESVLLDRKSGKQYSIEAALRCRRISKEEYHLYKDGHLPISEFALLVAGETKPSSSLSIGSIISKSPLASPAPQSTSFFSPSFSLGLGDDSFPIAGIYDTTTDNKCSIKTAVAKNMLDPITGQKLLEAQAATGGIVDLLSRERYSVHKAMERGLIENTSTQRLLNAQKAFTGIEDPVTKKRLSVGEAVQKGWMPRESVLPHLQVQHLTGGLIDPKRTGRIPIQQALLSGMISEELAQLLQDESSYEKDLTDPISKERLSYKEAMGRCRKDPLSGLLLLPAALEGYRCYRSASPTVPRSLR

SEQ ID NO: 25593 - protein, 77 aa, Homo sapiens
MNNQYTRREVFCRNTCHDLKHFWEREIGKQTYYRESEERRLGRSALRKLREEWKQRLETKLRLRNNPEDTEKRTNVG

SEQ ID NO: 25594 - protein, 135 aa, Homo sapiens
MATVQQLEGRWRLVDSKGFDEYMKELGVGIALRKMGAMAKPDCIITCDGKNLTIKTESTLKTTQFSCTLGEKFEETTADGRKTQTVCNFTDGALVQHQEWDGKESTITRKLKDGKLVVECVMNNVTCTRIYEKVE

SEQ ID NO: 25595 - protein, 552 aa, Homo sapiens
MLDHKDLEAEIHPLKNEERKSQENLGNPSKNEDNVKSAPPQSRLSRCRAAAFFLSLFLCLFVVFVVSFVIPCPDRPASQRMWRIDYSAAVIYDFLAVDDINGDRIQDVLFLYKNTNSSNNFSRSCVDEGFSSPCTFAAAVSGANGSTLWERPVAQDVALVECAVPQPRGSEAPSACILVGRPSSFIAVNLFTGETLWNHSSSFSGNASILSPLLQVPDVDGDGAPDLLVLTQEREEVSGHLYSGSTGHQIGLRGSLGVDGESGFLLHVTRTGAHYILFPCASSLCGCSVKGLYEKVTGSGGPFKSDPHWESMLNATTRRMLSHSSGAVRYLMHVPGNAGADVLLVGSEAFVLLDGQELTPRWTPKAAHVLRKPIFGRYKPDTLAVAVENGTGTDRQILFLDLGTGAVLCSLALPSLPGGPLSASLPTADHRSAFFFWGLHELGSTSETETGEARHSLYMFHPTLPRVLLELANVSTHIVAFDAVLFEPSRHAAYILLTGPADSEAPGLVSVIKHKVRDLVPSSRVVRLGEGGPDSDQAIRDRFSRLRYQSEA

SEQ ID NO: 25596 - protein, 540 aa, Homo sapiens
MLDHKDLEAEIHPLKNEERKSQENLGNPSKNEDNVKSAPPQSRLSRCRAAAFFLSLFLCLFVVFVVSFVIPCPDRPASQRMWRIDYSAAVIYDFLAVDDINGDRIQDVLFLYKNTNSSNNFSRSCVDEGFSSPCTFAAAVSGANGSTLWERPVAQDVALVECAVPQPRGSEAPSACILVGRPSSFIAVNLFTGETLWNHSSSFSGNASILSPLLQVPDVDGDGAPDLLVLTQEREEVSGHLYSGSTGHQIGLRGSLGVDGESGFLLHVTRTGAHYILFPCASSLCGCSVKGLYEKVTGSGGPFKSDPHWESMLNATTRRMLSHSSGAVRYLMHVPGNAGADVLLVGSEAFVLLDGQELTPRWTPKAAHVLRKPIFGRYKPDTLAVAVENGTGTDRQILFLDLGTGAVLCSLALPSLPGGPLSASLPTADHRSAFFFWGLHELGSTSETETGEARHSLYMFHPTLPRVLLELANVSTHIVAFDAVLFEPSRHAAYILLTGPADSEAPGLVSVIKHKAHTGRQRRGSWTGQSSRRDLHVRVL

SEQ ID NO: 25597 - protein, 132 aa, Homo sapiens
MVEPFLGTWKLVSSENFEDYMKELGVNFAARNMAGLVKPTVTISVDGKMMTIRTESSFQDTKISFKLGEEFDETTADNRKVKSTITLENGSMIHVQKWLGKETTIKRKIVDEKMVVECKMNNIVSTRIYEKV

SEQ ID NO: 25598 - protein, 79 aa, Homo sapiens
MIFTPFLPPADLSVFQNVKGPQKDPEELVAVSDTAEDPSSGTGLPREPALLRGSWRSRFQRALACFIKCFRGGYRALGI

SEQ ID NO: 25599 - protein, 670 aa, Homo sapiens
MAFPVDMLENCSHEELENSAEDYMSDLRCGDPENPECFSLLNITIPISLSNVGFVPLYGGDQTQKILALFAPEDSLTAVALYLADQWWAIDDIVKTSVPSREGLKQVSTLGERVVLYVLNRIIYRKQEMERNEIPFLCHSSTDYAKILWKKGEAIGFYSVKPTGSICASFLTQSYQLPVLDTMFLRKKYRGKDFGLHMLEDFVDSFTEDALGLRYPLSSLMYTACKQYFEKYPGDHELLWEVEGVGHWYQRIPVTRALQREALKILALSQNEPKRPMSGEYGPASVPEYEARTEDNQSSEMQLTIDSLKDAFASTSEGHDKTSVSTHTRSGNLKRPKIGKRFQDSEFSSSQGEDEKTSQTSLTASINKLESTARPSESSEEFLEEEPEQRGIEFEDESSDRDARPALETQPQQEKQDGEKESELEPMNGEIMDDSLKTSLITEEEDSTSEVLDEELKLQPFNSSEDSTNLVPLVVESSKPPEVDAPDKTPRIPDSEMLMDEGTSDEKGHMEEKLSLLPRKKAHLGSSDNVATMSNEERSDGGFPNSVIAEFSEEPVSENLSPNTTSSLEDQGEEGVSEPQETSTALPQSSLIEVELEDVPFSQNAGQKNQSEEQSEASSEQLDQFTQSAEKAVDSSSEEIEVEVPVVDRRNLRRKAKGHKGPAKKKAKLT

SEQ ID NO: 25600 - protein, 127 aa, Homo sapiens
MAFPVDMLENCSHEELENSAEDYMSDLRCGDPENPECFSLLNITIPISLSNVGFVPLYGGDQTQKILALFAPEDSLTAVALYLADQWWAIDDIVKTSVPSREGLKQEAYVPLFLPKVTNCQFLIQCF

SEQ ID NO: 25601 - protein, 177 aa, Homo sapiens
MAGYQLWSPWTPLDESFQWLRHTTPTPSSKHPFKASPCFPHTPSDLEVQLCFQEVTLVLDSPFLESGVSPKLPCHTSELRTMNNKGLVRKPQPIRLSGVDSVFGRVITAQPPKWTGTFRVSDKSAFCKIISREHQWPIGLKEPQIQMTVTMCKQMLRSILLLYATYKKCTFALQHSK

SEQ ID NO: 25602 - protein, 469 aa, Homo sapiens
MASPRELTQNPLKKIWMPYSNGRPALHACQRGVCMTNCPTLIVMVGLPARGKTYISKKLTRYLNWIGVPTREFNVGQYRRDVVKTYKSFEFFLPDNEEGLKIRKQCALAALRDVRRFLSEEGGHVAVFDATNTTRERRATIFNFGEQNGYKTFFVESICVDPEVIAANIVQVKLGSPDYVNRDSDEATEDFMRRIECYENSYESLDEDLDRDLSYIKIMDVGQSYVVNRVADHIQSRIVYYLMNIHVTPRSIYLCRHGESELNLKGRIGGDPGLSPRGREFAKSLAQFISDQNIKDLKVWTSQMKRTIQTAEALGVPYEQWKVLNEIDAGVCEEMTYEEIQDNYPLEFALRDQDKYRYRYPKGESYEDLVQRLEPVIMELERQENVLVICHQAVMRCLLAYFLDKAAEQLPYLKCPLHTVLKLTPVAYGCKVESIFLNVAAVNTHRDRPQNVDISRPPEEALVTVPAHQ

SEQ ID NO: 25603 - protein, 434 aa, Homo sapiens
MASPRELTQNPLKKIWMPYSNGRPALHACQRGVCMTNCPTLIVMVGLPARGKTYISKKLTRYLNWIGVPTREFNVGQYRRDVVKTYKSFEFFLPDNEEGLKIRKQCALAALRDVRRFLSEEGGHVAVFDATNTTRERRATIFNFGEQNGYKTFFVESICVDPEVIAANIVQVKLGSPDYVNRDSDEATEDFMRRIECYENSYESLDEDLDRDLSYIKIMDVGQSYVVNRVADHIQSRIVYYLMNIHVTPRSIYLCRHGESELNLKGRIGGDPGLSPRGREFAKSLAQFISDQNIKDLKVWTSQMKRTIQTAEALGVPYEQWKVLNEIDASYEDLVQRLEPVIMELERQENVLVICHQAVMRCLLAYFLDKAAEQLPYLKCPLHTVLKLTPVAYGCKVESIFLNVAAVNTHRDRPQNVDISRPPEEALVTVPAHQ

SEQ ID NO: 25604 - protein, 435 aa, Homo sapiens
MTNCPTLIVMVGLPARGKTYISKKLTRYLNWIGVPTREFNVGQYRRDVVKTYKSFEFFLPDNEEGLKIRKQCALAALRDVRRFLSEEGGHVAVFDATNTTRERRATIFNFGEQNGYKTFFVESICVDPEVIAANIVQVKLGSPDYVNRDSDEATEDFMRRIECYENSYESLDEDLDRDLSYIKIMDVGQSYVVNRVADHIQSRIVYYLMNIHVTPRSIYLCRHGESELNLKGRIGGDPGLSPRGREFAKSLAQFISDQNIKDLKVWTSQMKRTIQTAEALGVPYEQWKVLNEIDAGVCEEMTYEEIQDNYPLEFALRDQDKYRYRYPKGESYEDLVQRLEPVIMELERQENVLVICHQAVMRCLLAYFLDKAAEQLPYLKCPLHTVLKLTPVAYGCKVESIFLNVAAVNTHRDRPQNVDISRPPEEALVTVPAHQ

SEQ ID NO: 25605 - protein, 223 aa, Homo sapiens [sequence omitted]

SEQ ID NO: 25606 - protein, 373 aa, Homo sapiens
MAETREEETVSAEASGFSDLSDSEFLEFLDLEDAQESKALVNMPGPSSESLGKDDKPISLQNWKRGLDILSPMERFHLKYLYVTDLATQNWCELQTAYGKELPGFLAPEKAAVLDTGASIHLARELELHDLVTVPVTTKEDAWAIKFLNILLLIPTLQSEGHIREFPVFGEGEGVLLVGVIDELHYTAKGELELAELKTRRRPMLPLEAQKKKDCFQVSLYKYIFDAMVQGKVTPASLIHHTKLCLEKPLGPSVLRHAQQGGFSVKSLGDLMELVFLSLTLSDLPVIDILKIEYIHQETATVLGTEIVAFKEKEVRAKVQHYMAYWMGHREPQGVDVEEAWKCRTCTYADICEWRKGSGVLSSTLAPQVKKAK

SEQ ID NO: 25607 - protein, 159 aa, Homo sapiens
MWRELRGCPGGDVETVQRLSRRRRGKSSEAVPEKTWRAQRMSQTRESSEAVPEKTWREFRGCPGEDVERAQRLRDCPGEDMETAQRLSARRRAESSEAVPEKTWRELKGCPQEDVERVQRLSLLLHLAVFLWIIIAINFSNSGVKSQSSTYLPSGKILK

SEQ ID NO: 25608 - protein, 354 aa, Homo sapiens
MAPARRPAGARLLLVYAGLLAAAAAGLGSPEPGAPSRSRARREPPPGNELPRGPGESRAGPAARPPEPTAERAHSVDPRDAWMLFVRQSDKGVNGKKRSRGKAKKLKFGLPGPPGPPGPQGPPGPIIPPEALLKEFQLLLKGAVRQRERAEPEPCTCGPAGPVAASLAPVSATAGEDDDDVVGDVLALLAAPLAPGPRAPRVEAAFLCRLRRDALVERRALHELGVYYLPDAEGAFRRGPGLNLTSGQYRAPVAGFYALAATLHVALGEPPRRGPPRPRDHLRLLICIQSRCQRNASLEAIMGLESSSELFTISVNGVLYLQMGQWTSVFLDNASGCSLTVRSGSHFSAVLLGV

SEQ ID NO: 25609 - protein, 574 aa, Homo sapiens
MWTFLGIATFTYFYKKFGDFITLANREVLLCVLVFLSLGLVLSYRCRHRNGGLLGRQQSGSQFALFSDILSGLPFIGFFWAKSPPESENKEQLEARRRRKGTNISETSLIGTAACTSTSSQNDPEVIIVGAGVLGSALAAVLSRDGRKVTVIERDLKEPDRIVGEFLQPGGYHVLKDLGLGDTVEGLDAQVVNGYMIHDQESKSEVQIPYPLSENNQVQSGRAFHHGRFIMSLRKAAMAEPNAKFIEGVVLQLLEEDDVVMGVQYKDKETGDIKELHAPLTVVADGLFSKFRKSLVSNKVSVSSHFVGFLMKNAPQFKANHAELILANPSPVLIYQISSSETRVLVDIRGEMPRNLREYMVEKIYPQIPDHLKEPFLEATDNSHLRSMPASFLPPSSVKKRGVLLLGDAYNMRHPLTGGGMTVAFKDIKLWRKLLKGIPDLYDDAAIFEAKKSFYWARKTSHSFVVNILAQALYELFSATDDSLHQLRKACFLYFKLGGECVAGPVGLLSVLSPNPLVLIGHFFAVAIYAVYFCFKSEPWITKPRALLSSGAVLYKACSVIFPLIYSEMKYMVH

SEQ ID NO: 25610 - protein, 681 aa, Homo sapiens
MTASPDYLVVLFGITAGATGAKLGSDEKELILLFWKVVDLANKKVGQLHEVLVRPDQLELTEDCKEETKIDVESLSSASQLDQALRQFNQSVSNELNIGVGTSFCLCTDGQLHVRQILHPEASKKNVLLPECFYSFFDLRKEFKKCCPGSPDIDKLDVATMTEYLNFEKSSSVSRYGASQVEDMGNIILAMISEPYNHRFSDPERVNYKFESGTCSKMELIDDNTVVRARGLPWQSSDQDIARFFKGLNIAKGGAALCLNAQGRRNGEALVRFVSEEHRDLALQRHKHHMGTRYIEVYKATGEDFLKIAGGTSNEVAQFLSKENQVIVRMRGLPFTATAEEVVAFFGQHCPITGGKEGILFVTYPDGRPTGDAFVLFACEEYAQNALRKHKDLLGKRYIELFRSTAAEVQQVLNRFSSAPLIPLPTPPIIPVLPQQFVPPTNVRDCIRLRGLPYAATIEDILDFLGEFATDIRTHGVHMVLNHQGRPSGDAFIQMKSADRAFMAAQKCHKKNMKDRYVEVFQCSAEEMNFVLMGGTLNRNGLSPPPCKLPCLSPPSYTFPAPAAVIPTEAAIYQPSVILNPRALQPSTAYYPAGTQLFMNYTAYYPSPPGSPNSLGYFPTAANLSGVPPQPGTVVRMQGLAYNTGVKEILNFFQGYQYATEDGLIHTNDQARTLPKEWVCI

SEQ ID NO: 25611 - protein, 608 aa, Homo sapiens
MTASPDYLVVLFGITAGATGAKLGSDEKELILLFWKVVDLANKKVGQLHEVLVRPDQLELTEDCKEETKIDVESLSSASQLDQALRQFNQSVSNELNIGVGTSFCLCTDGQLHVRQILHPEASKKNVLLPECFYSFFDLRKEFKKCCPGSPDIDKLDVATMTEYLNFEKSSSVSRYGASQVEDMGNIILAMISEPYNHRFSDPERVNYKFESGTCSKMELIDDNTVVRARGLPWQSSDQDIARFFKGLNIAKGGAALCLNAQGRRNGEALVRFVSEEHRDLALQRHKHHMGTRYIEVYKATGEDFLKIAGGTSNEVAQFLSKENQVIVRMRGLPFTATAEEVVAFFGQHCPITGGKEGILFVTYPDGRPTGDAFVLFACEEYAQNALRKHKDLLGKRYIELFRSTAAEVQQVLNRFSSAPLIPLPTPPIIPVLPQQFVPPTNVRDCIRLRGLPYAATIEDILDFLGEFATDIRTHGVHMVLNHQGRPSGDAFIQMKSADRAFMAAQKCHKKNMKDRYVEVFQCSAEEMNFVLMGGTLNRNGLSPPPCKLPCLSPPSYTFPAPAAVIPTEAAIYQPSVILNPRALQPSTAYYPAGTQLFMNYTAYYPSV

SEQ ID NO: 25612 - protein, 677 aa, Homo sapiens
MTASPDYLVVLFGITAGATGAKLGSDEKELILLFWKVVDLANKKVGQLHEVLVRPDQLELTEDCKEETKIDVESLSSASQLDQALRQFNQSVSNELNIGVGTSFCLCTDGQLHVRQILHPEASKKNVLLPECFYSFFDLRKEFKKCCPGSPDIDKLDVATMTEYLNFEKSSSVSRYGASQVEDMGNIILAMISEPYNHRFSDPERVNYKFESGTCSKMELIDDNTVVRARGLPWQSSDQDIARFFKGLNIAKGGAALCLNAQGRRNGEALVRFVSEEHRDLALQRHKHHMGTRYIEVYKATGEDFLKIAGGTSNEVAQFLSKENQVIVRMRGLPFTATAEEVVAFFGQHCPITGGKEGILFVTYPDGRPTGDAFVLFACEEYAQNALRKHKDLLGKRYIELFRSTAAEVQQVLNRFSSAPLIPLPTPPIIPVLPQQFVPPTNVRDCIRLRGLPYAATIEDILDFLGEFATDIRTHGVHMVLNHQGRPSGDAFIQMKSADRAFMAAQKCHKKNMKDRYVEVFQCSAEEMNFVLMGGTLNRNGLSPPPCLSPPSYTFPAPAAVIPTEAAIYQPSVILNPRALQPSTAYYPAGTQLFMNYTAYYPSPPGSPNSLGYFPTAANLSGVPPQPGTVVRMQGLAYNTGVKEILNFFQGYQYATEDGLIHTNDQARTLPKEWVCI

SEQ ID NO: 25613 - protein, 663 aa, Homo sapiens
MTASPDYLVVLFGITAGATGAKLGSDEKELILLFWKVVDLANKKVGQLHEVLVRPDQLELTEDCKEETKIDVESLSSASQLDQALRQFNQSVSNELNIGVGTSFCLCTDGQLHVRQILHPEASKKNVLLPECFYSFFDLRKEFKKCCPGSPDIDKLDVATMTEYLNFEKSSSVSRYGASQVEDMGNIILAMISEPYNHRFSDPERVNYKFESGTCSKMELIDDNTVVRARGLPWQSSDQDIARFFKGLNIAKGGAALCLNAQGRRNGEALVRFVSEEHRDLALQRHKHHMGTRYIEVYKATGEDFLKIAGGTSNEVAQFLSKENQVIVRMRGLPFTATAEEVVAFFGQHCPITGGKEGILFVTYPDGRPTGDAFVLFACEEYAQNALRKHKDLLGKRYIELFRSTAAEVQQVLNRFSSAPLIPLPTPPIIPVLPQQFVPPTNVRDCIRLRGLPYAATIEDILDFLGEFATDIRTHGVHMVLNHQGRPSGDAFIQMKSADRAFMAAQKCHKKNMKDRYVEVFQCSAEEMNFVLMGGTLNRNGLSPPPCKLPCLSPPSYTFPAPAAVIPTEAAIYQPSVILNPRALQPSTAYYPAGTQLFMNYTAYYPSPPGSPNSLGYFPTAANLSGVPPQPGTVVRMQGLAYNTGVKEILNFFQGYQCLKDVW

SEQ ID NO: 25614 - protein, 659 aa, Homo sapiens
MTASPDYLVVLFGITAGATGAKLGSDEKELILLFWKVVDLANKKVGQLHEVLVRPDQLELTEDCKEETKIDVESLSSASQLDQALRQFNQSVSNELNIGVGTSFCLCTDGQLHVRQILHPEASKKNVLLPECFYSFFDLRKEFKKCCPGSPDIDKLDVATMTEYLNFEKSSSVSRYGASQVEDMGNIILAMISEPYNHRFSDPERVNYKFESGTCSKMELIDDNTVVRARGLPWQSSDQDIARFFKGLNIAKGGAALCLNAQGRRNGEALVRFVSEEHRDLALQRHKHHMGTRYIEVYKATGEDFLKIAGGTSNEVAQFLSKENQVIVRMRGLPFTATAEEVVAFFGQHCPITGGKEGILFVTYPDGRPTGDAFVLFACEEYAQNALRKHKDLLGKRYIELFRSTAAEVQQVLNRFSSAPLIPLPTPPIIPVLPQQFVPPTNVRDCIRLRGLPYAATIEDILDFLGEFATDIRTHGVHMVLNHQGRPSGDAFIQMKSADRAFMAAQKCHKKNMKDRYVEVFQCSAEEMNFVLMGGTLNRNGLSPPPCLSPPSYTFPAPAAVIPTEAAIYQPSVILNPRALQPSTAYYPAGTQLFMNYTAYYPSPPGSPNSLGYFPTAANLSGVPPQPGTVVRMQGLAYNTGVKEILNFFQGYQCLKDVW

SEQ ID NO: 25615 - protein, 727 aa, Homo sapiens
MTPPPPPPPPPGPDPAADPAADPCPWPGSLVVLFGATAGALGRDLGSDETDLILLVWQVVEPRSRQVGTLHKSLVRAEAAALSTQCREASGLSADSLARAEPLDKVLQQFSQLVNGDVALLGGGPYMLCTDGQQLLRQVLHPEASRKNLVLPDMFFSFYDLRREFHMQHPSTCPARDLTVATMAQGLGLETDATEDDFGVWEVKTMVAVILHLLKEPSSQLFSKPEVIKQKYETGPCSDSTVPCPYSSKADVVDSETVVRARGLPWQSSDQDVARFFKGLNVARGGVALCLNAQGRRNGEALIRFVDSEQRDLALQRHKHHMGVRYIEVYKATGEEFVKIAGGTSLEVARFLSREDQVILRLRGLPFSAGPTDVLGFLGPECPVTGGTEGLLFVRHPDGRPTGDAFALFACEELAQAALRRHKGMLGKRYIELFRSTAAEVQQVLNRYASGPLLPTLTAPLLPIPFPLAPGTGRDCVRLRGLPYTATIEDILSFLGEAAADIRPHGVHMVLNQQGRPSGDAFIQMTSAERALAAAQRCHKKVMKERYVEVVPCSTEEMSRVLMGGTLGRSGMSPPPCKLPCLSPPTYTTFQATPTLIPTETAALYPSSALLPAARVPAAPTPVAYYPGPATQLYLNYTAYYPSPPVSPTTVGYLTTPTAALASAPTSVLSQSGALVRMQGVPYTAGMKDLLSVFQAYQLPADDYTSLMPVGDPPRTVLQAPKEWVCL

SEQ ID NO: 25616 - protein, 717 aa, Homo sapiens
MTPPPPPPPPPGPDPAADPAADPCPWPGSLVVLFGATAGALGRDLGSDETDLILLVWQVVEPRSRQVGTLHKSLVRAEAAALSTQCREASGLSADSLARAEPLDKVLQQFSQLVNGDVALLGGGPYMLCTDGQQLLRQVLHPEASRKNLVLPDMFFSFYDLRREFHMQHPSTCPARDLTVATMAQGLGLETDATEDDFGVWEVKTMVAVILHLLKEPSSQLFSKPEVIKQKYETGPCSKADVVDSETVVRARGLPWQSSDQDVARFFKGLNVARGGVALCLNAQGRRNGEALIRFVDSEQRDLALQRHKHHMGVRYIEVYKATGEEFVKIAGGTSLEVARFLSREDQVILRLRGLPFSAGPTDVLGFLGPECPVTGGTEGLLFVRHPDGRPTGDAFALFACEELAQAALRRHKGMLGKRYIELFRSTAAEVQQVLNRYASGPLLPTLTAPLLPIPFPLAPGTGRDCVRLRGLPYTATIEDILSFLGEAAADIRPHGVHMVLNQQGRPSGDAFIQMTSAERALAAAQRCHKKVMKERYVEVVPCSTEEMSRVLMGGTLGRSGMSPPPCKLPCLSPPTYTTFQATPTLIPTETAALYPSSALLPAARVPAAPTPVAYYPGPATQLYLNYTAYYPSPPVSPTTVGYLTTPTAALASAPTSVLSQSGALVRMQGVPYTAGMKDLLSVFQAYQLPADDYTSLMPVGDPPRTVLQAPKEWVCL

SEQ ID NO: 25617 - protein, 514 aa, Homo sapiens
MEDSEFLAYVELLDEVEQGSVRAKASSVSLHAERTWMEKMKVEDLNVCEPASPAPEAPATSLLNDLKYSPSEEEEVTYTVINQFQQKFGAAILHIKKQNVLSVAAEGANVCRHGKLCWLQVATNCRVYLFDIFLLGSRAFHNGLQMILEDKRILKVIHDCRWLSDCLSHQYGILLNNVFDTQVADVLQFSMETGGYLPNCITTLQESLIKHLQVAPKYLSFLEKRQKLIQENPEVWFIRPVSPSLLKILALEATYLLPLRLALLDEMMSDLTTLVDGYLNTYREGSADRLGGTEPTCMELPEELLQLKDFQKQRREKAAREYRVNAQGLLIRTVLQPKKLVTETAGKEEKVKGFLFGKNFRIDKAPSFTSQDFHGDVNLLKEESLNKQATNPQHLPPTEEGETSEDSSNKLICTKSKGSEDQRITQKEHFMTPKHEFQASLSLKEETEQLLMVENKEDLKCTKQAVSMSSFPQETRVSPSDTFYPIRKTVVSTLPPCPALEKIDSWISPFLNLP

SEQ ID NO: 25618 - protein, 312 aa, Homo sapiens
MSHCAQPKTVIFFKVLLTVQRKLFYCLQENPEVWFIRPVSPSLLKILALEATYLLPLRLALLDEMMSDLTTLVDGYLNTYREGSADRLGGTEPTCMELPEELLQLKDFQKQRREKAAREYRVNAQGLLIRTVLQPKKLVTETAGKEEKVKGFLFGKNFRIDKAPSFTSQDFHGDVNLLKEESLNKQATNPQHLPPTEEGETSEDSSNKLICTKSKGSEDQRITQKEHFMTPKHEFQASLSLKEETEQLLMVENKEDLKCTKQAVSMSSFPQETRVSPSDTFYPIRKTVVSTLPPCPALEKIDSWISPFLNLP

SEQ ID NO: 25619 - protein, 572 aa, Homo sapiens
MDPSSDYHFLSQILWKRVKLTLVCGVFEGVLQHVDPNKIVVLKKVKNVETGRSVPGVKLFFGHEIVNVELLDEVEQGSVRAKASSVSLHAERTWMEKMKVEDLNVCEPASPAPEAPATSLLNDLKYSPSEEEEVTYTVINQFQQKFGAAILHIKKQNVLSVAAEGANVCRHGKLCWLQVATNCRVYLFDIFLLGSRAFHNGLQMILEDKRILKVIHDCRWLSDCLSHQYGILLNNVFDTQVADVLQFSMETGGYLPNCITTLQESLIKHLQVAPKYLSFLEKRQKLIQENPEVWFIRPVSPSLLKILALEATYLLPLRLALLDEMMSDLTTLVDGYLNTYREGSADRLGGTEPTCMELPEELLQLKDFQKQRREKAAREYRVNAQGLLIRTVLQPKKLVTETAGKEEKVKGFLFGKNFRIDKAPSFTSQDFHGDVNLLKEESLNKQATNPQHLPPTEEGETSEDSSNKLICTKSKGSEDQRITQKEHFMTPKHEFQASLSLKEETEQLLMVENKEDLKCTKQAVSMSSFPQETRVSPSDTFYPIRKTVVSTLPPCPALEKIDSWISPFLNLP

SEQ ID NO: 25620 - protein, 377 aa, Homo sapiens
MRRLNRKKTLSLVKELDAFPKVPESYVETSASGGTVSLIAFTTMALLTIMEFSVYQDTWMKYEYEVDKDFSSKLRINIDITVAMKCQYVGADVLDLAETMVASADGLVYEPTVFDLSPQQKEWQRMLQLIQSRLQEEHSLQDVIFKSAFKSTSTALPPREDDSSQSPNACRIHGHLYVNKVAGNFHITVGKAIPHPRGHAHLAALVNHESYNFSHRIDHLSFGELVPAIINPLDGTEKIAIDHNQMFQYFITVVPTKLHTYKISADTHQFSVTERERIINHAAGSHGVSGIFMKYDLSSLMVTVTEEHMPFWQFFVRLCGIVGGIFSTTGMLHGIGKFIVEIICCRFRLGSYKPVNSVPFEDGHTDNHLPLLENNTH

SEQ ID NO: 25621 - protein, 495 aa, Homo sapiens
MAGKVRSLLPPLLLAAAGLAGLLLLCVPTRDVREPPALKYGIVLDAGSSHTSMFIYKWPADKENDTGIVGQHSSCDVPGGGISSYADNPSGASQSLVGCLEQALQDVPKERHAGTPLYLGATAGMRLLNLTNPEASTSVLMAVTHTLTQYPFDFRGARILSGQEEGVFGWVTANYLLENFIKYGWVGRWFRPRKGTLGAMDLGGASTQITFETTSPAEDRASEVQLHLYGQHYRVYTHSFLCYGRDQVLQRLLASALQTHGFHPCWPRGFSTQVLLGDVYQSPCTMAQRPQNFNSSARVSLSGSSDPHLCRDLVSGLFSFSSCPFSRCSFNGVFQPPVAGNFVAFSAFFYTVDFLRTSMGLPVATLQQLEAAAVNVCNQTWAQLQARVPGQRARLADYCAGAMFVQQLLSRGYGFDERAFGGVIFQKKAADTAVGWALGYMLNLTNLIPADPPGLRKGTDFSSWVVLLLLFASALLAALVLLLRQVHSAKLPSTI

SEQ ID NO: 25622 - protein, 472 aa, Homo sapiens
MAGKVRSLLPPLLLAAAGLAGLLLLCVPTRDVREPPALKYGIVLDAGSSHTSMFIYKWPADKENDTGIVGQHSSCDVPGGGISSYADNPSGASQSLVGCLEQALQDVPKERHAGTPLYLGATAGMRLLNLTNPEASTSVLMAVTHTLTQYPFDFRGARILSGQEEGVFGWVTANYLLENFIKYGWVGRWFRPRKGTLGAMDLGGASTQITFETTSPAEDRASEVQLHLYGQHYRVYTHSFLCYGRDQVLQRLLASALQTHGFHPCWPRGFSTQVLLGDVYQSPCTMAQRPQNFNSSARVSLSGSSDPHLCRDLVSGLFSFSSCPFSRCSFNGVFQPPVAGNFVAFSAFFYTVDFLRTSMGLPVATLQQLEAAAVNVCNQTWAQQLLSRGYGFDERAFGGVIFQKKAADTAVGWALGYMLNLTNLIPADPPGLRKGTDFSSWVVLLLLFASALLAALVLLLRQVHSAKLPSTI

SEQ ID NO: 25623 - protein, 449 aa, Homo sapiens
MAGKVRSLLPPLLLAAAGLAGLLLLCVPTRDVREPPALKYGIVLDAGSSHTSMFIYKWPADKENDTGIVGQHSSCDVPGGGISSYADNPSGASQSLVGCLEQALQDVPKERHAGTPLYLGATAGMRLLNLTNPEASTSVLMAVTHTLTQYPFDFRGARILSGQEEGVFGWVTANYLLENFIKYGWVGRWFRPRKGTLGAMDLGGASTQITFETTSPAEDRASEVQLHLYGQHYRVYTHSFLCYGRDQVLQRLLASALQTHGFHPCWPRGFSTQVLLGDVYQSPCTMAQRPQNFNSSARVSLSGSSDPHLCRDLVSGLFSFSSCPFSRCSFNGVFQPPVAGNFVAFSAFFYTVDFLRTSMGLPVATLQQLEAAAVNVCNQTWAAADTAVGWALGYMLNLTNLIPADPPGLRKGTDFSSWVVLLLLFASALLAALVLLLRQVHSAKLPSTI

SEQ ID NO: 25624 - protein, 621 aa, Homo sapiens
MSRQNLVALTVTTLLGVAVGGFVLWKGIQRRRRSKTSPVTQQPQQKVLGSRELPPPEDDQLHSSAPRSSWKERILKAKVVTVSQEAEWDQIEPLLRSELEDFPVLGIDCEWVNLEGKASPLSLLQMASPSGLCVLVRLPKLICGGKTLPRTLLDILADGTILKVGVGCSEDASKLLQDYGLVVRGCLDLRYLAMRQRNNLLCNGLSLKSLAETVLNFPLDKSLLLRCSNWDAETLTEDQVIYAARDAQISVALFLHLLGYPFSRNSPGEKNDDHSSWRKVLEKCQGVVDIPFRSKGMSRLGEEVNGEATESQQKPRNKKSKMDGMVPGNHQGRDPRKHKRKPLGVGYSARKSPLYDNCFLHAPDGQPLCTCDRRKAQWYLDKGIGELVSEEPFVVKLRFEPAGRPESPGDYYLMVKENLCVVCGKRDSYIRKNVIPHEYRKHFPIEMKDHNSHDVLLLCTSCHAISNYYDNHLKQQLAKEFQAPIGSEEGLRLLEDPERRQVRSGARALLNAESLPTQRKEELLQALREFYNTDVVTEEMLQEAASLETRISNENYVPHGLKVVQCHSQGGLRSLMQLESRWRQHFLDSMQPKHLPQQWSVDHNHQKLLRKFGEDLPIQLS

SEQ ID NO: 25625 - protein, 496 aa, Homo sapiens
MASPSGLCVLVRLPKLICGGKTLPRTLLDILADGTILKVGVGCSEDASKLLQDYGLVVRGCLDLRYLAMRQRNNLLCNGLSLKSLAETVLNFPLDKSLLLRCSNWDAETLTEDQVIYAARDAQISVALFLHLLGYPFSRNSPGEKNDDHSSWRKVLEKCQGVVDIPFRSKGMSRLGEEVNGEATESQQKPRNKKSKMDGMVPGNHQGRDPRKHKRKPLGVGYSARKSPLYDNCFLHAPDGQPLCTCDRRKAQWYLDKGIGELVSEEPFVVKLRFEPAGRPESPGDYYLMVKENLCVVCGKRDSYIRKNVIPHEYRKHFPIEMKDHNSHDVLLLCTSCHAISNYYDNHLKQQLAKEFQAPIGSEEGLRLLEDPERRQVRSGARALLNAESLPTQRKEELLQALREFYNTDVVTEEMLQEAASLETRISNENYVPHGLKVVQCHSQGGLRSLMQLESRWRQHFLDSMQPKHLPQQWSVDHNHQKLLRKFGEDLPIQLS

SEQ ID NO: 25626 - protein, 715 aa, Homo sapiens
MSQSGAVSCCPGATNGSLGRSDGVAKMSPKDLFEQRKKYSNSNVIMHETSQYHVQHLATFIMDKSEAITSVDDAIRKLVQLSSKEKIWTQEMLLQVNDQSLRLLDIESQEELEDFPLPTVQRSQTVLNQLRYPSVLLLVCQDSEQSKPDVHFFHCDEVEAELVHEDIESALADCRLGKKMRPQTLKGHQEKIRQRQSILPPPQGPAPIPFQHRGGDSPEAKNRVGPQVPLSEPGFRRRESQEEPRAVLAQKIEKETQILNCALDDIEWFVARLQKAAEAFKQLNQRKKGKKKGKKAPAEGVLTLRARPPSEGEFIDCFQKIKLAINLLAKLQKHIQNPSAAELVHFLFGPLDLIVNTCSGPDIARSVSCPLLSRDAVDFLRGHLVPKEMSLWESLGESWMRPRSEWPREPQVPLYVPKFHSGWEPPVDVLQEAPWEVEGLASAPIEEVSPVSRQSIRNSQKHSPTSEPTPPGDALPPVSSPHTHRGYQPTPAMAKYVKILYDFTARNANELSVLKDEVLEVLEDGRQWWKLRSRSGQAGYVPCNILGEARPEDAGAPFEQAGQKYWGPASPTHKLPPSFPGNKDELMQHMDEVNDELIRKISNIRAQPQRHFRVERSQPVSQPLTYESGPDEVRAWLEAKAFSPRIVENLGILTGPQLFSLNKEELKKVCGEEGVRVYSQLTMQKAFLEKQQSGSELEELMNKFHSMNQRRGEDS

SEQ ID NO: 25627 - protein, 327 aa, Homo sapiens
MSLWESLGESWMRPRSEWPREPQVPLYVPKFHSGWEPPVDVLQEAPWEVEGLASAPIEEVSPVSRQSIRNSQKHSPTSEPTPPGDALPPVSSPHTHRGYQPTPAMAKYVKILYDFTARNANELSVLKDEVLEVLEDGRQWWKLRSRSGQAGYVPCNILGEARPEDAGAPFEQAGQKYWGPASPTHKLPPSFPGNKDELMQHMDEVNDELIRKISNIRAQPQRHFRVERSQPVSQPLTYESGPDEVRAWLEAKAFSPRIVENLGILTGPQLFSLNKEELKKVCGEEGVRVYSQLTMQKAFLEKQQSGSELEELMNKFHSMNQRRGEDS

SEQ ID NO: 25628 - protein, 731 aa, Homo sapiens
MSQSGAVSCCPGATNGSLGRSDGVAKMSPKDLFEQRKKYSNSNVIMHETSQYHVQHLATFIMDKSEAITSVDDAIRKLVQLSSKEKIWTQEMLLQVNDQSLRLLDIESQSAQTPGASRVRAMYPQEELEDFPLPTVQRSQTVLNQLRYPSVLLLVCQDSEQSKPDVHFFHCDEVEAELVHEDIESALADCRLGKKMRPQTLKGHQEKIRQRQSILPPPQGPAPIPFQHRGGDSPEAKNRVGPQVPLSEPGFRRRESQEEPRAVLAQKIEKETQILNCALDDIEWFVARLQKAAEAFKQLNQRKKGKKKGKKAPAEGVLTLRARPPSEGEFIDCFQKIKLAINLLAKLQKHIQNPSAAELVHFLFGPLDLIVNTCSGPDIARSVSCPLLSRDAVDFLRGHLVPKEMSLWESLGESWMRPRSEWPREPQVPLYVPKFHSGWEPPVDVLQEAPWEVEGLASAPIEEVSPVSRQSIRNSQKHSPTSEPTPPGDALPPVSSPHTHRGYQPTPAMAKYVKILYDFTARNANELSVLKDEVLEVLEDGRQWWKLRSRSGQAGYVPCNILGEARPEDAGAPFEQAGQKYWGPASPTHKLPPSFPGNKDELMQHMDEVNDELIRKISNIRAQPQRHFRVERSQPVSQPLTYESGPDEVRAWLEAKAFSPRIVENLGILTGPQLFSLNKEELKKVCGEEGVRVYSQLTMQKAFLEKQQSGSELEELMNKFHSMNQRRGEDS

SEQ ID NO: 25629 - protein, 292 aa, Homo sapiens
MMAFAPPKNTDGPKMQTKMSTWTPLNHQLLNDRVFEERRALLGKWFDKWTDSQRRRILTGLLERCSLSQQKFCCRKLQEKIPAEALDFTTKLPRVLSLYIFSFLDPRSLCRCAQVCWHWKNLAELDQLWMLKCLRFNWYINFSPTPFEQGIWKKHYIQMVKELHITKPKTPPKDGFVIADVQLVTSNSPEEKQSPLSAFRSSSSLRKKNNSGEKALPPWRSSDKHPTDIIRFNYLDNRDPMETVQQGRRKRNQMTPDFSRQSHDKKNKLQDRTRLRKAQSMMSRRNPFPLCP

SEQ ID NO: 25630 - protein, 280 aa, Homo sapiens
MMAFAPPKNTDGPKMQTKMSTWTPLNHQLLNDRFDKWTDSQRRRILTGLLERCSLSQQKFCCRKLQEKIPAEALDFTTKLPRVLSLYIFSFLDPRSLCRCAQVCWHWKNLAELDQLWMLKCLRFNWYINFSPTPFEQGIWKKHYIQMVKELHITKPKTPPKDGFVIADVQLVTSNSPEEKQSPLSAFRSSSSLRKKNNSGEKALPPWRSSDKHPTDIIRFNYLDNRDPMETVQQGRRKRNQMTPDFSRQSHDKKNKLQDRTRLRKAQSMMSRRNPFPLCP

SEQ ID NO: 25631 - protein, 223 aa, Homo sapiens
MKFVPCLLLVTLSCLGTLGQAPRQKQGSTGEEFHFQTGGRDSCTMRPSSLGQGAGEVWLRVDCRNTDQTYWCEYRGQPSMCQAFAADPKPYWNQALQELRRLHHACQGAPVLRPSVCREAGPQAHMQQVTSSLKGSPEPNQQPEAGTPSLRPKATVKLTEATQLGKDSMEELGKAKPTTRPTAKPTQPGPRPGGNEEAKKKAWEHCWKPFQALCAFLISFFRG

SEQ ID NO: 25632 - protein, 86 aa, Homo sapiens
MIPAVVLLLLLLVEQAAALGEPQLCYILDAILFLYGIVLTLLYCRLKIQVRKAAITSYEKSDGVYTGLSTRNQETYETLKHEKPPQ

SEQ ID NO: 25633 - protein, 1801 aa, Homo sapiens
MSDDIRKRFEFPNSLIQSQAVGHLIAAVLKENGFSEKIHQSTNQTPALNLLWEKCCSDNVVVRTACCEGLVALVAQDHAEFSYVLNGILNLIPSTRNTHGLIKAIMHLLQMQALKEGQGGEKNIQSIYTIRNHPHPLITVLEHRPDCWPVFLQQLTAFFQQCPERLEVSCIQIMAPFLWYLYCEPSQLQEYAKLRLALLKVLLQPQVLCDKDQPSILEQQILQLCCDIVPCLQVKDLIQTTEAMMFIEEVCLSLLRHPVFWKIQLTQMSLQLLCVSEVSLKITGECSSSIHLLEHSVELLKEDFPVELVIIGIALLLLQTPASQQKPILNLALKLLSVTEDQKIPKSSLLLVMPILQILSSTALEDCISVDEEGPSRQQLALNLLEMIQQECYRDDHQKLSYKLVCPVTSMYGTIFTAWRILEVMTDSSAASDWLASVESLLPITAVIPAPAFLLLAHLLVEDKGQNLHQILKVTTELAQADSSQVPNLIPVLMFKLGRPLEPILYNDILYTLPKLGVHKVCIGQILRIIQLLGTTPRLRAVTLRLLTSLWEKQDRVYPELQRFMAVSDVPSLSVGKEVQWEKLIAKAASIRDICKQRPYQHGADMLAAISQVLNECTKPDQATPAALVLQGLHALCQAEVVCIRSTWNALSPKLSCDTRPLILKTLSELFSLVPSLTVNTTEYENFKVQVLSFLWTHTQNKDPIVANAAYRSLANFTAGEHTILHLPEKIRPEIPIPEELDDDEDVEDVDLSVPGSCYLKLLSLTPPLVLPALEEFFTSLVKQEMVNMPRGIYHSALKGGARSDQGKTVAGIPNFILKMYETNKQPGLKPGLAGGMLFCYDVSMYQSKDGKPLNRLMASRGRSFKQTSLALVHEVHIQLSEWHRAIFLPQAWLAYMNRAYHAILQGRLGELELQLKHGKEEPEEVQYKKSTAWLWVRDMLTDEITKAAAKESPVVKGNALLALSSLAVVVSRHEASLSSDSDGLLEVQPNFLSMKEWVSMVLDTLLVIVDSHYQPRGQLLSWFYYKSYSGENTASAIARSAAATALSLLVPVFIISCKEKVEEILNMLTARLPGKPSADESQAVQIHMGLALGMFLSRLCEEKLSDISGQEMNLLLMKSLDALENCCFDTSLEYNTGCILGVGLVLSLMSHSSQMQSRVHVAALLRKLSAHVDDSGSQSRTFQEVLAYTLSCVCTSAFSAGIIEATEAEDVMNKLRLLVENSQQTSGFALALGNIVHGLSVCGHGKAEDLGSKLLPAWIRIVLTEGTPTMLCLAALHGMVALVGSEGDVMQLKSEAIQTSHFQGRLNEVIRTLTQVISVSGVIGLQSNAVWLLGHLHLSTLSSSQSRASVPTDYSYLPESSFIGAAIGFFITGGKKGPESVPPSLLKVVMKPIATVGESYQYPPVNWAALLSPLMRLNFGEEIQQLCLEIMVTQAQSSQNAAALLGLWVTPPLIHSLSLNTKRYLLISAPLWIKHISDEQILGFVENLMVAVFKAASPLGSPELCPSALHGLSQAMKLPSPAHHLWSLLSEATGKIFDLLPNKIRRKDLELYISIAKCLLEMTDDDANRIAQVTKSNIEKAAFVKLYLVSQGRFPLVNLTDMLSVAVQHREKEVLAWMILHSLYQARIVSHANTGVLKRMEWLLELMGYIRNVAYQSTSFHNTALDKALDFFLLIFATAVVAWADHTAPLLLGLSASWLPWHQENGPAGPVPSFLGRSPMHRVTLQEVLTLLPNSMALLLQKEPWKEQTQKFIDWLFSIMESPKEALSAQSRDLLKATLLSLRVLPEFKKKAVWTRAYGW

SEQ ID NO: 25634 - protein, 972 aa, Homo sapiens
MERMNWLSRLASRGPGHRIPQGANLQTPVMADPETCLMVFKNHWSQVVRILERQGPRAAPGGADDLSAVRNHTYQMLTLLAEDRAVPSAPTGPGPLLEFALHEDLLTRVLTWQLQWDELGDGVEERRAEQLKLFEMLVSEARQPLLRHGPVREALLTLLDACGRPVPSSPALDEGLVLLLSQLCVCVAQEPSLLEFFLQPPPEPGAAPRLLLFSRLVPFVHREGTLGQQARDALLLLMALSAGSPTVGRYIADHSYFCPVLATGLSALYSSLPRKIEVPGDDWHCLRREDWLGVPALALFMSSLEFCNAVIQVAHPLVQKQLVDYIHNGFLVPVMGPALHKTSVEEMIASTAYLELFLRSISEPALLRTFLRFLLLHRHDTHTILDTLVARIGSNSRLCMVSLSLFRTLLNLSCEDVLLQLVLRYLVPCNHVMLSQKPAVRDVDLYGRAADKFLSLIPRCCRHHAPSPPRPEHASWARGPGSPSVDSSSVTTVPRPSTPSRLALFLRQQSLGGSESPGPAPCSPGLSASPASSPGRRPTPAEEPGELEDNYLEYLREARRGVDRCVRACRTWSAPYDGERPSPEPSPFGSRTKKRSLLPEEDRNNVGEGEEEELGRRGRAGGAGEGPGHLPPPQLNGVPGSWPEGAKKVRLVPKEGAGELLEGISEGMAGLEGFGQELRELEVALSNGGTGSESPLEPPLPLEEEEAYESFTCPPEPPGPFLSSPLRTLNQLPSQPFTGPFMAVLFAKLENMLQNSVYVNFLLTGLVAQLACHPQPLLRSFLLNTNMVFQPSVKSLLQVLGSVKNKIENFAASQEDFPALLSKAKKYLIARGKLDWAEGPAAGPAPRRSDPLVKSRRPSLGELLLRHAHSPTRARQAAQLVLQPGRDGAGLGLSGGSPGASTPVLLTRGGAPERQGEALRVKNAVYCAVIFPEFLKELAAISQAHAVTSPFLLETSEEGSGPLISGCGPLNP

SEQ ID NO: 25635 - protein, 986 aa, Homo sapiens
MERMNWLSRLASRGPGHRIPQGANLQTPVMADPETCLMVFKNHWSQVVRILERQGPRAAPGGADDLSAVRNHTYQMLTLLAEDRAVPSAPTGPGPLLEFALHEDLLTRVLTWQLQWDELGDGVEERRAEQLKLFEMLVSEARQPLLRHGPVREALLTLLDACGRPVPSSPALDEGLVLLLSQLCVCVAQEPSLLEFFLQPPPEPGAAPRLLLFSRLVPFVHREGTLGQQARDALLLLMALSAGSPTVGRYIADHSYFCPVLATGLSALYSSLPRKIEVPGDDWHCLRREDWLGVPALALFMSSLEFCNAVIQVAHPLVQKQLVDYIHNGFLVPVMGPALHKTSVEEMIASTAYLELFLRSISEPALLRTFLRFLLLHRHDTHTILDTLVARIGSNSRLCMVSLSLFRTLLNLSCEDVLLQLVLRYLVPCNHVMLSQKPAVRDVDLYGRAADKFLSLIPRCCRHHAPSPPRPEHASWARGGPSRETGRREDITGPGSPSVDSSSVTTVPRPSTPSRLALFLRQQSLGGSESPGPAPCSPGLSASPASSPGRRPTPAEEPGELEDNYLEYLREARRGVDRCVRACRTWSAPYDGERPSPEPSPFGSRTKKRSLLPEEDRNNVGEGEEEELGRRGRAGGAGEGPGHLPPPQLNGVPGSWPEGAKKVRLVPKEGAGELLEGISEGMAGLEGFGQELRELEVALSNGGTGSESPLEPPLPLEEEEAYESFTCPPEPPGPFLSSPLRTLNQLPSQPFTGPFMAVLFAKLENMLQNSVYVNFLLTGLVAQLACHPQPLLRSFLLNTNMVFQPSVKSLLQVLGSVKNKIENFAASQEDFPALLSKAKKYLIARGKLDWAEGPAAGPAPRRSDPLVKSRRPSLGELLLRHAHSPTRARQAAQLVLQPGRDGAGLGLSGGSPGASTPVLLTRGGAPERQGEALRVKNAVYCAVIFPEFLKELAAISQAHAVTSPFLLETSEEGSGPLISGCGPLNP

SEQ ID NO: 25636 - protein, 705 aa, Homo sapiens
MLTLLAEDRAVPSAPTGPGPLLEFALHEDLLTRVLTWQLQWDELGDGVEERRAEQLKLFEMLVSEARQPLLRHGPVREALLTLLDACGRPVPSSPALDEGLVLLLSQLCVCVAQEPSLLEFFLQPPPEPGAAPRLLLFSRLVPFVHREGTLGQQARDALLLLMALSAGSPTVGRYIADHSYFCPVLATGLSALYSSLPRKIEVPGDDWHCLRREDWLGVPALALFMSSLEFCNAVIQVAHPLVQKQLVDYIHNGFLVPVMGPALHKTSVEEMIASTAYLELFLRSISEPALLRTFLRFLLLHRHDTHTILDTLVARIGSNSRLCMVSLSLFRTLLNLSCEDVLLQLVLRYLVPCNHVMLSQKPAVRDVDLYGRAADKFLSLIPRCCRHHAPSPPRPEHASWARGPGSPSVDSSSVTTVPRPSTPSRLALFLRQQSLGGSESPGPAPCSPGLSASPASSPGRRPTPAEEPGELEDNYLEYLREARRGVDRCVRACRTWSAPYDGERPSPEPSPFGSRTKKRSLLPEEDRNNVGEGEEEELGRRGRAGGAGEGPGHLPPPQLNGVPGSWPEGAKKVRLVPKEGAGELLEGISEGMAGLEGFGQELRELEVALSNGGTGSESPLEPPLPLEEEEAYESFTCPPEPPGPFLSSPLRTLNQLPSQPFTGPFMAVLFAKLENMLQNSALSCSTPTWSSSPVSSPCCRCWAL

SEQ ID NO: 25637 - protein, 765 aa, Homo sapiens
MFSKFTSILQHAVEALAPSLPLQEDFVYHWKAITHYYIETSDDKAPVTDTNIPSHLEQMLDILVQEENERESGETGPCMEYLLHHKILETLYTLGKADCPPGMKQQVLVFYTKLLGRIRQPLLPHINVHRPVQKLIRLCGEVLATPTENEEIQFLCIVCAKLKQDPYLVNFFLENKMKSLASKGVPNVISEDTLKGQDSLSTDTGQSRQPEELSGATGMEQTELEDEPPHQMDHLSTSLDNLSVTSLPEASVVCPNQDYNLVNSLLNLTRSPDGRIAVKACEGLMLLVSLPEPAAAKCLTQSTCLCELLTDRLASLYKALPQSVDPLDIETVEAINWGLDSYSHKEDASAFPGKRALISFLSWFDYCDQLIKEAQKTAAVALAKAVHERFFIGVMEPQLMQTSEMGILTSTALLHRIVRQVTSDVLLQEMVFFILGEQREPETLAEISRHPLRHRLIEHCDHISDEISIMTLRMFEHLLQKPNEHILYNLVLRNLEERNYTEYKPLCPEDKDVVENGLIAGAVDLEEDPLFTDISPENTLPNQEWLSSSPPATPDHPKNDGKTEVHKIVNSFLCLVPDDAKSSYHVEGTGYDTYLRDAHRQFRDYCAICLRWEWPGSPKALEKCNLEAAFFEGHFLKVLFDRMGRILDQPYDVNLQVTSVLSRLSLFPHPHIHEYLLDPYVNLAPGCRSLFSVIVRVVGDLMLRIQRIQDFTPKLLLVRKRLLGLEPEGPIIDHITLLEGVIVLEEFCKELAAIAFVKYHASSTP

SEQ ID NO: 25638 - protein, 738 aa, Homo sapiens
MFSKFTSILQHAVEALAPSLPLQEDFVYHWKAITHYYIETSDDKAPVTDTNIPSHLEQMLDILVQEENERESGETGPCMEYLLHHKILETLYTLGKADCPPGMKQQVLVFYTKLLGRIRQPLLPHINVHRPVQKLIRLCGEVLATPTENEEIQFLCIVCAKLKQDPYLVNFFLENKMKSLASKGVPNVISEDTLKGQDSLSTDTGQSRQPEELSGATGMEQTELEDEPPHQMDHLSTSLDNLSVTSLPEASVVCPNQDYNLVNSLLNLTRSPDGRIAVKACEGLMLLVSLPEPAAAKCLTQSTCLCELLTDRLASLYKALPQSVDPLDIETVEAINWGLDSYSHKEDASAFPGKRALISFLSWFDYCDQLIKEAQKTAAVALAKAVHERFFIGVMEPQLMQTSEMGILTSTALLHRIVRQVTSDVLLQEMVFFILGEQREPETLAEISRHPLRHRLIEHCDHISDEISIMTLRMFEHLLQKPNEHILYNLVLRNLEERNYTEYKPLCPEDKDVVENGLIAGAVDLEEDPLFTDISPENTLPNQEWLSSSPPATPDHPKNDGKTEVHKIVNSFLCLVPDDAKSSYHVEGTGYDTYLRDAHRQFRDYCAICLRWEWPGSPKALEKCNLEAAFFEGHFLKVLFDRMGRILDQPYDVNLQVTSVLSRLSLFPHPHIHEYLLDPYVNLAPGCRSLFSVIVRVVGDLMLRIQRIQDFTPKLLLVRKRLLGLEPEGPMQTLPSWW

SEQ ID NO: 25639 - protein, 460 aa, Homo sapiens
MFEKYPGKMEGLFRHNPYTAFPPAVPGLPPGLPPAVSFGSLQGAFQPKSTNPELPPRLGPVPSGLSQKGTQIPDHFRPPLRKPGKWCAMHVRVAYMILRHQEKMKGDSHKLDFRNDLLPCLPGPYGALPPGQELSHPASLFTATGAVHAAANPFTAAPGAHGPFLSPSTHIDPFGRPTSFASLAALSNGAFGGLGSPTFNSGAVFAQKESPGAPPAFASPPDPWGRLHRSPLTFPAWVRPPEAARTPGSDKERPVERREPSITKEEKDRDLPFSRPQLRVSPATPKARAGEEGPRPTKESVRVKEERKEEAAAAAAAAAAAAAAAAAAATGPQGLHLLFERPRPPPFLGPSPPDRCAGFLEPTWLAAPPRLARPPRFYEAGEELTGPGAVAAARLYGLEPAHPLLYSRLAPPPPPAAAPGTPHLLSKTPPGALLGAPPPLVPAPRPSSPPRGPGPARADR

SEQ ID NO: 25640 - protein, 487 aa, Homo sapiens
MFEKYPGKMEGLFRHNPYTAFPPAVPGLPPGLPPAVSFGSLQGAFQPKSTNPELPPRLGPVPSGLSQKGTQIPDHFRPPLRKPGKWCAMHVRVAYMILRHQEKMKGDSHKLDFRNDLLPCLPGPYGALPPGQELSHPASLFTATGAVHAAANPFTAAPGAHGPFLSPSTHIDPFGRPTSFASLAALSNGAFGGLGSPTFNSGAVFAQKESPGAPPAFASPPDPWGRLHRSPLTFPAWVRPPEAARTPGSDKERPVERREPSITKEEKDRDLPFSRPQLRVSPATPKARAGEEGPRPTKESVRVKEERKEEAAAAAAAAAAAAAAAAAAATGPQGLHLLFERPRPPPFLGPSPPDRCAGFLEPTWLAAPPRLARPPRFYEAGEELTGPGAVAAARLYGLEPAHPLLYSRLAPPPPPAAAPGTPHLLSKTFCTFLQGCPSQQFPSWLIKPSDWCCVPSLWPLCGERGLQGEEPGRDSQASPWEGGASRR

SEQ ID NO: 25641 - protein, 2511 aa, Homo sapiens
MEEVVIAGMSGKLPESENLQEFWDNLIGGVDMVTDDDRRWKAGLYGLPRRSGKLKDLSRFDASFFGVHPKQAHTMDPQLRLLLEVTYEAIVDGGINPDSLRGTHTGVWVGVSGSETSEALSRDPETLVGYSMVGCQRAMMANRLSFFFDFRGPSIALDTACSSSLMALQNAYQAIHSGQCPAAIVGGINVLLKPNTSVQFLRLGMLSPEGTCKAFDTAGNGYCRSEGVVAVLLTKKSLARRVYATILNAGTNTDGFKEQGVTFPSGDIQEQLIRSLYQSAGVAPESFEYIEAHGTGTKVGDPQELNGITRALCATRQEPLLIGSTKSNMGHPEPASGLAALAKVLLSLEHGLWAPNLHFHSPNPEIPALLDGRLQVVDQPLPVRGGNVGINSFGFGGSNVHIILRPNTQPPPAPAPHATLPRLLRASGRTPEAVQKLLEQGLRHSQDLAFLSMLNDIAAVPATAMPFRGYAVLGGERGGPEVQQVPAGERPLWFICSGMGTQWRGMGLSLMRLDRFRDSILRSDEAVKPFGLKVSQLLLSTDESTFDDIVHSFVSLTAIQIGLIDLLSCMGLRPDGIVGHSLGEVACGYADGCLSQEEAVLAAYWRGQCIKEAHLPPGAMAAVGLSWEECKQRCPPGVVPACHNSKDTVTISGPQAPVFEFVEQLRKEGVFAKEVRTGGMAFHSYFMEAIAPPLLQELKKVIREPKPRSARWLSTSIPEAQWHSSLARTSSAEYNVNNLVSPVLFQEALWHVPEHAVVLEIAPHALLQAVLKRGLKPSCTIIPLMKKDHRDNLEFFLAGIGRLHLSGIDANPNALFPPVEFPAPRGTPLISPLIKWDHSLAWDVPAAEDFPNGSGSPSAAIYNIDTSSESPDHYLVDHTLDGRVLFPATGYLSIVWKTLARALGLGVEQLPVVFEDVVLHQATILPKTGTVSLEVRLLEASRAFEVSENGNLVVSGKVYQWDDPDPRLFDHPESPTPNPTEPLFLAQAEVYKELRLRGYDYGPHFQGILEASLEGDSGRLLWKDNWVSFMDTMLQMSILGSAKHGLYLPTRVTAIHIDPATHRQKLYTLQDKAQVADVVVSRWLRVTVAGGVHISGLHTESAPRRQQEQQVPILEKFCFTPHTEEGCLSERAALQEELQLCKGLVQALQTKVTQQGLKMVVPGLDGAQIPRDPSQQELPRLLSAACRLQLNGNLQLELAQVLAQERPKLPEDPLLSGLLDSPALKACLDTAVENMPSLKMKVVEVLAGHGHLYSRIPGLLSPHPLLQLSYTATDRHPQALEAAQAELQQHDVAQGQWDPADPAPSALGSADLLVCNCAVAALGDPASALSNMVAALREGGFLLLHTLLRGHPLGDIVAFLTSTEPQYGQGILSQDAWESLFSRVSLRLVGLKKSFYGSTLFLCRRPTPQDSPIFLPVDDTSFRWVESLKGILADEDSSRPVWLKAINCATSGVVGLVNCLRREPGGNRLRCVLLSNLSSTSHVPEVDPGSAELQKVLQGDLVMNVYRDGAWGAFRHFLLEEDKPEEPTAHAFVSTLTRGDLSSIRWVCSSLRHAQPTCPGAQLCTVYYASLNFRDIMLATGKLSPDAIPGKWTSQDSLLGMEFSGRDASGKRVMGLVPAKGLATSVLLSPDFLWDVPSNWTLEEAASVPVVYSTAYYALVVRGRVRPGETLLIHSGSGGVGQAAIAIALSLGCRVFTTVGSAEKRAYLQARFPQLDSTSFANSRDTSFEQHVLWHTGGKGVDLVLNSLAEEKLQASVRCLATHGRFLEIGKFDLSQNHPLGMAIFLKNVTFHGVLLDAFFNESSADWREVWALVQAGIRDGVVRPLKCTVFHGAQVEDAFRYMAQGKHIGKVVVQVLAEEPEAVLKGAKPKLMSAISKTFCPAHKSYIIAGGLGGFGLELAQWLIQRGVQKLVLTSRSGIRTGYQAKQVRRWRRQGVQVQVSTSNISSLEGARGLIAEAAQLGPVGGVFNLAVVLRDGLLENQTPEFFQDVCKPKYSGTLNLDRVTREACPELDYFVVFSSVSCGRGNAGQSNYGFANSAMERICEKRRHEGLPGLAVQWGAIGDVGILVETMSTNDTIVSGTLPQRMASCLEVLDLFLNQPHMVLSSFVLAEKAAAYRDRDSQRDLVEAVAHILGIRDLAAVNLDSSLADLGLDSLMSVEVRQTLERELNLVLSVREVRQLTLRKLQELSSKADEASELACPTPKEDGLAQQQTQLNLRSLLVNPEGPTLMRLNSVQSSERPLFLVHPIEGSTTVFHSLASRLSIPTYGLQCTRAAPLDSIHSLAAYYIDCIRQVQPEGPYRVAGYSYGACVAFEMCSQLQAQQSPAPTHNSLFLFDGSPTYVLAYTQSYRAKLTPGCEAEAETEAICFFVQQFTDMEHNRVLEALLPLKGLEERVAAAVDLIIKSHQGLDRQELSFAARSFYYKLRAAEQYTPKAKYHGNVMLLRAKTGGAYGEDLGADYNLSQVCDGKVSVHVIEGDHRTLLEGSGLESIISIIHSSLAEPRVSVREG

SEQ ID NO: 25642 - protein, 417 aa, Homo sapiens
MAQKEGGRTVPCCSRPKVAALTAGTLLLLTAIGAASWAIVAVLLRSDQEPLYPVQVSSADARLMVFDKTEGTWRLLCSSRSNARVAGLSCEEMGFLRALTHSELDVRTAGANGTSGFFCVDEGRLPHTQRLLEVISVCDCPRGRFLAAICQDCGRRKLPVDRIVGGRDTSLGRWPWQVSLRYDGAHLCGGSLLSGDWVLTAAHCFPERNRVLSRWRVFAGAVAQASPHGLQLGVQAVVYHGGYLPFRDPNSEENSNDIALVHLSSPLPLTEYIQPVCLPAAGQALVDGKICTVTGWGNTQYYGQQAGVLQEARVPIISNDVCNGADFYGNQIKPKMFCAGYPEGGIDACQGDSGGPFVCEDSISRTPRWRLCGIVSWGTGCALAQKPGVYTKVSDFREWIFQAIKTHSEASGMVTQL

SEQ ID NO: 25643 - protein, 308 aa, Homo sapiens
MWKRWLALALALVAVAWVRAEEELRSKSKICANVFCGAGRECAVTEKGEPTCLCIEQCKPHKRPVCGSNGKTYLNHCELHRDACLTGSKIQVDYDGHCKEKKSVSPSASPVVCYQSNRDELRRRIIQWLEAEIIPDGWFSKGSNYSEILDKYFKNFDNGDSRLDSSEFLKFVEQNETAINITTYPDQENNKLLRGLCVDALIELSDENADWKLSFQEFLKCLNPSFNPPEKKCALEDETYADGAETEVDCNRCVCACGNWVCTAMTCDGKNQKGAQTQTEEEMTRYVQELQKHQETAEKTKRVSTKEI

SEQ ID NO: 25644 - protein, 273 aa, Homo sapiens
MWKRWLALALALVAVAWVRAEQCKPHKRPVCGSNGKTYLNHCELHRDACLTGSKIQVDYDGHCKEKKSVSPSASPVVCYQSNRDELRRRIIQWLEAEIIPDGWFSKGSNYSEILDKYFKNFDNGDSRLDSSEFLKFVEQNETAINITTYPDQENNKLLRGLCVDALIELSDENADWKLSFQEFLKCLNPSFNPPEKKCALEDETYADGAETEVDCNRCVCACGNWVCTAMTCDGKNQKGAQTQTEEEMTRYVQELQKHQETAEKTKRVSTKEI

SEQ ID NO: 25645 - protein, 222 aa, Homo sapiens
MAASVRQARSLLGVAATLAPGSRGYRARPPPRRRPGPRWPDPEDLLTPRWQLGPRYAAKQFARYGAASGVVPGSLWPSPEQLRELEAEEREWYPSLATMQESLRVKQLAEEQKRREREQHIAECMAKMPQMIVNWQQQQRENWEKAQADKERRARLQAEAQELLGYQVDPRSARFQELLQDLEKKERKRLKEEKQKRKKEARAAALAAAVAQDPAASGAPSS

SEQ ID NO: 25646 - protein, 526 aa, Homo sapiens
MGGRSSCEDPGCPRDEERAPRMGCMKSKFLQVGGNTFSKTETSASPHCPVYVPDPTSTIKPGPNSHNSNTPGIREAGSEDIIVVALYDYEAIHHEDLSFQKGDQMVVLEESGEWWKARSLATRKEGYIPSNYVARVDSLETEEWFFKGISRKDAERQLLAPGNMLGSFMIRDSETTKGSYSLSVRDYDPRQGDTVKHYKIRTLDNGGFYISPRSTFSTLQELVDHYKKGNDGLCQKLSVPCMSSKPQKPWEKDAWEIPRESLKLEKKLGAGQFGEVWMATYNKHTKVAVKTMKPGSMSVEAFLAEANVMKTLQHDKLVKLHAVVTKEPIYIITEFMAKGSLLDFLKSDEGSKQPLPKLIDFSAQIAEGMAFIEQRNYIHRDLRAANILVSASLVCKIADFGLARVIEDNEYTAREGAKFPIKWTAPEAINFGSFTIKSDVWSFGILLMEIVTYGRIPYPGMSNPEVIRALERGYRMPRPENCPEELYNIMMRCWKNRPEERPTFEYIQSVLDDFYTATESQYQQQP

SEQ ID NO: 25647 - protein, 505 aa, Homo sapiens
MGCMKSKFLQVGGNTFSKTETSASPHCPVYVPDPTSTIKPGPNSHNSNTPGIREAGSEDIIVVALYDYEAIHHEDLSFQKGDQMVVLEESGEWWKARSLATRKEGYIPSNYVARVDSLETEEWFFKGISRKDAERQLLAPGNMLGSFMIRDSETTKGSYSLSVRDYDPRQGDTVKHYKIRTLDNGGFYISPRSTFSTLQELVDHYKKGNDGLCQKLSVPCMSSKPQKPWEKDAWEIPRESLKLEKKLGAGQFGEVWMATYNKHTKVAVKTMKPGSMSVEAFLAEANVMKTLQHDKLVKLHAVVTKEPIYIITEFMAKGSLLDFLKSDEGSKQPLPKLIDFSAQIAEGMAFIEQRNYIHRDLRAANILVSASLVCKIADFGLARVIEDNEYTAREGAKFPIKWTAPEAINFGSFTIKSDVWSFGILLMEIVTYGRIPYPGMSNPEVIRALERGYRMPRPENCPEELYNIMMRCWKNRPEERPTFEYIQSVLDDFYTATESQYQQQP

SEQ ID NO: 25648 - protein, 504 aa, Homo sapiens
MGCMKSKFLQVGGNTFSKTETSASPHCPVYVPDPTSTIKPGPNSHNSNTPGIREGSEDIIVVALYDYEAIHHEDLSFQKGDQMVVLEESGEWWKARSLATRKEGYIPSNYVARVDSLETEEWFFKGISRKDAERQLLAPGNMLGSFMIRDSETTKGSYSLSVRDYDPRQGDTVKHYKIRTLDNGGFYISPRSTFSTLQELVDHYKKGNDGLCQKLSVPCMSSKPQKPWEKDAWEIPRESLKLEKKLGAGQFGEVWMATYNKHTKVAVKTMKPGSMSVEAFLAEANVMKTLQHDKLVKLHAVVTKEPIYIITEFMAKGSLLDFLKSDEGSKQPLPKLIDFSAQIAEGMAFIEQRNYIHRDLRAANILVSASLVCKIADFGLARVIEDNEYTAREGAKFPIKWTAPEAINFGSFTIKSDVWSFGILLMEIVTYGRIPYPGMSNPEVIRALERGYRMPRPENCPEELYNIMMRCWKNRPEERPTFEYIQSVLDDFYTATESQYQQQP

SEQ ID NO: 25649 - protein, 525 aa, Homo sapiens
MGGRSSCEDPGCPRDEERAPRMGCMKSKFLQVGGNTFSKTETSASPHCPVYVPDPTSTIKPGPNSHNSNTPGIREGSEDIIVVALYDYEAIHHEDLSFQKGDQMVVLEESGEWWKARSLATRKEGYIPSNYVARVDSLETEEWFFKGISRKDAERQLLAPGNMLGSFMIRDSETTKGSYSLSVRDYDPRQGDTVKHYKIRTLDNGGFYISPRSTFSTLQELVDHYKKGNDGLCQKLSVPCMSSKPQKPWEKDAWEIPRESLKLEKKLGAGQFGEVWMATYNKHTKVAVKTMKPGSMSVEAFLAEANVMKTLQHDKLVKLHAVVTKEPIYIITEFMAKGSLLDFLKSDEGSKQPLPKLIDFSAQIAEGMAFIEQRNYIHRDLRAANILVSASLVCKIADFGLARVIEDNEYTAREGAKFPIKWTAPEAINFGSFTIKSDVWSFGILLMEIVTYGRIPYPGMSNPEVIRALERGYRMPRPENCPEELYNIMMRCWKNRPEERPTFEYIQSVLDDFYTATESQYQQQP

SEQ ID NO: 25650 - protein, 117 aa, Homo sapiens
MSWRGRSTYYWPRPRRYVQPPEVIGPMRPEQFSDEVEPATPEEGEPATQRQDPAAAQEGEDEGASAGQGPKPEADSQEQGHPQTGCECEDGPDGQEMDPPNPEEVKTPEEGEKQSQC

SEQ ID NO: 25651 - protein, 117 aa, Homo sapiens
MSWRGRSTYYWPRPRRYVQPPEVIGPMRPEQFSDEVEPATPEEGEPATQRQDPAAAQEGEDEGASAGQGPKPEADSQEQGHPQTGCECEDGPDGQEVDPPNPEEVKTPEEGEKQSQC

SEQ ID NO: 25652 - protein, 117 aa, Homo sapiens; identical to SEQ ID NO: 19867

SEQ ID NO: 25653 - protein, 344 aa, Homo sapiens
MVRARHQPGGLCLLLLLLCQFMEDRSAQAGNCWLRQAKNGRCQVLYKTELSKEECCSTGRLSTSWTEEDVNDNTLFKWMIFNGGAPNCIPCKETCENVDCGPGKKCRMNKKNKPRCVCAPDCSNITWKGPVCGLDGKTYRNECALLKARCKEQPELEVQYQGRCKKTCRDVFCPGSSTCVVDQTNNAYCVTCNRICPEPASSEQYLCGNDGVTYSSACHLRKATCLLGRSIGLAYEGKCIKAKSCEDIQCTGGKKCLWDFKVGRGRCSLCDELCPDSKSDEPVCASDNATYASECAMKEAACSSGVLLEVKHSGSCNSISEDTEEEEEDEDQDYSFPISSILEW

SEQ ID NO: 25654 - protein, 317 aa, Homo sapiens
MVRARHQPGGLCLLLLLLCQFMEDRSAQAGNCWLRQAKNGRCQVLYKTELSKEECCSTGRLSTSWTEEDVNDNTLFKWMIFNGGAPNCIPCKETCENVDCGPGKKCRMNKKNKPRCVCAPDCSNITWKGPVCGLDGKTYRNECALLKARCKEQPELEVQYQGRCKKTCRDVFCPGSSTCVVDQTNNAYCVTCNRICPEPASSEQYLCGNDGVTYSSACHLRKATCLLGRSIGLAYEGKCIKAKSCEDIQCTGGKKCLWDFKVGRGRCSLCDELCPDSKSDEPVCASDNATYASECAMKEAACSSGVLLEVKHSGSCN

SEQ ID NO: 25655 - protein, 357 aa, Homo sapiens
MEEGMNVLHDFGIQSTHYLQVNYQDSQDWFILVSVIADLRNAFYVLFPIWFHLQEAVGIKLLWVAVIGDWLNLVFKWILFGQRPYWWVLDTDYYSNTSVPLIKQFPVTCETGPGSPSGHAMGTAGVYYVMVTSTLSIFQGKIKPTYRFRCLNVILWLGFWAVQLNVCLSRIYLAAHFPHQVVAGVLSGIAVAETFSHIHSIYNASLKKYFLITFFLFSFAIGFYLLLKGLGVDLLWTLEKAQRWCEQPEWVHIDTTPFASLLKNLGTLFGLGLALNSSMYRESCKGKLSKWLPFRLSSIVASLVLLHVFDSLKPPSQVELVFYVLSFCKSAVVPLASVSVIPYCLAQVLGQPHKKSL

SEQ ID NO: 25656 - protein, 176 aa, Homo sapiens
MEEGMNVLHDFGIQSTHYLQVNYQDSQDWFILVSVIADLRNAFYVLFPIWFHLQEAVGIKLLWVAVIGDWLNLVFKWILFGQRPYWWVLDTDYYSNTSVPLIKQFPVTCETGPGKDKADLQISVLECHFVVGILGCAAECLSVTNLPCCSFSSSSCCWSPVRHCCCRNFQPHPQHL

SEQ ID NO: 25657 - protein, 268 aa, Homo sapiens
MAAVRALVASRLAAASAFTSLSPGGRTPSQRAALHLSVPRPAARVALVLSGCGVYDGTEIHEASAILVHLSRGGAEVQIFAPDVPQMHVIDHTKGQPSEGESRNVLTESARIARGKITDLANLSAANHDAAIFPGGFGAAKNLSTFAVDGKDCKVNKEVERVLKEFHQAGKPIGLCCIAPVLAAKVLRGVEVTVGHEQEEGGKWPYAGTAEAIKALGAKHCVKEVVEAHVDQKNKVVTTPAFMCETALHYIHDGIGAMVRKVLELTGK

SEQ ID NO: 25658 - protein, 237 aa, Homo sapiens
MAAVRALVASRLAAASAFTSLSPGGRTPSQRAALHLSVPRPAARVALVLSGCGVYDGTEIHEASAILVHLSRGGAEVQIFAPDVPQMHVIDHTKGQPSEGESRNVLTESARIARGKITDLANLSAANHDAAIFPGGFGAAKNLLCCIAPVLAAKVLRGVEVTVGHEQEEGGKWPYAGTAEAIKALGAKHCVKEVVEAHVDQKNKVVTTPAFMCETALHYIHDGIGAMVRKVLELTGK

SEQ ID NO: 25659 - protein, 247 aa, Homo sapiens
MWPLLTMHITQLNRECLLHLFSFLDKDSRKSLARTCSQLHDVFEDPALWSLLHFRSLTELQKDNFLLGPALRSLSICWHSSRVQVCSIEDWLKSAFQRSICSRHESLVNDFLLRVCDRLSAVRSPRRREAPAPSSGTPIAVGPKSPRWGGPDHSEFADLRSGVTGARAAARRGLGSLRAERPSETPPAPGVSWGPPPPGAPVVISVKQEEGKQGRTGRRSHRAAPPCGFARTRVCPPTFPGADAFPQ

SEQ ID NO: 25660 - protein, 657 aa, Homo sapiens
MPRYTVHVRGEWLAVPCQDAQLTVGWLGREAVRRYIKNKPDNGGFTSVDDAHFLVRRCKGLGLLDNEDRLEVALENNEFVEVVIEGDAMSPDFIPSQPEGVYLYSKYREPEKYIELDGDRLTTEDLVNLGKGRYKIKLTPTAEKRVQKSREVIDSIIKEKTVVYGITTGFGKFARTVIPINKLQELQVNLVRSHSSGVGKPLSPERCRMLLALRINVLAKGYSGISLETLKQVIEMFNASCLPYVPEKGTVGASGDLAPLSHLALGLVGEGKMWSPKSGWADAKYVLEAHGLKPVILKPKEGLALINGTQMITSLGCEAVERASAIARQADIVAALTLEVLKGTTKAFDTDIHALRPHRGQIEVAFRFRSLLDSDHHPSEIAESHRFCDRVQDAYTLRCCPQVHGVVNDTIAFVKNIITTELNSATDNPMVFANRGETVSGGNFHGEYPAKALDYLAIGIHELAAISERRIERLCNPSLSELPAFLVAEGGLNSGFMIAHCTAAALVSENKALCHPSSVDSLSTSAATEDHVSMGGWAARKALRVIEHVEQVLAIELLAACQGIEFLRPLKTTTPLEKVYDLVRSVVRPWIKDRFMAPDIEAAHRLLLEQKVWEVAAPYIEKYRMEHIPESRPLSPTAFSLQFLHKKSTKIPESEDL

SEQ ID NO: 25661 - protein, 591 aa, Homo sapiens
MPRYTVHVRGEWLAVPCQDAQLTVGWLGREAVRRYIKNKPDNGGFTSVDDAHFLVRRCKGLGLLDNEDRLEVALENNEFVEVVIEGDAMSPDFIPSQPEGVYLYSKYREPEKYIELDGDRLTTEDLVNLGKGRYKIKLTPTAEKRVQKSREVIDSIIKEKTVVYGITTGFGKFARTVIPINKLQELQVNLVRSHSSGVGKPLSPERCRMLLALRINVLAKGYSGISLETLKQVIEMFNASCLPYVPEKGTVGASGDLAPLSHLALGLVGEGKMWSPKSGWADAKYVLEAHGLKPVILKPKEGLALINGTQMITSLGCEAVERASAIARQADIVAALTLEVLKGTTKAFDTDIHALRPHRGQIEVAFRFRSLLDSDHHPSEIAESHRFCDRVQDAYTLRCCPQVHGVVNDTIAFVKNIITTELNSATDNPMVFANRGETVSGGNFHGEYPAKALDYLAIGIHELAAISERRIERLCNPSLSELPAFLVAEGGLNSGFMIAHCTAAALVSENKALCHPSSVDSLSTSAATEDHVSMGGWAARKALRVIEHVEQVLAIELLAACQGIEFLRPLKTTTPLEKVYDLVRSVVRFGK

SEQ ID NO: 25662 - protein, 449 aa, Homo sapiens
MLLALRINVLAKGYSGISLETLKQVIEMFNASCLPYVPEKGTVGASGDLAPLSHLALGLVGEGKMWSPKSGWADAKYVLEAHGLKPVILKPKEGLALINGTQMITSLGCEAVERASAIARQADIVAALTLEVLKGTTKAFDTDIHALRPHRGQIEVAFRFRSLLDSDHHPSEIAESHRFCDRVQDAYTLRCCPQVHGVVNDTIAFVKNIITTELNSATDNPMVFANRGETVSGGNFHGEYPAKALDYLAIGIHELAAISERRIERLCNPSLSELPAFLVAEGGLNSGFMIAHCTAAALVSENKALCHPSSVDSLSTSAATEDHVSMGGWAARKALRVIEHVEQVLAIELLAACQGIEFLRPLKTTTPLEKVYDLVRSVVRPWIKDRFMAPDIEAAHRLLLEQKVWEVAAPYIEKYRMEHIPESRPLSPTAFSLQFLHKKSTKIPESEDL

SEQ ID NO: 25663 - protein, 330 aa, Homo sapiens
MAAVDSFYLLYREIARSCNCYMEALALVGAWYTARKSITVICDFYSLIRLHFIPRLGSRADLIKQYGRWAVVSGATDGIGKAYAEELASRGLNIILISRNEEKLQVVAKDIADTYKVETDIIVADFSSGREIYLPIREALKDKDVGILVNNVGVFYPYPQYFTQLSEDKLWDIINVNIAAASLMVHVVLPGMVERKKGAIVTISSGSCCKPTPQLAAFSASKAYLDHFSRALQYEYASKGIFVQSLIPFYVATSMTAPSNFLHRCSWLVPSPKVYAHHAVSTLGISKRTTGYWSHSIQFLFAQYMPEWLWVWGANILNRSLRKEALSCTA

SEQ ID NO: 25664 - protein, 275 aa, Homo sapiens
MAAVDSFYLLYREIARSCNCYMEALALVGAWYTARKSITVICDFYSLIRLHFIPRLGSRADLIKQYGRWAVVSGATDGIGKAYAEELASRGLNIILISRNEEKLQYFTQLSEDKLWDIINVNIAAASLMVHVVLPGMVERKKGAIVTISSGSCCKPTPQLAAFSASKAYLDHFSRALQYEYASKGIFVQSLIPFYVATSMTAPSNFLHRCSWLVPSPKVYAHHAVSTLGISKRTTGYWSHSIQFLFAQYMPEWLWVWGANILNRSLRKEALSCTA

SEQ ID NO: 25665 - protein, 394 aa, Homo sapiens
MATAQLQRTPMSALVFPNKISTEHQSLVLVKRLLAVSVSCITYLRGIFPECAYGTRYLDDLCVKILREDKNCPGSTQLVKWMLGCYDALQKKYLRMVVLAVYTNPEDPQTISECYQFKFKYTNNGPLMDFISKNQSNESSMLSTDTKKASILLIRKIYILMQNLGPLPNDVCLTMKLFYYDEVTPPDYQPPGFKDGDCEGVIFEGEPMYLNVGEVSTPFHIFKVKVTTERERMENIDSTILSPKQIKTPFQKILRDKDVEDEQEHYTSDDLDIETKMEEQEKNPASSELEEPSLVCEEDEIMRSKESPDLSISHSQVEQLVNKTSELDMSESKTRSGKVFQNKMANGNQPVKSSKENRKRSQHESGRIVLHHFDSSSQESVPKRRKFSEPKEHI

SEQ ID NO: 25666 - protein, 387 aa, Homo sapiens
MATAQLQRTPMSALVFPNKISTEHQSLVLVKRLLAVSVSCITYLRGIFPECAYGTRYLDDLCVKILREDKNCPGSTQLVKWMLGCYDALQKKYVYTNPEDPQTISECYQFKFKYTNNGPLMDFISKNQSNESSMLSTDTKKASILLIRKIYILMQNLGPLPNDVCLTMKLFYYDEVTPPDYQPPGFKDGDCEGVIFEGEPMYLNVGEVSTPFHIFKVKVTTERERMENIDSTILSPKQIKTPFQKILRDKDVEDEQEHYTSDDLDIETKMEEQEKNPASSELEEPSLVCEEDEIMRSKESPDLSISHSQVEQLVNKTSELDMSESKTRSGKVFQNKMANGNQPVKSSKENRKRSQHESGRIVLHHFDSSSQESVPKRRKFSEPKEHI

SEQ ID NO: 25667 - protein, 323 aa, Homo sapiens
MRLWNKISRWMLGCYDALQKKYLRMVVLAVYTNPEDPQTISECYQFKFKYTNNGPLMDFISKNQSNESSMLSTDTKKASILLIRKIYILMQNLGPLPNDVCLTMKLFYYDEVTPPDYQPPGFKDGDCEGVIFEGEPMYLNVGEVSTPFHIFKVKVTTERERMENIDSTILSPKQIKTPFQKILRDKDVEDEQEHYTSDDLDIETKMEEQEKNPASSELEEPSLVCEEDEIMRSKESPDLSISHSQVEQLVNKTSELDMSESKTRSGKVFQNKMANGNQPVKSSKENRKRSQHESGRIVLHHFDSSSQESVPKRRKFSEPKEHI

SEQ ID NO: 25668 - protein, 314 aa, Homo sapiens
MRLWNKISRWMLGCYDALQKKYLRMVVLATISECYQFKFKYTNNGPLMDFISKNQSNESSMLSTDTKKASILLIRKIYILMQNLGPLPNDVCLTMKLFYYDEVTPPDYQPPGFKDGDCEGVIFEGEPMYLNVGEVSTPFHIFKVKVTTERERMENIDSTILSPKQIKTPFQKILRDKDVEDEQEHYTSDDLDIETKMEEQEKNPASSELEEPSLVCEEDEIMRSKESPDLSISHSQVEQLVNKTSELDMSESKTRSGKVFQNKMANGNQPVKSSKENRKRSQHESGRIVLHHFDSSSQESVPKRRKFSEPKEHI

SEQ ID NO: 25669 - protein, 316 aa, Homo sapiens
MRLWNKISRWMLGCYDALQKKYVYTNPEDPQTISECYQFKFKYTNNGPLMDFISKNQSNESSMLSTDTKKASILLIRKIYILMQNLGPLPNDVCLTMKLFYYDEVTPPDYQPPGFKDGDCEGVIFEGEPMYLNVGEVSTPFHIFKVKVTTERERMENIDSTILSPKQIKTPFQKILRDKDVEDEQEHYTSDDLDIETKMEEQEKNPASSELEEPSLVCEEDEIMRSKESPDLSISHSQVEQLVNKTSELDMSESKTRSGKVFQNKMANGNQPVKSSKENRKRSQHESGRIVLHHFDSSSQESVPKRRKFSEPKEHI

SEQ ID NO: 25670 - protein, 418 aa, Homo sapiens
MLPNTGRLAGCTVFITGASRGIGKAIALKAAKDGANIVIAAKTAQPHPKLLGTIYTAAEEIEAVGGKALPCIVDVRDEQQISAAVEKAIKKFGGIDILVNNASAISLTNTLDTPTKRLDLMMNVNTRGTYLASKACIPYLKKSKVAHILNISPPLNLNPVWFKQHCAYTIAKYGMSMYVLGMAEEFKGEIAVNALWPKTAIHTAAMDMLGGPGIESQCRKVDIIADAAYSIFQKPKSFTGNFVIDENILKEEGIENFDVYAIKPGHPLQPDFFLDEYPEAVSKKVESTGAVPEFKEEKLQLQPKPRSGAVEETFRIVKDSLSDDVVKATQAIYLFELSGEDGGTWFLDLKSKGGNVGYGEPSDQADVVMSMTTDDFVKMFSGKLKPTMAFMSGKLKIKGNMALAIKLEKLMNQMNARL

SEQ ID NO: 25671 - protein, 345 aa, Homo sapiens
MLPNTGRLAGCTVFITGASRGIGKAIALKAAKDGANIVIAAKTAQPHPKLLGTIYTAAEEIEAVGGKALPCIVDVRDEQQISAAVEKAIKKFGAYTIAKYGMSMYVLGMAEEFKGEIAVNALWPKTAIHTAAMDMLGGPGIESQCRKVDIIADAAYSIFQKPKSFTGNFVIDENILKEEGIENFDVYAIKPGHPLQPDFFLDEYPEAVSKKVESTGAVPEFKEEKLQLQPKPRSGAVEETFRIVKDSLSDDVVKATQAIYLFELSGEDGGTWFLDLKSKGGNVGYGEPSDQADVVMSMTTDDFVKMFSGKLKPTMAFMSGKLKIKGNMALAIKLEKLMNQMNARL

SEQ ID NO: 25672 - protein, 168 aa, Homo sapiens [sequence omitted]

SEQ ID NO: 25673 - protein, 647 aa, Homo sapiens
MACSLQKLFAVEEEFEDEDFLSAVEDAENRFTGSLPVNAGRLRPVSSRPQETVQAQSSRLLLLHPTAPSEALGLPDLDLCLPASSTPSADSRPSCIGAAPLRPVSTSSSWIGNQRRVTVTEVLRETARPQSSALHPLLTFESQQQQVGGFEGPEQDEFDKVLASMELEEPGMELECGVSSEAIPILPAQQREGSVLAKKARVVDLSGSCQKGPVPAIHKAGIMSAQDESLDPVIQCRTPRPPLRPGAVGHLPVPTALTVPTQQLHWEVCPQRSPVQALQPLQAARGTIQSSPQNRFPCQPFQSPSSWLSGKAHLPRPRTPNSSCSTPSRTSSGLFPRIPLQPQAPVSSIGSPVGTPKGPQGALQTPIVTNHLVQLVTAASRTPQQPTHPSTRAKTRRFPGPAGILPHQQSGRSLEDIMVSAPQTPTHGALAKFQTEIVASSQASVEEDFGRGPWLTMKSTLGLDERDPSCFLCTYSIVMVLRKQAALKQLPRNKVPNMAVMIKSLTRSTMDASVVFKDPTGEMQGTVHRLLLETCQNELKPGSVLLLKQIGVFSPSLRNHYLNVTPNNLVHIYSPDSGDGSFLKPSQPFPKDSGSFQHDVAAKPEEGFRTAQNLEAEASPEEELPEADDLDGLLSELPEDFFCGTSS

SEQ ID NO: 25674 - protein, 137 aa, Homo sapiens
MACSLQKLFAVEEEFEDEDFLSAVEDAENRFTGSLPVNAGRLRPVSSRPQETVQAQSSRLLLLHPTAPSEALGLPDLDLCLPASSTPSADSRPSCIGAAPLRPVSTSNCLNSSHSATPLGSLSATLHCSSTSASPSC

SEQ ID NO: 25675 - protein, 521 aa, Homo sapiens
MACSLQKLFAVEEEFEDEDFLSAVEDAENRFTGSLPVNAGRLRPVSSRPQETVQAQSSRLLLLHPTAPSEALGLPDLDLCLPASSTPSADSRPSCIGAAPLRPVSTSSSWIGNQRRVTVTEVLRETARPQSSALHPLLTFESQQQQVGGFEGPEQDEFDKVLASMELEEPGMELECGVSSEAIPILPAQQREGSVLAKKARVVDLSGSCQKGPVPAIHKAGIMSAQDESLDPVIQCRTPRPPLRPGAVGHLPVPTALTVPTQQLHWEVCPQRSPVQALQPLQAARGTIQSSPQNRFPCQPFQSPSSWLSGKAHLPRPRTPNSSCSTPSRTSSGLFPRIPLQPQAPVSSIGSPVGTPKGPQGALQTPIVTNHLVQLVTAASRTPQQPTHPSTRAKTRRFPGPAGILPHQAALKQLPRNKVPNMAVMIKSLTRSTMDASVVFKDPTGEMQGTVHRLLLETCQNELKPGSVLLLKQIGVFSPSLRNHYLNVTPNNLVHIYSPDSGDGSFLKPSQPFPKMTWMDS

SEQ ID NO: 25676 - protein, 646 aa, Homo sapiens
MACSLQKLFAVEEEFEDEDFLSAVEDAENRFTGSLPVNAGRLRPVSSRPQETVQAQSSRLLLLHPTAPSEALGLPDLDLCLPASSTPSADSRPSCIGAAPLRPVSTSSSWIGNQRRVTVTEVLRETARPQSSALHPLLTFESQQQQVGGFEGPEQDEFDKVLASMELEEPGMELECGVSSEAIPILPAQQREGSVLAKKARVVDLSGSCQKGPVPAIHKAGIMSAQDESLDPVIQCRTPRPPLRPGAVGHLPVPTALTVPTQQLHWEVCPQRSPVQALQPLQAARGTIQSSPQNRFPCQPFQSPSSWLSGKAHLPRPRTPNSSCSTPSRTSSGLFPRIPLQPQAPVSSIGSPVGTPKGPQGALQTPIVTNHLVQLVTAASRTPQQPTHPSTRAKTRRFPGPAGILPHQQSGRSLEDIMVSAPQTPTHGALAKFQTEIVASSQASVEEDFGRGPWLTMKSTLGLDERDPSCFLCTYSIVMVLRKAALKQLPRNKVPNMAVMIKSLTRSTMDASVVFKDPTGEMQGTVHRLLLETCQNELKPGSVLLLKQIGVFSPSLRNHYLNVTPNNLVHIYSPDSGDGSFLKPSQPFPKDSGSFQHDVAAKPEEGFRTAQNLEAEASPEEELPEADDLDGLLSELPEDFFCGTSS

SEQ ID NO: 25677 - protein, 76 aa, Homo sapiens
MAETDPKTVQDLTSVVQTLLQQMQDKFQTMSDQIIGRIDDMSSRIDDLEKNIADLMTQAGVEELESENKIPATQKS

SEQ ID NO: 25678 - protein, 74 aa, Homo sapiens
MDVRGPEAPGGRALRDAAENLFQELQEHFQALTATLNLRMEEMGNRIEDLQKNVKDLMVQAGIENSIKEQMLKT

SEQ ID NO: 25679 - protein, 755 aa, Homo sapiens
MSGTNLDGNDEFDEQLRMQELYGDGKDGDTQTDAGGEPDSLGQQPTDTPYEWDLDKKAWFPKITEDFIATYQANYGFSNDGASSSTANVEDVHARTAEEPPQEKAPEPTDARKKGEKRKAESGWFHVEEDRNTNVYVSGLPPDITVDEFIQLMSKFGIIMRDPQTEEFKVKLYKDNQGNLKGDGLCCYLKRESVELALKLLDEDEIRGYKLHVEVAKFQLKGEYDASKKKKKCKDYKKKLSMQQKQLDWRPERRAGPSRMRHERVVIIKNMFHPMDFEDDPLVLNEIREDLRVECSKFGQIRKLLLFDRHPDGVASVSFRDPEEADYCIQTLDGRWFGGRQITAQAWDGTTDYQVEETSREREERLRGWEAFLNAPEANRGLRRSDSVSASERAGPSRARHFSEHPSTSKMNAQETATGMAFEEPIDEKKFEKTEDGGEFEEGASENNAKESSPEKEAEEGCPEKESEEGCPKRGFEGSCSQKESEEGNPVRGSEEDSPKKESKKKTLKNDCEENGLAKESEDDLNKESEEEVGPTKESEEDDSEKESDEDCSEKQSEDGSEREFEENGLEKDLDEEGSEKELHENVLDKELEENDSENSEFEDDGSEKVLDEEGSEREFDEDSDEKEEEEDTYEKVFDDESDEKEDEEYADEKGLEAADKKAEEGDADEKLFEESDDKEDEDADGKEVEDADEKLFEDDDSNEKLFDEEEDSSEKLFDDSDERGTLGGFGSVEEGPLSTGSSFILSSDDDDDDI

SEQ ID NO: 25680 - protein, 387 aa, Homo sapiens
MNVSGCPGAGNASQAGGGGGWHPEAVIVPLLFALIFLVGTVGNTLVLAVLLRGGQAVSTTNLFILNLGVADLCFILCCVPFQATIYTLDGWVFGSLLCKAVHFLIFLTMHASSFTLAAVSLDRYLAIRYPLHSRELRTPRNALAAIGLIWGLSLLFSGPYLSYYRQSQLANLTVCHPAWSAPRRRAMDICTFVFSYLLPVLVLGLTYARTLRYLWRAVDPVAAGSGARRAKRKVTRMILIVAALFCLCWMPHHALILCVWFGQFPLTRATYALRILSHLVSYANSCVNPIVYALVSKHFRKGFRTICAGLLGRAPGRASGRVCAAARGTHSGSVLERESSDLLHMSEAAGALRPCPGASQPCILEPCPGPSWQGPKAGDSILTVDVA

SEQ ID NO: 25681 - protein, 622 aa, Homo sapiens
MRLLRRRHMPLRLAMVGCAFVLFLFLLHRDVSSREEATEKPWLKSLVSRKDHVLDLMLEAMNNLRDSMPKLQIRAPEAQQTLFSINQSCLPGFYTPAELKPFWERPPQDPNAPGADGKAFQKSKWTPLETQEKEEGYKKHCFNAFASDRISLQRSLGPDTRPPECVDQKFRRCPPLATTSVIIVFHNEAWSTLLRTVYSVLHTTPAILLKEIILVDDASTEEHLKEKLEQYVKQLQVVRVVRQEERKGLITARLLGASVAQAEVLTFLDAHCECFHGWLEPLLARIAEDKTVVVSPDIVTIDLNTFEFAKPVQRGRVHSRGNFDWSLTFGWETLPPHEKQRRKDETYPIKSPTFAGGLFSISKSYFEHIGTYDNQMEIWGGENVEMSFRVWQCGGQLEIIPCSVVGHVFRTKSPHTFPKGTSVIARNQVRLAEVWMDSYKKIFYRRNLQAAKMAQEKSFGDISERLQLREQLHCHNFSWYLHNVYPEMFVPDLTPTFYGAIKNLGTNQCLDVGENNRGGKPLIMYSCHGLGGNQYFEYTTQRDLRHNIAKQLCLHVSKGALGLGSCHFTGKNSQVPKDEEWELAQDQLIRNSGSGTCLTSQDKKPAMAPCNPSDPHQLWLFV

SEQ ID NO: 25682 - protein, 464 aa, Homo sapiens
MDGTEGSAGQPGPAERSHRSSVSSVGARAADVLVYLADDTVVPLAVENLPSLSAHELHRAVREVLQLPDIALDVFALWLVSPLLEVQLKPKHQPYKLGRQWPELLLRFTSAPDDDVAMDEPFLQFRRNVFFPKRRELQIHDEEVLRLLYEEAKGNVLAARYPCDVEDCEALGALVCRVQLGPYQPGRPAACDLREKLDSFLPAHLCKRGQSLFAALRGRGARAGPGEQGLLNAYRQVQEVSSDGGCEAALGTHYRAYLLKCHELPFYGCAFFHGEVDKPAQGFLHRGGRKPVSVAISLEGVHVIDSREKHVLLGLRFQELSWDHTSPEEEEPILWLEFDGDSEGTPVNKLLKIYSKQAELMSSLIEYCIELSQAAEPAGPQDSATGSPSDPSSSLAPVQRPKLRRQGSVVSSRIQHLSTIDYVEDGKGIRRVKPKRTTSFFSRQLSLGQGSYTVVQPGDSLEQG

SEQ ID NO: 25683 - protein, 408 aa, Homo sapiens
MDGTEGSAGQPGPAERSHRSSVSSVGAREVQLKPKHQPYKLGRQWPELLLRFTSAPDDDVAMDEPFLQFRRNVFFPKRRELQIHDEEVLRLLYEEAKGNVLAARYPCDVEDCEALGALVCRVQLGPYQPGRPAACDLREKLDSFLPAHLCKRGQSLFAALRGRGARAGPGEQGLLNAYRQVQEVSSDGGCEAALGTHYRAYLLKCHELPFYGCAFFHGEVDKPAQGFLHRGGRKPVSVAISLEGVHVIDSREKHVLLGLRFQELSWDHTSPEEEEPILWLEFDGDSEGTPVNKLLKIYSKQAELMSSLIEYCIELSQAAEPAGPQDSATGSPSDPSSSLAPVQRPKLRRQGSVVSSRIQHLSTIDYVEDGKGIRRVKPKRTTSFFSRQLSLGQGSYTVVQPGDSLEQG

SEQ ID NO: 25684 - protein, 430 aa, Homo sapiens
MDGTEGSAGQPGPAERSHRSSVSSVGARAADVLVYLADDTVVPLAVENLPSLSAHELHRAVREVLQLPDIALDVFALWLVSPLLDEPFLQFRRNVFFPKRRELQIHDEEVLRLLYEEAKGNVLAARYPCDVEDCEALGALVCRVQLGPYQPGRPAACDLREKLDSFLPAHLCKRGQSLFAALRGRGARAGPGEQGLLNAYRQVQEVSSDGGCEAALGTHYRAYLLKCHELPFYGCAFFHGEVDKPAQGFLHRGGRKPVSVAISLEGVHVIDSREKHVLLGLRFQELSWDHTSPEEEEPILWLEFDGDSEGTPVNKLLKIYSKQAELMSSLIEYCIELSQAAEPAGPQDSATGSPSDPSSSLAPVQRPKLRRQGSVVSSRIQHLSTIDYVEDGKGIRRVKPKRTTSFFSRQLSLGQGSYTVVQPGDSLEQG

SEQ ID NO: 25685 - protein, 714 aa, Homo sapiens
MLHLKVQFLDDSQKIFVVDQKSSGKALFNLSCSHLNLAEKEYFGLEFCSHSGNNVWLELLKPITKQVKNPKEIVFKFMVKFFPVDPGHLREELTRYLFTLQIKKDLALGRLPCSDNCTALMVSHILQSELGDFHEETDRKHLAQTRYLPNQDCLEGKIMHFHQKHIGRSPAESDILLLDIARKLDMYGIRPHPASDGEGMQIHLAVAHMGVLVLRGNTKINTFNWAKIRKLSFKRKHFLIKLHANILVLCKDTLEFTMASRDACKAFWKTCVEYHAFFRLSEEPKSKPKTLLCSKGSSFRYSGRTQRQLLEYGRKGRLKSLPFERKHYPSQYHERQCRSSPDLLSDVSKQVEDLRLAYGGGYYQNVNGVHASEPVLESRRRNSALEVTFATELEHSKPEADPTLLHQSQSSSSFPFIYMDPVFNTEPNPNPDPRDIFSERSSLSSFQTSCKFSGNHMSIYSGLTSKVRPAKQLTYTDVPYIPCTGQQVGIMPPQVFFYVDKPPQVPRWSPIRAEERTSPHSYVEPTAMKPAERSPRNIRMKSFQQDLQVLQEAIARTSGRSNINVGLEEEDPNLEDAFVCNIQEQTPKRSQSQSDMKTIRFPFGSEFRPLGPCPALSHKADLFTDMFAEQELPAVLMDQSTAERYVASESSDSESEILKPDYYALYGKEIRSPMARIRLSSGSLQLDEEDEDAYFNTPTAEDRTSLKPCNYFLA

SEQ ID NO: 25686 - protein, 699 aa, Homo sapiens
MLHLKVQFLDDSQKIFVVDQKSSGKALFNLSCSHLNLAEKEYFGLEFCSHSGNNVWLELLKPITKQVKMDPGHLREELTRYLFTLQIKKDLALGRLPCSDNCTALMVSHILQSELGDFHEETDRKHLAQTRYLPNQDCLEGKIMHFHQKHIGRSPAESDILLLDIARKLDMYGIRPHPASDGEGMQIHLAVAHMGVLVLRGNTKINTFNWAKIRKLSFKRKHFLIKLHANILVLCKDTLEFTMASRDACKAFWKTCVEYHAFFRLSEEPKSKPKTLLCSKGSSFRYSGRTQRQLLEYGRKGRLKSLPFERKHYPSQYHERQCRSSPDLLSDVSKQVEDLRLAYGGGYYQNVNGVHASEPVLESRRRNSALEVTFATELEHSKPEADPTLLHQSQSSSSFPFIYMDPVFNTEPNPNPDPRDIFSERSSLSSFQTSCKFSGNHMSIYSGLTSKVRPAKQLTYTDVPYIPCTGQQVGIMPPQVFFYVDKPPQVPRWSPIRAEERTSPHSYVEPTAMKPAERSPRNIRMKSFQQDLQVLQEAIARTSGRSNINVGLEEEDPNLEDAFVCNIQEQTPKRSQSQSDMKTIRFPFGSEFRPLGPCPALSHKADLFTDMFAEQELPAVLMDQSTAERYVASESSDSESEILKPDYYALYGKEIRSPMARIRLSSGSLQLDEEDEDAYFNTPTAEDRTSLKPCNYFLA

SEQ ID NO: 25687 - protein, 607 aa, Homo sapiens
MRAVRRGLREGGAMAAARDPPEVSLREATQRKLRRFSELRGKLVARGEFWDIVAITAADEKQELAYNQQLSEKLKRKELPLGVQYHVFVDPAGAKIGNGGSTLCALQCLEKLYGDKWNSFTILLIHSGGYSQRLPNASALGKIFTALPLGNPIYQMLELKLAMYIDFPLNMNPGILVTCADDIELYSIGEFEFIRFDKPGFTALAHPSSLTIGTTHGVFVLDPFDDLKHRDLEYRSCHRFLHKPSIEKMYQFNAVCRPGNFCQQDFAGGDIADLKLDSDYVYTDSLFYMDHKSAKMLLAFYEKIGTLSCEIDAYGDFLQALGPGATVEYTRNTSNVIKEESELVEMRQRIFHLLKGTSLNVVVLNNSKFYHIGTTEEYLFYFTSDNSLKSELGLQSITFSIFPDIPECSGKTSCIIQSILDSRCSVAPGSVVEYSRLGPDVSVGENCIISGSYILTKAALPAHSFVCSLSLKMNRCLKYATMAFGVQDNLKKSVKTLSDIKLLQFFGVCFLSCLDVWNLKVTEELFSGNKTCLSLWTARIFPVCSSLSDSVITSLKMLNAVKNKSAFSLNSYKLLSIEEMLIYKDVEDMITYREQIFLEISLKSSLM

SEQ ID NO: 25688 - protein, 340 aa, Homo sapiens
MAAARDPPEVSLREATQRKLRRFSELRGKLVARGEFWDIVAITAADEKQELAYNQQLSEKLKRKELPLGVQYHVFVDPAGAKIGNGGSTLCALQCLEKLYGDKWNSFTILLIHSGGYSQRLPNASALGKIFTALPLDIPECSGKTSCIIQSILDSRCSVAPGSVVEYSRLGPDVSVGENCIISGSYILTKAALPAHSFVCSLSLKMNRCLKYATMAFGVQDNLKKSVKTLSDIKLLQFFGVCFLSCLDVWNLKVTEELFSGNKTCLSLWTARIFPVCSSLSDSVITSLKMLNAVKNKSAFSLNSYKLLSIEEMLIYKDVEDMITYREQIFLEISLKSSLM

SEQ ID NO: 25689 - protein, 169 aa, Homo sapiens
MAAARDPPEVSLREATQRKLRRFSELRGKLVARGEFWDIVAITAADEKQELAYNQQLSEKLKRKELPLGVQYHVFVDPAGAKIGNGGSTLCALQCLEKLYGDKWNSFTILLIHSVSFQIYQNALAKHPVSFKAYWIQDVLWHLAQLWSIPDWGLMFQLGKTALLVVLTS

SEQ ID NO: 25690 - protein, 348 aa, Homo sapiens
MSAAFPPSLMMMQRPLGSSTAFSIDSLIGSPPQPSPGHFVYTGYPMFMPYRPVVLPPPPPPPPALPQAALQPALPPAHPHHQIPSLPTGFCSSLAQGMALTSTLMATLPGGFSASPQHQEAAAARKFAPQPLPGGGNFDKAEALQADAEDGKGFLAKEGSLLAFSAAETVQASLVGAVRGQGKDESKVEDDPKGKEESFSLESDVDYSSDDNLTGQAAHKEEDPGHALEETPPSSGAAGSTTSTGKNRRRRTAFTSEQLLELEKEFHCKKYLSLTERSQIAHALKLSEVQVKIWFQNRRAKWKRVKAGNANSKTGEPSRNPKIVVPIPVHVSRFAIRSQHQQLEQARP

SEQ ID NO: 25691 - protein, 438 aa, Homo sapiens
MALRGVSVRLLSRGPGLHVLRTWVSSAAQTEKGGRTQSQLAKSSRPEFDWQDPLVLEEQLTTDEILIRDTFRTYCQERLMPRILLANRNEVFHREIISEMGELGVLGPTIKGYGCAGVSSVAYGLLARELERVDSGYRSAMSVQSSLVMHPIYAYGSEEQRQKYLPQLAKGELLGCFGLTEPNSGSDPSSMETRAHYNSSNKSYTLNGTKTWITNSPMADLFVVWARCEDGCIRGFLLEKGMRGLSAPRIQGKFSLRASATGMIIMDGVEVPEENVLPGASSLGGPFGCLNNARYGIAWGVLGASEFCLHTARQYALDRMQFGVPLARNQLIQKKLADMLTEITLGLHACLQLGRLKDQDKAAPEMVSLLKRNNCGKALDIARQARDMLGGNGISDEYHVIRHAMNLEAVNTYEGTHDIHALILGRAITGIQAFTASK

SEQ ID NO: 25692 - protein, 428 aa, Homo sapiens
MALRGVSVRLLSRGPGLHVLRTWVSSAAQTEKGGRTQSQLAKSSRPEFDWQDPLVLEEQLTTDEILIRDTFRTYCQERLMPRILLANRNEVFHREIISEMGELGVLGPTIKGYGCAGVSSVAYGLLARELERVDSGYRSAMSVQSSLVMHPIYAYGSEEQRQKYLPQLAKGELLGCFGLTEPNSGSDPSSMETRAHYNSSNKSYTLNGTKTWITNSPMADLFVVWARCEDGCIRGFLLEKGMRGLSAPRIQGKFSLRASATGMIIMDGVEVPEENVLPGASSLGGPFGCLNNARYGIAWGVLGASEFCLHTARQYALDRMQFGVPLARNQLIQKKLADMLTEITLGLHACLQLGRLKDQDKAAPEMVSLLKRNNCGKALDIARQARDMLGGNGISDEYHVIRHAMNLEAVNTYEVVQMCSLKRRWNSL

SEQ ID NO: 25693 - protein, 284 aa, Homo sapiens
MAAPGLRLGAGRLFEMPAVLERLSRYNSTSQAFAEVLRLPKQQLRKLLYPLQEVERFLAPYGRQDLHLRIFDPSPEDIARADNIFTATERNRIDYVSSAVRIDHAPDLPRPEVCFIGRSNVGKSSLIKALFSLAPEVEVRVSKKPGHTKKMNFFKVGKHFTVVDMPGYGFRAPEDFVDMVETYLKERRNLKRTFLLVDSVVGIQKTDNIAIEMCEEFALPYVIVLTKIDKSSKGHLLKQVLQIQKFVNMKTQGCFPQLFPVSAVTFSGIHLLRCFIASVTGSLD

SEQ ID NO: 25694 - protein, 251 aa, Homo sapiens
MAAPGLRLGAGRLFEMPAVLERLSRYNSTSQAFAEVLRLPKQQLRKLLYPLQEVERFLAPYGRQDLHLRIFDPSPEDIARADNIFTATERNRIDYVSSAVRIDHAPDLPRPEGHTKKMNFFKVGKHFTVVDMPGYGFRAPEDFVDMVETYLKERRNLKRTFLLVDSVVGIQKTDNIAIEMCEEFALPYVIVLTKIDKSSKGHLLKQVLQIQKFVNMKTQGCFPQLFPVSAVTFSGIHLLRCFIASVTGSLD

SEQ ID NO: 25695 - protein, 121 aa, Homo sapiens
MAAPGLRLGAGRLFEMPAVLERLSRYNSTSQAFAEVLRLPKQQLRKLLYPLQEVERFLAPYGRQDLHLRIFDPSPEDIARADNIFTATERNRIDYVSSAVRIDHAPDLPRPELEENIFISG

SEQ ID NO: 25696 - protein, 1871 aa, Homo sapiens
MENEIFTPLLEQFMTSPLVTWVKTFGPLAAGNGTNLDEYVALVDGVFLNQVMLQINPKLESQRVNKKVNNDASLRMHNLSILVRQIKFYYQETLQQLIMMSLPNVLIIGKNPFSEQGTEEVKKLLLLLLGCAVQCQKKEEFIERIQGLDFDTKAAVAAHIQEVTHNQENVFDLQWMEVTDMSQEDIEPLLKNMALHLKRLIDERDEHSETIIELSEERDGLHFLPHASSSAQSPCGSPGMKRTESRQHLSVELADAKAKIRRLRQELEEKTEQLLDCKQELEQMEIELKRLQQENMNLLSDARSARMYRDELDALREKAVRVDKLESEVSRYKERLHDIEFYKARVEELKEDNQVLLETKTMLEDQLEGTRARSDKLHELEKENLQLKAKLHDMEMERDMDRKKIEELMEENMTLEMAQKQSMDESLHLGWELEQISRTSELSEAPQKSLGHEVNELTSSRLLKLEMENQSLTKTVEELRTTVDSVEGNASKILKMEKENQRLSKKVEILENEIVQEKQSLQNCQNLSKDLMKEKAQLEKTIETLRENSERQIKILEQENEHLNQTVSSLRQRSQISAEARVKDIEKENKILHESIKETSSKLSKIEFEKRQIKKELEHYKEKGERAEELENELHHLEKENELLQKKITNLKITCEKIEALEQENSELERENRKLKKTLDSFKNLTFQLESLEKENSQLDEENLELRRNVESLKCASMKMAQLQLENKELESEKEQLKKGLELLKASFKKTERLEVSYQGLDIENQRLQKTLENSNKKIQQLESELQDLEMENQTLQKNLEELKISSKRLEQLEKENKSLEQETSQLEKDKKQLEKENKRLRQQAEIKDTTLEENNVKIGNLEKENKTLSKEIGIYKESCVRLKELEKENKELVKRATIDIKTLVTLREDLVSEKLKTQQMNNDLEKLTHELEKIGLNKERLLHDEQSTDDSRYKLLESKLESTLKKSLEIKEEKIAALEARLEESTNYNQQLRQELKTVKKNYEALKQRQDEERMVQSSPPISGEDNKWERESQETTRELLKVKDRLIEVERNNATLQAEKQALKTQLKQLETQNNNLQAQILALQRQTVSLQEQNTTLQTQNAKLQVENSTLNSQSTSLMNQNAQLLIQQSSLENENESVIKEREDLKSLYDSLIKDHEKLELLHERQASEYESLISKHGTLKSAHKNLEVEHRDLEDRYNQLLKQKGQLEDLEKMLKVEQEKMLLENKNHETVAAEYKKLCGENDRLNHTYSQLLKETEVLQTDHKNLKSLLNNSKLEQTRLEAEFSKLKEQYQQLDITSTKLNNQCELLSQLKGNLEEENRHLLDQIQTLMLQNRTLLEQNMESKDLFHVEQRQYIDKLNELRRQKEKLEEKIMDQYKFYDPSPPRRRGNWITLKMRKLIKSKKDINRERQKSLTLTPTRSDSSEGFLQLPHQDSQDSSSVGSNSLEDGQTLGTKKSSMVALKRLPFLRNRPKDKDKMKACYRRSMSMNDLVQSMVLAGQWTGSTENLEVPDDISTGKRRKELGAMAFSTTAINFSTVNSSAGFRSKQLVNNKDTTSFEDISPQGVSDDSSTGSRVHASRPASLDSGRTSTSNSNNNASLHEVKAGAVNNQSRPQSHSSGEFSLLHDHEAWSSSGSSPIQYLKRQTRSSPVLQHKISETLESRHHKIKTGSPGSEVVTLQQFLEESNKLTSVQIKSSSQENLLDEVMKSLSVSSDFLGKDKPVSCGLARSVSGKTPGDFYDRRTTKPEFLRPGPRKTEDTYFISSAGKPTPGTQGKIKLVKESSLSRQSKDSNPYATLPRASSVISTAEGTTRRTSIHDFLTKDSRLPISVDSPPAAADSNTTAASNVDKVQESRNSKSRSREQQSS

SEQ ID NO: 25697 - protein, 1843 aa, Homo sapiens
MENEIFTPLLEQFMTSPLVTWVKTFGPLAAGNGTNLDEYVALVDGVFLNQVMLQINPKLESQRVNKKVNNDASLRMHNLSILVRQIKFYYQETLQQLIMMSLPNVLIIGKNPFSEQGTEEVKKLLLLLLGCAVQCQKKEEFIERIQGLDFDTKAAVAAHIQEVTHNQENVFDLQWMEVTDMSQEDIEPLLKNMALHLKRLIDERDEHSETIIELSEERDGLHFLPHASSSAQSPCGSPGMKRTESRQHLSVELADAKAKIRRLRQELEEKTEQLLDCKQELEQMEIELKRLQQENMNLLSDARSARMYRDELDALREKAVRVDKLESEVSRYKERLHDIEFYKARVEELKEDNQVLLETKTMLEDQLEGTRARSDKLHELEKENLQLKAKLHDMEMERDMDRKKIEELMEENMTLEMAQKQSMDESLHLGWELEQISRTSELSEAPQKSLGHEVNELTSSRLLKLEMENQSLTKTVEELRTTVDSVEGNASKILKMEKENQRLSKKVEILENEIVQEKQSLQNCQNLSKDLMKEKAQLEKTIETLRENSERQIKILEQENEHLNQTVSSLRQRSQISAEARVKDIEKENKILHESIKETSSKLSKIEFEKRQIKKELEHYKEKGERAEELENELHHLEKENELLQKKITNLKITCEKIEALEQENSELERENRKLKKTLDSFKNLTFQLESLEKENSQLDEENLELRRNVESLKCASMKMAQLQLENKELESEKEQLKKGLELLKASFKKTERLEVSYQGLDIENQRLQKTLENSNKKIQQLESELQDLEMENQTLQKNLEELKISSKRLEQLEKENKSLEQETSQLEKDKKQLEKENKRLRQQAEIKDTTLEENNVKIGNLEKENKTLSKEIGIYKESCVRLKELEKENKELVKRATIDIKTLVTLREDLVSEKLKTQQMNNDLEKLTHELEKIGLNKERLLHDEQSTDDSRYKLLESKLESTLKKSLEIKEEKIAALEARLEESTNYNQQLRQELKTVKKNYEALKQRQDEERMVQSSPPISGEDNKWERESQETTRELLKVKDRLIEVERNNATLQAEKQALKTQLKQLETQNNNLQAQILALQRQTVSLQEQNTTLQTQNAKLQVENSTLNSQSTSLMNQNAQLLIQQSSLENENESVIKEREDLKSLYDSLIKDHEKLELLHERQASEYESLISKHGTLKSAHKNLEVEHRDLEDRYNQLLKQKGQLEDLEKMLKVEQEKMLLENKNHETVAAEYKKLCGENDRLNHTYSQLLKETEVLQTDHKNLKSLLNNSKLEQTRLEAEFSKLKEQYQQLDITSTKLNNQCELLSQLKGNLEEENRHLLDQIQTLMLQNRTLLEQNMESKDLFHVEQRQYIDKLNELRRQKEKLEEKIMDQYKFYDPSPPRRRGNWITLKMRKLIKSKKDINRERQKSLTLTPTRSDSSEGFLQLPHQDSQDSSSVGSNSLEDGQTLGTKKSSTMNDLVQSMVLAGQWTGSTENLEVPDDISTGKRRKELGAMAFSTTAINFSTVNSSAGFRSKQLVNNKDTTSFEDISPQGVSDDSSTGSRVHASRPASLDSGRTSTSNSNNNASLHEVKAGAVNNQSRPQSHSSGEFSLLHDHEAWSSSGSSPIQYLKRQTRSSPVLQHKISETLESRHHKIKTGSPGSEVVTLQQFLEESNKLTSVQIKSSSQENLLDEVMKSLSVSSDFLGKDKPVSCGLARSVSGKTPGDFYDRRTTKPEFLRPGPRKTEDTYFISSAGKPTPGTQGKIKLVKESSLSRQSKDSNPYATLPRASSVISTAEGTTRRTSIHDFLTKDSRLPISVDSPPAAADSNTTAASNVDKVQESRNSKSRSREQQSS

SEQ ID NO: 25698 - protein, 1870 aa, Homo sapiens
MENEIFTPLLEQFMTSPLVTWVKTFGPLAAGNGTNLDEYVALVDGVFLNQVMLQINPKLESQRVNKKVNNDASLRMHNLSILVRQIKFYYQETLQQLIMMSLPNVLIIGKNPFSEQGTEEVKKLLLLLLGCAVQCQKKEEFIERIQGLDFDTKAAVAAHIQEVTHNQENVFDLQWMEVTDMSQEDIEPLLKNMALHLKRLIDERDEHSETIIELSEERDGLHFLPHASSSAQSPCGSPGMKRTESRQHLSVELADAKAKIRRLRQELEEKTEQLLDCKQELEQMEIELKRLQQENMNLLSDARSARMYRDELDALREKAVRVDKLESEVSRYKERLHDIEFYKARVEELKEDNQVLLETKTMLEDQLEGTRARSDKLHELEKENLQLKAKLHDMEMERDMDRKKIEELMEENMTLEMAQKQSMDESLHLGWELEQISRTSELSEAPQKSLGHEVNELTSSRLLKLEMENQSLTKTVEELRTTVDSVEGNASKILKMEKENQRLSKKVEILENEIVQEKQSLQNCQNLSKDLMKEKAQLEKTIETLRENSERQIKILEQENEHLNQTVSSLRQRSQISAEARVKDIEKENKILHESIKETSSKLSKIEFEKRQIKKELEHYKEKGERAEELENELHHLEKENELLQKKITNLKITCEKIEALEQENSELERENRKLKKTLDSFKNLTFQLESLEKENSQLDEENLELRRNVESLKCASMKMAQLQLENKELESEKEQLKKGLELLKASFKKTERLEVSYQGLDIENQRLQKTLENSNKKIQQLESELQDLEMENQTLQKNLEELKISSKRLEQLEKENKSLEQETSQLEKDKKQLEKENKRLRQQAEIKDTTLEENNVKIGNLEKENKTLSKEIGIYKESCVRLKELEKENKELVKRATIDIKTLVTLREDLVSEKLKTQQMNNDLEKLTHELEKIGLNKERLLHDEQSTDDRYKLLESKLESTLKKSLEIKEEKIAALEARLEESTNYNQQLRQELKTVKKNYEALKQRQDEERMVQSSPPISGEDNKWERESQETTRELLKVKDRLIEVERNNATLQAEKQALKTQLKQLETQNNNLQAQILALQRQTVSLQEQNTTLQTQNAKLQVENSTLNSQSTSLMNQNAQLLIQQSSLENENESVIKEREDLKSLYDSLIKDHEKLELLHERQASEYESLISKHGTLKSAHKNLEVEHRDLEDRYNQLLKQKGQLEDLEKMLKVEQEKMLLENKNHETVAAEYKKLCGENDRLNHTYSQLLKETEVLQTDHKNLKSLLNNSKLEQTRLEAEFSKLKEQYQQLDITSTKLNNQCELLSQLKGNLEEENRHLLDQIQTLMLQNRTLLEQNMESKDLFHVEQRQYIDKLNELRRQKEKLEEKIMDQYKFYDPSPPRRRGNWITLKMRKLIKSKKDINRERQKSLTLTPTRSDSSEGFLQLPHQDSQDSSSVGSNSLEDGQTLGTKKSSMVALKRLPFLRNRPKDKDKMKACYRRSMSMNDLVQSMVLAGQWTGSTENLEVPDDISTGKRRKELGAMAFSTTAINFSTVNSSAGFRSKQLVNNKDTTSFEDISPQGVSDDSSTGSRVHASRPASLDSGRTSTSNSNNNASLHEVKAGAVNNQSRPQSHSSGEFSLLHDHEAWSSSGSSPIQYLKRQTRSSPVLQHKISETLESRHHKIKTGSPGSEVVTLQQFLEESNKLTSVQIKSSSQENLLDEVMKSLSVSSDFLGKDKPVSCGLARSVSGKTPGDFYDRRTTKPEFLRPGPRKTEDTYFISSAGKPTPGTQGKIKLVKESSLSRQSKDSNPYATLPRASSVISTAEGTTRRTSIHDFLTKDSRLPISVDSPPAAADSNTTAASNVDKVQESRNSKSRSREQQSS

SEQ ID NO: 25699 - protein, 1842 aa, Homo sapiens
MENEIFTPLLEQFMTSPLVTWVKTFGPLAAGNGTNLDEYVALVDGVFLNQVMLQINPKLESQRVNKKVNNDASLRMHNLSILVRQIKFYYQETLQQLIMMSLPNVLIIGKNPFSEQGTEEVKKLLLLLLGCAVQCQKKEEFIERIQGLDFDTKAAVAAHIQEVTHNQENVFDLQWMEVTDMSQEDIEPLLKNMALHLKRLIDERDEHSETIIELSEERDGLHFLPHASSSAQSPCGSPGMKRTESRQHLSVELADAKAKIRRLRQELEEKTEQLLDCKQELEQMEIELKRLQQENMNLLSDARSARMYRDELDALREKAVRVDKLESEVSRYKERLHDIEFYKARVEELKEDNQVLLETKTMLEDQLEGTRARSDKLHELEKENLQLKAKLHDMEMERDMDRKKIEELMEENMTLEMAQKQSMDESLHLGWELEQISRTSELSEAPQKSLGHEVNELTSSRLLKLEMENQSLTKTVEELRTTVDSVEGNASKILKMEKENQRLSKKVEILENEIVQEKQSLQNCQNLSKDLMKEKAQLEKTIETLRENSERQIKILEQENEHLNQTVSSLRQRSQISAEARVKDIEKENKILHESIKETSSKLSKIEFEKRQIKKELEHYKEKGERAEELENELHHLEKENELLQKKITNLKITCEKIEALEQENSELERENRKLKKTLDSFKNLTFQLESLEKENSQLDEENLELRRNVESLKCASMKMAQLQLENKELESEKEQLKKGLELLKASFKKTERLEVSYQGLDIENQRLQKTLENSNKKIQQLESELQDLEMENQTLQKNLEELKISSKRLEQLEKENKSLEQETSQLEKDKKQLEKENKRLRQQAEIKDTTLEENNVKIGNLEKENKTLSKEIGIYKESCVRLKELEKENKELVKRATIDIKTLVTLREDLVSEKLKTQQMNNDLEKLTHELEKIGLNKERLLHDEQSTDDRYKLLESKLESTLKKSLEIKEEKIAALEARLEESTNYNQQLRQELKTVKKNYEALKQRQDEERMVQSSPPISGEDNKWERESQETTRELLKVKDRLIEVERNNATLQAEKQALKTQLKQLETQNNNLQAQILALQRQTVSLQEQNTTLQTQNAKLQVENSTLNSQSTSLMNQNAQLLIQQSSLENENESVIKEREDLKSLYDSLIKDHEKLELLHERQASEYESLISKHGTLKSAHKNLEVEHRDLEDRYNQLLKQKGQLEDLEKMLKVEQEKMLLENKNHETVAAEYKKLCGENDRLNHTYSQLLKETEVLQTDHKNLKSLLNNSKLEQTRLEAEFSKLKEQYQQLDITSTKLNNQCELLSQLKGNLEEENRHLLDQIQTLMLQNRTLLEQNMESKDLFHVEQRQYIDKLNELRRQKEKLEEKIMDQYKFYDPSPPRRRGNWITLKMRKLIKSKKDINRERQKSLTLTPTRSDSSEGFLQLPHQDSQDSSSVGSNSLEDGQTLGTKKSSTMNDLVQSMVLAGQWTGSTENLEVPDDISTGKRRKELGAMAFSTTAINFSTVNSSAGFRSKQLVNNKDTTSFEDISPQGVSDDSSTGSRVHASRPASLDSGRTSTSNSNNNASLHEVKAGAVNNQSRPQSHSSGEFSLLHDHEAWSSSGSSPIQYLKRQTRSSPVLQHKISETLESRHHKIKTGSPGSEVVTLQQFLEESNKLTSVQIKSSSQENLLDEVMKSLSVSSDFLGKDKPVSCGLARSVSGKTPGDFYDRRTTKPEFLRPGPRKTEDTYFISSAGKPTPGTQGKIKLVKESSLSRQSKDSNPYATLPRASSVISTAEGTTRRTSIHDFLTKDSRLPISVDSPPAAADSNTTAASNVDKVQESRNSKSRSREQQSS

SEQ ID NO: 25700 - protein, 1796 aa, Homo sapiens
MENEIFTPLLEQFMTSPLVTWVKTFGPLAAGNGTNLDEYVALVDGVFLNQVMLQINPKLESQRVNKKVNNDASLRMHNLSILVRQIKFYYQETLQQLIMMSLPNVLIIGKNPFSEQGTEEVKKLLLLLLGCAVQCQKKEEFIERIQGLDFDTKAAVAAHIQEVTHNQENVFDLQWMEVTDMSQEDIEPLLKNMALHLKRLIDERDEHSETIIELSEERDGLHFLPHASSSAQSPCGSPGMKRTESRQHLSVELADAKAKIRRLRQELEEKTEQLLDCKQELEQMEIELKRLQQENMNLLSDARSARMYRDELDALREKAVRVDKLESEVSRYKERLHDIEFYKARVEELKEDNQVLLETKTMLEDQLEGTRARSDKLHELEKENLQLKAKLHDMEMERDMDRKKIEELMEENMTLEMAQKQSMDESLHLGWELEQISRTSELSEAPQKSLGHEVNELTSSRLLKLEMENQSLTKTVEELRTTVDSVEGNASKILKMEKENQRLSKKVEILENEIVQEKQSLQNCQNLSKDLMKEKAQLEKTIETLRENSERQIKILEQENEHLNQTVSSLRQRSQISAEARVKDIEKENKILHESIKETSSKLSKIEFEKRQIKKELEHYKEKGERAEELENELHHLEKENELLQKKITNLKITCEKIEALEQENSELERENRKLKKTLDSFKNLTFQLESLEKENSQLDEENLELRRNVESLKCASMKMAQLQLENKELESEKEQLKKGLELLKASFKKTERLEVSYQGLDIENQRLQKTLENSNKKIQQLESELQDLEMENQTLQKNLEELKISSKRLEQLEKENKSLEQETSQLEKDKKQLEKENKRLRQQAEIKDTTLEENNVKIGNLEKENKTLSKEIGIYKESCVRLKELEKENKELVKRATIDIKTLVTLREDLVSEKLKTQQMNNDLEKLTHELEKIGLNKERLLHDEQSTDDRYKLLESKLESTLKKSLEIKEEKIAALEARLEESTNYNQQLRQELKTVKKNYEALKQRQDEERMVQSSPPISGEDNKWERESQETTRELLKVKDRLIEVERNNATLQAEKQALKTQLKQLETQNNNLQAQILALQRQTVSLQEQNTTLQTQNAKLQVENSTLNSQSTSLMNQNAQLLIQQSSLENENESVIKEREDLKSLYDSLIKDHEKLELLHERQASEYESLISKHGTLKSAHKNLEVEHRDLEDRYNQLLKQKGQLEDLEKMLKVEQEKMLLENKNHETVAAEYKKLCGENDRLNHTYSQLLKETEVLQTDHKNLKSLLNNSKLEQTRLEAEFSKLKEQYQQLDITSTKLNNQCELLSQLKGNLEEENRHLLDQIQTLMLQNRTLLEQNMESKDLFHVEQRQYIDKLNELRRQKEKLEEKIMDQYKFYDPSPPRRRGNWITLKMRKLIKSKKDINRERQKSLTLTPTRSDSSEGFLQLPHQDSQDSSSVGSNSLEDGQTLGTKKSSMVALKRLPFLRNRPKDKDKMKACYRRSMSMNDLVQSMVLAGQWTGSTENLEVPDDISTGKRRKELGAMAFSTTAINFSTVNSSAGFRSKQLVNNKDTTSFEDISPQGVSDDSSTGSRVHASRPASLDSGRTSTSNSNNNASLHEVKAGAVNNQSRPQSHSSGEFSLLHDHEAWSSSGSSPIQYLKRQTRSSPVLQHKISETLESRHHKIKTGSPGSEVVTLQQFLEESNKLTSVQIKSSSQENLLDEVMKSLSVSSDFLGKDKPVSCGLASVISTAEGTTRRTSIHDFLTKDSRLPISVDSPPAAADSNTTAASNVDKVQESRNSKSRSREQQSS

SEQ ID NO: 25701 - protein, 543 aa, Homo sapiens
MPNPKNSKGGRKNKRANSSGDEQENGAGALAAAGAAGAAAGGALAAAAGCGAAAAGAPGAGGAAGAGGAGTGAANAAAAAGAAAAGDAKNEAPCATPLICSFGRPVDLEKDDYQKVVCNNEHCPCSTWMHLQCFYEWESSILVQFNCIGRARSWNEKQCRQNMWTKKGYDLAFRFCSCRCGQGHLKKDTDWYQVKRMQDEKKKKSGSEKNTGRPPGEAAEEAKKCRPPNKPQKGPSHDLPRRHSMDRQNSQEKAVGAAAYGARSPGGSPGQSPPTGYSILSPAHFSGPRSSRYLGEFLKNAIHLEPHKKAMAGGHVFRNAHFDYSPAGLAVHRGGHFDTPVQFLRRLDLSELLTHIPRHKLNTFHVRMEDDAQVGQGEDLRKFILAALSASHRNVVNCALCHRALPVFEQFPLVDGTLFLSPSRHDEIEYDVPCHLQGRLMHLYAVCVDCLEGVHKIICIKCKSRWDGSWHQLGTMYTYDILAASPCCQARLNCKHCGKPVIDVRIGMQYFSEYSNVQQCPHCGNLDYHFVKPFSSFKVLEAY

SEQ ID NO: 25702 - protein, 121 aa, Homo sapiens; identical to SEQ ID NO: 23187

SEQ ID NO: 25703 - protein, 184 aa, Homo sapiens
MKALGAVLLALLLCGRPGRGQTQQEEEEEDEDHGPDDYDEEDEDEVEEEETNRLPGGRSRVLLRCYTCKSLPRDERCNLTQNCSHGQTCTTLIAHGNTESGLLTTHSTWCTDSCQPITKTVEGTQVTMTCCQSSLCNVPPWQSSRVQDPTGKGAGGPRGSSETVGAALLLNLLAGLGAMGARRP

SEQ ID NO: 25704 - protein, 133 aa, Homo sapiens
MMLNSDTMELDLPPTHSETESGFSDCGGGAGPDGAGPGGPGGGQARGPEPGEPGRKDLQHLSREERRRRRRATAKYRTAHATRERIRVEAFNLAFAELRKLLPTLPPDKKLSKIEILRLAICYISYLNHVLDV

SEQ ID NO: 25705 - protein, 261 aa, Homo sapiens
MAAACRSVKGLVAVITGGASGLGLATAERLVGQGASAVLLDLPNSGGEAQAKKLGNNCVFAPADVTSEKDVQTALALAKGKFGRVDVAVNCAGIAVASKTYNLKKGQTHTLEDFQRVLDVNLMGTFNVIRLVAGEMGQNEPDQGGQRGVIINTASVAAFEGQVGQAAYSASKGGIVGMTLPIARDLAPIGIRVMTIAPGLFGTPLLTSLPEKVCNFLASQVPFPSRLGDPAEYAHLVQAIIENPFLNGEVIRLDGAIRMQP

SEQ ID NO: 25706 - protein, 252 aa, Homo sapiens
MAAACRSVKGLVAVITGGASGLGLATAERLVGQGASAVLLDLPNSGGEAQAKKLGNNCVFAPADVTSEKDVQTALALAKGKFGRVDVAVNCAGIAVASKTYNLKKGQTHTLEDFQRVLDVNLMGTFNVIRLVAGEMGQNEPDQGGQRGVIINTASVAAFEGQVGQAAYSASKGGIVGMTLPIARDLAPIGLFGTPLLTSLPEKVCNFLASQVPFPSRLGDPAEYAHLVQAIIENPFLNGEVIRLDGAIRMQP

SEQ ID NO: 25707 - protein, 2035 aa, Homo sapiens
MASAVSPANLPAVLLQPRWKRVVGWSGPVPRPRHGHRAVAIKELIVVFGGGNEGIVDELHVYNTATNQWFIPAVRGDIPPGCAAYGFVCDGTRLLVFGGMVEYGKYSNDLYELQASRWEWKRLKAKTPKNGPPPCPRLGHSFSLVGNKCYLFGGLANDSEDPKNNIPRYLNDLYILELRPGSGVVAWDIPITYGVLPPPRESHTAVVYTEKDNKKSKLVIYGGMSGCRLGDLWTLDIDTLTWNKPSLSGVAPLPRSLHSATTIGNKMYVFGGWVPLVMDDVKVATHEKEWKCTNTLACLNLDTMAWETILMDTLEDNIPRARAGHCAVAINTRLYIWSGRDGYRKAWNNQVCCKDLWYLETEKPPPPARVQLVRANTNSLEVSWGAVATADSYLLQLQKYDIPATAATATSPTPNPVPSVPANPPKSPAPAAAAPAVQPLTQVGITLLPQAAPAPPTTTTIQVLPTVPGSSISVPTAARTQGVPAVLKVTGPQATTGTPLVTMRPASQAGKAPVTVTSLPAGVRMVVPTQSAQGTVIGSSPQMSGMAALAAAAAATQKIPPSSAPTVLSVPAGTTIVKTMAVTPGTTTLPATVKVASSPVMVSNPATRMLKTAAAQVGTSVSSATNTSTRPIITVHKSGTVTVAQQAQVVTTVVGGVTKTITLVKSPISVPGGSALISNLGKVMSVVQTKPVQTSAVTGQASTGPVTQIIQTKGPLPAGTILKLVTSADGKPTTIITTTQASGAGTKPTILGISSVSPSTTKPGTTTIIKTIPMSAIITQAGATGVTSSPGIKSPITIITTKVMTSGTGAPAKIITAVPKIATGHGQQGVTQVVLKGAPGQPGTILRTVPMGGVRLVTPVTVSAVKPAVTTLVVKGTTGVTTLGTVTGTVSTSLAGAGGHSTSASLATPITTLGTIATLSSQVINPTAITVSAAQTTLTAAGGLTTPTITMQPVSQPTQVTLITAPSGVEAQPVHDLPVSILASPTTEQPTATVTIADSGQGDVQPGTVTLVCSNPPCETHETGTTNTATTTVVANLGGHPQPTQVQFVCDRQEAAASLVTSTVGQQNGSVVRVCSNPPCETHETGTTNTATTATSNMAGQHGCSNPPCETHETGTTNTATTAMSSVGANHQRDARRACAAGTPAVIRISVATGALEAAQGSKSQCQTRQTSATSTTMTVMATGAPCSAGPLLGPSMAREPGGRSPAFVQLAPLSSKVRLSSPSIKDLPAGRHSHAVSTAAMTRSSVGAGEPRMAPVCESLQGGSPSTTVTVTALEALLCPSATVTQVCSNPPCETHETGTTNTATTSNAGSAQRVCSNPPCETHETGTTHTATTATSNGGTGQPEGGQQPPAGRPCETHQTTSTGTTMSVSVGALLPDATSSHRTVESGLEVAAAPSVTPQAGTALLAPFPTQRVCSNPPCETHETGTTHTATTVTSNMSSNQDPPPAASDQGEVESTQGDSVNITSSSAITTTVSSTLTRAVTTVTQSTPVPGPSVPPPEELQVSPGPRQQLPPRQLLQSASTALMGESAEVLSASQTPELPAAVDLSSTGEPSSGQESAGSAVVATVVVQPPPPTQSEVDQLSLPQELMAEAQAGTTTLMVTGLTPEELAVTAAAEAAAQAAATEEAQALAIQAVLQAAQQAVMGTGEPMDTSEAAATVTQAELGHLSAEGQEGQATTIPIVLTQQELAALVQQQQLQEAQAQQQHHHLPTEALAPADSLNDPAIESNCLNELAGTVPSTVALLPSTATESLAPSNTFVAPQPVVVASPAKLQAAATLTEVANGIESLGVKPDLPPPPSKAPMKKENQWFDVGVIKGTNVMVTHYFLPPDDAVPSDDDLGTVPDYNQLKKQELQPGTAYKFRVAGINACGRGPFSEISAFKTCLPGFPGAPCAIKISKSPDGAHLTWEPPSVTSGKIIEYSVYLAIQSSQAGGELKSSTPAQLAFMRVYCGPSPSCLVQSSSLSNAHIDYTTKPAIIFRIAARNEKGYGPATQVRWLQETSKDSSGTKPANKRPMSSPEMKSAPKKSKADGQ

SEQ ID NO: 25708 - protein, 1966 aa, Homo sapiens
MASAVSPANLPAVLLQPRWKRVVGWSGPVPRPRHGHRAVAIKELIVVFGGGNEGIVDELHVYNTATNQWFIPAVRGDIPPGCAAYGFVCDGTRLLVFGGMVEYGKYSNDLYELQASRWEWKRLKAKTPKNGPPPCPRLGHSFSLVGNKCYLFGGLANDSEDPKNNIPRYLNDLYILELRPGSGVVAWDIPITYGVLPPPRESHTAVVYTEKDNKKSKLVIYGGMSGCRLGDLWTLDIDTLTWNKPSLSGVAPLPRSLHSATTIGNKMYVFGGWVPLVMDDVKVATHEKEWKCTNTLACLNLDTMAWETILMDTLEDNIPRARAGHCAVAINTRLYIWSGRDGYRKAWNNQVCCKDLWYLETEKPPPPARVQLVRANTNSLEAAPAPPTTTTIQVLPTVPGSSISVPTAARTQGVPAVLKVTGPQATTGTPLVTMRPASQAGKAPVTVTSLPAGVRMVVPTQSAQGTVIGSSPQMSGMAALAAAAAATQKIPPSSAPTVLSVPAGTTIVKTMAVTPGTTTLPATVKVASSPVMVSNPATRMLKTAAAQVGTSVSSATNTSTRPIITVHKSGTVTVAQQAQVVTTVVGGVTKTITLVKSPISVPGGSALISNLGKVMSVVQTKPVQTSAVTGQASTGPVTQIIQTKGPLPAGTILKLVTSADGKPTTIITTTQASGAGTKPTILGISSVSPSTTKPGTTTIIKTIPMSAIITQAGATGVTSSPGIKSPITIITTKVMTSGTGAPAKIITAVPKIATGHGQQGVTQVVLKGAPGQPGTILRTVPMGGVRLVTPVTVSAVKPAVTTLVVKGTTGVTTLGTVTGTVSTSLAGAGGHSTSASLATPITTLGTIATLSSQVINPTAITVSAAQTTLTAAGGLTTPTITMQPVSQPTQVTLITAPSGVEAQPVHDLPVSILASPTTEQPTATVTIADSGQGDVQPGTVTLVCSNPPCETHETGTTNTATTTVVANLGGHPQPTQVQFVCDRQEAAASLVTSTVGQQNGSVVRVCSNPPCETHETGTTNTATTATSNMAGQHGCSNPPCETHETGTTNTATTAMSSVGANHQRDARRACAAGTPAVIRISVATGALEAAQGSKSQCQTRQTSATSTTMTVMATGAPCSAGPLLGPSMAREPGGRSPAFVQLAPLSSKVRLSSPSIKDLPAGRHSHAVSTAAMTRSSVGAGEPRMAPVCESLQGGSPSTTVTVTALEALLCPSATVTQVCSNPPCETHETGTTNTATTSNAGSAQRVCSNPPCETHETGTTHTATTATSNGGTGQPEGGQQPPAGRPCETHQTTSTGTTMSVSVGALLPDATSSHRTVESGLEVAAAPSVTPQAGTALLAPFPTQRVCSNPPCETHETGTTHTATTVTSNMSSNQDPPPAASDQGEVESTQGDSVNITSSSAITTTVSSTLTRAVTTVTQSTPVPGPSVPPPEELQVSPGPRQQLPPRQLLQSASTALMGESAEVLSASQTPELPAAVDLSSTGEPSSGQESAGSAVVATVVVQPPPPTQSEVDQLSLPQELMAEAQAGTTTLMVTGLTPEELAVTAAAEAAAQAAATEEAQALAIQAVLQAAQQAVMGTGEPMDTSEAAATVTQAELGHLSAEGQEGQATTIPIVLTQQELAALVQQQQLQEAQAQQQHHHLPTEALAPADSLNDPAIESNCLNELAGTVPSTVALLPSTATESLAPSNTFVAPQPVVVASPAKLQAAATLTEVANGIESLGVKPDLPPPPSKAPMKKENQWFDVGVIKGTNVMVTHYFLPPDDAVPSDDDLGTVPDYNQLKKQELQPGTAYKFRVAGINACGRGPFSEISAFKTCLPGFPGAPCAIKISKSPDGAHLTWEPPSVTSGKIIEYSVYLAIQSSQAGGELKSSTPAQLAFMRVYCGPSPSCLVQSSSLSNAHIDYTTKPAIIFRIAARNEKGYGPATQVRWLQETSKDSSGTKPANKRPMSSPEMKSAPKKSKADGQ

SEQ ID NO: 25709 - protein, 428 aa, Homo sapiens
MASAVSPANLPAVLLQPRWKRVVGWSGPVPRPRHGHRAVAIKELIVVFGGGNEGIVDELHVYNTATNQWFIPAVRGDIPPGCAAYGFVCDGTRLLVFGGMVEYGKYSNDLYELQASRWEWKRLKAKTPKNGPPPCPRLGHSFSLVGNKCYLFGGLANDSEDPKNNIPRYLNDLYILELRPGSGVVAWDIPITYGVLPPPRESHTAVVYTEKDNKKSKLVIYGGMSGCRLGDLWTLDIDTLTWNKPSLSGVAPLPRSLHSATTIGNKMYVFGGWVPLVMDDVKVATHEKEWKCTNTLACLNLDTMAWETILMDTLEDNIPRARAGHCAVAINTRLYIWSGRDGYRKAWNNQVCCKDLWYLETEKPPPPARVQLVRANTNSLEVSWGAVATADSYLLQLQKYDIPATAATATSPTPNPVPSVPANPPKSL

SEQ ID NO: 25710 - protein, 2079 aa, Homo sapiens
MASAVSPANLPAVLLQPRWKRVVGWSGPVPRPRHGHRAVAIKELIVVFGGGNEGIVDELHVYNTATNQWFIPAVRGDIPPGCAAYGFVCDGTRLLVFGGMVEYGKYSNDLYELQASRWEWKRLKAKTPKNGPPPCPRLGHSFSLVGNKCYLFGGLANDSEDPKNNIPRYLNDLYILELRPGSGVVAWDIPITYGVLPPPRESHTAVVYTEKDNKKSKLVIYGGMSGCRLGDLWTLDIDTLTWNKPSLSGVAPLPRSLHSATTIGNKMYVFGGWVPLVMDDVKVATHEKEWKCTNTLACLNLDTMAWETILMDTLEDNIPRARAGHCAVAINTRLYIWSGRDGYRKAWNNQVCCKDLWYLETEKPPPPARVQLVRANTNSLEVSWGAVATADSYLLQLQKYDIPATAATATSPTPNPVPSVPANPPKSPAPAAAAPAVQPLTQVGITLLPQAAPAPPTTTTIQVLPTVPGSSISVPTAARTQGVPAVLKVTGPQATTGTPLVTMRPASQAGKAPVTVTSLPAGVRMVVPTQSAQGTVIGSSPQMSGMAALAAAAAATQKIPPSSAPTVLSVPAGTTIVKTMAVTPGTTTLPATVKVASSPVMVSNPATRMLKTAAAQVGTSVSSATNTSTRPIITVHKSGTVTVAQQAQVVTTVVGGVTKTITLVKSPISVPGGSALISNLGKVMSVVQTKPVQTSAVTGQASTGPVTQIIQTKGPLPAGTILKLVTSADGKPTTIITTTQASGAGTKPTILGISSVSPSTTKPGTTTIIKTIPMSAIITQAGATGVTSSPGIKSPITIITTKVMTSGTGAPAKIITAVPKIATGHGQQGVTQVVLKGAPGQPGTILRTVPMGGVRLVTPVTVSAVKPAVTTLVVKGTTGVTTLGTVTGTVSTSLAGAGGHSTSASLATPITTLGTIATLSSQVINPTAITVSAAQTTLTAAGGLTTPTITMQPVSQPTQVTLITAPSGVEAQPVHDLPVSILASPTTEQPTATVTIADSGQGDVQPGTVTLVCSNPPCETHETGTTNTATTTVVANLGGHPQPTQVQFVCDRQEAAASLVTSTVGQQNGSVVRVCSNPPCETHETGTTNTATTATSNMAGQHGCSNPPCETHETGTTNTATTAMSSVGANHQRDARRACAAGTPAVIRISVATGALEAAQGSKSQCQTRQTSATSTTMTVMATGAPCSAGPLLGPSMAREPGGRSPAFVQLAPLSSKVRLSSPSIKDLPAGRHSHAVSTAAMTRSSVGAGEPRMAPVCESLQGGSPSTTVTVTALEALLCPSATVTQVCSNPPCETHETGTTNTATTSNAGSAQRVCSNPPCETHETGTTHTATTATSNGGTGQPEGGQQPPAGRPCETHQTTSTGTTMSVSVGALLPDATSSHRTVESGLEVAAAPSVTPQAGTALLAPFPTQRVCSNPPCETHETGTTHTATTVTSNMSSNQDPPPAASDQGEVESTQGDSVNITSSSAITTTVSSTLTRAVTTVTQSTPVPGPSVPKISSMTETAPRALTTEVPIPAKITVTIANTETSDMPFSAVDILQPPEELQVSPGPRQQLPPRQLLQSASTALMGESAEVLSASQTPELPAAVDLSSTGEPSSGQESAGSAVVATVVVQPPPPTQSEVDQLSLPQELMAEAQAGTTTLMVTGLTPEELAVTAAAEAAAQAAATEEAQALAIQAVLQAAQQAVMGTGEPMDTSEAAATVTQAELGHLSAEGQEGQATTIPIVLTQQELAALVQQQQLQEAQAQQQHHHLPTEALAPADSLNDPAIESNCLNELAGTVPSTVALLPSTATESLAPSNTFVAPQPVVVASPAKLQAAATLTEVANGIESLGVKPDLPPPPSKAPMKKENQWFDVGVIKGTNVMVTHYFLPPDDAVPSDDDLGTVPDYNQLKKQELQPGTAYKFRVAGINACGRGPFSEISAFKTCLPGFPGAPCAIKISKSPDGAHLTWEPPSVTSGKIIEYSVYLAIQSSQAGGELKSSTPAQLAFMRVYCGPSPSCLVQSSSLSNAHIDYTTKPAIIFRIAARNEKGYGPATQVRWLQETSKDSSGTKPANKRPMSSPEMKSAPKKSKADGQ

SEQ ID NO: 25711 - protein, 135 aa, Homo sapiens
MMLSPDQAADSDHPSSAHSDPESLGGTDTKVLGSVSDLEPVEEAEGDGKGGSRAALYPHPQQLSREEKRRRRRATAKYRSAHATRERIRVEAFNLAFAELRKLLPTLPPDKKLSKIEILRLAICYISYLNHVLDV

SEQ ID NO: 25712 - protein, 1606 aa, Homo sapiens
MLLHLCSVKNLYQNRFLGLAAMASPSRNSQSRRRCKEPLRYSYNPDQFHNMDLRGGPHDGVTIPRSTSDTDLVTSDSRSTLMVSSSYYSIGHSQDLVIHWDIKEEVDAGDWIGMYLIDEVLSENFLDYKNRGVNGSHRGQIIWKIDASSYFVEPETKICFKYYHGVSGALRATTPSVTVKNSAAPIFKSIGADETVQGQGSRRLISFSLSDFQAMGLKKGMFFNPDPYLKISIQPGKHSIFPALPHHGQERRSKIIGNTVNPIWQAEQFSFVSLPTDVLEIEVKDKFAKSRPIIKRFLGKLSMPVQRLLERHAIGDRVVSYTLGRRLPTDHVSGQLQFRFEITSSIHPDDEEISLSTEPESAQIQDSPMNNLMESGSGEPRSEAPESSESWKPEQLGEGSVPDGPGNQSIELSRPAEEAAVITEAGDQGMVSVGPEGAGELLAQVQKDIQPAPSAEELAEQLDLGEEASALLLEDGEAPASTKEEPLEEEATTQSRAGREEEEKEQEEEGDVSTLEQGEGRLQLRASVKRKSRPCSLPVSELETVIASACGDPETPRTHYIRIHTLLHSMPSAQGGSAAEEEDGAEEESTLKDSSEKDGLSEVDTVAADPSALEEDREEPEGATPGTAHPGHSGGHFPSLANGAAQDGDTHPSTGSESDSSPRQGGDHSCEGCDASCCSPSCYSSSCYSTSCYSSSCYSASCYSPSCYNGNRFASHTRFSSVDSAKISESTVFSSQDDEEEENSAFESVPDSMQSPELDPESTNGAGPWQDELAAPSGHVERSPEGLESPVAGPSNRREGECPILHNSQPVSQLPSLRPEHHHYPTIDEPLPPNWEARIDSHGRVFYVDHVNRTTTWQRPTAAATPDGMRRSGSIQQMEQLNRRYQNIQRTIATERSEEDSGSQSCEQAPAGGGGGGGSDSEAESSQSSLDLRREGSLSPVNSQKITLLLQSPAVKFITNPEFFTVLHANYSAYRVFTSSTCLKHMILKVRRDARNFERYQHNRDLVNFINMFADTRLELPRGWEIKTDQQGKSFFVDHNSRATTFIDPRIPLQNGRLPNHLTHRQHLQRLRSYSAGEASEVSRNRGASLLARPGHSLVAAIRSQHQHESLPLAYNDKIVAFLRQPNIFEMLQERQPSLARNHTLREKIHYIRTEGNHGLEKLSCDADLVILLSLFEEEIMSYVPLQAAFHPGYSFSPRCSPCSSPQNSPGLQRASARAPSPYRRDFEAKLRNFYRKLEAKGFGQGPGKIKLIIRRDHLLEGTFNQVMAYSRKELQRNKLYVTFVGEEGLDYSGPSREFFFLLSQELFNPYYGLFEYSANDTYTVQISPMSAFVENHLEWFRFSGRILGLALIHQYLLDAFFTRPFYKALLRLPCDLSDLEYLDEEFHQSLQWMKDNNITDILDLTFTVNEEVFGQVTERELKSGGANTQVTEKNKKEYIERMVKWRVERGVVQQTEALVRGFYEVVDSRLVSVFDARELELVIAGTAEIDLNDWRNNTEYRGGYHDGHLVIRWFWAAVERFNNEQRLRLLQFVTGTSSVPYEGFAALRGSNGLRRFCIEKWGKITSLPRAHTCFNRLDLPPYPSYSMLYEKLLTAVEETSTFGLE

SEQ ID NO: 25713 - protein, 1572 aa, Homo sapiens
MLLHLCSVKNLYQNRFLGLAAMASPSRNSQSRRRCKEPLRYSYNPDQFHNMDLRGGPHDGVTIPRSTSDTDLVTSDSRSTLMVSSSYYSIGHSQDLVIHWDIKEEVDAGDWIGMYLIDEVLSENFLDYKNRGVNGSHRGQIIWKIDASSYFVEPETKICFKYYHGVSGALRATTPSVTVKNSAAPIFKSIGADETVQGQGSRRLISFSLSDFQAMGLKKGMFFNPDPYLKISIQPGKHSIFPALPHHGQERRSKIIGNTVNPIWQAEQFSFVSLPTDVLEIEVKDKFAKSRPIIKRFLGKLSMPVQRLLERHAIGDRVVSYTLGRRLPTDHVSGQLQFRFEITSSIHPDDEEISLSTEPESAQIQDSPMNNLMESGSGEPRSEAPESSESWKPEQLGEGSVPDGPGNQSIELSRPAEEAAVITEAGDQGMVSVGPEGAGELLAQVQKDIQPAPSAEELAEQLDLGEEASALLLEDGEAPASTKEEPLEEEATTQSRAGREEEEKEQEEEGDVSTLEQGEGRLQLRASVKRKSRPCSLPVSELETVIASACGDPETPRTHYIRIHTLLHSMPSAQGGSAAEEEDGAEEESTLKDSSEKDGLSEVDTVAADPSALEEDREEPEGATPGTAHPGHSGGHFPSLANGAAQDGDTHPSTGSESDSSPRQGGDHSCEGCDASCCSPSCYSSSCYSTSCYSSSCYSASCYSPSCYNGNRFASHTRFSSVDSAKISESTVFSSQDDEEEENSAFESVPDSMQSPELDPESTNGAGPWQDELAAPSGHVERSPEGLESPVAGPSNRREDWEARIDSHGRVFYVDHVNRTTTWQRPTAAATPDGMRRSGSIQQMEQLNRRYQNIQRTIATERSEEDSGSQSCEQAPAGGGGGGGSDSEAESSQSSLDLRREGSLSPVNSQKITLLLQSPAVKFITNPEFFTVLHANYSAYRVFTSSTCLKHMILKVRRDARNFERYQHNRDLVNFINMFADTRLELPRGWEIKTDQQGKSFFVDHNSRATTFIDPRIPLQNGRLPNHLTHRQHLQRLRSYSAGEASEVSRNRGASLLARPGHSLVAAIRSQHQHESLPLAYNDKIVAFLRQPNIFEMLQERQPSLARNHTLREKIHYIRTEGNHGLEKLSCDADLVILLSLFEEEIMSYVPLQAAFHPGYSFSPRCSPCSSPQNSPGLQRASARAPSPYRRDFEAKLRNFYRKLEAKGFGQGPGKIKLIIRRDHLLEGTFNQVMAYSRKELQRNKLYVTFVGEEGLDYSGPSREFFFLLSQELFNPYYGLFEYSANDTYTVQISPMSAFVENHLEWFRFSGRILGLALIHQYLLDAFFTRPFYKALLRLPCDLSDLEYLDEEFHQSLQWMKDNNITDILDLTFTVNEEVFGQVTERELKSGGANTQVTEKNKKEYIERMVKWRVERGVVQQTEALVRGFYEVVDSRLVSVFDARELELVIAGTAEIDLNDWRNNTEYRGGYHDGHLVIRWFWAAVERFNNEQRLRLLQFVTGTSSVPYEGFAALRGSNGLRRFCIEKWGKITSLPRAHTCFNRLDLPPYPSYSMLYEKLLTAVEETSTFGLE

SEQ ID NO: 25714 - protein, 1381 aa, Homo sapiens
MASPRASRWPPPLLLLLLPLLLLPPAAPGTRDPPPSPARRALSLAPLAGAGLELQLERRPEREPPPTPPRERRGPATPGPSYRAPEPGAATQRGPSGRAPRGGSADAAWKHWPESNTEAHVENITFYQNQEDFSTVSSKEGVMVQTSGKSHAASDAPENLTLLAETADARGRSGSSSRTNFTILPVGYSLEIATALTSQSGNLASESLHLPSSSSEFDERIAAFQTKSGTASEMGTERAMGLSEEWTVHSQEATTSAWSPSFLPALEMGELTTPSRKRNSSGPDLSWLHFYRTAASSPLLDLSSSSESTEKLNNSTGLQSSSVSQTKTMHVATVFTDGGPRTLRSLTVSLGPVSKTEGFPKDSRIATTSSSVLLSPSAVESRRNSRVTGNPGDEEFIEPSTENEFGLTSLRWQNDSPTFGEHQLASSSEVQNGSPMSQTETVSRSVAPMRGGEITAHWLLTNSTTSADVTGSSASYPEGVNASVLTQFSDSTVQSGGSHTALGDRSYSESSSTSSSESLNSSAPRGERSIAGISYGQVRGTAIEQRTSSDHTDHTYLSSTFTKGERALLSITDNSSSSDIVESSTSYIKISNSSHSEYSSFFHAQTERSNISSYDGEYAQPSTESPVLHTSNLPSYTPTINMPNTSVVLDTDAEFVSDSSSSSSSSSSSSSSGPPLPLPSVSQSHHLFSSILPSTRASVHLLKSTSDASTPWSSSPSPLPVSLTTSTSAPLSVSQTTLPQSSSTPVLPRARETPVTSFQTSTMTSFMTMLHSSQTADLKSQSTPHQEKVITESKSPSLVSLPTESTKAVTTNSPLPPSLTESSTEQTLPATSTNLAQMSPTFTTTILKTSQPLMTTPGTLSSTASLVTGPIAVQTTAGKQLSLTHPEILVPQISTEGGISTERNRVIVDATTGLIPLTSVPTSAKEMTTKLGVTAEYSPASRSLGTSPSPQTTVVSTAEDLAPKSATFAVQSSTQSPTTVSSSASVNSCAVNPCLHNGECVADNTSRGYHCRCPPSWQGDDCSVDVNECLSNPCPSTAMCNNTQGSFICKCPVGYQLEKGICNLVRTFVTEFKLKRTFLNTTVEKHSDLQEVENEITKTLNMCFSALPSYIRSTVHASRESNAVVISLQTTFSLASNVTLFDLADRMQKCVNSCKSSAEVCQLLGSQRRIFRAGSLCKRKSPECDKDTSICTDLDGVALCQCKSGYFQFNKMDHSCRACEDGYRLENETCMSCPFGLGGLNCGNPYQLITVVIAAAGGGLLLILGIALIVTCCRKNKNDISKLIFKSGDFQMSPYAEYPKNPRSQEWGREAIEMHENGSTKNLLQMTDVYYSPTSVRNPELERNGLYPAYTGLPGSRHSCIFPGQYNPSFISDESRRRDYF

SEQ ID NO: 25715 - protein, 1012 aa, Homo sapiens
MASPRASRWPPPLLLLLLPLLLLPPAAPGTRDPPPSPARRALSLAPLAGAGLELQLERRPEREPPPTPPRERRGPATPGPSYRAPEPGAATQRGPSGRAPRGGSADAAWKHWPESNTEAHVENITFYQNQEDFSTVSSKEGVMVQTSGKSHAASDAPENLTLLAETADARGRSGSSSRTNFTILPVGYSLEIATALTSQSGNLASESLHLPSSSSEFDERIAAFQTKSGTASEMGTERAMGLSEEWTVHSQEATTSAWSPSFLPALEMGELTTPSRKRNSSGPDLSWLHFYRTAASSPLLDLSSSSESTEKLNNSTGLQSSSVSQTKTMHVATVFTDGGPRTLRSLTVSLGPVSKTEGFPKDSRIATTSSSVLLSPSAVESRRNSRVTGNPGDEEFIEPSTENEFGLTSLRWQNDSPTFGEHQLASSSEVQNGSPMSQTETVSRSVAPMRGGEITAHWLLTNSTTSADVTGSSASYPEGVNASVLTQFSDSTVQSGGSHTALGDRSYSESSSTSSSESLNSSAPRGERSIAGISYGQVRGTAIEQRTSSDHTDHTYLSSTFTKGERALLSITDNSSSSDIVESSTSYIKISNSSHSEYSSFFHAQTERSNISSYDGEYAQPSTESPVLHTSNLPSYTPTINMPNTSVVLDTDAEFVSDSSSSSSSSSSSSSSGPPLPLPSVSQSHHLFSSILPSTRASVHLLKSTSDASTPWSSSPSPLPVSLTTSTSAPLSVSQTTLPQSSSTPVLPRARETPVTSFQTSTMTSFMTMLHSSQTADLKSQSTPHQEKVITESKSPSLVSLPTESTKAVTTNSPLPPSLTESSTEQTLPATSTNLAQMSPTFTTTILKTSQPLMTTPGTLSSTASLVTGPIAVQTTAGKQLSLTHPEILVPQISTEGGISTERNRVIVDATTGLIPLTSVPTSAKEMTTKLGVTAEYSPASRSLGTSPSPQTTVVSTAEDLAPKSATFAVQSSTQSPTTVSSSASGKTQSHKHMLTARPSPALRATWGSGFM

SEQ ID NO: 25716 - protein, 390 aa, Homo sapiens
MGEAGAGAGASGGPEASPEAEVVKLLPFLAPGARADLQAAAVRHVLALTGCGPGRALLAGQAALLQALMELAPASAPARDAARALVNLAADPGLHETLLAADPGLPARLMGRALDPQWPWAEEAAAALANLSREPAPCAALMAALAAAEPADSGLERLVRALCTPGYNARAPLHYLAPLLSNLSQRPAARAFLLDPDRCVVQRLLPLTQYPDSSVRRGGVVGTLRNCCFEHRHHEWLLGPEVDILPFLLLPLAGPEDFSEEEMERLPVDLQYLPPDKQREPDADIRKMLVEAIMLLTATAPGRQQVRDQGAYLILRELHSWEPEPDVRTACEKLIQVLIGDEPERGMENLLEVQVPEDVEQQLQQLDCREQEQLERELAPEPWVERATPT

SEQ ID NO: 25717 - protein, 346 aa, Homo sapiens
MYNGSCCRIEGDTISQVMPPLLIVAFVLGALGNGVALCGFCFHMKTWKPSTVYLFNLAVADFLLMICLPFRTDYYLRRRHWAFGDIPCRVGLFTLAMNRAGSIVFLTVVAADRYFKVVHPHHAVNTISTRVAAGIVCTLWALVILGTVYLLLENHLCVQETAVSCESFIMESANGWHDIMFQLEFFMPLGIILFCSFKIVWSLRRRQQLARQARMKKATRFIMVVAIVFITCYLPSVSARLYFLWTVPSSACDPSVHGALHITLSFTYMNSMLDPLVYYFSSPSFPKFYNKLKICSLKPKQPGHSKTQRPEEMPISNLGRRSCISVANSFQSQSDGQWDPHIVEWH

SEQ ID NO: 25718 - protein, 314 aa, Homo sapiens
MAFVTRQFMRSVSSSSTASASAKKIIVKHVTVIGGGLMGAGIAQVAAATGHTVVLVDQTEDILAKSKKGIEESLRKVAKKKFAENLKAGDEFVEKTLSTIATSTDAASVVHSTDLVVEAIVENLKVKNELFKRLDKFAAEHTIFASNTSSLQITSIANATTRQDRFAGLHFFNPVPVMKLVEVIKTPMTSQKTFESLVDFSKALGKHPVSCKDTPGFIVNRLLVPYLMEAIRLYERGDASKEDIDTAMKLGAGYPMGPFELLDYVGLDTTKFIVDGWHEMDAENPLHQPSPSLNKLVAENKFGKKTGEGFYKYK

SEQ ID NO: 25719 - protein, 390 aa, Homo sapiens
MGRAGLEAPPPPCGVTGTPGARGLQGRVGPRPQSLAFRGCLPRASSLPGSPRCRRRCHTMAFVTRQFMRSVSSSSTASASAKKIIVKHVTVIGGGLMGAGIAQVAAATGHTVVLVDQTEDILAKSKKGIEESLRKVAKKKFAENLKAGDEFVEKTLSTIATSTDAASVVHSTDLVVEAIVENLKVKNELFKRLDKFAAEHTIFASNTSSLQITSIANATTRQDRFAGLHFFNPVPVMKLVEVIKTPMTSQKTFESLVDFSKALGKHPVSCKDTPGFIVNRLLVPYLMEAIRLYERDFQTCGDSNSGLGFSLKGDASKEDIDTAMKLGAGYPMGPFELLDYVGLDTTKFIVDGWHEMDAENPLHQPSPSLNKLVAENKFGKKTGEGFYKYK

SEQ ID NO: 25720 - protein, 331 aa, Homo sapiens
MAFVTRQFMRSVSSSSTASASAKKIIVKHVTVIGGGLMGAGIAQVAAATGHTVVLVDQTEDILAKSKKGIEESLRKVAKKKFAENLKAGDEFVEKTLSTIATSTDAASVVHSTDLVVEAIVENLKVKNELFKRLDKFAAEHTIFASNTSSLQITSIANATTRQDRFAGLHFFNPVPVMKLVEVIKTPMTSQKTFESLVDFSKALGKHPVSCKDTPGFIVNRLLVPYLMEAIRLYERDFQTCGDSNSGLGFSLKGDASKEDIDTAMKLGAGYPMGPFELLDYVGLDTTKFIVDGWHEMDAENPLHQPSPSLNKLVAENKFGKKTGEGFYKYK

SEQ ID NO: 25721 - protein, 217 aa, Homo sapiens
MSKGRAEAAAGAAGILLRYLQEQNRPYSSQDVFGNLQREHGLGKAVVVKTLEQLAQQGKIKEKMYGKQKIYFADQDQFDMVSDADLQVLDGKIVALTAKVQSLQQSCRYMEAELKELSSALTTPEMQKEIQELKKECAGYRERLKNIKAATNHVTPEEKEQVYRERQKYCKEWRKRKRMATELSDAILEGYPKSKKQFFEEVGIETDEDYNVTLPDP

SEQ ID NO: 25722 - protein, 205 aa, Homo sapiens
MSKGRAEAAAGAAGILLRYLQEQNRPYSSQDVFGNLQREHGLGKAVVVKTLEQLAQQGKIKEKMYGKQKIYFADQDQFDMVSDADLQVLDGKIVALTAKVQSLQQSCRYMEAEMQKEIQELKKECAGYRERLKNIKAATNHVTPEEKEQVYRERQKYCKEWRKRKRMATELSDAILEGYPKSKKQFFEEVGIETDEDYNVTLPDP

SEQ ID NO: 25723 - protein, 92 aa, Homo sapiens
MQKEIQELKKECAGYRERLKNIKAATNHVTPEEKEQVYRERQKYCKEWRKRKRMATELSDAILEGYPKSKKQFFEEVGIETDEDYNVTLPDP

SEQ ID NO: 25724 - protein, 480 aa, Homo sapiens
MQIPRAALLPLLLLLLAAPASAQLSRAGRSAPLAAGCPDRCEPARCPPQPEHCEGGRARDACGCCEVCGAPEGAACGLQEGPCGEGLQCVVPFGVPASATVRRRAQAGLCVCASSEPVCGSDANTYANLCQLRAASRRSERLHRPPVIVLQRGACGQGQEDPNSLRHKYNFIADVVEKIAPAVVHIELFRKLPFSKREVPVASGSGFIVSEDGLIVTNAHVVTNKHRVKVELKNGATYEAKIKDVDEKADIALIKIDHQGKLPVLLLGRSSELRPGEFVVAIGSPFSLQNTVTTGIVSTTQRGGKELGLRNSDMDYIQTDAIINYGNSGGPLVNLDGEVIGINTLKVTAGISFAIPSDKIKKFLTESHDRQAKGKAITKKKYIGIRMMSLTSSKAKELKDRHRDFPDVISGAYIIEVIPDTPAEAGGLKENDVIISINGQSVVSANDVSDVIKRESTLNMVVRRGNEDIMITVIPEEIDP

SEQ ID NO: 25725 - protein, 333 aa, Homo sapiens
MASQNTEQEYEAKLAPSVGGEPTSGGPSGSSPDPNPDSSEVLDRHEDQAMSQDPGSQDNSPPEDRNQRVVNVEDNHNLFRLSFPRKLWTIVEEDTFKSVSWNDDGDAVIIDKDLFQREVLQRKGAERIFKTDNLTSFIRQLNLYGFCKTRPSNSPGNKKMMIYCNSNFQRDKPRLLENIQRKDALRNTAQQATRVPTPKRKNLVATRRSLRIYHINARKEAIKMCQQGAPSVQGPSGTQSFRRSGMWSKKSATRHPLGNGPPQEPNGPSWEGTSGNVTFTSSATTWMEGTGILSSLVYSDNGSVMSLYNICYYALLASLSVMSPNEPSDDEEE

SEQ ID NO: 25726 - protein, 1158 aa, Homo sapiens
MHAFCVGQYLEPDQEGVTIPDLGSLSSPLIDTERNLGLLLGLHASYLAMSTPLSPVEIECAKWLQSSIFSGGLQTSQIHYSYNEEKDEDHCSSPGGTPASKSRLCSHRRALGDHSQAFLQAIADNNIQDHNVKDFLCQIERYCRQCHLTTPIMFPPEHPVEEVGRLLLCCLLKHEDLGHVALSLVHAGALGIEQVKHRTLPKSVVDVCRVVYQAKCSLIKTHQEQGRSYKEVCAPVIERLRFLFNELRPAVCNDLSIMSKFKLLSSLPHWRRIAQKIIREPRKKRVPKKPESTDDEEKIGNEESDLEEACILPHSPINVDKRPIAIKSPKDKWQPLLSTVTGVHKYKWLKQNVQGLYPQSPLLSTIAEFALKEEPVDVEKRKCLLKQLERAEVRLEGIDTILKLYLVSKNFLLPSVPYAMFCGWQRLIPEGIDIGEPLTDCLKDVDLIPPFNRMLLEVTFGKLYAWAVQNIRNVLVDASAKFKELGIQPVPLQTITNENPSGPSLGTIPQAHFLLVMLSMLTLQHSANNLDLLLNSGTLALAQTALRLIGPSCDSVEEDMNASAQGASATVLEETRKETAPVQLPVSGPELAAMMKIGTRVMRGVDWKWGDQDRPPPGLGRVIGELGEDGWIRVQWDTGSTNSYRMGKEGNYDLKLAELPAPAQPSAEDSDTEDDSEAEQTERNIHPTAMMFTSTINLLQTLCLSAGVHAEIMQSEATKTLCGLLQMLVYREQHRSWCTLGFVQSIALTLQVCGTLSSLQWITLLMKVVEGHAPFTATSLQRQILAVHLLQAVLPSWDKTERARDMKCLMEKLFDFLGSLLTMCSSDVPLLRESTLRRRRVCPQASLTATHSSTLAEEVVALLHTLHSLTQWNGLINKYINSQLRSITHSFAGRPSKGAQLEDYFPDSENPEVGGLMAVLAVVGGIDGRLCLGGQVVHDDFGEVTMTRITLKGKITVQFSDMRTCHVCPLNQLKPLPAVAFNVNNLPFTEPMLSVWAQLVNLAGSKLEKHKIKKSTKQAFAGQVDLDLLRCQQLKLYILKAGRALFSHQDKLRQILSQPAVQETGTVHTDDGAVVSPDLGDMSPEGPQPPMILLQQLLASATQPSPVKAIFDKQELEERMSRCCFWRRRTTKLEQILLFIRRMNSVCEKENTNATASN

SEQ ID NO: 25727 - protein, 377 aa, Homo sapiens
MDSALSDPHNGSAEAGGPTNSTTRPPSTPEGIALAYGSLLLMALLPIFFGALRSVRCARGKNASDMPETITSRDAARFPIIASCTLLGLYLFFKIFSQEYINLLLSMYFFVLGILALSHTISPFMNKFFPASFPNRQYQLLFTQGSGENKEEIINYEFDTKDLVCLGLSSIVGVWYLLRKHWIANNLFGLAFSLNGVELLHLNNVSTGCILLGGLFIYDVFWVFGTNVMVTVAKSFEAPIKLVFPQDLLEKGLEANNFAMLGLGDVVIPGIFIALLLRFDISLKKNTHTYFYTSFAAYIFGLGLTIFIMHIFKHAQPALLYLVPACIGFPVLVALAKGEVTEMFSYEESNPKDPAAVTESKEGTEASASKGLEKKEK

SEQ ID NO: 25728 - protein, 426 aa, Homo sapiens
MDSALSDPHNGSAEAGGPTNSTTRPPSTPEGIALAYGSLLLMALLPIFFGALRSVRCARGKNASDMPETITSRDAARFPIIASCTLLGLYLFFKIFSQEYINLLLSMYFFVLGILALSHTISPFMNKFFPASFPNRQYQLLFTQGSGENKEEIINYEFDTKDLVCLGLSSIVGVWYLLRKHWIANNLFGLAFSLNGVELLHLNNVSTGCILLGGLFIYDVFWVFGTNVMVTVAKSFEAPIKLVFPQDLLEKGLEANNFAMLGLGDVVIPGIFIALLLRFDISLKKNTHTYFYTSFAAYIFGLGLTIFIMHIFKHAQPALLYLVPACIGFPVLVALAKGEVTEMFSYESSAEILPHTPRLTHFPTVSGSPASLADSMQQKLAGPRRRRPQNPSAIYEESNPKDPAAVTESKEGTEASASKGLEKKEK

SEQ ID NO: 25729 - protein, 394 aa, Homo sapiens
MDSALSDPHNGSAEAGGPTNSTTRPPSTPEGIALAYGSLLLMALLPIFFGALRSVRCARGKNASDMPETITSRDAARFPIIASCTLLGLYLFFKIFSQEYINLLLSMYFFVLGILALSHTISPFMNKFFPASFPNRQYQLLFTQGSGENKEEIINYEFDTKDLVCLGLSSIVGVWYLLRKHWIANNLFGLAFSLNGVELLHLNNVSTGCILLGGLFIYDVFWVFGTNVMVTVAKSFEAPIKLVFPQDLLEKGLEANNFAMLGLGDVVIPGIFIALLLRFDISLKKNTHTYFYTSFAAYIFGLGLTIFIMHIFKHAQPALLYLVPACIGFPVLVALAKGEVTEMFSYESSAEILPHTPRLTHFPTVSGSPASLADSMQQKLAGPRRRRPQNPSAM

SEQ ID NO: 25730 - protein, 335 aa, Homo sapiens
MDSALSDPHNGSAEAGGPTNSTTRPPSTPEGIALAYGSLLLMALLPIFFGALRSVRCARGKNASDMPETITSRDAARFPIIASCTLLGLYLFFKIFSQEYINLLLSMYFFVLGILALSHTISPFMNKFFPASFPNRQYQLLFTQGSGENKEEIINYEFDTKDLVCLGLSSIVGVWYLLRKVFGTNVMVTVAKSFEAPIKLVFPQDLLEKGLEANNFAMLGLGDVVIPGIFIALLLRFDISLKKNTHTYFYTSFAAYIFGLGLTIFIMHIFKHAQPALLYLVPACIGFPVLVALAKGEVTEMFSYEESNPKDPAAVTESKEGTEASASKGLEKKEK

SEQ ID NO: 25731 - protein, 346 aa, Homo sapiens [sequence omitted]

SEQ ID NO: 25732 - protein, 775 aa, Homo sapiens
MKRSGTLRLLSDLSAFGGAARLRELVAGDSAVRVRGSPDGRHLLLLRPPGAVAPQLLVASRGPGAELERAWPAGQPSPLDAFFLPWPARPALVLVWESGLAEVWGAGVGPGWRPLQSTELCPGGGARVVAVAALRGRLVWCEERQARAEGPSGSPAAAFSHCVCVRTLEPSGEASTSLGRTHVLLHHCPAFGLLASCRQLFLVPTATTWPGVAHVLLIWSPGKGKVMVAAPRLGLSYSKSLNPGRGDTWDFRTLLRGLPGLLSPREPLAVHTWAPTPQGLLLLDFGGTVSLLQSHGGTRAVGTLQEAPVGPWGSAALGTFQGTLACVLGSTLELLDMGSGQLLERKVLSTDRVHLLEPPAPGMEDEEELETRGNLRLLSALGLFCVGWEAPQGVELPSAKDLVFEEACGYYQRRSLRGAQLTPEELRHSSTFRAPQALASILQGHLPPSALLTMLRTELRDYRGLEQLKAQLVAGDDEEAGWTELAEQEVARLLRTELIGDQLAQLNTVFQALPTAAWGATLRALQLQLDGNGKLRSQAPPDVWKKVLGGITAGKEPPNGILPPFELLCQCLCQLEPRWLPPFVELAQQQGGPGWGAGGPGLPLYRRALAVLGEEGTRPEALELELLLSSGRPKAVLQAVGQLVQKEQWDRALDAGLALGPSSPLLRSEIFKLLLAEFAQHRRLDAHLPLLCRLCPPELAPAELLLLLRTYLPDEVGPPTPFPEPGAEPPLTVGLLKALLEQTGAQGWLSGPVLSPYEDILWDPSTPPPTPPRDL

SEQ ID NO: 25733 - protein, 177 aa, Homo sapiens
MEICRGLRSHLITLLLFLFHSETICRPSGRKSSKMQAFRIWDVNQKTFYLRNNQLVAGYLQGPNVNLEEKIDVVPIEPHALFLGIHGGKMCLSCVKSGDETRLQLEAVNITDLSENRKQDKRFAFIRSDSGPTTSFESAACPGWFLCTAMEADQPVSLTNMPDEGVMVTKFYFQEDE

SEQ ID NO: 25734 - protein, 159 aa, Homo sapiens
MALETICRPSGRKSSKMQAFRIWDVNQKTFYLRNNQLVAGYLQGPNVNLEEKIDVVPIEPHALFLGIHGGKMCLSCVKSGDETRLQLEAVNITDLSENRKQDKRFAFIRSDSGPTTSFESAACPGWFLCTAMEADQPVSLTNMPDEGVMVTKFYFQEDE

SEQ ID NO: 25735 - protein, 180 aa, Homo sapiens
MALADLYEEGGGGGGEGEDNADSKETICRPSGRKSSKMQAFRIWDVNQKTFYLRNNQLVAGYLQGPNVNLEEKIDVVPIEPHALFLGIHGGKMCLSCVKSGDETRLQLEAVNITDLSENRKQDKRFAFIRSDSGPTTSFESAACPGWFLCTAMEADQPVSLTNMPDEGVMVTKFYFQEDE

SEQ ID NO: 25736 - protein, 143 aa, Homo sapiens
MQAFRIWDVNQKTFYLRNNQLVAGYLQGPNVNLEEKIDVVPIEPHALFLGIHGGKMCLSCVKSGDETRLQLEAVNITDLSENRKQDKRFAFIRSDSGPTTSFESAACPGWFLCTAMEADQPVSLTNMPDEGVMVTKFYFQEDE

SEQ ID NO: 25737 - protein, 541 aa, Homo sapiens
MNCRELPLTLWVLISVSTAESCTSRPHITVVEGEPFYLKHCSCSLAHEIETTTKSWYKSSGSQEHVELNPRSSSRIALHDCVLEFWPVELNDTGSYFFQMKNYTQKWKLNVIRRNKHSCFTERQVTSKIVEVKKFFQITCENSYYQTLVNSTSLYKNCKKLLLENNKNPTIKKNAEFEDQGYYSCVHFLHHNGKLFNITKTFNITIVEDRSNIVPVLLGPKLNHVAVELGKNVRLNCSALLNEEDVIYWMFGEENGSDPNIHEEKEMRIMTPEGKWHASKVLRIENIGESNLNVLYNCTVASTGGTDTKSFILVRKADMADIPGHVFTRGMIIAVLILVAVVCLVTVCVIYRVDLVLFYRHLTRRDETLTDGKTYDAFVSYLKECRPENGEEHTFAVEILPRVLEKHFGYKLCIFERDVVPGGAVVDEIHSLIEKSRRLIIVLSKSYMSNEVRYELESGLHEALVERKIKIILIEFTPVTDFTFLPQSLKLLKSHRVLKWKADKSLSYNSRFWKNLLYLMPAKTVKPGRDEPEVLPVLSES

SEQ ID NO: 25738 - protein, 263 aa, Homo sapiens
MMPKHCFLGFLISFFLTGVAGTQSTHESLKPQRVQFQSRNFHNILQWQPGRALTGNSSVYFVQYKIMFSCSMKSSHQKPSGCWQHISCNFPGCRTLAKYGQRQWKNKEDCWGTQELSCDLTSETSDIQEPYYGRVRAASAGSYSEWSMTPRFTPWWETKIDPPVMNITQVNGSLLVILHAPNLPYRYQKEKNVSIEDYYELLYRVFIINNSLEKEQKVYEGAHRAVEIEALTPHSSYCVVAEIYQPMLDRRSQRSEERCVEIP

SEQ ID NO: 25739 - protein, 231 aa, Homo sapiens
MMPKHCFLGFLISFFLTGVAGTQSTHESLKPQRVQFQSRNFHNILQWQPGRALTGNSSVYFVQYKIYGQRQWKNKEDCWGTQELSCDLTSETSDIQEPYYGRVRAASAGSYSEWSMTPRFTPWWETKIDPPVMNITQVNGSLLVILHAPNLPYRYQKEKNVSIEDYYELLYRVFIINNSLEKEQKVYEGAHRAVEIEALTPHSSYCVVAEIYQPMLDRRSQRSEERCVEIP

SEQ ID NO: 25740 - protein, 130 aa, Homo sapiens
MMPKHCFLGFLISFFLTGVAGTQSTHESLKPQRVQFQSRNFHNILQWQPGRALTGNSSVYFVQYKIYGQRQWKNKEDCWGTQELSCDLTSETSDIQEPYYGRVRAASAGSYSEWSMTPRFTPWWERAKGL

SEQ ID NO: 25741 - protein, 243 aa, Homo sapiens
MGQTAGDLGWRLSLLLLPLLLVQAGVWGFPRPPGRPQLSLQELRREFTVSLHLARKLLSEVRGQAHRFAESHLPGVNLYLLPLGEQLPDVSLTFQAWRRLSDPERLCFISTTLQPFHALLGGLGTQGRWTNMERMQLWAMRLDLRDLQRHLRFQVLAAGFNLPEEEEEEEEEEEEERKGLLPGALGSALQGPAQVSWPQLLSTYRLLHSLELVLSRAVRELLLLSKAGHSVWPLGFPTLSPQP

SEQ ID NO: 25742 - protein, 222 aa, Homo sapiens
MSSYVANSFYKQSPNIPAYNMQTCGNYGSASEVQASRYCYGGLDLSITFPPPAPSNSLHGVDMAANPRAHPDRPACSAAAAPGHAPGRDEAAPLNPGMYSQKAARPALEERAKSSGEIKEEQAQTGQPAGLSQPPAPPQIYPWMTKLHMSHETDGKRSRTSYTRYQTLELEKEFHFNRYLTRRRRIEIANNLCLNERQIKIWFQNRRMKWKKDSKMKSKEAL

SEQ ID NO: 25743 - protein, 403 aa, Homo sapiens [sequence omitted]

SEQ ID NO: 25744 - protein, 218 aa, Homo sapiens
MSFVGENSGVKMGSEDWEKDEPQCCLEDPAGSPLEPGPSLPTMNFVHTSPKVKNLNPKKFSIHDQDHKVLVLDSGNLIAVPDKNYIRPEIFFALASSLSSASAEKGSPILLGVSKGEFCLYCDKDKGQSHPSLQLKKEKLMKLAAQKESARRPFIFYRAQVGSWNMLESAAHPGWFICTSCNCNEPVGVTDKFENRKHIEFSFQPVCKAEMSPSEVSD

SEQ ID NO: 25745 - protein, 192 aa, Homo sapiens
MSGCDRRETETKGKNSFKKRLRGPKVKNLNPKKFSIHDQDHKVLVLDSGNLIAVPDKNYIRPEIFFALASSLSSASAEKGSPILLGVSKGEFCLYCDKDKGQSHPSLQLKKEKLMKLAAQKESARRPFIFYRAQVGSWNMLESAAHPGWFICTSCNCNEPVGVTDKFENRKHIEFSFQPVCKAEMSPSEVSD

SEQ ID NO: 25746 - protein, 178 aa, Homo sapiens
MSFVGENSGVKMGSEDWEKDEPQCCLEDPAGSPLEPGPSLPTMNFVHTKIFFALASSLSSASAEKGSPILLGVSKGEFCLYCDKDKGQSHPSLQLKKEKLMKLAAQKESARRPFIFYRAQVGSWNMLESAAHPGWFICTSCNCNEPVGVTDKFENRKHIEFSFQPVCKAEMSPSEVSD

SEQ ID NO: 25747 - protein, 197 aa, Homo sapiens
MSFVGENSGVKMGSEDWEKDEPQCCLEGPKVKNLNPKKFSIHDQDHKVLVLDSGNLIAVPDKNYIRPEIFFALASSLSSASAEKGSPILLGVSKGEFCLYCDKDKGQSHPSLQLKKEKLMKLAAQKESARRPFIFYRAQVGSWNMLESAAHPGWFICTSCNCNEPVGVTDKFENRKHIEFSFQPVCKAEMSPSEVSD

SEQ ID NO: 25748 - protein, 157 aa, Homo sapiens
MSFVGENSGVKMGSEDWEKDEPQCCLEEIFFALASSLSSASAEKGSPILLGVSKGEFCLYCDKDKGQSHPSLQLKKEKLMKLAAQKESARRPFIFYRAQVGSWNMLESAAHPGWFICTSCNCNEPVGVTDKFENRKHIEFSFQPVCKAEMSPSEVSD

SEQ ID NO: 25749 - protein, 500 aa, Homo sapiens
MNQRRSESRPGNHRLQAYAEPGKGDSGGAGPLSGSARRGRGGGGAIRVRRPCWSGGAGRGGGPAWAVRLPTVTAGWTWPALRTLSSLRAGPSEPHSPGRRPPRAGRPLCQADPQPGKAARRSLEPDPAQTGPRPARAAGMSEARKGPDEAEESQYDSGIESLRSLRSLPESTSAPASGPSDGSPQPCTHPPGPVKEPQEKEDADGERADSTYGSSSLTYTLSLLGGPEAEDPAPRLPLPHVGALSPQQLEALTYISEDGDTLVHLAVIHEAPAVLLCCLALLPQEVLDIQNNLYQTALHLAVHLDQPGAVRALVLKGASRALQDRHGDTALHVACQRQHLACARCLLEGRPEPGRGTSHSLDLQLQNWQGLACLHIATLQKNQPLMELLLRNGADIDVQEGTSGKTALHLAVETQERGLVQFLLQAGAQVDARMLNGCTPLHLAAGRGLMGISSTLCKAGADSLLRNVEDETPQDLTEESLVLLPFDDLKISGKLLLCTD

SEQ ID NO: 25750 - protein, 234 aa, Homo sapiens
MCFPKVLSDDMKKLKARMVMLLPTSAQGLGAWVSACDTEDTVGHLGPWRDKDPALWCQLCLSSQHQAIERFYDKMQNAESGRGQVMSSLAELEDDFKEGYLETVAAYYEEQHPELTPLLEKERDGLRCRGNRSPVPDVEDPATEEPGESFCDKVMRWFQAMLQRLQTWWHGVLAWVKEKVVALVHAVQALWKQFQSFCCSLSELFMSSFQSYGAPRGDKEELTPQKCSEPQSSK

SEQ ID NO: 25751 - protein, 188 aa, Homo sapiens
MCFPKVLSDDMKKLKARMHQAIERFYDKMQNAESGRGQVMSSLAELEDDFKEGYLETVAAYYEEQHPELTPLLEKERDGLRCRGNRSPVPDVEDPATEEPGESFCDKVMRWFQAMLQRLQTWWHGVLAWVKEKVVALVHAVQALWKQFQSFCCSLSELFMSSFQSYGAPRGDKEELTPQKCSEPQSSK

SEQ ID NO: 25752 - protein, 178 aa, Homo sapiens
MKKLKARMHQAIERFYDKMQNAESGRGQVMSSLAELEDDFKEGYLETVAAYYEEQHPELTPLLEKERDGLRCRGNRSPVPDVEDPATEEPGESFCDKVMRWFQAMLQRLQTWWHGVLAWVKEKVVALVHAVQALWKQFQSFCCSLSELFMSSFQSYGAPRGDKEELTPQKCSEPQSSK

SEQ ID NO: 25753 - protein, 131 aa, Homo sapiens
MCFPKVLSDDMKKLKARMHQAIERFYDKMQNAESGRGQVMSSLAELEDDFKEGYLETVAAYYEEQHPELTPLLEKERDGLRCRGNRSPVPDVEDPATEEPGESFCDKSYGAPRGDKEELTPQKCSEPQSSK

SEQ ID NO: 25754 - protein, 168 aa, Homo sapiens
MCFPKVLSDDMKKLKARMVMSSLAELEDDFKEGYLETVAAYYEEQHPELTPLLEKERDGLRCRGNRSPVPDVEDPATEEPGESFCDKVMRWFQAMLQRLQTWWHGVLAWVKEKVVALVHAVQALWKQFQSFCCSLSELFMSSFQSYGAPRGDKEELTPQKCSEPQSSK

SEQ ID NO: 25755 - protein, 179 aa, Homo sapiens
MCFPKVLSDDMKKLKARMHQAIERFYDKMQNAESGRGQDDFKEGYLETVAAYYEEQHPELTPLLEKERDGLRCRGNRSPVPDVEDPATEEPGESFCDKVMRWFQAMLQRLQTWWHGVLAWVKEKVVALVHAVQALWKQFQSFCCSLSELFMSSFQSYGAPRGDKEELTPQKCSEPQSSK

SEQ ID NO: 25756 - protein, 148 aa, Homo sapiens
MCFPKVLSDDMKKLKARMVMSSLAELEELTPLLEKERDGLRCRGNRSPVPDVEDPATEEPGESFCDKVMRWFQAMLQRLQTWWHGVLAWVKEKVVALVHAVQALWKQFQSFCCSLSELFMSSFQSYGAPRGDKEELTPQKCSEPQSSK

SEQ ID NO: 25757 - protein, 777 aa, Homo sapiens
MAAAGLVAVAAAAEYSGTVASGGNLPGVHCGPSSGAGPGFGPGSWSRSLDRALEEAAVTGVLSLSGRKLREFPRGAANHDLTDTTRADLSRNRLSEIPIEACHFVSLENLNLYQNCIRYIPEAILNLQALTFLNISRNQLSTLPVHLCNLPLKVLIASNNKLVSLPEEIGHLRHLMELDVSCNEIQTIPSQIGNLEALRDLNVRRNHLVHLPEELAELPLIRLDFSCNKITTIPVCYRNLRHLQTITLDNNPLQSPPAQICIKGKVHIFKYLNIQACKIAPDLPDYDRRPLGFGSCHEELYSSRPYGALDSGFNSVDSGDKRWSGNEPTDEFSDLPLRVAEITKEQRLRRESQYQENRGSLVVTNGGVEHDLDQIDYIDSCTAEEEEAEVRQPKGPDPDSLSSQFMAYIEQRRISHEGSPVKPVAIREFQKTEDMRRYLHQNRVPAEPSSLLSLSASHNQLSHTDLELHQRREQLVERTRREAQLAALQYEEEKIRTKQIQRDAVLDFVKQKASQSPQKQHPLLDGVDGECPFPSRRSQHTDDSALCMSLSGLNQVGCAATLPHSSAFTPLKSDDRPNALLSSPATETVHHSPAYSFPAAIQRNQPQRPESFLFRAGVRAETNKGHASPLPPSAAPTTDSTDSITGQNSRQREEELELIDQLRKHIEYRLKVSLPCDLGAALTDGVVLCHLANHVRPRSVPSIHVPSPAVPKLTMAKCRRNVENFLEACRKIGVPQEQLCLPLHILEEKGLSQVAVTVQALLELAPPKQQQHQLSAV

SEQ ID NO: 25758 - protein, 803 aa, Homo sapiens
MAAAGLVAVAAAAEYSGTVASGGNLPGVHCGPSSGAGPGFGPGSWSRSLDRALEEAAVTGVLSLSGRKLREFPRGAANHDLTDTTRADLSRNRLSEIPIEACHFVSLENLNLYQNCIRYIPEAILNLQALTFLNISRNQLSTLPVHLCNLPLKVLIASNNKLVSLPEEIGHLRHLMELDVSCNEIQTIPSQIGNLEALRDLNVRRNHLVHLPEELAELPLIRLDFSCNKITTIPVCYRNLRHLQTITLDNNPLQSPPAQICIKGKVHIFKYLNIQACKIAPDLPDYDRRPLGFGSCHEELYSSRPYGALDSGFNSVDSGDKRWSGNEPTDEFSDLPLRVAEITKEQRLRRESQYQENRGSLVVTNGGVEHDLDQIDYIDSCTAEEEEAEVRQPKGPDPDSLSSQFMAYIEQRRISHEGSPVKPVAIREFQKTEDMRRYLHQNRVPAEPSSLLSLSASHNQLSHTDLELHQRREQLVERTRREAQLAALQYEEEKIRTKQIQRDAVLDFVKQKASQSPQKQHPLLDGVDGECPFPSRRSQHTDDSALCMSLSGLNQVGCAATLPHSSAFTPLKSDDRPNALLSSPATETVHHSPAYSFPAAIQRNQPQRPESFLFRAGVRAETNKGHASPLPPSAAPTTDSTDSITGQNSRQREEELELIDQLRKHIEYRLKVSLPCDLGAALTDGVVLCHLANHVRPRSVPSIHVPSPAVPKLTMAKCRRNVENFLEACRKIGVPQDNLCSPSDILQLNLSVKRTVETLLSLGAHSEESSFVCLSLQLLGFVAFYCTVMLTLCVLYYWLFPAR

SEQ ID NO: 25759 - protein, 712 aa, Homo sapiens
MAAAGLVAVAAAAEYSGTVASGGNLPGVHCGPSSGAGPGFGPGSWSRSLDRALEEAAVTGVLSLSGRKLREFPRGAANHDLTDTTRADLSRNRLSEIPIEACHFVSLENLNLYQNCIRYIPEAILNLQALTFLNISRNQLSTLPVHLCNLPLKVLIASNNKLVSLPEEIGHLRHLMELDVSCNEIQTIPSQIGNLEALRDLNVRRNHLVHLPEELAELPLIRLDFSCNKITTIPVCYRNLRHLQTITLDNNPLQSPPAQICIKGKVHIFKYLNIQACKIAPDLPDYDRRPLGFGSCHEELYSSRPYGALDSGFNSVDSGDKRWSGNEPTDEFSDLPLRVAEITKEQRLRRESQYQENRGSLVVTNGGVEHDLDQIDYIDSCTAEEEEAEVRQPKGPDPDSLSSQFMAYIEQRRISHEGSPVKPVAIREFQKTEDMRRYLHQNRVPAEPSSLLSLSASHNQLSHTDLELHQRREQLVERTRREAQLAALQYEEEKIRTKQIQRDAVLDFVKQKASQSPQKQHPLLDGVDGECPFPSRRSQHTDDSALCMSLSGLNQVGCAATLPHSSAFTPLKSDDRPNALLSSPATETVHHSPAYSFPAAIQRNQPQRPESFLFRAGVRAETNKGHASPLPPSAAPTTDSTDSITGQNSRQREEELELIDQLRKHIEYRLKVSLPCDLGAALTDGVVLCHLANHVRPRSVPSIHVPSPAVVS

SEQ ID NO: 25760 - protein, 725 aa, Homo sapiens
MAAAGLVAVAAAAEYSGTVASGGNLPGVHCGPSSGAGPGFGPGSWSRSLDRALEEAAVTGVLSLSGRKLREFPRGAANHDLTDTTRADLSRNRLSEIPIEACHFVSLENLNLYQNCIRYIPEAILNLQALTFLNISRNQLSTLPVHLCNLPLKVLIASNNKLVSLPEEIGHLRHLMELDVSCNEIQTIPSQIGNLEALRDLNVRRNHLVHLPEELAELPLIRLDFSCNKITTIPVCYRNLRHLQTITLDNNPLQSPPAQICIKGKVHIFKYLNIQACKIAPDLPDYDRRPLGFGSCHEELYSSRPYGALDSGFNSVDSGDKRWSGNEPTDEFSDLPLRVAEITKEQRLRRESQYQENRGSLVVTNGGVEHDLDQIDYIDSCTAEEEEAEGSPVKPVAIREFQKTEDMRRYLHQNRVPAEPSSLLSLSASHNQLSHTDLELHQRREQLVERTRREAQLAALQYEEEKIRTKQIQRDAVLDFVKQKASQSPQKQHPLLDGVDGECPFPSRRSQHTDDSALCMSDDRPNALLSSPATETVHHSPAYSFPAAIQRNQPQRPESFLFRAGVRAETNKGHASPLPPSAAPTTDSTDSITGQNSRQREEELELIDQLRKHIEYRLKVSLPCDLGAALTDGVVLCHLANHVRPRSVPSIHVPSPAVPKLTMAKCRRNVENFLEACRKIGVPQEQLCLPLHILEEKGLSQVAVTVQALLELAPPKQQQHQLSAV

SEQ ID NO: 25761 - protein, 620 aa, Homo sapiens
MQVSKRMLAGGVRSMPSPLLACWQPILLLVLGSVLSGSATGCPPRCECSAQDRAVLCHRKRFVAVPEGIPTETRLLDLGKNRIKTLNQDEFASFPHLEELELNENIVSAVEPGAFNNLFNLRTLGLRSNRLKLIPLGVFTGLSNLTKLDISENKIVILLDYMFQDLYNLKSLEVGDNDLVYISHRAFSGLNSLEQLTLEKCNLTSIPTEALSHLHGLIVLRLRHLNINAIRDYSFKRLYRLKVLEISHWPYLDTMTPNCLYGLNLTSLSITHCNLTAVPYLAVRHLVYLRFLNLSYNPISTIEGSMLHELLRLQEIQLVGGQLAVVEPYAFRGLNYLRVLNVSGNQLTTLEESVFHSVGNLETLILDSNPLACDCRLLWVFRRRWRLNFNRQQPTCATPEFVQGKEFKDFPDVLLPNYFTCRRARIRDRKAQQVFVDEGHTVQFVCRADGDPPPAILWLSPRKHLVSAKSNGRLTVFPDGTLEVRYAQVQDNGTYLCIAANAGGNDSMPAHLHVRSYSPDWPHQPNKTFAFISNQPGEGEANSTRATVPFPFDIKTLIIATTMGFISFLGVVLFCLVLLFLWSRGKGNTKHNIEIEYVPRKSDAGISSADAPRKFNMKMI

SEQ ID NO: 25762 - protein, 614 aa, Homo sapiens
MLAGGVRSMPSPLLACWQPILLLVLGSVLSGSATGCPPRCECSAQDRAVLCHRKRFVAVPEGIPTETRLLDLGKNRIKTLNQDEFASFPHLEELELNENIVSAVEPGAFNNLFNLRTLGLRSNRLKLIPLGVFTGLSNLTKLDISENKIVILLDYMFQDLYNLKSLEVGDNDLVYISHRAFSGLNSLEQLTLEKCNLTSIPTEALSHLHGLIVLRLRHLNINAIRDYSFKRLYRLKVLEISHWPYLDTMTPNCLYGLNLTSLSITHCNLTAVPYLAVRHLVYLRFLNLSYNPISTIEGSMLHELLRLQEIQLVGGQLAVVEPYAFRGLNYLRVLNVSGNQLTTLEESVFHSVGNLETLILDSNPLACDCRLLWVFRRRWRLNFNRQQPTCATPEFVQGKEFKDFPDVLLPNYFTCRRARIRDRKAQQVFVDEGHTVQFVCRADGDPPPAILWLSPRKHLVSAKSNGRLTVFPDGTLEVRYAQVQDNGTYLCIAANAGGNDSMPAHLHVRSYSPDWPHQPNKTFAFISNQPGEGEANSTRATVPFPFDIKTLIIATTMGFISFLGVVLFCLVLLFLWSRGKGNTKHNIEIEYVPRKSDAGISSADAPRKFNMKMI

SEQ ID NO: 25763 - protein, 713 aa, Homo sapiens
MARARGSPCPPLPPGRMSWPHGALLFLWLFSPPLGAGGGGVAVTSAAGGGSPPATSCPVACSCSNQASRVICTRRDLAEVPASIPVNTRYLNLQENGIQVIRTDTFKHLRHLEILQLSKNLVRKIEVGAFNGLPSLNTLELFDNRLTTVPTQAFEYLSKLRELWLRNNPIESIPSYAFNRVPSLRRLDLGELKRLEYISEAAFEGLVNLRYLNLGMCNLKDIPNLTALVRLEELELSGNRLDLIRPGSFQGLTSLRKLWLMHAQVATIERNAFDDLKSLEELNLSHNNLMSLPHDLFTPLHRLERVHLNHNPWHCNCDVLWLSWWLKETVPSNTTCCARCHAPAGLKGRYIGELDQSHFTCYAPVIVEPPTDLNVTEGMAAELKCRTGTSMTSVNWLTPNGTLMTHGSYRVRISVLHDGTLNFTNVTVQDTGQYTCMVTNSAGNTTASATLNVSAVDPVAAGGTGSGGGGPGGSGGVGGGSGGYTYFTTVTVETLETQPGEEALQPRGTEKEPPGPTTDGVWGGGRPGDAAGPASSSTTAPAPRSSRPTEKAFTVPITDVTENALKDLDDVMKTTKIIIGCFVAITFMAAVMLVAFYKLRKQHQLHKHHGPTRTVEIINVEDELPAASAVSVAAAAAVASGGGVGGDSHLALPALERDHLNHHHYVAAAFKAHYSSNPSGGGCGGKGPPGLNSIHEPLLFKSGSKENVQETQI

SEQ ID NO: 25764 - protein, 246 aa, Homo sapiens
MFPVKVKVEKSELEMAKARNQLDAVLQCLLEKSHMDRERLDEEAGKTPSDTHNKDCSIAATGKRPSARFPHQRRKKRREMDDGLAEGGPQRSNTYVIKLFDRSVDLAQFSENTPLYPICRAWMRNSPSVRERECSPSSPLPPLPEDEEGSEVTNSKSRDVYKLPPPTPPGPPGDACRSRIPSPLQPEMQGTPDDEPSEPEPSPSTLIYRNMQRWKRIRQRWKEASHRNQLRYSESMKILREMYERQ

SEQ ID NO: 25765 - protein, 803 aa, Homo sapiens
MIPVTEFRQFSEQQPAFRVLKPWWDVFTDYLSVAMLMIGVFGCTLQVMQDKIICLPKRVQPAQNHSSLSNVSQAVASTTPLPPPKPSPANPITVEMKGLKTDLDLQQYSFINQMCYERALHWYAKYFPYLVLIHTLVFMLCSNFWFKFPGSSSKIEHFISILGKCFDSPWTTRALSEVSGEDSEEKDNRKNNMNRSNTIQSGPEDSLVNSQSLKSIPEKFVVDKSTAGALDKKEGEQAKALFEKVKKFRLHVEEGDILYAMYVRQTVLKVIKFLIIIAYNSALVSKVQFTVDCNVDIQDMTGYKNFSCNHTMAHLFSKLSFCYLCFVSIYGLTCLYTLYWLFYRSLREYSFEYVRQETGIDDIPDVKNDFAFMLHMIDQYDPLYSKRFAVFLSEVSENKLKQLNLNNEWTPDKLRQKLQTNAHNRLELPLIMLSGLPDTVFEITELQSLKLEIIKNVMIPATIAQLDNLQELSLHQCSVKIHSAALSFLKENLKVLSVKFDDMRELPPWMYGLRNLEELYLVGSLSHDISRNVTLESLRDLKSLKILSIKSNVSKIPQAVVDVSSHLQKMCIHNDGTKLVMLNNLKKMTNLTELELVHCDLERIPHAVFSLLSLQELDLKENNLKSIEEIVSFQHLRKLTVLKLWHNSITYIPEHIKKLTSLERLSFSHNKIEVLPSHLFLCNKIRYLDLSYNDIRFIPPEIGVLQSLQYFSITCNKVESLPDELYFCKKLKTLKIGKNSLSVLSPKIGNLLFLSYLDVKGNHFEILPPELGDCRALKRAGLVVEDALFETLPSDVREQMKTE

SEQ ID NO: 25766 - protein, 237 aa, Homo sapiens
MDWLMGKSKAKPNGKKPAAEERKAYLEPEHTKARITDFQFKELVVLPREIDLNEWLASNTTTFFHHINLQYSTISEFCTGETCQTMAVCNTQYYWYDERGKKVKCTAPQYVDFVMSSVQKLVTDEDVFPTKYGREFPSSFESLVRKICRHLFHVLAHIYWAHFKETLALELHGHLNTLYVHFILFAREFNLLDPKETAIMDDLTEVLCSGAGGVHSGGSGDGAGSGGPGAQNHVKER

SEQ ID NO: 25767 - protein, 142 aa, Homo sapiens
MDWLMGKSKAKPNGKKPAAEERKAYLEPEHTKARITDFQFKELVVLPREIDLNEWLASNTTTFFHHINLQYSTISEFCTGETCQTMAVCNTQYYWYDERGKKVKCTAPQYVDFVMSSVQKLVTDEDVFPTKYENSPAPLSPW

SEQ ID NO: 25768 - protein, 268 aa, Homo sapiens
MLGDHCSLPEDQARPGQSLQSGLCCKMVLQAVSKVLRKSKAKPNGKKPAAEERKAYLEPEHTKARITDFQFKELVVLPREIDLNEWLASNTTTFFHHINLQYSTISEFCTGETCQTMAVCNTQYYWYDERGKKVKCTAPQYVDFVMSSVQKLVTDEDVFPTKYGREFPSSFESLVRKICRHLFHVLAHIYWAHFKETLALELHGHLNTLYVHFILFAREFNLLDPKETAIMDDLTEVLCSGAGGVHSGGSGDGAGSGGPGAQNHVKER

SEQ ID NO: 25769 - protein, 509 aa, Homo sapiens
MELKKSPDGGWGWVIVFVSFLTQFLCYGSPLAVGVLYIEWLDAFGEGKGKTAWVGSLASGVGLLASPVCSLCVSSFGARPVTIFSGFMVAGGLMLSSFAPNIYFLFFSYGIVVGLGCGLLYTATVTITCQYFDDRRGLALGLISTGSSVGLFIYAALQRMLVEFYGLDGCLLIVGALALNILACGSLMRPLQSSDCPLPKKIAPEDLPDKYSIYNEKGKNLEENINILDKSYSSEEKCRITLANGDWKQDSLLHKNPTVTHTKEPETYKKKVAEQTYFCKQLAKRKWQLYKNYCGETVALFKNKVFSALFIAILLFDIGGFPPSLLMEDVARSSNVKEEEFIMPLISIIGIMTAVGKLLLGILADFKWINTLYLYVATLIIMGLALCAIPFAKSYVTLALLSGILGFLTGNWSIFPYVTTKTVGIEKLAHAYGILMFFAGLGNSLGPPIVGWFYDWTQTYDIAFYFSGFCVLLGGFILLLAALPSWDTCNKQLPKPAPTTFLYKVASNV

SEQ ID NO: 25770 - protein, 577 aa, Homo sapiens
MPKTISVRVTTMDAELEFAIQPNTTGKQLFDQVVKTIGLREVWFFGLQYQDTKGFSTWLKLNKKVTAQDVRKESPLLFKFRAKFYPEDVSEELIQDITQRLFFLQVKEGILNDDIYCPPETAVLLASYAVQSKYGDFNKEVHKSGYLAGDKLLPQRVLEQHKLNKDQWEERIQVWHEEHRGMLREDAVLEYLKIAQDLEMYGVNYFSIKNKKGSELWLGVDALGLNIYEQNDRLTPKIGFPWSEIRNISFNDKKFVIKPIDKKAPDFVFYAPRLRINKRILALCMGNHELYMRRRKPDTIEVQQMKAQAREEKHQKQMERAMLENEKKKREMAEKEKEKIEREKEELMERLKQIEEQTKKAQQELEEQTRRALELEQERKRAQSEAEKLAKERQEAEEAKEALLQASRDQKKTQEQLALEMAELTARISQLEMARQKKESEAVEWQQKAQMVQEDLEKTRAELKTAMSTPHVAEPAENEQDEQDENGAEASADLRADAMAKDRSEEERTTEAEKNERVQKHLKALTSELANARDESKKTANDMIHAENMRLGRDKYKTLRQIRQGNTKQRIDEFESM

SEQ ID NO: 25771 - protein, 545 aa, Homo sapiens
MPPFLLLTCLFITGTSVSPVALDPCSAYISLNEPWRNTDHQLDESQGPPLCDNHVNGEWYHFTGMAGDAMPTFCIPENHCGTHAPVWLNGSHPLEGDGIVQRQACASFNGNCCLWNTTVEVKACPGGYYVYRLTKPSVCFHVYCGHFYDICDEDCHGSCSDTSECTCAPGTVLGPDRQTCFDENECEQNNGGCSEICVNLKNSYRCECGVGRVLRSDGKTCEDVEGCHNNNGGCSHSCLGSEKGYQCECPRGLVLSEDNHTCQVPVLCKSNAIEVNIPRELVGGLELFLTNTSCRGVSNGTHVNILFSLKTCGTVVDVVNDKIVASNLVTGLPKQTPGSSGDFIIRTSKLLIPVTCEFPRLYTISEGYVPNLRNSPLEIMSRNHGIFPFTLEIFKDNEFEEPYREALPTLKLRDSLYFGIEPVVHVSGLESLVESCFATPTSKIDEVLKYYLIRDGCVSDDSVKQYTSRDHLAKHFQVPVFKFVGKDHKEVFLHCRVLVCGVLDERSRCAQGCHRRMRRGAGGEDSAGLQGQTLTGGPIRIDWED

SEQ ID NO: 25772 - protein, 321 aa, Homo sapiens
MPPFLLLTCLFITGTSVSPVALDPCSAYISLNEPWRNTDHQLDESQGPPLCDNHVNGEWYHFTGMAGDAMPTFCIPENHCGTHAPVWLNGSHPLEGDGIVQRQACASFNGNCCLWNTTVEVKACPGGYYVYRLTKPSVCFHVYCGHFYDICDEDCHGSCSDTSECTCAPGTVLGPDRQTCFDENECEQNNGGCSEICVNLKNSYRCECGVGRVLRSDGKTCEDVEGCHNNNGGCSHSCLGSEKGYQCECPRGLVLSEDNHTCQVPVLCKSNAIEVNIPRELVGGLELFLTNTSCRGVSNGTHVNILFSLKTCGTVVDLCFR

SEQ ID NO: 25773 - protein, 217 aa, Homo sapiens
MSNPFLKQVFNKDKTFRPKRKFEPGTQRFELHKKAQASLNAGLDLRLAVQLPPGEDLNDWVAVHVVDFFNRVNLIYGTISDGCTEQSCPVMSGGPKYEYRWQDEHKFRKPTALSAPRYMDLLMDWIEAQINNEDLFPTNVGTPFPKNFLQTVRKILSRLFRVFVHVYIHHFDRIAQMGSEAHVNTCYKHFYYFVKEFGLIDTKELEPLKEMTARMCH

SEQ ID NO: 25774 - protein, 186 aa, Homo sapiens [sequence omitted]

SEQ ID NO: 25775 - protein, 146 aa, Homo sapiens
MEPTRDCPLFGGAFSAILPMGAIDVSDLRPVPDNQEVFCHPVTDQSLIVELLELQAHVRGEAAARYHFEDVGGVQGARAVHVESVQPLSLENLALRGRCQEAWVLSGKQQIAKENQQVAKDVTLHQALLRLPQYQTDLLLTFNQPP

SEQ ID NO: 25776 - protein, 165 aa, Homo sapiens
MEPTRDCPLFGGAFSAILPMGAIDVSDLRPVPDNQEVFCHPVTDQSLIVELLELQAHVRGEAAARYHFEDVGGVQGARAVHVESVQPLSLENLALRGRCQEAWVLSGKQQIAKENQQVRARECVMSWKGGSGDAEIQVSILTLIPLGSKGRDTSSGLAEAAPVPD

SEQ ID NO: 25777 - protein, 118 aa, Homo sapiens
MEPTRDCPLFGGAFSAILPMGAIDVSDLRPVPDNQEVFCHPVTDQSLIVELLELQAHVRGEAAARYHFEDVGGVQGARAVHVESVQPLSLENLALRGRCQEAWVLSGKQQIAKENQQP

SEQ ID NO: 25778 - protein, 582 aa, Homo sapiens
MSIETLLEAARFLEWQAQQQQRAREEQERLRLEQEREQEQKKANSLARLAHTLPVEEPRMEAPPLPLSPPAPPPAPPPPLATPAPLTVIPIPVVTNSPQPLPPPPPLPAAAQPLPLAPRQPALVGAPGLSIKEPAPLPSRPQVPTPAPLLPDSKATIPPNGSPKPLQPLPTPVLTIAPHPGVQPQLAPQQPPPPTLGTLKLAPAEEVKSSEQKKRPGGIGTREVHNKLEKNRRAHLKECFETLKRNIPNVDDKKTSNLSVLRTALRYIQSLKRKEKEYEHEMERLAREKIATQQRLAELKHELSQWMDVLEIDRVLRQTGQPEDDQASTSTASEGEDNIDEDMEEDRAGLGPPKLSHRPQPELLKSTLPPPSTTPAPLPPHPHPHPHSVALPPAHLPVQQQQPQQKTPLPAPPPPPAAPAQTLVPAPAHLVATAGGGSTVIAHTATTHASVIQTVNHVLQGPGGKHIAHIAPSAPSPAVQLAPATPPIGHITVHPATLNHVAHLGSQLPLYPQPVAVSHIAHTLSHQQVNGTAGLGPPATVMAKPAVGAQVVHHPQLVGQTVLNPVTMVTMPSFPVSTLKLA

SEQ ID NO: 25779 - protein, 330 aa, Homo sapiens
MCSFFLCQTGKQAKISMGEENQTFVSKFIFLGLSQDLQTQILLFILFLIIYLLTVLGNQLIIILIFLDSRLHTPMYFFLRNLSFADLCFSTSIVPQVLVHFLVKRKTISFYGCMTQIIVFLLVGCTECALLAVMSYDRYVAVCKPLYYSTIMTQRVCLWLSFRSWASGALVSLVDTSFTFHLPYWGQNIINHYFCEPPALLKLASIDTYSTEMAIFSMGVVILLAPVSLILGSYWNIISTVIQMQSGEGRLKAFSTCGSHLIVVVLFYGSGIFTYMRPNSKTTKELDKMISVFYTAVTPMLNPIIYSLRNKDVKGALRKLVGRKCFSHRQ

SEQ ID NO: 25780 - protein, 373 aa, Homo sapiens
MTEVLWPAVPNGTDAAFLAGPGSSWGNSTVASTAAVSSSFKCALTKTGFQFYYLPAVYILVFIIGFLGNSVAIWMFVFHMKPWSGISVYMFNLALADFLYVLTLPALIFYYFNKTDWIFGDAMCKLQRFIFHVNLYGSILFLTCISAHRYSGVVYPLKSLGRLKKKNAICISVLVWLIVVVAISPILFYSGTGVRKNKTITCYDTTSDEYLRSYFIYSMCTTVAMFCVPLVLILGCYGLIVRALIYKDLDNSPLRRKSIYLVIIVLTVFAVSYIPFHVMKTMNLRARLDFQTPAMCAFNDRVYATYQVTRGLASLNSCVDPILYFLAGDTFRRRLSRATRKASRRSEANLQSKSEDMTLNILPEFKQNGDTSL

SEQ ID NO: 25781 - protein, 169 aa, Homo sapiens
MAPKRAKRRTVEGGSSSVFSMFDQTQIQEFKEAFTVIDQNRDGIIDKEDLRDTFAAMGRLNVKNEELDAMMKEASGPINFTVFLTMFGEKLKGADPEDVITGAFKVLDPEGKGTIKKKFLEELLTTQCDRFSQEEIKNMWAAFPPDVGGNVDYKNICYVITHGDAKDQE

SEQ ID NO: 25782 - protein, 192 aa, Homo sapiens
MSPRRTLPRPLSLCLSLCLCLCLAAALGSAQSGSCRDKKNCKVVFSQQELRKRLTPLQYHVTQEKGTESAFEGEYTHHKDPGIYKCVVCGTPLFKSETKFDSGSGWPSFHDVINSEAITFTDDFSYGMHRVETSCSQCGAHLGHIFDDGPRPTGKRYCINSAALSFTPADSSGTAEGGSGVASPAQADKAEL

SEQ ID NO: 25783 - protein, 185 aa, Homo sapiens
MSAFNLLHLVTKSQPVALRACGLPSGSCRDKKNCKVVFSQQELRKRLTPLQYHVTQEKGTESAFEGEYTHHKDPGIYKCVVCGTPLFKSETKFDSGSGWPSFHDVINSEAITFTDDFSYGMHRVETSCSQCGAHLGHIFDDGPRPTGKRYCINSAALSFTPADSSGTAEGGSGVASPAQADKAEL

SEQ ID NO: 25784 - protein, 3323 aa, Homo sapiens
MQLLGLLGLLWMLKASPWATGTLSTATSISQVPFPRAEAASAVLSNSPHSRDLAGWPLGVPQLASPAPGHRENAPMTLTTSPHDTLISETLLNSPVSSNTSTTPTSKFAFKVETTPPTVLVYSATTECVYPTSFIITISHPTSICVTTTQVAFTSSYTSTPVTQKPVTTVTSTYSMTTTEKGTSAMTSSPSTTTARETPIVTVTPSSVSATDTTFHTTISSTTRTTERTPLPTGSIHTTTSPTPVFTTLKTAVTSTSPITSSITSTNTVTSMTTTASQPTATNTLSSPTRTILSSTPVLSTETITSGITNTTPLSTLVTTLPTTISRSTPTSETTYTTSPTSTVTDSTTKIAYSTSMTGTLSTETSLPPTSSSLPTTETATTPMTNLVTTTTEISSHSTPSFSSSTIYSTVSTSTTAISSLPPTSGTMVTSTTMTPSSLSTDIPFTTPTTITHHSVGSTGFLTTATDLTSTFTVSSSSAMSTSVIPSSPSIQNTETSSLVSMTSATTPNVRPTFVSTLSTPTSSLLTTFPATYSFSSSMSASSAGTTHTESISSPPASTSTLHTTAESTLAPTTTTSFTTSTTMEPPSTTAATTGTGQTTFTSSTATFPETTTPTPTTDMSTESLTTAMTSPPITSSVTSTNTVTSMTTTTSPPTTTNSFTSLTSMPLSSTPVPSTEVVTSGTINTIPPSILVTTLPTPNASSMTTSETTYPNSPTGPGTNSTTEITYPTTMTETSSTATSLPPTSPLVSTAKTAKTPTTNLVTTTTKTTSHSTTSFTSSTVYSTASTYTTAITSVPTTLGTMVTSTSMISSTVSTGIPTSQPTTITPSSVGISGSLPMMTDLTSVYTVSNMSARPTTVIPSSPTVQNTEISISVSMTSATTPSGGPTFTSTENTPTRSLLTSFPMTHSFSSSMSESSAGTTHTESISSPRGTTSTLHTTVESTPSPTTTTSFTTSTMMEPPSSTVSTTGRGQTTFPSSTATFPETTTLTPTTDISTVSLTTAMTSPPPVSSSITPTNTMTSMRTTTYWPTATNTLSPLTSSILSSTPVPSTEMITSHTTNTTPLSTLVTTLLTTITRSTPTSETTYPTSPTSIVSDSTTEITYSTSITGTLSTATTLPPTSSSLPTTETATMTPTTTLITTTPNTTSLSTPSFTSSTIYSTVSTSTTAISSASPTSGTMVTSTTMTPSSLSTDTPSTTPTTITYPSVGSTGFLTTATDLTSTFTVSSSSAMSTSVIPSSPSIQNTETSSLVSMTSATTPSLRPTITSTDSTLTSSLLTTFPSTYSFSSSMSASSAGTTHTETISSLPASTNTIHTTAESALAPTTTTSFTTSPTMEPPSTTVATTGTGQTTFPSSTATFLETTTLTPTTDFSTESLTTAMTSTPPITSSITPTDTMTSMRTTTSWPTATNTLSPLTSSILSSTPVPSTEVTTSHTTNTNPVSTLVTTLPITITRSTLTSETAYPSSPTSTVTESTTEITYPTTMTETSSTATSLPPTSSLVSTAETAKTPTTNLVTTTTKTTSHSTTSFTSSTIYSTASTPTTAITSVPTTLGTMVTSTSMIPSTVSTGIPTSQPTTITPSSVGISGSLPMMTDLTSVYTVSSMSARPTSVIPSSPTVQNTETSIFVSMMSATTPSGGPTFTSTENTPTRSLLTSFPVTHSFSSSMSASSVGTTHTQSISSPPAITSTLHTTAESTPSPTTTMSFTTFTKMETPSSTVATTGTGQTTFTSSTATSPKTTTLTPTSDISTGSFKTAVSSTPPITSSITSTYTVTSMTTTTPLGPTATNTLPSFTSSVSSSTPVPSTEAITSGTTNTTPLSTLVTTFSNSDTSSTPTSETTYPTSLTSALTDSTTRTTYSTNMTGTLSTVTSLRPTSSSLLTTVTATVPTTNLVTTTTKITSHSTPSFTSSIATTETPSHSTPRFTSSITTTETPSHSTPRFTSSITNTKTTSHSSPSFTSSITTTETTSHNTPSLTSSITTTKTTSHSTPSYTSLITTTTTTSHSTPSFTSSITTTETTSHNTPSLTSSITTTETTSHSTPSFTSSITTETTSHSTPSFTSLITITEITSHSTLSYTTSITTTETPSHSTLSFTSSITTTETTSHSTPSFTSSITTSEMPSHSTPSFTSSITTTENATHSTPNFTSSITTTETTSHSTPSFTSLITTTETTSHRWGTTETTSYSTPSFTSSNTITETTSHSTPSYITSITTTETPSSSTPSFSSSITTTETTSHSTPGFTSSITTTETTSHSTPSFTSSITTTETTSHDTPSFTSSITTSETPSHSTPSSTSLITTTKTTSHSTPSFTSSITTTETTSHSAHSFTSSITTTETTSHNTRSFTSSITTTETNSHSTTSFTSSITTTETTSHSTPSFSSSITTTETPLHSTPGLTSWVTTTKTTSHITPGLTSSITTTETTSHSTPGFTSSITTTETTSESTPSLSSSTIYSTVSTSTTAITSHFTTSETAVTPTPVTPSSLSTDIPTTSLRTLTPSSVGTSTSLTTTTDFPSIPTDISTLPTRTHIISSSPSIQSTETSSLVGTTSPTMSTVRMTLRITENTPISSFSTSIVVIPETPTQTPPVLTSATGTQTSPAPTTVTFGSTDSSTSTLHTLTPSTALSTIVSTSQVPIPSTHSSTLQTTPSTPSLQTSLTSTSEFTTESFTRGSTSTNAILTSFSTIIWSSTPTIIMSSSPSSASITPVFSTTIHSVPSSPYIFSTENVGSASITGFPSLSSSATTSTSSTSSSLTTALTEITPFSYISLPSTTPCPGTITITIVPASPTDPCVEMDPSTEATSPPTTPLTVFPFTTEMVTCPTSISIQTTLTTYMDTSSMMPESESSISPNASSSTGTGTVPTNTVFTSTRLPTSETWLSNSSVIPLPLPGVSTIPLTMKPSSSLPTILRTSSKSTHPSPPTTRTSETPVATTQTPTTLTSRRTTRITSQMTTQSTLTTTAGTCDNGGTWEQGQCACLPGFSGDRCQLQTRCQNGGQWDGLKCQCPSTFYGSSCEFAVEQVDLDVVETEVGMEVSVDQQFSPDLNDNTSQAYRDFNKTFWNQMQKIFADMQGFTFKGVEILSLRNGSIVVDYLVLLEMPFSPQLESEYEQVKTTLKEGLQNASQDVNSCQDSQTLCFKPDSIKVNNNSKTELTPAAICRRAAPTGYEEFYFPLVEATRLRCVTKCTSGVDNAIDCHQGQCVLETSGPTCRCYSTDTHWFSGPRCEVAVHWRALVGGLTAGAALLVLLLLALGVRAVRSGWWGGQRRGRSWDQDRKWFETWDEEVVGTFSNWGFEDDGTDKDTNFYVALENVDTTMKVHIKRPEMTSSSV

SEQ ID NO: 25785 - protein, 3063 aa, Homo sapiens
MQLLGLLGLLWMLKASPWATGTLSTATSISQVPFPRAEAASAVLSNSPHSRDLAGWPLGVPQLASPAPGHRENAPMTLTTSPHDTLISETLLNSPVSSNTSTTPTSKFAFKVETTPPTVLVYSATTECVYPTSFIITISHPTSICVTTTQVAFTSSYTSTPVTQKPVTTVTSTYSMTTTEKGTSAMTSSPSTTTARETPIVTVTPSSVSATDTTFHTTISSTTRTTERTPLPTGSIHTTTSPTPVFTTLKTAVTSTSPITSSITSTNTVTSMTTTASQPTATNTLSSPTRTILSSTPVLSTETITSGITNTTPLSTLVTTLPTTISRSTPTSETTYTTSPTSTVTDSTTKIAYSTSMTGTLSTETSLPPTSSSLPTTETATTPMTNLVTTTTEISSHSTPSFSSSTIYSTVSTSTTAISSLPPTSGTMVTSTTMTPSSLSTDIPFTTPTTITHHSVGSTGFLTTATDLTSTFTVSSSSAMSTSVIPSSPSIQNTETSSLVSMTSATTPNVRPTFVSTLSTPTSSLLTTFPATYSFSSSMSASSAGTTHTESISSPPASTSTLHTTAESTLAPTTTTSFTTSTTMEPPSTTAATTGTGQTTFTSSTATFPETTTPTPTTDMSTESLTTAMTSPPITSSVTSTNTVTSMTTTTSPPTTTNSFTSLTSMPLSSTPVPSTEVVTSGTINTIPPSILVTTLPTPNASSMTTSETTYPNSPTGPGTNSTTEITYPTTMTETSSTATSLPPTSPLVSTAKTAKTPTTNLVTTTTKTTSHSTTSFTSSTVYSTASTYTTAITSVPTTLGTMVTSTSMISSTVSTGIPTSQPTTITPSSVGISGSLPMMTDLTSVYTVSNMSARPTTVIPSSPTVQNTEISISVSMTSATTPSGGPTFTSTENTPTRSLLTSFPMTHSFSSSMSESSAGTTHTESISSPRGTTSTLHTTVESTPSPTTTTSFTTSTMMEPPSSTVSTTGRGQTTFPSSTATFPETTTLTPTTDISTVSLTTAMTSPPPVSSSITPTNTMTSMRTTTYWPTATNTLSPLTSSILSSTPVPSTEMITSHTTNTTPLSTLVTTLLTTITRSTPTSETTYPTSPTSIVSDSTTEITYSTSITGTLSTATTLPPTSSSLPTTETATMTPTTTLITTTPNTTSLSTPSFTSSTIYSTVSTSTTAISSASPTSGTMVTSTTMTPSSLSTDTPSTTPTTITYPSVGSTGFLTTATDLTSTFTVSSSSAMSTSVIPSSPSIQNTETSSLVSMTSATTPSLRPTITSTDSTLTSSLLTTFPSTYSFSSSMSASSAGTTHTETISSLPASTNTIHTTAESALAPTTTTSFTTSPTMEPPSTTVATTGTGQTTFPSSTATFLETTTLTPTTDFSTESLTTAMTSTPPITSSITPTDTMTSMRTTTSWPTATNTLSPLTSSILSSTPVPSTEVTTSHTTNTNPVSTLVTTLPITITRSTLTSETAYPSSPTSTVTESTTEITYPTTMTETSSTATSLPPTSSLVSTAETAKTPTTNLVTTTTKTTSHSTTSFTSSTIYSTASTPTTAITSVPTTLGTMVTSTSMIPSTVSTGIPTSQPTTITPSSVGISGSLPMMTDLTSVYTVSSMSARPTSVIPSSPTVQNTETSIFVSMMSATTPSGGPTFTSTENTPTRSLLTSFPVTHSFSSSMSASSVGTTHTQSISSPPAITSTLHTTAESTPSPTTTMSFTTFTKMETPSSTVATTGTGQTTFTSSTATSPKTTTLTPTSDISTGSFKTAVSSTPPITSSITSTYTVTSMTTTTPLGPTATNTLPSFTSSVSSSTPVPSTEAITSGTTNTTPLSTLVTTFSNSDTSSTPTSETTYPTSLTSALTDSTTRTTYSTNMTGTLSTVTSLRPTSSSLLTTVTATVPTTNLVTTTTKITSHSTPSFTSSIATTETPSHSTPRFTSSITTTETPSHSTPRFTSSITNTKTTSHSSPSFTSSITTTETTSHNTPSLTSSITTTKTTSHSTPSYTSLITTTTTTSHSTPSFTSSITTTETTSHNTPSLTSSITTTETTSHSTPSFTSSITTETTSHSTPSFTSLITITEITSHSTLSYTTSITTTETPSHSTLSFTSSITTTETTSHSTPSFTSSITTSEMPSHSTPSFTSSITTTENATHSTPNFTSSITTTETTSHSTPSFTSLITTTETTSHRWGTTETTSYSTPSFTSSNTITETTSHSTPSYITSITTTETPSSSTPSFSSSITTTETTSHSTPGFTSSITTTETTSHSTPSFTSSITTTETTSHDTPSFTSSITTSETPSHSTPSSTSLITTTKTTSHSTPSFTSSITTTETTSHSAHSFTSSITTTETTSHNTRSFTSSITTTETNSHSTTSFTSSITTTETTSHSTPSFSSSITTTETPLHSTPGLTSWVTTTKTTSHITPGLTSSITTTETTSHSTPGFTSSITTTETTSESTPSLSSSTIYSTVSTSTTAITSHFTTSETAVTPTPVTPSSLSTDIPTTSLRTLTPSSVGTSTSLTTTTDFPSIPTDISTLPTRTHIISSSPSIQSTETSSLVGTTSPTMSTVRMTLRITENTPISSFSTSIVVIPETPTQTPPVLTSATGTQTSPAPTTVTFGSTDSSTSTLHTLTPSTALSTIVSTSQVPIPSTHSSTLQTTPSTPSLQTSLTSTSEFTTESFTRGSTSTNAILTSFSTIIWSSTPTIIMSSSPSSASITPVFSTTIHSVPSSPYIFSTENVGSASITGFPSLSSSATTSTSSTSSSLTTALTEITPFSYISLPSTTPCPGTITITIVPASPTDPCVEMDPSTEATSPPTTPLTVFPFTTEMVTCPTSISIQTTLTTYMDTSSMMPESESSISPNASSSTGTGTVPTNTVFTSTRLPTSETWLSNSSVIPLPLPGVSTIPLTMKPSSSLPTILRTSSKSTHPSPPTTRTSETPVATTQTPTTLTSRRTTRITSQMTTQSTLTTTAGTCDNGGTWEQGQCACLPGFSGDRCQLQTRCQNGGQWDGLKCQCPSTFYGSSCEFAVEQVDLDAEDFCRHAGLHLQGCGDPVPEEWQHRGGLPGPAGDALQPPAGERV

SEQ ID NO: 25786 - protein, 3080 aa, Homo sapiens
MQLLGLLGLLWMLKASPWATGTLSTATSISQVPFPRAEAASAVLSNSPHSRDLAGWPLGVPQLASPAPGHRENAPMTLTTSPHDTLISETLLNSPVSSNTSTTPTSKFAFKVETTPPTVLVYSATTECVYPTSFIITISHPTSICVTTTQVAFTSSYTSTPVTQKPVTTVTSTYSMTTTEKGTSAMTSSPSTTTARETPIVTVTPSSVSATDTTFHTTISSTTRTTERTPLPTGSIHTTTSPTPVFTTLKTAVTSTSPITSSITSTNTVTSMTTTASQPTATNTLSSPTRTILSSTPVLSTETITSGITNTTPLSTLVTTLPTTISRSTPTSETTYTTSPTSTVTDSTTKIAYSTSMTGTLSTETSLPPTSSSLPTTETATTPMTNLVTTTTEISSHSTPSFSSSTIYSTVSTSTTAISSLPPTSGTMVTSTTMTPSSLSTDIPFTTPTTITHHSVGSTGFLTTATDLTSTFTVSSSSAMSTSVIPSSPSIQNTETSSLVSMTSATTPNVRPTFVSTLSTPTSSLLTTFPATYSFSSSMSASSAGTTHTESISSPPASTSTLHTTAESTLAPTTTTSFTTSTTMEPPSTTAATTGTGQTTFTSSTATFPETTTPTPTTDMSTESLTTAMTSPPITSSVTSTNTVTSMTTTTSPPTTTNSFTSLTSMPLSSTPVPSTEVVTSGTINTIPPSILVTTLPTPNASSMTTSETTYPNSPTGPGTNSTTEITYPTTMTETSSTATSLPPTSPLVSTAKTAKTPTTNLVTTTTKTTSHSTTSFTSSTVYSTASTYTTAITSVPTTLGTMVTSTSMISSTVSTGIPTSQPTTITPSSVGISGSLPMMTDLTSVYTVSNMSARPTTVIPSSPTVQNTEISISVSMTSATTPSGGPTFTSTENTPTRSLLTSFPMTHSFSSSMSESSAGTTHTESISSPRGTTSTLHTTVESTPSPTTTTSFTTSTMMEPPSSTVSTTGRGQTTFPSSTATFPETTTLTPTTDISTVSLTTAMTSPPPVSSSITPTNTMTSMRTTTYWPTATNTLSPLTSSILSSTPVPSTEMITSHTTNTTPLSTLVTTLLTTITRSTPTSETTYPTSPTSIVSDSTTEITYSTSITGTLSTATTLPPTSSSLPTTETATMTPTTTLITTTPNTTSLSTPSFTSSTIYSTVSTSTTAISSASPTSGTMVTSTTMTPSSLSTDTPSTTPTTITYPSVGSTGFLTTATDLTSTFTVSSSSAMSTSVIPSSPSIQNTETSSLVSMTSATTPSLRPTITSTDSTLTSSLLTTFPSTYSFSSSMSASSAGTTHTETISSLPASTNTIHTTAESALAPTTTTSFTTSPTMEPPSTTVATTGTGQTTFPSSTATFLETTTLTPTTDFSTESLTTAMTSTPPITSSITPTDTMTSMRTTTSWPTATNTLSPLTSSILSSTPVPSTEVTTSHTTNTNPVSTLVTTLPITITRSTLTSETAYPSSPTSTVTESTTEITYPTTMTETSSTATSLPPTSSLVSTAETAKTPTTNLVTTTTKTTSHSTTSFTSSTIYSTASTPTTAITSVPTTLGTMVTSTSMIPSTVSTGIPTSQPTTITPSSVGISGSLPMMTDLTSVYTVSSMSARPTSVIPSSPTVQNTETSIFVSMMSATTPSGGPTFTSTENTPTRSLLTSFPVTHSFSSSMSASSVGTTHTQSISSPPAITSTLHTTAESTPSPTTTMSFTTFTKMETPSSTVATTGTGQTTFTSSTATSPKTTTLTPTSDISTGSFKTAVSSTPPITSSITSTYTVTSMTTTTPLGPTATNTLPSFTSSVSSSTPVPSTEAITSGTTNTTPLSTLVTTFSNSDTSSTPTSETTYPTSLTSALTDSTTRTTYSTNMTGTLSTVTSLRPTSSSLLTTVTATVPTTNLVTTTTKITSHSTPSFTSSIATTETPSHSTPRFTSSITTTETPSHSTPRFTSSITNTKTTSHSSPSFTSSITTTETTSHNTPSLTSSITTTKTTSHSTPSYTSLITTTTTTSHSTPSFTSSITTTETTSHNTPSLTSSITTTETTSHSTPSFTSSITTETTSHSTPSFTSLITITEITSHSTLSYTTSITTTETPSHSTLSFTSSITTTETTSHSTPSFTSSITTSEMPSHSTPSFTSSITTTENATHSTPNFTSSITTTETTSHSTPSFTSLITTTETTSHRWGTTETTSYSTPSFTSSNTITETTSHSTPSYITSITTTETPSSSTPSFSSSITTTETTSHSTPGFTSSITTTETTSHSTPSFTSSITTTETTSHDTPSFTSSITTSETPSHSTPSSTSLITTTKTTSHSTPSFTSSITTTETTSHSAHSFTSSITTTETTSHNTRSFTSSITTTETNSHSTTSFTSSITTTETTSHSTPSFSSSITTTETPLHSTPGLTSWVTTTKTTSHITPGLTSSITTTETTSHSTPGFTSSITTTETTSESTPSLSSSTIYSTVSTSTTAITSHFTTSETAVTPTPVTPSSLSTDIPTTSLRTLTPSSVGTSTSLTTTTDFPSIPTDISTLPTRTHIISSSPSIQSTETSSLVGTTSPTMSTVRMTLRITENTPISSFSTSIVVIPETPTQTPPVLTSATGTQTSPAPTTVTFGSTDSSTSTLHTLTPSTALSTIVSTSQVPIPSTHSSTLQTTPSTPSLQTSLTSTSEFTTESFTRGSTSTNAILTSFSTIIWSSTPTIIMSSSPSSASITPVFSTTIHSVPSSPYIFSTENVGSASITGFPSLSSSATTSTSSTSSSLTTALTEITPFSYISLPSTTPCPGTITITIVPASPTDPCVEMDPSTEATSPPTTPLTVFPFTTEMVTCPTSISIQTTLTTYMDTSSMMPESESSISPNASSSTGTGTVPTNTVFTSTRLPTSETWLSNSSVIPLPLPGVSTIPLTMKPSSSLPTILRTSSKSTHPSPPTTRTSETPVATTQTPTTLTSRRTTRITSQMTTQSTLTTTAGTCDNGGTWEQGQCACLPGFSGDRCQLQTRCQNGGQWDGLKCQCPSTFYGSSCEFAVEQVDLDVVETEVGMEVSVDQQFSPDLNDNTSQAYRDFNKTFWNQEWQHRGGLPGPAGDALQPPAGERV

SEQ ID NO: 25787 - protein, 3081 aa, Homo sapiens
MQLLGLLGLLWMLKASPWATGTLSTATSISQVPFPRAEAASAVLSNSPHSRDLAGWPLGVPQLASPAPGHRENAPMTLTTSPHDTLISETLLNSPVSSNTSTTPTSKFAFKVETTPPTVLVYSATTECVYPTSFIITISHPTSICVTTTQVAFTSSYTSTPVTQKPVTTVTSTYSMTTTEKGTSAMTSSPSTTTARETPIVTVTPSSVSATDTTFHTTISSTTRTTERTPLPTGSIHTTTSPTPVFTTLKTAVTSTSPITSSITSTNTVTSMTTTASQPTATNTLSSPTRTILSSTPVLSTETITSGITNTTPLSTLVTTLPTTISRSTPTSETTYTTSPTSTVTDSTTKIAYSTSMTGTLSTETSLPPTSSSLPTTETATTPMTNLVTTTTEISSHSTPSFSSSTIYSTVSTSTTAISSLPPTSGTMVTSTTMTPSSLSTDIPFTTPTTITHHSVGSTGFLTTATDLTSTFTVSSSSAMSTSVIPSSPSIQNTETSSLVSMTSATTPNVRPTFVSTLSTPTSSLLTTFPATYSFSSSMSASSAGTTHTESISSPPASTSTLHTTAESTLAPTTTTSFTTSTTMEPPSTTAATTGTGQTTFTSSTATFPETTTPTPTTDMSTESLTTAMTSPPITSSVTSTNTVTSMTTTTSPPTTTNSFTSLTSMPLSSTPVPSTEVVTSGTINTIPPSILVTTLPTPNASSMTTSETTYPNSPTGPGTNSTTEITYPTTMTETSSTATSLPPTSPLVSTAKTAKTPTTNLVTTTTKTTSHSTTSFTSSTVYSTASTYTTAITSVPTTLGTMVTSTSMISSTVSTGIPTSQPTTITPSSVGISGSLPMMTDLTSVYTVSNMSARPTTVIPSSPTVQNTEISISVSMTSATTPSGGPTFTSTENTPTRSLLTSFPMTHSFSSSMSESSAGTTHTESISSPRGTTSTLHTTVESTPSPTTTTSFTTSTMMEPPSSTVSTTGRGQTTFPSSTATFPETTTLTPTTDISTVSLTTAMTSPPPVSSSITPTNTMTSMRTTTYWPTATNTLSPLTSSILSSTPVPSTEMITSHTTNTTPLSTLVTTLLTTITRSTPTSETTYPTSPTSIVSDSTTEITYSTSITGTLSTATTLPPTSSSLPTTETATMTPTTTLITTTPNTTSLSTPSFTSSTIYSTVSTSTTAISSASPTSGTMVTSTTMTPSSLSTDTPSTTPTTITYPSVGSTGFLTTATDLTSTFTVSSSSAMSTSVIPSSPSIQNTETSSLVSMTSATTPSLRPTITSTDSTLTSSLLTTFPSTYSFSSSMSASSAGTTHTETISSLPASTNTIHTTAESALAPTTTTSFTTSPTMEPPSTTVATTGTGQTTFPSSTATFLETTTLTPTTDFSTESLTTAMTSTPPITSSITPTDTMTSMRTTTSWPTATNTLSPLTSSILSSTPVPSTEVTTSHTTNTNPVSTLVTTLPITITRSTLTSETAYPSSPTSTVTESTTEITYPTTMTETSSTATSLPPTSSLVSTAETAKTPTTNLVTTTTKTTSHSTTSFTSSTIYSTASTPTTAITSVPTTLGTMVTSTSMIPSTVSTGIPTSQPTTITPSSVGISGSLPMMTDLTSVYTVSSMSARPTSVIPSSPTVQNTETSIFVSMMSATTPSGGPTFTSTENTPTRSLLTSFPVTHSFSSSMSASSVGTTHTQSISSPPAITSTLHTTAESTPSPTTTMSFTTFTKMETPSSTVATTGTGQTTFTSSTATSPKTTTLTPTSDISTGSFKTAVSSTPPITSSITSTYTVTSMTTTTPLGPTATNTLPSFTSSVSSSTPVPSTEAITSGTTNTTPLSTLVTTFSNSDTSSTPTSETTYPTSLTSALTDSTTRTTYSTNMTGTLSTVTSLRPTSSSLLTTVTATVPTTNLVTTTTKITSHSTPSFTSSIATTETPSHSTPRFTSSITTTETPSHSTPRFTSSITNTKTTSHSSPSFTSSITTTETTSHNTPSLTSSITTTKTTSHSTPSYTSLITTTTTTSHSTPSFTSSITTTETTSHNTPSLTSSITTTETTSHSTPSFTSSITTETTSHSTPSFTSLITITEITSHSTLSYTTSITTTETPSHSTLSFTSSITTTETTSHSTPSFTSSITTSEMPSHSTPSFTSSITTTENATHSTPNFTSSITTTETTSHSTPSFTSLITTTETTSHRWGTTETTSYSTPSFTSSNTITETTSHSTPSYITSITTTETPSSSTPSFSSSITTTETTSHSTPGFTSSITTTETTSHSTPSFTSSITTTETTSHDTPSFTSSITTSETPSHSTPSSTSLITTTKTTSHSTPSFTSSITTTETTSHSAHSFTSSITTTETTSHNTRSFTSSITTTETNSHSTTSFTSSITTTETTSHSTPSFSSSITTTETPLHSTPGLTSWVTTTKTTSHITPGLTSSITTTETTSHSTPGFTSSITTTETTSESTPSLSSSTIYSTVSTSTTAITSHFTTSETAVTPTPVTPSSLSTDIPTTSLRTLTPSSVGTSTSLTTTTDFPSIPTDISTLPTRTHIISSSPSIQSTETSSLVGTTSPTMSTVRMTLRITENTPISSFSTSIVVIPETPTQTPPVLTSATGTQTSPAPTTVTFGSTDSSTSTLHTLTPSTALSTIVSTSQVPIPSTHSSTLQTTPSTPSLQTSLTSTSEFTTESFTRGSTSTNAILTSFSTIIWSSTPTIIMSSSPSSASITPVFSTTIHSVPSSPYIFSTENVGSASITGFPSLSSSATTSTSSTSSSLTTALTEITPFSYISLPSTTPCPGTITITIVPASPTDPCVEMDPSTEATSPPTTPLTVFPFTTEMVTCPTSISIQTTLTTYMDTSSMMPESESSISPNASSSTGTGTVPTNTVFTSTRLPTSETWLSNSSVIPLPLPGVSTIPLTMKPSSSLPTILRTSSKSTHPSPPTTRTSETPVATTQTPTTLTSRRTTRITSQMTTQSTLTTTAGTCDNGGTWEQGQCACLPGFSGDRCQLQTRCQNGGQWDGLKCQCPSTFYGSSCEFAVEQVDLDVVETEVGMEVSVDQQFSPDLNDNTSQAYRDFNKTFWNQMQKIFADMQGFTFKGVEILSLSPVF

SEQ ID NO: 25788 - protein, 3265 aa, Homo sapiens
MQLLGLLGLLWMLKASPWATGTLSTATSISQVPFPRAEAASAVLSNSPHSRDLAGWPLGVPQLASPAPGHRENAPMTLTTSPHDTLISETLLNSPVSSNTSTTPTSKFAFKVETTPPTVLVYSATTECVYPTSFIITISHPTSICVTTTQVAFTSSYTSTPVTQKPVTTVTSTYSMTTTEKGTSAMTSSPSTTTARETPIVTVTPSSVSATDTTFHTTISSTTRTTERTPLPTGSIHTTTSPTPVFTTLKTAVTSTSPITSSITSTNTVTSMTTTASQPTATNTLSSPTRTILSSTPVLSTETITSGITNTTPLSTLVTTLPTTISRSTPTSETTYTTSPTSTVTDSTTKIAYSTSMTGTLSTETSLPPTSSSLPTTETATTPMTNLVTTTTEISSHSTPSFSSSTIYSTVSTSTTAISSLPPTSGTMVTSTTMTPSSLSTDIPFTTPTTITHHSVGSTGFLTTATDLTSTFTVSSSSAMSTSVIPSSPSIQNTETSSLVSMTSATTPNVRPTFVSTLSTPTSSLLTTFPATYSFSSSMSASSAGTTHTESISSPPASTSTLHTTAESTLAPTTTTSFTTSTTMEPPSTTAATTGTGQTTFTSSTATFPETTTPTPTTDMSTESLTTAMTSPPITSSVTSTNTVTSMTTTTSPPTTTNSFTSLTSMPLSSTPVPSTEVVTSGTINTIPPSILVTTLPTPNASSMTTSETTYPNSPTGPGTNSTTEITYPTTMTETSSTATSLPPTSPLVSTAKTAKTPTTNLVTTTTKTTSHSTTSFTSSTVYSTASTYTTAITSVPTTLGTMVTSTSMISSTVSTGIPTSQPTTITPSSVGISGSLPMMTDLTSVYTVSNMSARPTTVIPSSPTVQNTEISISVSMTSATTPSGGPTFTSTENTPTRSLLTSFPMTHSFSSSMSESSAGTTHTESISSPRGTTSTLHTTVESTPSPTTTTSFTTSTMMEPPSSTVSTTGRGQTTFPSSTATFPETTTLTPTTDISTVSLTTAMTSPPPVSSSITPTNTMTSMRTTTYWPTATNTLSPLTSSILSSTPVPSTEMITSHTTNTTPLSTLVTTLLTTITRSTPTSETTYPTSPTSIVSDSTTEITYSTSITGTLSTATTLPPTSSSLPTTETATMTPTTTLITTTPNTTSLSTPSFTSSTIYSTVSTSTTAISSASPTSGTMVTSTTMTPSSLSTDTPSTTPTTITYPSVGSTGFLTTATDLTSTFTVSSSSAMSTSVIPSSPSIQNTETSSLVSMTSATTPSLRPTITSTDSTLTSSLLTTFPSTYSFSSSMSASSAGTTHTETISSLPASTNTIHTTAESALAPTTTTSFTTSPTMEPPSTTVATTGTGQTTFPSSTATFLETTTLTPTTDFSTESLTTAMTSTPPITSSITPTDTMTSMRTTTSWPTATNTLSPLTSSILSSTPVPSTEVTTSHTTNTNPVSTLVTTLPITITRSTLTSETAYPSSPTSTVTESTTEITYPTTMTETSSTATSLPPTSSLVSTAETAKTPTTNLVTTTTKTTSHSTTSFTSSTIYSTASTPTTAITSVPTTLGTMVTSTSMIPSTVSTGIPTSQPTTITPSSVGISGSLPMMTDLTSVYTVSSMSARPTSVIPSSPTVQNTETSIFVSMMSATTPSGGPTFTSTENTPTRSLLTSFPVTHSFSSSMSASSVGTTHTQSISSPPAITSTLHTTAESTPSPTTTMSFTTFTKMETPSSTVATTGTGQTTFTSSTATSPKTTTLTPTSDISTGSFKTAVSSTPPITSSITSTYTVTSMTTTTPLGPTATNTLPSFTSSVSSSTPVPSTEAITSGTTNTTPLSTLVTTFSNSDTSSTPTSETTYPTSLTSALTDSTTRTTYSTNMTGTLSTVTSLRPTSSSLLTTVTATVPTTNLVTTTTKITSHSTPSFTSSIATTETPSHSTPRFTSSITTTETPSHSTPRFTSSITNTKTTSHSSPSFTSSITTTETTSHNTPSLTSSITTTKTTSHSTPSYTSLITTTTTTSHSTPSFTSSITTTETTSHNTPSLTSSITTTETTSHSTPSFTSSITTETTSHSTPSFTSLITITEITSHSTLSYTTSITTTETPSHSTLSFTSSITTTETTSHSTPSFTSSITTSEMPSHSTPSFTSSITTTENATHSTPNFTSSITTTETTSHSTPSFTSLITTTETTSHRWGTTETTSYSTPSFTSSNTITETTSHSTPSYITSITTTETPSSSTPSFSSSITTTETTSHSTPGFTSSITTTETTSHSTPSFTSSITTTETTSHDTPSFTSSITTSETPSHSTPSSTSLITTTKTTSHSTPSFTSSITTTETTSHSAHSFTSSITTTETTSHNTRSFTSSITTTETNSHSTTSFTSSITTTETTSHSTPSFSSSITTTETPLHSTPGLTSWVTTTKTTSHITPGLTSSITTTETTSHSTPGFTSSITTTETTSESTPSLSSSTIYSTVSTSTTAITSHFTTSETAVTPTPVTPSSLSTDIPTTSLRTLTPSSVGTSTSLTTTTDFPSIPTDISTLPTRTHIISSSPSIQSTETSSLVGTTSPTMSTVRMTLRITENTPISSFSTSIVVIPETPTQTPPVLTSATGTQTSPAPTTVTFGSTDSSTSTLHTLTPSTALSTIVSTSQVPIPSTHSSTLQTTPSTPSLQTSLTSTSEFTTESFTRGSTSTNAILTSFSTIIWSSTPTIIMSSSPSSASITPVFSTTIHSVPSSPYIFSTENVGSASITGFPSLSSSATTSTSSTSSSLTTALTEITPFSYISLPSTTPCPGTITITIVPASPTDPCVEMDPSTEATSPPTTPLTVFPFTTEMVTCPTSISIQTTLTTYMDTSSMMPESESSISPNASSSTGTGTVPTNTVFTSTRLPTSETWLSNSSVIPLPLPGVSTIPLTMKPSSSLPTILRTSSKSTHPSPPTTRTSETPVATTQTPTTLTSRRTTRITSQMTTQSTLTTTAGTCDNGGTWEQGQCACLPGFSGDRCQLQTRCQNGGQWDGLKCQCPSTFYGSSCEFAVEQVDLDVVETEVGMEVSVDQQFSPDLNDNTSQAYRDFNKTFWNQMQKIFADMQGFTFKGVEILSLRNGSIVVDYLVLLEMPFSPQLESEYEQVKTTLKEGLQNASQDVNSCQDSQTLCFKPDSIKVNNNSKTELTPAAICRRAAPTGYEEFYFPLVEATRLRCVTKCTSGVDNAIDCHQGQCVLETSGPTCRSWDQDRKWFETWDEEVVGTFSNWGFEDDGTDKDTNFYVALENVDTTMKVHIKRPEMTSSSV

SEQ ID NO: 25789 - protein, 932 aa, Homo sapiens
MTNCLSFRNGRGLALLCALLGTLCETGSGQIRYSVSEELDKGSFVGNIANDLGLEPRELAERGVRIVSRGRTQLFSLNPQSGSLVTAERIDREELCAQIPLCLVKINILVEDKLKIFEVEIEIKDINDNAPNFPTEELEIKIGELTVPGTRFPIKTAFDPDVGINSLQNYKLSPNDYFSLAVNSVSEGAKYPELVLERALDREKKEIHQLVLVASDGGDPVHSGNLHIQVIVLDANDNPPMFTQPEYRVSVWENVPVGTRLLTVNATDPDEGFNAQVSYILDKMPGKIAEIFHLNSVSGEVSILKSLDYEDAMFYEIKIEAQDGPGLLSRAKILVTVLDVNDNAPEITITSLTSSVPEEGTVGREIALIDVHDRDSGQNGQVEVFVLGNLPFKLEKSIDQYYRLVTATSLDREQISEYNISLRASDGGSPPLSTETHITLHVIDINDNPPTFPHLSYSAYIPENNPRGASIFSVTAQDPDSNNNARITYALTEDTLQGAPLSSFVSINSNTGVLYALRSFDYEQFRDLKLLVTASDSGNPPLSSNVSLNLFVLDQNDNAPEILYPALPTDGSTGVELAPRSAEPGYLVTKVVAVDRDSGQNAWLSYRLLKASEPGLFSVGLHTGEVRTARALLDRDALKQSLVVAVQDHGQPPLSATVTLTVAVADRIPDILADLGSLEPSAKPNDSDLTLYLVVAVAAVSCVFLAFVIVLLALRLRRWHKSRLLQASGGGLASTPGSHFVGADGVRAFLQTYSHEVSLTADSRKSHLIFPQPNYADTLISQESCEKSEPLLITQDLLEMKGDSNLLQQAPPNTDWRFSQAQRPGTSGSQNGDDTGTWPNNQFDTEMLQAMILASASEAADGSSTLGGGAGTMGLSARYGPQFTLQHVPDYRQNVYIPGSNATLTNAAGKRDGKAPAGGNGNKKKSGKKEKK

SEQ ID NO: 25790 - protein, 829 aa, Homo sapiens
MTNCLSFRNGRGLALLCALLGTLCETGSGQIRYSVSEELDKGSFVGNIANDLGLEPRELAERGVRIVSRGRTQLFSLNPQSGSLVTAERIDREELCAQIPLCLVKINILVEDKLKIFEVEIEIKDINDNAPNFPTEELEIKIGELTVPGTRFPIKTAFDPDVGINSLQNYKLSPNDYFSLAVNSVSEGAKYPELVLERALDREKKEIHQLVLVASDGGDPVHSGNLHIQVIVLDANDNPPMFTQPEYRVSVWENVPVGTRLLTVNATDPDEGFNAQVSYILDKMPGKIAEIFHLNSVSGEVSILKSLDYEDAMFYEIKIEAQDGPGLLSRAKILVTVLDVNDNAPEITITSLTSSVPEEGTVGREIALIDVHDRDSGQNGQVEVFVLGNLPFKLEKSIDQYYRLVTATSLDREQISEYNISLRASDGGSPPLSTETHITLHVIDINDNPPTFPHLSYSAYIPENNPRGASIFSVTAQDPDSNNNARITYALTEDTLQGAPLSSFVSINSNTGVLYALRSFDYEQFRDLKLLVTASDSGNPPLSSNVSLNLFVLDQNDNAPEILYPALPTDGSTGVELAPRSAEPGYLVTKVVAVDRDSGQNAWLSYRLLKASEPGLFSVGLHTGEVRTARALLDRDALKQSLVVAVQDHGQPPLSATVTLTVAVADRIPDILADLGSLEPSAKPNDSDLTLYLVVAVAAVSCVFLAFVIVLLALRLRRWHKSRLLQASGGGLASTPGSHFVGADGVRAFLQTYSHEVSLTADSRKSHLIFPQPNYADTLISQESCEKSEPLLITQDLLEMKGDSNLLQVSLFISLIIKNKYENVVIIKL

SEQ ID NO: 25791 - protein, 5762 aa, Homo sapiens
MGAPSACRTLVLALAAMLVVPQAETQGPVEPSWENAGHTMDGGAPTSSPTRRVSFVPPVTVFPSLSPLNPAHNGRVCSTWGDFHYKTFDGDVFRFPGLCNYVFSEHCRAAYEDFNVQLRRGLVGSRPVVTRVVIKAQGLVLEASNGSVLINGQREELPYSRTGLLVEQSGDYIKVSIRLVLTFLWNGEDSALLELDPKYANQTCGLCGDFNGLPAFNEFYAHNARLTPLQFGNLQKLDGPTEQCPDPLPLPAGNCTDEEGICHRTLLGPAFAECHALVDSTAYLAACAQDLCRCPTCPCATFVEYSRQCAHAGGQPRNWRCPELCPRTCPLNMQHQECGSPCTDTCSNPQRAQLCEDHCVDGCFCPPGTVLDDITHSGCLPLGQCPCTHGGRTYSPGTSFNTTCSSCTCSGGLWQCQDLPCPGTCSVQGGAHISTYDEKLYDLHGDCSYVLSKKCADSSFTVLAELRKCGLTDNENCLKAVTLSLDGGDTAIRVQADGGVFLNSIYTQLPLSAANITLFTPSSFFIVVQTGLGLQLLVQLVPLMQVFVRLDPAHQGQMCGLCGNFNQNQADDFTALSGVVEATGAAFANTWKAQAACANARNSFEDPCSLSVENENYARHWCSRLTDPNSAFSRCHSIINPKPFHSNCMFDTCNCERSEDCLCAALSSYVHACAAKGVQLSDWRDGVCTKYMQNCPKSQRYAYVVDACQPTCRGLSEADVTCSVSFVPVDGCTCPAGTFLNDAGACVPAQECPCYAHGTVLAPGEVVHDEGAVCSCTGGKLSCLGASLQKSTGCAAPMVYLDCSNSSAGTPGAECLRSCHTLDVGCFSTHCVSGCVCPPGLVSDGSGGCIAEEDCPCVHNEATYKPGETIRVDCNTCTCRNRRWECSHRLCLGTCVAYGDGHFITFDGDRYSFEGSCEYILAQDYCGDNTTHGTFRIVTENIPCGTTGTTCSKAIKLFVESYELILQEGTFKAVARGPGGDPPYKIRYMGIFLVIETHGMAVSWDRKTSVFIRLHQDYKGRVCGLCGNFDDNAINDFATRSRSVVGDALEFGNSWKLSPSCPDALAPKDPCTANPFRKSWAQKQCSILHGPTFAACRSQVDSTKYYEACVNDACACDSGGDCECFCTAVAAYAQACHDAGLCVSWRTPDTCPLFCDFYNPHGGCEWHYQPCGAPCLKTCRNPSGHCLVDLPGLEGCYPKCPPSQPFFNEDQMKCVAQCGCYDKDGNYYDVGARVPTAENCQSCNCTPSGIQCAHSLEACTCTYEDRTYSYQDVIYNTTDGLGACLIAICGSNGTIIRKAVACPGTPATTPFTFTTAWVPHSTTSPALPVSTVCVREVCRWSSWYNGHRPEPGLGGGDFETFENLRQRGYQVCPVLADIECRAAQLPDMPLEELGQQVDCDRMRGLMCANSQQSPPLCHDYELRVLCCEYVPCGPSPAPGTSPQPSLSASTEPAVPTPTQTTATEKTTLWVTPSIRSTAALTSQTGSSSGPVTVTPSAPGTTTCQPRCQWTEWFDEDYPKSEQLGGDVESYDKIRAAGGHLCQQPKDIECQAESFPNWTLAQVGQKVHCDVHFGLVCRNWEQEGVFKMCYNYRIRVLCCSDDHCRGRATTPPPTTELETATTTTTQALFSTPQPTSSPGLTRAPPASTTAVPTLSEGLTSPRYTSTLGTATTGGPTTPAGSTEPTVPGVATSTLPTRSALPGTTGSLGTWRPSQPPTLAPTTMATSRARPTGTASTASKEPLTTSLAPTLTSELSTSQAETSTPRTETTMSPLTNTTTSQGTTRCQPKCEWTEWFDVDFPTSGVAGGDMETFENIRAAGGKMCWAPKSIECRAENYPEVSIDQVGQVLTCSLETGLTCKNEDQTGRFNMCFNYNVRVLCCDDYSHCPSTPATSSTATPSSTPGTTWILTKPTTTATTTASTGSTATPTSTLRTAPPPKVLTTTATTPTVTSSKATPSSSPGTATALPALRSTATTPTATSVTPIPSSSLGTTWTRLSQTTTPTATMSTATPSSTPETAHTSTVLTATATTTGATGSVATPSSTPGTAHTTKVPTTTTTGFTATPSSSPGTALTPPVWISTTTTPTTRGSTVTPSSIPGTTHTATVLTTTTTTVATGSMATPSSSTQTSGTPPSLTTTATTITATGSTTNPSSTPGTTPIPPVLTTTATTPAATSNTVTPSSALGTTHTPPVPNTMATTHGRSLPPSSPHTVRTAWTSATSGILGTTHITEPSTVTSHTLAATTGTTQHSTPALSSPHPSSRTTESPPSPGTTTPGHTTATSRTTATATPSKTRTSTLLPSSPTSAPITTVVTMGCEPQCAWSEWLDYSYPMPGPSGGDFDTYSNIRAAGGAVCEQPLGLECRAQAQPGVPLRELGQVVECSLDFGLVCRNREQVGKFKMCFNYEIRVFCCNYGHCPSTPATSSTAMPSSTPGTTWILTELTTTATTTESTGSTATPSSTPGTTWILTEPSTTATVTVPTGSTATASSTQATAGTPHVSTTATTPTVTSSKATPFSSPGTATALPALRSTATTPTATSFTAIPSSSLGTTWTRLSQTTTPTATMSTATPSSTPETVHTSTVLTTTATTTGATGSVATPSSTPGTAHTTKVLTTTTTGFTATPSSSPGTARTLPVWISTTTTPTTRGSTVTPSSIPGTTHTPTVLTTTTTTVATGSMATPSSSTQTSGTPPSLTTTATTITATGSTTNPSSTPGTTPIPPVLTTTATTPAATSSTVTPSSALGTTHTPPVPNTTATTHGRSLSPSSPHTVRTAWTSATSGTLGTTHITEPSTGTSHTPAATTGTTQHSTPALSSPHPSSRTTESPPSPGTTTPGHTRATSRTTATATPSKTRTSTLLPSSPTSAPITTVVTMGCEPQCAWSEWLDYSYPMPGPSGGDFDTYSNIRAAGGAVCEQPLGLECRAQAQPGVPLRELGQVVECSLDFGLVCRNREQVGKFKMCFNYEIRVFCCNYGHCPSTPATSSTATPSSTPGTTWILTEQTTAATTTATTGSTAIPSSTPGTAPPPKVLTSTATTPTATSSKATSSSSPRTATTLPVLTSTATKSTATSFTPIPSFTLGTTGTLPEQTTTPMATMSTIHPSSTPETTHTSTVLTTKATTTRATSSMSTPSSTPGTTWILTELTTAATTTAATGPTATPSSTPGTTWILTEPSTTATVTVPTGSTATASSTRATAGTLKVLTSTATTPTVISSRATPSSSPGTATALPALRSTATTPTATSVTAIPSSSLGTAWTRLSQTTTPTATMSTATPSSTPETVHTSTVLTTTTTTTRATGSVATPSSTPGTAHTTKVPTTTTTGFTATPSSSPGTALTPPVWISTTTTPTTRGSTVTPSSIPGTTHTATVLTTTTTTVATGSMATPSSSTQTSGTPPSLTTTATTITATGSTTNPSSTPGTTPIPPVLTTTATTPAATSSTVTPSSALGTTHTPPVPNTTATTHGRSLPPSSPHTVRTAWTSATSGILGTTHITEPSTVTSHTPAATTSTTQHSTPALSSPHPSSRTTESPPSPGTTTPGHTRGTSRTTATATPSKTRTSTLLPSSPTSAPITTVVTTGCEPQCAWSEWLDYSYPMPGPSGGDFDTYSNIRAAGGAVCEQPLGLECRAQAQPGVPLRELGQVVECSLDFGLVCRNREQVGKFKMCFNYEIRVFCCNYGHCPSTPATSSTATPSSTPGTTWILTKLTTTATTTESTGSTATPSSTPGTTWILTEPSTTATVTVPTGSTATASSTQATAGTPHVSTTATTPTVTSSKATPFSSPGTATALPALRSTATTPTATSFTAIPSSSLGTTWTRLSQTTTPTATMSTATPSSTPETAHTSTVLTTTATTTRATGSVATPSSTPGTAHTTKVPTTTTTGFTVTPSSSPGTARTPPVWISTTTTPTTSGSTVTPSSVPGTTHTPTVLTTTTTTVATGSMATPSSSTQTSGTPPSLITTATTITATGSTTNPSSTPGTTPIPPVLTTTATTPAATSSTVTPSSALGTTHTPPVPNTTATTHGRSLSPSSPHTVRTAWTSATSGTLGTTHITEPSTGTSHTPAATTGTTQHSTPALSSPHPSSRTTESPPSPGTTTPGHTTATSRTTATATPSKTRTSTLLPSSPTSAPITTVVTTGCEPQCAWSEWLDYSYPMPGPSGGDFDTYSNIRAAGGAVCEQPLGLECRAQAQPGVPLGELGQVVECSLDFGLVCRNREQVGKFKMCFNYEIRVFCCNYGHCPSTPATSSTAMPSSTPGTTWILTELTTTATTTASTGSTATPSSTPGTAPPPKVLTSPATTPTATSSKATSSSSPRTATTLPVLTSTATKSTATSVTPIPSSTLGTTGTLPEQTTTPVATMSTIHPSSTPETTHTSTVLTTKATTTRATSSTSTPSSTPGTTWILTELTTAATTTAATGPTATPSSTPGTTWILTELTTTATTTASTGSTATPSSTPGTTWILTEPSTTATVTVPTGSTATASSTQATAGTPHVSTTATTPTVTSSKATPSSSPGTATALPALRSTATTPTATSFTAIPSSSLGTTWTRLSQTTTPTATMSTATPSSTPETVHTSTVLTATATTTGATGSVATPSSTPGTAHTTKVPTTTTTGFTATPSSSPGTALTPPVWISTTTTPTTTTPTTSGSTVTPSSIPGTTHTARVLTTTTTTVATGSMATPSSSTQTSGTPPSLTTTATTITATGSTTNPSSTPGTTPITPVLTSTATTPAATSSKATSSSSPRTATTLPVLTSTATKSTATSFTPIPSSTLWTTWTVPAQTTTPMSTMSTIHTSSTPETTHTSTVLTTTATMTRATNSTATPSSTLGTTRILTELTTTATTTAATGSTATLSSTPGTTWILTEPSTIATVMVPTGSTATASSTLGTAHTPKVVTTMATMPTATASTVPSSSTVGTTRTPAVLPSSLPTFSVSTVSSSVLTTLRPTGFPSSHFSTPCFCRAFGQFFSPGEVIYNKTDRAGCHFYAVCNQHCDIDRFQGACPTSPPPVSSAPLSSPSPAPGCDNAIPLRQVNETWTLENCTVARCVGDNRVVLLDPKPVANVTCVNKHLPIKVSDPSQPCDFHYECECICSMWGGSHYSTFDGTSYTFRGNCTYVLMREIHARFGNLSLYLDNHYCTASATAAAARCPRALSIHYKSMDIVLTVTMVHGKEEGLILFDQIPVSSGFSKNGVLVSVLGTTTMRVDIPALGVSVTFNGQVFQARLPYSLFHNNTEGQCGTCTNNQRDDCLQRDGTTAASCKDMAKTWLVPDSRKDGCWAPTGTPPTASPAAPVSSTPTPTPCPPQPLCDLMLSQVFAECHNLVPPGPFFNACISDHCRGRLEVPCQSLEAYAELCRARGVCSDWRGATGGLCDLTCPPTKVYKPCGPIQPATCNSRNQSPQLEGMAEGCFCPEDQILFNAHMGICVQACPCVGPDGFPKFPGERWVSNCQSCVCDEGSVSVQCKPLPCDAQGQPPPCNRPGFVTVTRPRAENPCCPETVCVCNTTTCPQSLPVCPPGQESICTQEEGDCCPTFRCRPQLCSYNGTFYGVGATFPGALPCHMCTCLSGDTQDPTVQCQEDACNNTTCPQGFEYKRVAGQCCGECVQTACLTPDGQPVQLNETWVNSHVDNCTVYLCEAEGGVHLLTPQPASCPDVSSCRGSLRKTGCCYSCEEDSCQVRINTTILWHQGCETEVNITFCEGSCPGASKYSAEAQAMQHQCTCCQERRVHEETVPLHCPNGSAILHTYTHVDECGCTPFCVPAPMAPPHTRGFPAQEATAV

SEQ ID NO: 25792 - protein, 200 aa, Homo sapiens
MASLYVGDLHPEVTEAMLYEKFSPAGPILSIRICRDKITRRSLGYAYVNYQQPVDAKRALETLNFDVIKGRPVRIMWSQRDPSLRKSGVGNVFIKNLGKTIDNKALYNIFSAFGNILSCKVACDEKGPKGYGFVHFQKQESAERAIDVMNGMFLNYRKIFVGRFKSHKEREAERGAWARQSTSADVKDFEEDTDEEATLR

SEQ ID NO: 25793 - protein, 593 aa, Homo sapiens
MRDSTGAGNSLVHKRSPLRRNQKTPTSLTKLSLQDGHKAKKPACKFEEGQDVLARWSDGLFYLGTIKKINILKQSCFIIFEDSSKSWVLWKDIQTGATGSGEMVCTICQEEYSEAPNEMVICDKCGQGYHQLCHTPHIDSSVIDSDEKWLCRQCVFATTTKRGGALKKGPNAKALQVMKQTLPYSVADLEWDAGHKTNVQQCYCYCGGPGDWYLKMLQCCKCKQWFHEACVQCLQKPMLFGDRFYTFICSVCSSGPEYLKRLPLQWVDIAHLCLYNLSVIHKKKYFDSELELMTYINENWDRLHPGELADTPKSERYEHVLEALNDYKTMFMSGKEIKKKKHLFGLRIRVPPVPPNVAFKAEKEPEGTSHEFKIKGRKASKPISDSREVSNGIEKKGKKKSVGRPPGPYTRKMIQKTAEPLLDKESISENPTLDLPCSIGRTEGTAHSSNTSDVDFTGASSAKETTSSSISRHYGLSDSRKRTRTGRSWPAAIPHLRRRRGRLPRRALQTQNSEIVKDDEGKEDYQFDELNTEILNNLADQELQLNHLKNSITSYFGAAGRIACGEKYRVLARRVTLDGKVQYLVEWEGATAS

SEQ ID NO: 25794 - protein, 262 aa, Homo sapiens
MSGKEIKKKKHLFGLRIRVPPVPPNVAFKAEKEPEGTSHEFKIKGRKASKPISDSREVSNGIEKKGKKKSVGRPPGPYTRKMIQKTAEPLLDKESISENPTLDLPCSIGRTEGTAHSSNTSDVDFTGASSAKETTSSSISRHYGLSDSRKRTRTGRSWPAAIPHLRRRRGRLPRRALQTQNSEIVKDDEGKEDYQFDELNTEILNNLADQELQLNHLKNSITSYFGAAGRIACGEKYRVLARRVTLDGKVQYLVEWEGATAS

SEQ ID NO: 25795 - protein, 491 aa, Homo sapiens
MVCTICQEEYSEAPNEMVICDKCGQGYHQLCHTPHIDSSVIDSDEKWLCRQCVFATTTKRGGALKKGPNAKALQVMKQTLPYSVADLEWDAGHKTNVQQCYCYCGGPGDWYLKMLQCCKCKQWFHEACVQCLQKPMLFGDRFYTFICSVCSSGPEYLKRLPLQWVDIAHLCLYNLSVIHKKKYFDSELELMTYINENWDRLHPGELADTPKSERYEHVLEALNDYKTMFMSGKEIKKKKHLFGLRIRVPPVPPNVAFKAEKEPEGTSHEFKIKGRKASKPISDSREVSNGIEKKGKKKSVGRPPGPYTRKMIQKTAEPLLDKESISENPTLDLPCSIGRTEGTAHSSNTSDVDFTGASSAKETTSSSISRHYGLSDSRKRTRTGRSWPAAIPHLRRRRGRLPRRALQTQNSEIVKDDEGKEDYQFDELNTEILNNLADQELQLNHLKNSITSYFGAAGRIACGEKYRVLARRVTLDGKVQYLVEWEGATAS

SEQ ID NO: 25796 - protein, 536 aa, Homo sapiens
MRDSTGAGNSLVHKRSPLRRNQKTPTSLTKLSLQDGHKAKKPACKFEEGQDVLARWSDGLFYLGTIKKINILKQSCFIIFEDSSKSWVLWKDIQTGATGSGEMVCTICQEEYSEAPNEMVICDKCGQGYHQLCHTPHIDSSVIDSDEKWLCRQCVFATTTKRGGALKKGPNAKALQVMKQTLPYSVADLEWDAGHKTNVQQCYCYCGGPGDWYLKMLQCCKCKQWFHEACVQCLQKPMLFGDRFYTFICSVCSSGPEYLKRLPLQWVDIAHLCLYNLSVIHKKKYFDSELELMTYINENWDRLHPGELADTPKSERYEHVLEALNDYKTMEVSNGIEKKGKKKSVGRPPGPYTRKMIQKTAEPLLDKESISENPTLDLPCSIGRTEGTAHSSNTSDVDFTGASSAKETTSSSISRHYGLSDSRKRTRTGRSWPAAIPHLRRRRGRLPRRALQTQNSEIVKDDEGKEDYQFDELNTEILNNLADQELQLNHLKNSITSYFGAAGRIACGEKYRVLARRVTLDGKVQYLVEWEGATAS

SEQ ID NO: 25797 - protein, 904 aa, Homo sapiens
MDRYLLLVIWGEGKFPSAASREAEHGPEVSSGEGTENQPDFTAANVYHLLKRSISASINPEDSTFPACSVGGIPGSKKWFFAVQAIYGFYQFCSSDWQEIHFDTEKDKIEDVLQTNIEECLGAVECFEEEDSNSRESLSLADLYEEAAENLHQLSDKLPAPGRAMVDIILLLSDKDPPKLKDYLPTVGALKHLREWYSAKITIAGNHCEINCQKIAEYLSANVVSLEDLRNVIDSKELWRGKIQIWERKFGFEISFPEFCLKGVTLKNFSTSNLNTDFLAKKIIPSKDKNILPKVFHYYGPALEFVQMIKLSDLPSCYMSDIEFELGLTNSTKQNSVLLLEQISSLCSKVGALFVLPCTISNILIPPPNQLSSRKWKEYIAKKPKTISVPDVEVKGECSSYYLLLQGNGNRRCKATLIHSANQINGSFALNLIHGKMKTKTEEAKLSFPFDLLSLPHFSGEQIVQREKQLANVQVLALEECLKRRKLAKQPETVSVAELKSLLVLTRKHFLDYFDAVIPKMILRKMDKIKTFNILNDFSPVEPNSSSLMETNPLEWPERHVLQNLETFEKTKQKMRTGSLPHSSEQLLGHKEGPRDSITLLDAKELLKYFTSDGLPIGDLQPLPIQKGEKTFVLTPELSPGKLQVLPFEKASVCHYHGIEYCLDDRKALERDGGFSELQSRLIRYETQTTCTRESFPVPTVLSPLPSPVVSSDPGSVPDGEVLQNELRTEVSRLKRRSKDLNCLYPRKRLVKSESSESLLSQTTGNSNHYHHHVTSRKPQTERSLPVTCPLVPIPSCETPKLATKTSSGQKSMHESKTSRQIKESRSQKHTRILKEVVTETLKKHSITETHECFTACSQRLFEISKFYLKDLKTSRGLFEEMKKTANNNAVQVIDWVLEKTSKK

SEQ ID NO: 25798 - protein, 329 aa, Homo sapiens
MDRYLLLVIWGEGKFPSAASREAEHGPEVSSGEGTENQPDFTAANVYHLLKRSISASINPEDSTFPACSVGGIPGSKKWFFAVQAIYGFYQFCSSDWQEIHFDTEKDKIEDVLQTNIEECLGAVECFEEEDSNSRESLSLADLYEEAAENLHQLSDKLPAPGRAMVDIILLLSDKDPPKLKDYLPTVGALKHLREWYSAKITIAGNHCEINCQKIAEYLSANVVSLEDLRNVIDSKELWRGKIQIWERKFGFEISFPEFCLKGVTLKNFSTSNLNTDFLAKKIIPSKDKNILPKVFHYYGPALEFVQMIKLSDLPSCYMSDIEFEFTED

SEQ ID NO: 25799 - protein, 668 aa, Homo sapiens
MAANMYRVGDYVYFENSSSNPYLVRRIEELNKTANGNVEAKVVCLFRRRDISSSLNSLADSNAREFEEESKQPGVSEQQRHQLKHRELFLSRQFESLPATHIRGKCSVTLLNETDILSQYLEKEDCFFYSLVFDPVQKTLLADQGEIRVGCKYQAEIPDRLVEGESDNRNQQKMEMKVWDPDNPLTDRQIDQFLVVARAVGTFARALDCSSSIRQPSLHMSAAAASRDITLFHAMDTLQRNGYDLAKAMSTLVPQGGPVLCRDEMEEWSASEAMLFEEALEKYGKDFNDIRQDFLPWKSLASIVQFYYMWKTTDRYIQQKRLKAAEADSKLKQVYIPTYTKPNPNQIISVGSKPGMNGAGFQKGLTCESCHTTQSAQWYAWGPPNMQCRLCASCWIYWKKYGGLKTPTQLEGATRGTTEPHSRGHLSRPEAQSLSPYTTSANRAKLLAKNRQTFLLQTTKLTRLARRMCRDLLQPRRAARRPYAPINANAIKAECSIRLPKAAKTPLKIHPLVRLPLATIVKDLVAQAPLKPKTPRGTKTPINRNQLSQNRGLGGIMVKRAYETMAGAGVPFSANGRPLASGIRSSSQPAAKRQKLNPADAPNPVVFVATKDTRALRKALTHLEMRRAARRPNLPLKVKPTLIAVRPPVPLPAPSHPASTNEPIVLED

SEQ ID NO: 25800 - protein, 495 aa, Homo sapiens
MEMKVWDPDNPLTDRQIDQFLVVARAVGTFARALDCSSSIRQPSLHMSAAAASRDITLFHAMDTLQRNGYDLAKAMSTLVPQGGPVLCRDEMEEWSASEAMLFEEALEKYGKDFNDIRQDFLPWKSLASIVQFYYMWKTTDRYIQQKRLKAAEADSKLKQVYIPTYTKPNPNQIISVGSKPGMNGAGFQKGLTCESCHTTQSAQWYAWGPPNMQCRLCASCWIYWKKYGGLKTPTQLEGATRGTTEPHSRGHLSRPEAQSLSPYTTSANRAKLLAKNRQTFLLQTTKLTRLARRMCRDLLQPRRAARRPYAPINANAIKAECSIRLPKAAKTPLKIHPLVRLPLATIVKDLVAQAPLKPKTPRGTKTPINRNQLSQNRGLGGIMVKRAYETMAGAGVPFSANGRPLASGIRSSSQPAAKRQKLNPADAPNPVVFVATKDTRALRKALTHLEMRRAARRPNLPLKVKPTLIAVRPPVPLPAPSHPASTNEPIVLED

SEQ ID NO: 25801 - protein, 251 aa, Homo sapiens
MPRYVPLLLLLLLLRCSERGGGVNFGEKDAKVPGTWRDGVRVPGEGASWDSDRASPERRYGIVGLSQSISTKHPETSPKDSRIRENDVTADGRTTEDHITADPGTTEDSVTADPGTTEDNVTVDPGTTEGSVTADPATTKDYVSADPGTTKDSVTADPGTTENFVTADPGTTKDSITADPRTTEDSVTADPGTTKHSITVDPGTTEDSVTADPGTTKHSITADPGTTEDSVTADPGTTEDETTKHGDTHLL

SEQ ID NO: 25802 - protein, 362 aa, Homo sapiens
METDAPQPGLASPDSPHDPCKMFIGGLSWQTTQEGLREYFGQFGEVKECLVMRDPLTKRSRGFGFVTFMDQAGVDKVLAQSRHELDSKTIDPKVAFPRRAQPKMVTRTKKIFVGGLSVNTTVEDVKQYFEQFGKVDDAMLMFDKTTNRHRGFGFVTFESEDIVEKVCEIHFHEINNKMVECKKAQPKEVMSPTGSARGRSRVMPYGMDAFMLGIGMLGYPGFQATTYASRSYTGLAPGYTYQFPEFRVERTPLPSAPVLPELTAIPLTAYGPMAAAAAAAAVVRGTGSHPWTMAPPPGSTPSRTGGFLGTTSPGPMAELYGAANQDSGVSSYISAASPAPSTGFGHSLGGPLIATAFTNGYH

SEQ ID NO: 25803 - protein, 577 aa, Homo sapiens
MNPVNATALYISASRLVLNYDPGDPKAFTEINRLLPYFRQSLSCCVCGHLLQDPIAPTNSTCQHYVCKTCKGKKMMMKPSCSWCKDYEQFEENKQLSILVNCYKKLCEYITQTTLARDIIEAVDCSSDILALLNDGSLFCEETEKPSDSSFTLCLTHSPLPSTSEPTTDPQASLSPMSESTLSIAIGSSVINGLPTYNGLSIDRFGINIPSPEHSNTIDVCNTVDIKTEDLSDSLPPVCDTVATDLCSTGIDICSFSEDIKPGDSLLLSVEEVLRSLETVSNTEVCCPNLQPNLEATVSNGPFLQLSSQSLSHNVFMSTSPALHGLSCTAATPKIAKLNRKRSRSESDSEKVQPLPISTIIRGPTLGASAPVTVKRESKISLQPIATVPNGGTTPKISKTVLLSTKSMKKSHEHGSKKSHSKTKPGILKKDKAVKEKIPSHHFMPGSPTKTVYKKPQEKKGCKCGRATQNPSVLTCRGQRCPCYSNRKACLDCICRGCQNSYMANGEKKLEAFAVPEKALEQTRLTLGINVTSIAVRNASTSTSVINVTGSPVTTFLAASTHDDKSLDEAIDMRFDC

SEQ ID NO: 25804 - protein, 503 aa, Homo sapiens
MMMKPSCSWCKDYEQFEENKQLSILVNCYKKLCEYITQTTLARDIIEAVDCSSDILALLNDGSLFCEETEKPSDSSFTLCLTHSPLPSTSEPTTDPQASLSPMSESTLSIAIGSSVINGLPTYNGLSIDRFGINIPSPEHSNTIDVCNTVDIKTEDLSDSLPPVCDTVATDLCSTGIDICSFSEDIKPGDSLLLSVEEVLRSLETVSNTEVCCPNLQPNLEATVSNGPFLQLSSQSLSHNVFMSTSPALHGLSCTAATPKIAKLNRKRSRSESDSEKVQPLPISTIIRGPTLGASAPVTVKRESKISLQPIATVPNGGTTPKISKTVLLSTKSMKKSHEHGSKKSHSKTKPGILKKDKAVKEKIPSHHFMPGSPTKTVYKKPQEKKGCKCGRATQNPSVLTCRGQRCPCYSNRKACLDCICRGCQNSYMANGEKKLEAFAVPEKALEQTRLTLGINVTSIAVRNASTSTSVINVTGSPVTTFLAASTHDDKSLDEAIDMRFDC

SEQ ID NO: 25805 - protein, 317 aa, Homo sapiens
MAVQGSQRRLLGSLNSTPTAIPQLGLAANQTGARCLEVSISDGLFLSLGLVSLVENALVVATIAKNRNLHSPMYCFICCLALSDLLVSGSNVLETAVILLLEAGALVARAAVLQQLDNVIDVITCSSMLSSLCFLGAIAVDRYISIFYALRYHSIVTLPRARRAVAAIWVASVVFSTLFIAYYDHVAVLLCLVVFFLAMLVLMAVLYVHMLARACQHAQGIARLHKRQRPVHQGFGLKGAVTLTILLGIFFLCWGPFFLHLTLIVLCPEHPTCGCIFKNFNLFLALIICNAIIDPLIYAFHSQELRRTLKEVLTCSW

SEQ ID NO: 25806 - protein, 1849 aa, Homo sapiens
MARLADYFIVVGYDHEKPGSGEGLGKIIQRFPQKDWDDTPFPQGIELFCQPGGWQLSRERKQPTFFVVVLTDIDSDRHYCSCLTFYEAEINLQGTKKEEIEGEAKVSGLIQPAEVFAPKSLVLVSRLYYPEIFRACLGLIYTVYVDSLNVSLESLIANLCACLVPAAGGSQKLFSLGAGDRQLIQTPLHDSLPITGTSVALLFQQLGIQNVLSLFCAVLTENKVLFHSASFQRLSDACRALESLMFPLKYSYPYIPILPAQLLEVLSSPTPFIIGVHSVFKTDVHELLDVIIADLDGGTIKIPECIHLSSLPEPLLHQTQSALSLILHPDLEVADHAFPPPRTALSHSKMLDKEVRAVFLRLFAQLFQGYRSCLQLIRIHAEPVIHFHKTAFLGQRGLVENDFLTKVLSGMAFAGFVSERGPPYRSCDLFDELVAFEVERIKVEENNPVKMIKHVRELAEQLFKNENPNPHMAFQKVPRPTEGSHLRVHILPFPEINEARVQELIQENVAKNQNAPPATRIEKKCVVPAGPPVVSIMDKVTTVFNSAQRLEVVRNCISFIFENKILETEKTLPAALRALKGKAARQCLTDELGLHVQQNRAILDHQQFDYIIRMMNCTLQDCSSLEEYNIAAALLPLTSAFYRKLAPGVSQFAYTCVQDHPIWTNQQFWETTFYNAVQEQVRSLYLSAKEDNHAPHLKQKDKLPDDHYQEKTAMDLAAEQLRLWPTLSKSTQQELVQHEESTVFSQAIHFANLMVNLLVPLDTSKNKLLRTSAPGDWESGSNSIVTNSIAGSVAESYDTESGFEDSENTDIANSVVRFITRFIDKVCTESGVTQDHIKSLHCMIPGIVAMHIETLEAVHRESRRLPPIQKPKILRPALLPGEEIVCEGLRVLLDPDGREEATGGLLGGPQLLPAEGALFLTTYRILFRGTPHDQLVGEQTVVRSFPIASITKEKKITMQNQLQQNMQEGLQITSASFQLIKVAFDEEVSPEVVEIFKKQLMKFRYPQSIFSTFAFAAGQTTPQIILPKQKEKNTSFRTFSKTIVKGAKRAGKMTIGRQYLLKKKTGTIVEERVNRPGWNEDDDVSVSDESELPTSTTLKASEKSTMEQLVEKACFRDYQRLGLGTISGSSSRSRPEYFRITASNRMYSLCRSYPGLLVVPQAVQDSSLPRVARCYRHNRLPVVCWKNSRSGTLLLRSGGFHGKGVVGLFKSQNSPQAAPTSSLESSSSIEQEKYLQALLNAVSVHQKLRGNSTLTVRPAFALSPGVWASLRSSTRLISSPTSFIDVGARLAGKDHSASFSNSSYLQNQLLKRQAALYIFGEKSQLRNFKVEFALNCEFVPVEFHEIRQVKASFKKLMRACIPSTIPTDSEVTFLKALGDSEWFPQLHRIMQLAVVVSEVLENGSSVLVCLEEGWDITAQVTSLVQLLSDPFYRTLEGFQMLVEKEWLSFGHKFSQRSSLTLNCQGSGFAPVFLQFLDCVHQVHNQYPTEFEFNLYYLKFLAFHYVSNRFKTFLLDSDYERLEHGTLFDDKGEKHAKKGVCIWECIDRMHKRSPIFFNYLYSPLEIEALKPNVNVSSLKKWDYYIEETLSTGPSYDWMMLTPKHFPSEDSDLAGEAGPRSQRRTVWPCYDDVSCTQPDALTSLFSEIEKLEHKLNQAPEKWQQLWERVTVDLKEEPRTDRSQRHLSRSPGIVSTNLPSYQKRSLLHLPDSSMGEEQNSSISPSNGVERRAATLYSQYTSKNDENRSFEGTLYKRGALLKGWKPRWFVLDVTKHQLRYYDSGEDTSCKGHIDLAEVEMVIPAGPSMGAPKHTSDKAFFDLKTSKRVYNFCAQDGQSAQQWMDKIQSCISDA

SEQ ID NO: 25807 - protein, 1152 aa, Homo sapiens
MARLADYFIVVGYDHEKPGSGEGLGKIIQRFPQKDWDDTPFPQGIELFCQPGGWQLSRERKQPTFFVVVLTDIDSDRHYCSCLTFYEAEINLQGTKKEEIEGEAKVSGLIQPAEVFAPKSLVLVSRLYYPEIFRACLGLIYTVYVDSLNVSLESLIANLCACLVPAAGGSQKLFSLGAGDRQLIQTPLHDSLPITGTSVALLFQQLGIQNVLSLFCAVLTENKVLFHSASFQRLSDACRALESLMFPLKYSYPYIPILPAQLLEVLSSPTPFIIGVHSVFKTDVHELLDVIIADLDGGTIKIPECIHLSSLPEPLLHQTQSALSLILHPDLEVADHAFPPPRTALSHSKMLDKEVRAVFLRLFAQLFQGYRSCLQLIRIHAEPVIHFHKTAFLGQRGLVENDFLTKVLSGMAFAGFVSERGPPYRSCDLFDELVAFEVERIKVEENNPVKMIKHVRELAEQLFKNENPNPHMAFQKVPRPTEGSHLRVHILPFPEINEARVQELIQENVAKNQNAPPATRIEKKCVVPAGPPVVSIMDKVTTVFNSAQRLEVVRNCISFIFENKILETEKTLPAALRALKGKAARQCLTDELGLHVQQNRAILDHQQFDYIIRMMNCTLQDCSSLEEYNIAAALLPLTSAFYRKLAPGVSQFAYTCVQDHPIWTNQQFWETTFYNAVQEQVRSLYLSAKEDNHAPHLKQKDKLPDDHYQEKTAMDLAAEQLRLWPTLSKSTQQELVQHEESTVFSQAIHFANLMVNLLVPLDTSKNKLLRTSAPGDWESGSNSIVTNSIAGSVAESYDTESGFEDSENTDIANSVVRFITRFIDKVCTESGVTQDHIKSLHCMIPGIVAMHIETLEAVHRESRRLPPIQKPKILRPALLPGEEIVCEGLRVLLDPDGREEATGGLLGGPQLLPAEGALFLTTYRILFRGTPHDQLVGEQTVVRSFPIASITKEKKITMQNQLQQNMQEGLQITSASFQLIKVAFDEEVSPEVVEIFKKQLMKFRYPQSIFSTFAFAAGQTTPQIILPKQKEKNTSFRTFSKTIVKGAKRAGKMTIGRQYLLKKKTGTIVEERVNRPGWNEDDDVSVSDESELPTSTTLKASEKSTMEQLVEKACFRDYQRLGLGTISGSSSRSRPEYFRITASNRMYSLCRR

SEQ ID NO: 25808 - protein, 621 aa, Homo sapiens
MEHIRTTKVEQVKLLDRFSTSNKSLTGTLYLTATHLLFIDSHQKETWILHHHIASVEKLALTTSGCPLVIQCKNFRTVHFIVPRERDCHDIYNSLLQLSKQAKYEDLYAFSYNPKQNDSERLQGWQLIDLAEEYKRMGVPNSHWQLSDANRDYKICETYPRELYVPRIASKPIIVGSSKFRSKGRFPVLSYYHQDKEAAICRCSQPLSGFSARCLEDEHLLQAISKANPVNRYMYVMDTRPKLNAMANRAAGKGYENEDNYSNIRFQFVGIENIHVMRSSLQKLLEVNGTKGLSVNDFYSGLESSGWLRHIKAVMDAAIFLAKAITVENASVLVHCSDGWDRTSQVCSLGSLLLDSYYRTIKGFMVLIEKDWISFGHKFSERCGQLDGDPKEVSPVFTQFLECVWHLTEQFPQAFEFSEAFLLQIHEHIHSCQFGNFLGNCQKEREELKLKEKTYSLWPFLLEDQKKYLNPLYSSESHRFTVLEPNTVSFNFKFWRNMYHQFDRTLHPRQSVFNIIMNMNEQNKQLEKDIKDLESKIKQRKNKQTDGILTKELLHSVHPESPNLKTSLCFKEQTLLPVNDALRTIEGSSPADNRYSEYAEEFSKSEPAVVSLEYGVARMTC

SEQ ID NO: 25809 - protein, 548 aa, Homo sapiens
MEHIRTTKVEQVKLLDRFSTSNKSLTGTLYLTATHLLFIDSHQKETWILHHHIASVEKLALTTSGCPLVIQCKNFRTVHFIVPRERDCHDIYNSLLQLSKQAKYEDLYAFSYNPKQNDSERLQGWQLIDLAEEYKRMGVPNSHWQLSDANRDYKICETYPRELYVPRIASKPIIVGSSKFRSKGRFPVLSYYHQDKEAAICRCSQPLSGFSARCLEDEHLLQAISKANPVNRYMYVMDTRPKLNAMANRAAGKGYENEDNYSNIRFQFVGIENIHVMRSSLQKLLEVNGTKGLSVNDFYSGLESSGWLRHIKAVMDAAIFLAKAITVENASVLVHCSDGWDRTSQVCSLGSLLLDSYYRTIKGFMVLIEKDWISFGHKFSERCGQLDGDPKEVSPVFTQFLECVWHLTEQFPQAFEFSEAFLLQIHEHIHSCQFGNFLGNCQKEREELKLKEKTYSLWPFLLEDQKKYLNPLYSSESHRFTVLEPNTVSFNFKFWRNMYHQFDRTLHPRQSVFNIIMNMNEQNKQLEKDIKDLESLTSYSSFKIIVGQ

SEQ ID NO: 25810 - protein, 583 aa, Homo sapiens
MSYGEIEGKFLGPREEVTSEPRCKKLKSTTESYVFHNHSNADFHRIQEKTGNDWVPVTIIDVRGHSYLQENKIKTTDLHRPLHDEMPGNRPDVIESIDSQVLQEARPPLVSADDEIYSTSKAFIGPIYKPPEKKKRNEGRNEAHVLNGINDRGGQKEKQKFNSEKSEIDNELFQFYKEIEELEKEKDGFENSCKESEPSQEQFVPFYEGHNNGLLKPDEEKKDLSNKAMPSHCDYQQNLGNEPDKYPCNGQVIPTFCDTSFTSFRPEWQSVYPFIVPYGPPLPSLNYHLNIQRFSGPPNPPSNIFQAQDDSQIQNGYYVNNCHVNWNCMTFDQNNEYTDCSENRSSVHPSGNGCSMQDRYVSNGFCEVRERCWKDHCMDKHNGTDRFVNQQFQEEKLNKLQKLLILLRGLPGSGKTTLSRILLGQNRDGIVFSTDDYFHHQDGYRYNVNQLGDAHDWNQNRAKQAIDQGRSPVIIDNTNIQAWEMKPYVEVAIGKGYRVEFHEPETWWKFDPEELEKRNKHGVSRKKIAQMLDRYEYQMSISIVMNSVEPSHKSTQRPPPPQGRQRWGGSLGSHNRVCVTNNH

SEQ ID NO: 25811 - protein, 655 aa, Homo sapiens
MSYGEIEGKFLGPREEVTSEPRCKKLKSTTESYVFHNHSNADFHRIQEKTGNDWVPVTIIDVRGHSYLQENKIKTTDLHRPLHDEMPGNRPDVIESIDSQVLQEARPPLVSADDEIYSTSKAFIGPIYKPPEKKKRNEGRNEAHVLNGINDRGGQKEKQKFNSEKSEIDNELFQFYKEIEELEKEKDGFENSCKESEPSQEQFVPFYEGHNNGLLKPDEEKKDLSNKAMPSHCDYQQNLGNEPDKYPCNGQVIPTFCDTSFTSFRPEWQSVYPFIVPYGPPLPSLNYHLNIQRFSGPPNPPSNIFQAQDDSQIQNGYYVNNCHVNWNCMTFDQNNEYTDCSENRSSVHPSGNGCSMQDRYVSNGFCEVRERCWKDHCMDKHNGTDRFVNQQFQEEKLNKLQKLLILLRGLPGSGKTTLSRILLGQNRDGIVFSTDDYFHHQDGYRYNVNQLGDAHDWNQNRAKQAIDQGRSPVIIDNTNIQAWEMKPYVEVAIGKGYRVEFHEPETWWKFDPEELEKRNKHGVSRKKIAQMLDRYEYQMSISIVMNSVEPSHKSTQRPPPPQGRQRFDRKLKRWEEPKELPAEDSQDLTSTDYRSLELPLSQGFAFQLVKLFGSPGVPMESLLPDDYVVPLDWKTLKMIYLQWKMSVEKRQKKIG

SEQ ID NO: 25812 - protein, 752 aa, Homo sapiens
MSYGEIEEFCLVRIVMALCSALMTIFTIKMGTAKQAIDQGRSPVIIDNTNIQAWEMKPYVEVAIGKGYRVEFHEPETWWKFDPEELEKRNKHGVSRKKIAQMLDRYEYQMSISIVMNSVEPSHKSTQRPPPPQGRQRERVLKKTGHRLSKTKQKRNRKRNKKQNSQNRIMEENSLEFLSDLTPGDQDPSQSEEEDIEKTRRESEYPFIDGLQNEVGDFVTGYKEKRWKNKDPKDSFQNVMSIVELDNTPKNYLSKEGDNLFVSLLLRPNEISVTCPILTQNLSCVTTDDCSGMKVEKHIRNRHTIALDTQDLSAETSCLFMKKREIVDKNLSHEPILCHQHGIRMSDKVLREEQVYTTKINHWAFFTTNLSDEDLQLGSDRQPYFGSWPAGPHKFICEQRPKKDRACKLAGPDSRGQWIQMIFTSVAASEPGNNPEILTDKLLIGNEDFSPPPETMDSFIETNLFRSCLPQPDIPKNALESTKNKKRRKKRIFNLVPNFDLLGQSRIGVKEREKCDLLTKNHGLKITLGEEKDRISERNSEEENKQKLMTFDHHPLWFYLDIIKATPLNIDGQRYSHCLSFNRLRCSASLYKNYIPSFVLHNLSSIWKPSFTNKKLFLTFESQTRVGNKLNDAGFISPEILHSHPDTSCSLGVTSDFHFLNERFDRKLKRWEEPKELPAEDSQDLTSTDYRSLELPLSQGFAFQLVKLFGSPGVPMESLLPDDYVVPLDWKTLKMIYLQWKMSVEKRQKKIG

SEQ ID NO: 25813 - protein, 2567 aa, Homo sapiens
MAISSRLALWEQKIREEDKSPPPSSPPPLFSVIPGGFIKQLVRGTEKEAKEARQRKQLAVASPEREIPEISISQPNSKSSSGTRSGSQQISQDDQSSSPGSSDILGKESEGSRSPDPEQMTSINGEKAQELGSSATPTKKTVPFKRGVRRGDVLLMVAKLDPDSAKPEKTHPHDAPPCKTSPPATDTGKEKKGETSRTPCGSQASTEILAPKAEKTRTGGLGDPGQGTVALKKGEEGQSIVGKGLGTPKTTELKEAEPQGKDRQGTRPQAQGPGEGVRPGKAEKEGAEPTNTVEKGNVSKDVGSEGKHVRPQIPGRKWGGFLGRRSKWDGPQNKKDKEGVLLSKAEKTGEPQTQMEKTSQVQGELGDDLRMGEKAGELRSTTGKAGESWDKKEKMGQPQGKSGNAGEARSQTEKGCEAPKEVSTMVESPAAPGKGGWPGSRGQEAEEPCSRAGDGAGALETELEGPSQPALEKDAERPRIRKENQDGPAPQEEGKGGQSRDSDQAPEDRWYEAEKVWLAQKDGFTLATVLKPDEGTADLPAGRVRLWIDADKTITEVDEEHVHRANPPELDQVEDLASLISVNESSVLNTLLQRYKAQLLHTCTGPDLIVLQPRGPSVPSAGKVPKGRRDGLPAHIGSMAQRAYWALLNQRRDQSIVALGWSGAGKTTCCEQVLEHLVGMAGSVDGRVSVEKIRATFTVLRAFGSVSMAHSRSATRFSMVMSLDFNATGRITAAQLQTMLLEKSRVARQPEGESNFLVFSQMLAGLDLDLRTELNLHQMADSSSFGMGVWSKPEDKQKAAAAFAQLQGAMEMLGISESEQRAVWRVLAAIYHLGAAGACKVGRKQFMRFEWANYAAEALGCEYEELNTATFKHHLRQIIQQMTFGPSRWGLEDEETSSGLKMTGVDCVEGMASGLYQELFAAVVSLINRSFSSHHLSMASIMVVDSPGFQNPRHQGKDRAATFEELCHNYAHERLQLLFYQRTFVSTLQRYQEEGVPVQFDLPDPSPGTTVAVVDQNPSQVRLPAGGGAQDARGLFWVLDEEVHVEGSSDSVVLERLCAAFEKKGAGTEGSSALRTCEQPLQCEIFHQLGWDPVRYDLTGWLHRAKPNLSALDAPQVLHQSKREELRSLFQARAKLPPVCRAVAGLEGTSQQALQRSRMVRRTFASSLAAVRRKAPCSQIKLQMDALTSMIKRSRLHFIHCLVPNPVVESRSGQESPPPPQPGRDKPGAGGPLALDIPALRVQLAGFHILEALRLHRTGYADHMGLTRFRRQFQVLDAPLLKKLMSTSEGIDERKAVEELLETLDLEKKAVAVGHSQVFLKAGVISRLEKQREKLVSQSIVLFQAACKGFLSRQEFKKLKIRRLAAQCIQKNVAVFLAVKDWPWWQLLGSLQPLLSATIGTEQLRAKEEELTTLRRKLEKSEKLRNELRQNTDLLESKIADLTSDLADERFKGDVACQVLESERAERLQAFREVQELKSKHEQVQKKLGDVNKQLEEAQQKIQLNDLERNPTGGADEWQMRFDCAQMENEFLRKRLQQCEERLDSELTARKELEQKLGELQSAYDGAKKMAHQLKRKCHHLTCDLEDTCVLLENQQSRNHELEKKQKKFDLQLAQALGESVFEKGLREKVTQENTSVRWELGQLQQQLKQKEQEASQLKQQVEMLQDHKRELLGSPSLGENCVAGLKERLWKLESSALEQQKIQSQQENTIKQLEQLRQRFELEIERMKQMHQKDREDQEEELEDVRQSCQKRLHQLEMQLEQEYEEKQMVLHEKQDLEGLIGTLCDQIGHRDFDVEKRLRRDLRRTHALLSDVQLLLGTMEDGKTSVSKEELEKVHSQLEQSEAKCEEALKTQKVLTADLESMHSELENMTRNKSLVDEQLYRLQFEKADLLKRIDEDQDDLNELMQKHKDLIAQSAADIGQIQELQLQLEEAKKEKHKLQEQLQVAQMRIEYLEQSTVDRAIVSRQEAVICDLENKTEFQKVQIKRFEVLVIRLRDSLIKMGEELSQAATSESQQRESSQYYQRRLEELKADMEELVQREAEASRRCMELEKYVEELAAVRQTLQTDLETSIRRIADLQAALEEVASSDSDTESVQTAVDCGSSGRKEMDNVSILSSQPEGSLQSWLSCTLSLATDTMRTPSRQSATSSRILSPRINEEAGDTERTQSALALSRARSTNVHSKTSGDKPVSPHFVRRQKYCHFGDGEVLAVQRKSTERLEPASSPLASRSTNTSPLSREKLPSPSAALSEFVEGLRRKRAQRGQGSTLGLEDWPTLPIYQTTGASTLRRGRAGSDEGNLSLRVGAKSPLEIEGAAGGLLRSTSLKCISSDGVGGTTLLPEKSKTQFSSCESLLESRPSMGRKLSSPTTPRDMLLSPTLRPRRRCLESSVDDAGCPDLGKEPLVFQNRQFAHLMEEPLGSDPFSWKLPSLDYERKTKVDFDDFLPAIRKPQTPTSLAGSAKGGQDGSQRSSIHFETEEANRSFLSGIKTILKKSPEPKEDPAHLSDSSSSSGSIVSFKSADSIKSRPGIPRLAGDGGERTSPERREPGTGRKDDDVASIMKKYLQK

SEQ ID NO: 25814 - protein, 2080 aa, Homo sapiens
MGSGAICWFNLRDVGSQAPEDRWYEAEKVWLAQKDGFTLATVLKPDEGTADLPAGRVRLWIDADKTITEVDEEHVHRANPPELDQVEDLASLISVNESSVLNTLLQRYKAQLLHTCTGPDLIVLQPRGPSVPSAGKVPKGRRDGLPAHIGSMAQRAYWALLNQRRDQSIVALGWSGAGKTTCCEQVLEHLVGMAGSVDGRVSVEKIRATFTVLRAFGSVSMAHSRSATRFSMVMSLDFNATGRITAAQLQTMLLEKSRVARQPEGESNFLVFSQMLAGLDLDLRTELNLHQMADSSSFGMGVWSKPEDKQKAAAAFAQLQGAMEMLGISESEQRAVWRVLAAIYHLGAAGACKVGRKQFMRFEWANYAAEALGCEYEELNTATFKHHLRQIIQQMTFGPSRWGLEDEETSSGLKMTGVDCVEGMASGLYQELFAAVVSLINRSFSSHHLSMASIMVVDSPGFQNPRHQGKDRAATFEELCHNYAHERLQLLFYQRTFVSTLQRYQEEGVPVQFDLPDPSPGTTVAVVDQNPSQVRLPAGGGAQDARGLFWVLDEEVHVEGSSDSVVLERLCAAFEKKGAGTEGSSALRTCEQPLQCEIFHQLGWDPVRYDLTGWLHRAKPNLSALDAPQVLHQSKREELRSLFQARAKLPPVCRAVAGLEGTSQQALQRSRMVRRTFASSLAAVRRKAPCSQIKLQMDALTSMIKRSRLHFIHCLVPNPVVESRSGQESPPPPQPGRDKPGAGGPLALDIPALRVQLAGFHILEALRLHRTGYADHMGLTRFRRQFQVLDAPLLKKLMSTSEGIDERKAVEELLETLDLEKKAVAVGHSQVFLKAGVISRLEKQREKLVSQSIVLFQAACKGFLSRQEFKKLKIRRLAAQCIQKNVAVFLAVKDWPWWQLLGSLQPLLSATIGTEQLRAKEEELTTLRRKLEKSEKLRNELRQNTDLLESKIADLTSDLADERFKGDVACQVLESERAERLQAFREVQELKSKHEQVQKKLGDVNKQLEEAQQKIQLNDLERNPTGGADEWQMRFDCAQMENEFLRKRLQQCEERLDSELTARKELEQKLGELQSAYDGAKKMAHQLKRKCHHLTCDLEDTCVLLENQQSRNHELEKKQKKFDLQLAQALGESVFEKGLREKVTQENTSVRWELGQLQQQLKQKEQEASQLKQQVEMLQDHKRELLGSPSLGENCVAGLKERLWKLESSALEQQKIQSQQENTIKQLEQLRQRFELEIERMKQMHQKDREDQEEELEDVRQSCQKRLHQLEMQLEQEYEEKQMVLHEKQDLEGLIGTLCDQIGHRDFDVEKRLRRDLRRTHALLSDVQLLLGTMEDGKTSVSKEELEKVHSQLEQSEAKCEEALKTQKVLTADLESMHSELENMTRNKSLVDEQLYRLQFEKADLLKRIDEDQDDLNELMQKHKDLIAQSAADIGQIQELQLQLEEAKKEKHKLQEQLQVAQMRIEYLEQSTVDRAIVSRQEAVICDLENKTEFQKVQIKRFEVLVIRLRDSLIKMGEELSQAATSESQQRESSQYYQRRLEELKADMEELVQREAEASRRCMELEKYVEELAAVRQTLQTDLETSIRRIADLQAALEEVASSDSDTESVQTAVDCGSSGRKEMDNVSILSSQPEGSLQSWLSCTLSLATDTMRTPSRQSATSSRILSPRINEEAGDTERTQSALALSRARSTNVHSKTSGDKPVSPHFVRRQKYCHFGDGEVLAVQRKSTERLEPASSPLASRSTNTSPLSREKLPSPSAALSEFVEGLRRKRAQRGQGSTLGLEDWPTLPIYQTTGASTLRRGRAGSDEGNLSLRVGAKSPLEIEGAAGGLLRSTSLKCISSDGVGGTTLLPEKSKTQFSSCESLLESRPSMGRKLSSPTTPRDMLLSPTLRPRRRCLESSVDDAGCPDLGKEPLVFQNRQFAHLMEEPLGSDPFSWKLPSLDYERKTKVDFDDFLPAIRKPQTPTSLAGSAKGGQDGSQRSSIHFETEEANRSFLSGIKTILKKSPEPKEDPAHLSDSSSSSGSIVSFKSADSIKSRPGIPRLAGDGGERTSPERREPGTGRKDDDVASIMKKYLQK

SEQ ID NO: 25815 - protein, 2568 aa, Homo sapiens
MAISSRLALWEQKIREEDKSPPPSSPPPLFSVIPGGFIKQLVRGTEKEAKEARQRKQLAVASPEREIPEISISQPNSKSSSGTRSGSQQISQDDQSSSPGSSDILGKESEGSRSPDPEQMTSINGEKAQELGSSATPTKKTVPFKRGVRRGDVLLMVAKLDPDSAKPEKTHPHDAPPCKTSPPATDTGKEKKGETSRTPCGSQASTEILAPKAEKTRTGGLGDPGQGTVALKKGEEGQSIVGKGLGTPKTTELKEAEPQGKDRQGTRPQAQGPGEGVRPGKAEKEGAEPTNTVEKGNVSKDVGSEGKHVRPQIPGRKWGGFLGRRSKWDGPQNKKDKEGVLLSKAEKTGEPQTQMEKTSQVQGELGDDLRMGEKAGELRSTTGKAGESWDKKEKMGQPQGKSGNAGEARSQTEKGCEAPKEVSTMVESPAAPGKGGWPGSRGQEAEEPCSRAGDGAGALETELEGPSQPALEKDAERPRIRKENQDGPAPQEEGKGGQSRDSDQAPEDRWYEAEKVWLAQKDGFTLATVLKPDEGTADLPAGRVRLWIDADKTITEVDEEHVHRANPPELDQVEDLASLISVNESSVLNTLLQRYKAQLLHTCTGPDLIVLQPRGPSVPSAGKVPKGRRDGLPAHIGSMAQRAYWALLNQRRDQSIVALGWSGAGKTTCCEQVLEHLVGMAGSVDGRVSVEKIRATFTVLRAFGSVSMAHSRSATRFSMVMSLDFNATGRITAAQLQTMLLEKSRVARQPEGESNFLVFSQMLAGLDLDLRTELNLHQMADSSSFGMGVWSKPEDKQKAAAAFAQLQGAMEMLGISESEQRAVWRVLAAIYHLGAAGACKVGRKQFMRFEWANYAAEALGCEYEELNTATFKHHLRQIIQQMTFGPSRWGLEDEETSSGLKMTGVDCVEGMASGLYQELFAAVVSLINRSFSSHHLSMASIMVVDSPGFQNPRHQGKDRAATFEELCHNYAHERLQLLFYQRTFVSTLQRYQEEGVPVQFDLPDPSPGTTVAVVDQNPSQQVRLPAGGGAQDARGLFWVLDEEVHVEGSSDSVVLERLCAAFEKKGAGTEGSSALRTCEQPLQCEIFHQLGWDPVRYDLTGWLHRAKPNLSALDAPQVLHQSKREELRSLFQARAKLPPVCRAVAGLEGTSQQALQRSRMVRRTFASSLAAVRRKAPCSQIKLQMDALTSMIKRSRLHFIHCLVPNPVVESRSGQESPPPPQPGRDKPGAGGPLALDIPALRVQLAGFHILEALRLHRTGYADHMGLTRFRRQFQVLDAPLLKKLMSTSEGIDERKAVEELLETLDLEKKAVAVGHSQVFLKAGVISRLEKQREKLVSQSIVLFQAACKGFLSRQEFKKLKIRRLAAQCIQKNVAVFLAVKDWPWWQLLGSLQPLLSATIGTEQLRAKEEELTTLRRKLEKSEKLRNELRQNTDLLESKIADLTSDLADERFKGDVACQVLESERAERLQAFREVQELKSKHEQVQKKLGDVNKQLEEAQQKIQLNDLERNPTGGADEWQMRFDCAQMENEFLRKRLQQCEERLDSELTARKELEQKLGELQSAYDGAKKMAHQLKRKCHHLTCDLEDTCVLLENQQSRNHELEKKQKKFDLQLAQALGESVFEKGLREKVTQENTSVRWELGQLQQQLKQKEQEASQLKQQVEMLQDHKRELLGSPSLGENCVAGLKERLWKLESSALEQQKIQSQQENTIKQLEQLRQRFELEIERMKQMHQKDREDQEEELEDVRQSCQKRLHQLEMQLEQEYEEKQMVLHEKQDLEGLIGTLCDQIGHRDFDVEKRLRRDLRRTHALLSDVQLLLGTMEDGKTSVSKEELEKVHSQLEQSEAKCEEALKTQKVLTADLESMHSELENMTRNKSLVDEQLYRLQFEKADLLKRIDEDQDDLNELMQKHKDLIAQSAADIGQIQELQLQLEEAKKEKHKLQEQLQVAQMRIEYLEQSTVDRAIVSRQEAVICDLENKTEFQKVQIKRFEVLVIRLRDSLIKMGEELSQAATSESQQRESSQYYQRRLEELKADMEELVQREAEASRRCMELEKYVEELAAVRQTLQTDLETSIRRIADLQAALEEVASSDSDTESVQTAVDCGSSGRKEMDNVSILSSQPEGSLQSWLSCTLSLATDTMRTPSRQSATSSRILSPRINEEAGDTERTQSALALSRARSTNVHSKTSGDKPVSPHFVRRQKYCHFGDGEVLAVQRKSTERLEPASSPLASRSTNTSPLSREKLPSPSAALSEFVEGLRRKRAQRGQGSTLGLEDWPTLPIYQTTGASTLRRGRAGSDEGNLSLRVGAKSPLEIEGAAGGLLRSTSLKCISSDGVGGTTLLPEKSKTQFSSCESLLESRPSMGRKLSSPTTPRDMLLSPTLRPRRRCLESSVDDAGCPDLGKEPLVFQNRQFAHLMEEPLGSDPFSWKLPSLDYERKTKVDFDDFLPAIRKPQTPTSLAGSAKGGQDGSQRSSIHFETEEANRSFLSGIKTILKKSPEPKEDPAHLSDSSSSSGSIVSFKSADSIKSRPGIPRLAGDGGERTSPERREPGTGRKDDDVASIMKKYLQK

SEQ ID NO: 25816 - protein, 796 aa, Homo sapiens
MLAPLRNAPGREGATSPSPPTDATGSLGEWDVDRNVKTEGWVSKERISKLHRLRMADILSQSETLASQDLSGDFKKPALPVSPAARSKAPASSSSNPEEVQKEGPTALQDSNSGEPDIPPPQPDCGDFRSLQEEQSRPPTAVSSPGGPARAPPYQEPPWGGPATAPYSLETLKGGTILGTRSLKGTSYCLFGRLSGCDVCLEHPSVSRYHAVLQHRASGPDGECDSNGPGFYLYDLGSTHGTFLNKTRIPPRTYCRVHVGHVVRFGGSTRLFILQGPEEDREAESELTVTQLKELRKQQQILLEKKMLGEDSDEEEEMDTSERKINAGSQDDEMGCTWGMGEDAVEDDAEENPIVLEFQQEREAFYIKDPKKALQGFFDREGEELEYEFDEQGHSTWLCRVRLPVDDSTGKQLVAEAIHSGKKKEAMIQCSLEACRILDTLGLLRQEAVSRKRKAKNWEDEDFYDSDDDTFLDRTGLIEKKRLNRMKKAGKIDEKPETFESLVAKLNDAERELSEISERLKASSQVLSESPSQDSLDAFMSEMKSGSTLDGVSRKKLHLRTFELRKEQQRLKGLIKIVKPAEIPELKKTETQTTGAENKAKKLTLPLFGAMKGGSKFKLKTGTVGKLPPKRPELPPTLMRMKDEPEVEEEEEEEEEEEKEKEEHEKKKLEDGSLSRPQPEIEPEAAVQEMRPPTDLTHFKETQTHENMSQLSEEEQNKDYQDCSKTTSLCAGPSASKNEYEKSRGELKKKKTPGPGKLPPTLSSKYPEDDPDYCVWVPPEGQSGDGRTHLNDKYGY

SEQ ID NO: 25817 - protein, 752 aa, Homo sapiens
MAKRSRSEDEDDDLQYADHDYEVPQQKGLKKLWNRVKWTRDEDDKLKKLVEQHGTDDWTLIASHLQNRSDFQCQHRWQKVLNPELIKGPWTKEEDQRVIELVQKYGPKRWSLIAKHLKGRIGKQCRERWHNHLNPEVKKSSWTEEEDRIIYEAHKRLGNRWAEIAKLLPGRTDNSIKNHWNSTMRRKVEQEGYLQDGIKSERSSSKLQHKPCAAMDHMQTQNQFYIPVQIPGYQYVSPEGNCIEHVQPTSAFIQQPFIDEDPDKEKKIKELEMLLMSAENEVRRKRIPSQPGSFSSWSGSFLMDDNMSNTLNSLDEHTSEFYSMDENQPVSAQQNSPTKFLAVEANAVLSSLQTIPEFAETLELIESDPVAWSDVTSFDISDAAASPIKSTPVKLMRIQHNEGAMECQFNVSLVLEGKKNTCNGGNSEAVPLTSPNIAKFSTPPAILRKKRKMRVGHSPGSELRDGSLNDGGNMALKHTPLKTLPFSPSQFFNTCPGNEQLNIENPSFTSTPICGQKALITTPLHKETTPKDQKENVGFRTPTIRRSILGTTPRTPTPFKNALAAQEKKYGPLKIVSQPLAFLEEDIREVLKEETGTDLFLKEEDEPAYKSCKQENTASGKKVRKSLVLDNWEKEESGTQLLTEDISDMQSENRFTTSLLMIPLLEIHDNRCNLIPEKQDINSTNKTYTLTKKKPNPNTSKVVKLEKNLQSNCEWETVVYGKTEDQLIMTEQARRYLSTYTATSSTSRALIL

SEQ ID NO: 25818 - protein, 692 aa, Homo sapiens
MAKRSRSEDEDDDLQYADHDYEVPQQKGLKKLWNRVKWTRDEDDKLKKLVEQHGTDDWTLIASHLQNRSDFQCQHRWQKVLNPELIKGPWTKEEDQRVIELVQKYGPKRWSLIAKHLKGRIGKQCRERWHNHLNPEVKKSSWTEEEDRIIYEAHKRLGNRWAEIAKLLPGRTDNSIKNHWNSTMRRKVEQEGYLQDGIKSERSSSKLQHKPCAAMDHMQTQNQFYIPVQIPGYQYVSPEGNCIEHVQPTSAFIQQPFIDEDPDKEKKIKELEMLLMSAENEVRRKRIPSQPGSFSSWSGSFLMDDNMSNTLNSLDEHTSEFYSMDENQPVSAQQNSPTKFLAVEANAVLSSLQTIPEFAETLELIESDPVAWSDVTSFDISDAAASPIKSTPVKLMRIQHNEGAMECQFNVSLVLEGKKNTCNGGNSEAVPLTSPNIAKFSTPPAILRKKRKMRVGHSPGSELRDGSLNDGGNMALKHTPLKTLPFSPSQFFNTCPGNEQLNIENPSFTSTPICGQKALITTPLHKETTPKDQKENVGFRTPTIRRSILGTTPRTPTPFKNALAAQEKKYGPLKIVSQPLAFLEEDIREVLKEETGTDLFLKEEDEPAYKSCKQENTASGKKVRKSLVLDNWEKEESGTQLLTEDISDMQSNCEWETVVYGKTEDQLIMTEQARRYLSTYTATSSTSRALIL

SEQ ID NO: 25819 - protein, 1939 aa, Homo sapiens
MSSDSEMAIFGEAAPFLRKSEKERIEAQNKPFDAKTSVFVVDPKESYVKAIVQSREGGKVTAKTEAGATVTVKEDQVFSMNPPKYDKIEDMAMMTHLHEPAVLYNLKERYAAWMIYTYSGLFCVTVNPYKWLPVYNPEVVTAYRGKKRQEAPPHIFSISDNAYQFMLTDRENQSILITGESGAGKTVNTKRVIQYFATIAVTGEKKKEEPASGKMQGTLEDQIISANPLLEAFGNAKTVRNDNSSRFGKFIRIHFGATGKLASADIETYLLEKSRVTFQLKAERSYHIFYQILSNKKPELIEMLLITTNPYDFAFVSQGEITVPSIDDQEELMATDSAVDILGFTADEKVAIYKLTGAVMHYGNMKFKQKQREEQAEPDGTEVADKAAYLTSLNSADLLKSLCYPRVKVGNEFVTKGQTVQQVYNAVGALAKAIYEKMFLWMVTRINQQLDTKQPRQYFIGVLDIAGFEIFDFNSLEQLCINFTNEKLQQFFNHHMFVLEQEEYKKEGIEWEFIDFGMDLAACIELIEKPMGIFSILEEECMFPKATDTSFKNKLYEQHLGKSNNFQKPKPAKGKPEAHFSLVHYAGTVDYNIAGWLDKNKDPLNETVVGLYQKSAMKTLAFLFSGAQTAEAEGGGGKKGGKKKGSSFQTVSALFRENLNKLMTNLRSTHPHFVRCIIPNETKTPGAMEHELVLHQLRCNGVLEGIRICRKGFPSRILYADFKQRYKVLNASAIPEGQFIDSKKASEKLLGSIEIDHTQYKFGHTKVFFKAGLLGTLEEMRDEKLAQLITRTQAICRGFLMRVEFRKMMERRESIFCIQYNIRAFMNVKHWPWMKLYFKIKPLLKSAETEKEMANMKEEFEKTKEELAKTEAKRKELEEKMVTLMQEKNDLQLQVQAEADALADAEERCDQLIKTKIQLEAKIKEVTERAEDEEEINAELTAKKRKLEDECSELKKDIDDLELTLAKVEKEKHATENKVKNLTEEMAGLDETIAKLTKEKKALQEAHQQTLDDLQMEEDKVNTLTKAKTKLEQQVDDLEGSLEQEKKLCMDLERAKRKLEGDLKLAQESTMDTENDKQQLNEKLKKKEFEMSNLQGKIEDEQALAIQLQKKIKELQARIEELEEEIEAERASRAKAEKQRSDLSRELEEISERLEEAGGATSAQIEMNKKREAEFQKMRRDLEESTLQHEATAAALRKKHADSVAELGEQIDSLQRVKQKLEKEKSELKMEINDLASNMETVSKAKANFEKMCRTLEDQLSEIKTKEEEQQRLINELSAQKARLHTESGEFSRQLDEKDAMVSQLSRGKQAFTQQIEELKRQLEEETKAKSTLAHALQSARHDCDLLREQYEEEQEAKAELQRGMSKANSEVAQWRTKYETDAIQRTEELEEAKKKLAQRLQDAEEHVEAVNSKCASLEKTKQRLQNEVEDLMIDVERSNAACIALDKKQRNFDKVLAEWKQKYEETQAELEASQKESRSLSTELFKVKNAYEESLDHLETLKRENKNLQQEISDLTEQIAEGGKHIHELEKVKKQLDHEKSELQTSLEEAEASLEHEEGKILRIQLELNQVKSEIDRKIAEKDEELDQLKRNHLRVVESMQSTLDAEIRSRNDALRIKKKMEGDLNEMEIQLNHANRQAAEALRNLRNTQGILKDTQLHLDDAIRGQDDLKEQLAMVERRANLMQAEVEELRASLERTERGRKMAEQELLDASERVQLLHTQNTSLINTKKKLETDISQIQGEMEDIVQEARNAEEKAKKAITDAAMMAEELKKEQDTSAHLERMKKNMEQTVKDLQLRLDEAEQLALKGGKKQIQKLEARVRELESEVESEQKHNVEAVKGLRKHERRVKELTYQTEEDRKNILRLQDLVDKLQTKVKAYKRQAEEAEEQSNVNLAKFRKLQHELEEAKERADIAESQVNKLRVKSREVHTKVISEE

SEQ ID NO: 25820 - protein, 515 aa, Homo sapiens
MATSTGRWLLLRLALFGFLWEASGGLDSGASRDDDLLLPYPRARARLPRDCTRVRAGNREHESWPPPPATPGAGGLAVRTFVSHFRDRAVAGHLTRAVEPLRTFSVLEPGGPGGCAARRRATVEETARAADCRVAQNGGFFRMNSGECLGNVVSDERRVSSSGGLQNAQFGIRRDGTLVTGYLSEEEVLDTENPFVQLLSGVVWLIRNGSIYINESQATECDETQETGSFSKFVNVISARTAIGHDRKGQLVLFHADGQTEQRGINLWEMAEFLLKQDVVNAINLDGGGSATFVLNGTLASYPSDHCQDNMWRCPRQVSTVVCVHEPRCQPPDCHGHGTCVDGHCQCTGHFWRGPGCDELDCGPSNCSQHGLCTETGCRCDAGWTGSNCSEECPLGWHGPGCQRPCKCEHHCPCDPKTGNCSVSRVKQCLQPPEATLRAGELSFFTRTAWLALTLALAFLLLISTAANLSLLLSRAERNRRLHGDYAYHPLQEMNGEPLAAEKEQPGGAHNPFKD

SEQ ID NO: 25821 - protein, 481 aa, Homo sapiens
MATSTGRWLLLRLALFGFLWEASGGLDSGASRDDDLLLPYPRARARLPRDCTRVRAGNREHESWPPPPATPGAGGLAVRTFVSHFRDRAVAGHLTRAVEPLRTFSVLEPGGPGGCAARRRATVEETARAADCRVAQNGGFFRMNSGECLGNVVSDERRVSSSGGLQNAQFGIRRDGTLVTGYLSEEEVLDTENPFVQLLSGVVWLIRNGSIYINESQATECDETQETGSFSKFVNVISARTAIGHDRKGQLVLFHADGQTEQRGINLWEMAEFLLKQDVVNAINLDGGGSATFVLNGTLASYPSDHCQDNMWRCPRQVSTVVCVHEPRCQPPDCHGHGTCVDGHCQCTGHFWRGPGCDELDCGPSNCSQHGLCTETGCRCDAGWTGSNCSEVKQCLQPPEATLRAGELSFFTRTAWLALTLALAFLLLISTAANLSLLLSRAERNRRLHGDYAYHPLQEMNGEPLAAEKEQPGGAHNPFKD

SEQ ID NO: 25822 - protein, 309 aa, Homo sapiens
MATSTGRWLLLRLALFGFLWEASGGLDSGASRDDDLLLPYPRARARLPRDCTRVRAGNREHESWPPPPATPGAGGLAVRTFVSHFRDRAVAGHLTRAVEPLRTFSVLEPGGPGGCAARRRATVEETARAADCRVAQNGGFFRMNSGECLGNVVSDERRVSSSGGLQNAQFGIRRDGTLVTGYLSEEEVLDTENPFVQLLSGVVWLIRNGSIYINESQATECDETQETGSFSKFVNVISARTAIGHDRKGQLVLFHADGQTEQRGINLWEMAEFLLKQDVVNAINLDGGGSATFVLNGTLASYPSDHWQA

SEQ ID NO: 25823 - protein, 68 aa, Homo sapiens
MGDQPCASGRSTLPPGNAREAKPPKKRCLLAPRWDYPEGTPNGGSTTLPSAPPPASAGLKSHPPPPEK

SEQ ID NO: 25824 - protein, 181 aa, Homo sapiens
MMLRVLVGAVLPAMLLAAPPPINKLALFPDKSAWCEAKNITQIVGHSGCEAKSIQNRACLGQCFSYSVPNTFPQSTESLVHCDSCMPAQSMWEIVTLECPGHEEVPRVDKLVEKILHCSCQACGKEPSHEGLSVYVQGEDGPGSQPGTHPHPHPHPHPGGQTPEPEDPPGAPHTEEEGAED

SEQ ID NO: 25825 - protein, 216 aa, Homo sapiens
MPGNLMSQTSRAVSIWKFPAKLGKTHGHRALEATGMMLRVLVGAVLPAMLLAAPPPINKLALFPDKSAWCEAKNITQIVGHSGCEAKSIQNRACLGQCFSYSVPNTFPQSTESLVHCDSCMPAQSMWEIVTLECPGHEEVPRVDKLVEKILHCSCQACGKEPSHEGLSVYVQGEDGPGSQPGTHPHPHPHPHPGGQTPEPEDPPGAPHTEEEGAED

SEQ ID NO: 25826 - protein, 754 aa, Homo sapiens
MWKLLPAAGPAGGEPYRLLTGVEYVVGRKNCAILIENDQSISRNHAVLTANFSVTNLSQTDEIPVLTLKDNSKYGTFVNEEKMQNGFSRTLKSGDGITFGVFGSKFRIEYEPLVACSSCLDVSGKTALNQAILQLGGFTVNNWTEECTHLVMVSVKVTIKTICALICGRPIVKPEYFTEFLKAVESKKQPPQIESFYPPLDEPSIGSKNVDLSGRQERKQIFKGKTFIFLNAKQHKKLSSAVVFGGGEARLITEENEEEHNFFLAPGTCVVDTGITNSQTLIPDCQKKWIQSIMDMLQRQGLRPIPEAEIGLAVIFMTTKNYCDPQGHPSTGLKTTTPGPSLSQGVSVDEKLMPSAPVNTTTYVADTESEQADTWDLSERPKEIKVSKMEQKFRMLSQDAPTVKESCKTSSNNNSMVSNTLAKMRIPNYQLSPTKLPSINKSKDRASQQQQTNSIRNYFQPSTKKRERDEENQEMSSCKSARIETSCSLLEQTQPATPSLWKNKEQHLSENEPVDTNSDNNLFTDTDLKSIVKNSASKSHAAEKLRSNKKREMDDVAIEDEVLEQLFKDTKPELEIDVKVQKQEEDVNVRKRPRMDIETNDTFSDEAVPESSKISQENEIGKKRELKEDSLWSAKEISNNDKLQDDSEMLPKKLLLTEFRSLVIKNSTSRNPSGINDDYGQLKNFKKFKKVTYPGAGKLPHIIGGSDLIAHHARKNTELEEWLRQEMEVQNQHAKEESLADDLFRYNPYLKRRR

SEQ ID NO: 25827 - protein, 132 aa, Homo sapiens
MSNKFLGTWKLVSSENFDDYMKALGVGLATRKLGNLAKPTVIISKKGDIITIRTESTFKNTEISFKLGQEFEETTADNRKTKSIVTLQRGSLNQVQRWDGKETTIKRKLVNGKMVAECKMKGVVCTRIYEKV

SEQ ID NO: 25828 - protein, 400 aa, Homo sapiens
MASEKPLAAVTCTAPVNIAVIKYWGKRDEELVLPINSSLSVTLHQDQLKTTTTAVISKDFTEDRIWLNGREEDVGQPRLQACLREIRCLARKRRNSRDGDPLPSSLSCKVHVASVNNFPTAAGLASSAAGYACLAYTLARVYGVESDLSEVARRGSGSACRSLYGGFVEWQMGEQADGKDSIARQVAPESHWPELRVLILVVSAEKKLTGSTVGMRASVETSPLLRFRAESVVPARMAEMARCIRERDFPSFAQLTMKDSNQFHATCLDTFPPISYLNAISWRIIHLVHRFNAHHGDTKVAYTFDAGPNAVIFTLDDTVAEFVAAVWHGFPPGSNGDTFLKGLQVRPAPLSAELQAALAMEPTPGGVKYIIVTQVGPGPQILDDPCAHLLGPDGLPKPAA

SEQ ID NO: 25829 - protein, 1141 aa, Homo sapiens
MPEAKPAAKKAPKGKDAPKGAPKEAPPKEAPAEAPKEAPPEDQSPTAEEPTGVFLKKPDSVSVETGKDAVVVAKVNGKELPDKPTIKWFKGKWLELGSKSGARFSFKESHNSASNVYTVELHIGKVVLGDRGYYRLEVKAKDTCDSCGFNIDVEAPRQDASGQSLESFKRTSEKKSDTAGELDFSGLLKKREVVEEEKKKKKKDDDDLGIPPEIWELLKGAKKSEYEKIAFQYGITDLRGMLKRLKKAKVEVKKSAAFTKKLDPAYQVDRGNKIKLMVEISDPDLTLKWFKNGQEIKPSSKYVFENVGKKRILTINKCTLADDAAYEVAVKDEKCFTELFVKEPPVLIVTPLEDQQVFVGDRVEMAVEVSEEGAQVMWMKDGVELTREDSFKARYRFKKDGKRHILIFSDVVQEDRGRYQVITNGGQCEAELIVEEKQLEVLQDIADLTVKASEQAVFKCEVSDEKVTGKWYKNGVEVRPSKRITISHVGRFHKLVIDDVRPEDEGDYTFVPDGYALSLSAKLNFLEIKVEYVPKQEPPKIHLDCSGKTSENAIVVVAGNKLRLDVSITGEPPPVATWLKGDEVFTTTEGRTRIEKRVDCSSFVIESAQREDEGRYTIKVTNPVGEDVASIFLQVVDVPDPPEAVRITSVGEDWAILVWEPPMYDGGKPVTGYLVERKKKGSQRWMKLNFEVFTETTYESTKMIEGILYEMRVFAVNAIGVSQPSMNTKPFMPIAPTSEPLHLIVEDVTDTTTTLKWRPPNRIGAGGIDGYLVEYCLEGSEEWVPANTEPVERCGFTVKNLPTGARILFRVVGVNIAGRSEPATLAQPVTIREIAEPPKIRLPRHLRQTYIRKVGEQLNLVVPFQGKPRPQVVWTKGGAPLDTSRVHVRTSDFDTVFFVRQAARSDSGEYELSVQIENMKDTATIRIRVVEKAGPPINVMVKEVWGTNALVEWQAPKDDGNSEIMGYFVQKADKKTMEWFNVYERNRHTSCTVSDLIVGNEYYFRVYTENICGLSDSPGVSKNTARILKTGITFKPFEYKEHDFRMAPKFLTPLIDRVVVAGYSAALNCAVRGHPKPKVVWMKNKMEIREDPKFLITNYQGVLTLNIRRPSPFDAGTYTCRAVNELGEALAECKLEVRVPQ

SEQ ID NO: 25830 - protein, 715 aa, Homo sapiens
MSKAHKPWPYRRRSQFSSRKYLKKEMNSFQQQPPPFGTVPPQMMFPPNWQGAEKDAAFLAKDFNFLTLNNQPPPGNRSQPRAMGPENNLYSQYEQKVRPCIDLIDSLRALGVEQDLALPAIAVIGDQSSGKSSVLEALSGVALPRGSGIVTRCPLVLKLKKQPCEAWAGRISYRNTELELQDPGQVEKEIHKAQNVMAGNGRGISHELISLEITSPEVPDLTIIDLPGITRVAVDNQPRDIGLQIKALIKKYIQRQQTINLVVVPCNVDIATTEALSMAHEVDPEGDRTIGILTKPDLMDRGTEKSVMNVVRNLTYPLKKGYMIVKCRGQQEITNRLSLAEATKKEITFFQTHPYFRVLLEEGSATVPRLAERLTTELIMHIQKSLPLLEGQIRESHQKATEELRRCGADIPSQEADKMFFLIEKIKMFNQDIEKLVEGEEVVRENETRLYNKIREDFKNWVGILATNTQKVKNIIHEEVEKYEKQYRGKELLGFVNYKTFEIIVHQYIQQLVEPALSMLQKAMEIIQQAFINVAKKHFGEFFNLNQTVQSTIEDIKVKHTAKAENMIQLQFRMEQMVFCQDQIYSVVLKKVREEIFNPLGTPSQNMKLNSHFPSNESSVSSFTEIGIHLNAYFLETSKRLANQIPFIIQYFMLRENGDSLQKAMMQILQEKNRYSWLLQEQSETATKRRILKERIYRLTQARHALCQFSSKEIH

SEQ ID NO: 25831 - protein, 201 aa, Homo sapiens
MSKAHKPWPYRRRSQFSSRKYLKKEMNSFQQQPPPFGTVPPQMMFPPNWQGAEKDAAFLAKDFNFLTLNNQPPPGNRSQPRAMGPENNLYSQYEQKVRPCIDLIDSLRALGVEQDLALPAIAVIGDQSSGKSSVLEALSGVALPRGSAQNVMAGNGRGISHELISLEITSPEVPDLTIIDLPGITRVAVDNQPRDIGLQVS

SEQ ID NO: 25832 - protein, 604 aa, Homo sapiens
MLARALLLCAVLALSHTANPCCSHPCQNRGVCMSVGFDQYKCDCTRTGFYGENCSTPEFLTRIKLFLKPTPNTVHYILTHFKGFWNVVNNIPFLRNAIMSYVLTSRSHLIDSPPTYNADYGYKSWEAFSNLSYYTRALPPVPDDCPTPLGVKGKKQLPDSNEIVEKLLLRRKFIPDPQGSNMMFAFFAQHFTHQFFKTDHKRGPAFTNGLGHGVDLNHIYGETLARQRKLRLFKDGKMKYQIIDGEMYPPTVKDTQAEMIYPPQVPEHLRFAVGQEVFGLVPGLMMYATIWLREHNRVCDVLKQEHPEWGDEQLFQTSRLILIGETIKIVIEDYVQHLSGYHFKLKFDPELLFNKQFQYQNRIAAEFNTLYHWHPLLPDTFQIHDQKYNYQQFIYNNSILLEHGITQFVESFTRQIAGRVAGGRNVPPAVQKVSQASIDQSRQMKYQSFNEYRKRFMLKPYESFEELTGEKEMSAELEALYGDIDAVELYPALLVEKPRPDAIFGETMVEVGAPFSLKGLMGNVICSPAYWKPSTFGGEVGFQIINTASIQSLICNNVKGCPFTSFSVPDPELIKTVTINASSSRSGLDDINPTVLLKERSTEL

SEQ ID NO: 25833 - protein, 182 aa, Homo sapiens
MPRVVPDQRSKFENEEFFRKLSRECEIKYTGFRDRPHEERQARFQNACRDGRSEIAFVATGTNLSLQFFPASWQGEQRQTPSREYVDLEREAGKVYLKAPMILNGVCVIWKGWIDLQRLDGMGCLEFDEERAQQEDALAQQAFEEARRRTREFEDRDRSHREEMEVRVSQLLAVTGKKTTRP

SEQ ID NO: 25834 - protein, 187 aa, Homo sapiens
MPRVVPDQRSKFENEEFFRKLSRECEIKYTGFRDRPHEERQARFQNACRDGRSEIAFVATGTNLSLQFFPASWQGEQRQTPSREYVDLEREAGKVYLKAPMILNGVCVIWKGWIDLQRLDGMGCLEFDEERAQQEDALAQQAFEEARRRTREFEDRDRSHREEMEARRQQDPSPGSNLGGGDDLKLR

SEQ ID NO: 25835 - protein, 1255 aa, Homo sapiens
MNGYAEFPPSPSNPTKEPVEPQPSQVPLQEDVDMSSGSSGHETNENCSTGRDSQGSDCDDSGKELGMLVEPPDARQSPDTFSLMMAKSEHNPSTSGCSSDQSSKVDTHKELIKTLKELKVHLPADKKAKGKASTLATLKYALRSVKQVKANEEYYQLLMSSEGHPCGADVPSYTVEEMESVTSEHIVKNADMFAVAVSLVSGKILYISDQVASIFHCKRDAFSDAKFVEFLAPHDVGVFHSFTSPYKLPLWSMCSGADSFTQECMEEKSFFCRVSVRKSHENEIRYHPFRMTPYLVKVRDQQGAESQLCCLLLAERVHSGYEAPRIPPEKRIFTTTHTPNCLFQDVDERAVPLLGYLPQDLIETPVLVQLHPSDRPLMLAIHKKILQSGGQPFDYSPIRFRARNGEYITLDTSWSSFINPWSRKISFIIGRHKVRVGPLNEDVFAAHPCTEEKALHPSIQELTEQIHRLLLQPVPHSGSSGYGSLGSNGSHEHLMSQTSSSDSNGHEDSRRRRAEICKNGNKTKNRSHYSHESGEQKKKSVTEMQTNPPAEKKAVPAMEKDSLGVSFPEELACKNQPTCSYQQISCLDSVIRYLESCNEAATLKRKCEFPANVPALRSSDKRKATVSPGPHAGEAEPPSRVNSRTGVGTHLTSLALPGKAESVASLTSQCSYSSTIVHVGDKKPQPELEMVEDAASGPESLDCLAGPALACGLSQEKEPFKKLGLTKEVLAAHTQKEEQSFLQKFKEIRKLSIFQSHCHYYLQERSKGQPSERTAPGLRNTSGIDSPWKKTGKNRKLKSKRVKPRDSSESTGSGGPVSARPPLVGLNATAWSPSDTSQSSCPAVPFPAPVPAAYSLPVFPAPGTVAAPPAPPHASFTVPAVPVDLQHQFAVQPPPFPAPLAPVMAFMLPSYSFPSGTPNLPQAFFPSQPQFPSHPTLTSEMASASQPEFPSRTSIPRQPCACPATRATPPSAMGRASPPLFQSRSSSPLQLNLLQLEEAPEGGTGAMGTTGATETAAVGADCKPGTSRDQQPKAPLTRDEPSDTQNSDALSTSSGLLNLLLNEDLCSASGSAASESLGSGSLGCDASPSGAGSSDTSHTSKYFGSIDSSENNHKAKMNTGMEESEHFIKCVLQDPIWLLMADADSSVMMTYQLPSRNLEAVLKEDREKLKLLQKLQPRFTESQKQELREVHQWMQTGGLPAAIDVAECVYCENKEKGNICIPYEEDIPSLGLSEVSDTKEDENGSPLNHRIEEQT

SEQ ID NO: 25836 - protein, 404 aa, Homo sapiens
MNGYAEFPPSPSNPTKEPVEPQPSQVPLQEDVDMSSGSSGHETNENCSTGRDSQGSDCDDSGKELGMLVEPPDARQSPDTFSLMMAKSEHNPSTSGCSSDQSSKVDTHKELIKTLKELKVHLPADKKAKGKASTLATLKYALRSVKQVKANEEYYQLLMSSEGHPCGADVPSYTVEEMESVTSEHIVKNADMFAVAVSLVSGKILYISDQVASIFHCKRDAFSDAKFVEFLAPHDVGVFHSFTSPYKLPLWSMCSGADSFTQECMEEKSFFCRVSVRKSHENEIRYHPFRMTPYLVKVRDQQGAESQLCCLLLAERVHSGYEAPRIPPEKRIFTTTHTPNCLFQDVDESPAVRRAAFRLFSHSVSRPERRVHHVGHQLVQLHQPMEQENLLHHWEAQSQGGPFE

SEQ ID NO: 25837 - protein, 1274 aa, Homo sapiens
MPEPGKKPVSAFSKKPRSVEVAAGSPAVFEAETERAGVKVRWQRGGSDISASNKYGLATEGTRHTLTVREVGPADQGSYAVIAGSSKVKFDLKVIEAEKAEPMLAPAPAPAEATGAPGEAPAPAAELGESAPSPKGSSSAALNGPTPGAPDDPIGLFVMRPQDGEVTVGGSITFSARVAGASLLKPPVVKWFKGKWVDLSSKVGQHLQLHDSYDRASKVYLFELHITDAQPAFTGSYRCEVSTKDKFDCSNFNLTVHEAMGTGDLDLLSAFRRTSLAGGGRRISDSHEDTGILDFSSLLKKRDSFRTPRDSKLEAPAEEDVWEILRQAPPSEYERIAFQYGVTDLRGMLKRLKGMRRDEKKSTAFQKKLEPAYQVSKGHKIRLTVELADHDAEVKWLKNGQEIQMSGSKYIFESIGAKRTLTISQCSLADDAAYQCVVGGEKCSTELFVKEPPVLITRPLEDQLVMVGQRVEFECEVSEEGAQVKWLKDGVELTREETFKYRFKKDGQRHHLIINEAMLEDAGHYALCTSGGQALAELIVQEKKLEVYQSIADLMVGAKDQAVFKCEVSDENVRGVWLKNGKELVPDSRIKVSHIGRVHKLTIDDVTPADEADYSFVPEGFACNLSAKLHFMEVKIDFVPRQEPPKIHLDCPGRIPDTIVVVAGNKLRLDVPISGDPAPTVIWQKAITQGNKAPARPAPDAPEDTGDSDEWVFDKKLLCETEGRVRVETTKDRSIFTVEGAEKEDEGVYTVTVKNPVGEDQVNLTVKVIDVPDAPAAPKISNVGEDSCTVQWEPPAYDGGQPILGYILERKKKKSYRWMRLNFDLIQELSHEARRMIEGVVYEMRVYAVNAIGMSRPSPASQPFMPIGPPSEPTHLAVEDVSDTTVSLKWRPPERVGAGGLDGYSVEYCPEGCSEWVAALQGLTEHTSILVKDLPTGARLLFRVRAHNMAGPGAPVTTTEPVTVQEILQRPRLQLPRHLRQTIQKKVGEPVNLLIPFQGKPRPQVTWTKEGQPLAGEEVSIRNSPTDTILFIRAARRVHSGTYQVTVRIENMEDKATLVLQVVDKPSPPQDLRVTDAWGLNVALEWKPPQDVGNTELWGYTVQKADKKTMEWFTVLEHYRRTHCVVPELIIGNGYYFRVFSQNMVGFSDRAATTKEPVFIPRPGITYEPPNYKALDFSEAPSFTQPLVNRSVIAGYTAMLCCAVRGSPKPKISWFKNGLDLGEDARFRMFSKQGVLTLEIRKPCPFDGGIYVCRATNLQGEARCECRLEVRVPQ

SEQ ID NO: 25838 - protein, 1273 aa, Homo sapiens
MPEPGKKPVSAFSKKPRSVEVAAGSPAVFEAETERAGVKVRWQRGGSDISASNKYGLATEGTRHTLTVREVGPADQGSYAVIAGSSKVKFDLKVIEAEKAEPMLAPAPAPAEATGAPGEAPAPAAELGESAPSPKGSSSAALNGPTPGAPDDPIGLFVMRPQDGEVTVGGSITFSARVAGASLLKPPVVKWFKGKWVDLSSKVGQHLQLHDSYDRASKVYLFELHITDAQPAFTGSYRCEVSTKDKFDCSNFNLTVHEAMGTGDLDLLSAFRRTSLAGGGRRISDSHEDTGILDFSSLLKKRDSFRTPRDSKLEAPAEEDVWEILRQAPPSEYERIAFQYGVTDLRGMLKRLKGMRRDEKKSTAFQKKLEPAYQVSKGHKIRLTVELADHDAEVKWLKNGQEIQMSGRYIFESIGAKRTLTISQCSLADDAAYQCVVGGEKCSTELFVKEPPVLITRPLEDQLVMVGQRVEFECEVSEEGAQVKWLKDGVELTREETFKYRFKKDGQRHHLIINEAMLEDAGHYALCTSGGQALAELIVQEKKLEVYQSIADLMVGAKDQAVFKCEVSDENVRGVWLKNGKELVPDSRIKVSHIGRVHKLTIDDVTPADEADYSFVPEGFACNLSAKLHFMEVKIDFVPRQEPPKIHLDCPGRIPDTIVVVAGNKLRLDVPISGDPAPTVIWQKAITQGNKAPARPAPDAPEDTGDSDEWVFDKKLLCETEGRVRVETTKDRSIFTVEGAEKEDEGVYTVTVKNPVGEDQVNLTVKVIDVPDAPAAPKISNVGEDSCTVQWEPPAYDGGQPILGYILERKKKKSYRWMRLNFDLIQELSHEARRMIEGVVYEMRVYAVNAIGMSRPSPASQPFMPIGPPSEPTHLAVEDVSDTTVSLKWRPPERVGAGGLDGYSVEYCPEGCSEWVAALQGLTEHTSILVKDLPTGARLLFRVRAHNMAGPGAPVTTTEPVTVQEILQRPRLQLPRHLRQTIQKKVGEPVNLLIPFQGKPRPQVTWTKEGQPLAGEEVSIRNSPTDTILFIRAARRVHSGTYQVTVRIENMEDKATLVLQVVDKPSPPQDLRVTDAWGLNVALEWKPPQDVGNTELWGYTVQKADKKTMEWFTVLEHYRRTHCVVPELIIGNGYYFRVFSQNMVGFSDRAATTKEPVFIPRPGITYEPPNYKALDFSEAPSFTQPLVNRSVIAGYTAMLCCAVRGSPKPKISWFKNGLDLGEDARFRMFSKQGVLTLEIRKPCPFDGGIYVCRATNLQGEARCECRLEVRVPQ

SEQ ID NO: 25839 - protein, 205 aa, Homo sapiens
MPSKKKKYNARFPPARIKKIMQTDEEIGKVAAAVPVIISRALELFLESLLKKACQVTQSRNAKTMTTSHLKQCIELEQQFDFLKDLVASVPDMQGDGEDNHMDGDKGARRGRKPGSGGRKNGGMGTKSKDKKLSGTDSEQEDESEDTDTDGEEETSQPPPQASHPSAHFQSPPTPFLPFASTLPLPPAPPGPSAPDEEDEEDYDS

SEQ ID NO: 25840 - protein, 211 aa, Homo sapiens
MPSKKKKYNARFPPARIKKIMQTDEEIGKVAAAVPVIISRALELFLESLLKKACQVTQSRNAKTMTTSHLKQCIELEQQFDFLKDLVASVPDMQGDGEDNHMDGDKGARRWTVPSQRRKPGSGGRKNGGMGTKSKDKKLSGTDSEQEDESEDTDTDGEEETSQPPPQASHPSAHFQSPPTPFLPFASTLPLPPAPPGPSAPDEEDEEDYDS

SEQ ID NO: 25841 - protein, 277 aa, Homo sapiens
MGLLECCARCLVGAPFASLVATGLCFFGVALFCGCGHEALTGTEKLIETYFSKNYQDYEYLINVIHAFQYVIYGTASFFFLYGALLLAEGFYTTGAVRQIFGDYKTTICGKGLSATVTGGQKGRGSRGQHQAHSLERVCHCLGKWLGHPDKFVGITYALTVVWLLVFACSAVPVYIYFNTWTTCQSIAFPSKTSASIGSLCADARMYGVLPWNAFPGKVCGSNLLSICKTAEFQMTFHLFIAAFVGAAATLVSLLTFMIAATYNFAVLKLMGRGTKF

SEQ ID NO: 25842 - protein, 242 aa, Homo sapiens
MGLLECCARCLVGAPFASLVATGLCFFGVALFCGCGHEALTGTEKLIETYFSKNYQDYEYLINVIHAFQYVIYGTASFFFLYGALLLAEGFYTTGAVRQIFGDYKTTICGKGLSATFVGITYALTVVWLLVFACSAVPVYIYFNTWTTCQSIAFPSKTSASIGSLCADARMYGVLPWNAFPGKVCGSNLLSICKTAEFQMTFHLFIAAFVGAAATLVSLLTFMIAATYNFAVLKLMGRGTKF

SEQ ID NO: 25843 - protein, 1616 aa, Homo sapiens
MFPLIGKTIIFDNFPDPSDTWEITETIGKGTYGKVFKVLNKKNGQKAAVKILDPIHDIDEEIEAEYNILKALSDHPNVVRFYGIYFKKDKVNGDKLWLVLELCSGGSVTDLVKGFLKRGERMSEPLIAYILHEALMGLQHLHNNKTIHRDVKGNNILLTTEGGVKLVDFGVSAQLTSTRHRRNTSVGTPFWMAPEVIACEQQLDTTYDARCDTWSLGITAIELGDGDPPLADLHPMRALFKIPRNPPPKLRQPELWSAEFNDFISKCLTKDYEKRPTVSELLQHKFITQIEGKDVMLQKQLTEFIGIHQCMGGTEKARRERIHTKKGNFNRPLISNLKDVDDLATLEILDENTVSEQLEKCYSRDQIYVYVGDILIALNPFQSLGLYSTKHSKLYIGSKRTASPPHIFAMADLGYQSMITYNSDQCIVISGESGAGKTENAHLLVQQLTVLGKANNRTLQEKILQVNNLVEAFGNACTIINDNSSRFGKYLEMKFTSSGAVVGAQISEYLLEKSRVIHQAIGEKNFHIFYYIYAGLAEKKKLAHYKLPENKPPRYLQNDHLRTVQDIMNNSFYKSQYELIEQCFKVIGFTMEQLGSIYSILAAILNVGNIEFSSVATEHQIDKSHISNHTALENCASLLCIRADELQEALTSHCVVTRGETIIRPNTVEKATDVRDAMAKTLYGRLFSWIVNCINSLLKHDSSPSGNGDELSIGILDIFGFENFKKNSFEQLCINIANEQIQYYYNQHVFAWEQNEYLNEDVDARVIEYEDNWPLLDMFLQKPMGLLSLLDEESRFPKATDQTLVEKFEGNLKSQYFWRPKRMELSFGIHHYAGKVLYNASGFLAKNRDTLPTDIVLLLRSSDNSVIRQLVNHPLTKTGNLPHSKTKNVINYQMRTSEKLINLAKGDTGEATRHARETTNMKTQTVASYFRYSLMDLLSKMVVGQPHFVRCIKPNSERQARKYDKEKVLLQLRYTGILETARIRRLGFSHRILFANFIKRYYLLCYKSSEEPRMSPDTCATILEKAGLDNWALGKTKVFLKYYHVEQLNLMRKEAIDKLILIQACVRAFLCSRRYQKIQEKRKESAIIIQSAARGHLVRKQRKEIVDMKNTAVTTIQTSDQEFDYKKNFENTRESFVKKQAENAISANERFISAPNNKGSVSVVKTSTFKPEEETTNAVESNNRVYQTPKKMNNVYEEEVKQEFYLVGPEVSPKQKSVKDLEENSNLRKVEKEEAMIQSYYQRYTEERNCEESKAAYLERKAISERPSYPVPWLAENETSFKKTLEPTLSQRSIYQNANSMEKEKKTSVVTQRAPICSQEEGRGRLRHETVKERQVEPVTQAQEEEDKAAVFIQSKYRGYKRRQQLRKDKMSSFKHQRIVTTPTEVARNTHNLYSYPTKHEEINNIKKKDNKDSKATSEREACGLAIFSKQISKLSEEYFILQKKLNEMILSQQLKSLYLGVSHHKPINRRVSSQQCLSGVCKGEEPKILRPPRRPRKPKTLNNPEDSTYYYLLHKSIQEEKRRPRKDSQGKLLDLEDFYYKEFLPSRSGPKEHSPSLRERRPQQELQNQCIKANERCWAAESPEKEEEREPAANPYDFRRLLRKTSQRRRLVQQS

SEQ ID NO: 25844 - protein, 247 aa, Homo sapiens
MFPLIGKTIIFDNFPDPSDTWEITETIGKGTYGKVFKVLNKKNGQKAAVKILDPIHDIDEEIEAEYNILKALSDHPNVVRFYGIYFKKDKVNGDKLWLVLELCSGGSVTDLVKGFLKRGERMSEPLIAYILHEALMGLQHLHNNKTIHRDVKGNNILLTTEGGVKLVDFGVSAQLTSTRHRRNTSVGTPFWMAPEVIACEQQLDTTYDARCDTWSLGITAIELGDGDPPLADLHPMRALFKIPRSDD

SEQ ID NO: 25845 - protein, 1030 aa, Homo sapiens
MKMADAKQKRNEQLKRWIGSETDLEPPVVKRQKTKVKFDDGAVFLAACSSGDTDEVLKLLHRGADINYANVDGLTALHQACIDDNVDMVKFLVENGANINQPDNEGWIPLHAAASCGYLDIAEFLIGQGAHVGAVNSEGDTPLDIAEEEAMEELLQNEVNRQGVDIEAARKEEERIMLRDARQWLNSGHINDVRHAKSGGTALHVAAAKGYTEVLKLLIQAGYDVNIKDYDGWTPLHAAAHWGKEEACRILVDNLCDMEMVNKVGQTAFDVADEDILGYLEELQKKQNLLHSEKRDKKSPLIESTANMDNNQSQKTFKNKETLIIEPEKNASRIESLEQEKVDEEEEGKKDESSCSSEEDEEDDSESEAETDKTKPLASVTNANTSSTQAAPVAVTTPTVSSGQATPTSPIKKFPTTATKISPKEEERKDESPATWRLGLRKTGSYGALAEITASKEGQKEKDTAGVTRSASSPRLSSSLDNKEKEKDSKGTRLAYVAPTIPRRLASTSDIEEKENRDSSSLRTSSSYTRRKWEDDLKKNSSVNEGSTYHKSCSFGRRQDDLISSSVPSTTSTPTVTSAAGLQKSLLSSTSTTTKITTGSSSAGTQSSTSNRLWAEDSTEKEKDSVPTAVTIPVAPTVVNAAASTTTLTTTTAGTVSSTTEVRERRRSYLTPVRDEESESQRKARSRQARQSRRSTQGVTLTDLQEAEKTIGRSRSTRTREQENEEKEKEEKEKQDKEKQEEKKESETSREDEYKQKYSRTYDETYQRYRPVSTSSSTTPSSSLSTMSSSLYASSQLNRPNSLVGITSAYSRGITKENEREGEKREEEKEGEDKSQPKSIRERRRPREKRRSTGVSFWTQDSDENEQEQQSDTEEGSNKKETQTDSISRYETSSTSAGDRYDSLLGRSGSYSYLEERKPYSSRLEKDDSTDFKKLYEQILAENEKLKAQLHDTNMELTDLKLQLEKATQRQERFADRSLLEMEKRERRALERRISEMEEELKMLPDLKADNQRLKDENGALIRVISKLSK

SEQ ID NO: 25846 - protein, 995 aa, Homo sapiens
MKMADAKQKRNEQLKRWIGSETDLEPPVVKRQKTKVKFDDGAVFLAACSSGDTDEVLKLLHRGADINYANVDGLTALHQACIDDNVDMVKFLVENGANINQPDNEGWIPLHAAASCGYLDIAEFLIGQGAHVGAVNSEGDTPLDIAEEEAMEELLQNEVNRQGVDIEAARKEEERIMLRDARQWLNSGHINDVRHAKSGGTALHVAAAKGYTEVLKLLIQAGYDVNIKDYDGWTPLHAAAHWGKEEACRILVDNLCDMEMVNKVGQTAFDVADEDILGYLEELQKKQNLLHSEKRDKKSPLIESTANMDNNQSQKTFKNKETLIIEPEKNASRIESLEQEKVDEEEEGKKDESSCSSEEDEEDDSESEAETDKTKPLASVTNANTSSTQAAPVAVTTPTVSSGQATPTSPIKKFPTTATKISPKEEERKDESPATWRLGLRKTGSYGALAEITASKEGQKEKDTAGVTRSASSPRLSSSLDNKEKEKDSKGTRLAYVAPTIPRRLASTSDIEEKENRDSSSLRTSSSYTRRKWEDDLKKNSSVNEGSTYHKSCSFGRRQDDLISSSVPSTTSTPTVTSAAGLQKSLLSSTSTTTKITTGSSSAGTQSSTSNRLWAEDSTEKEKDSVPTAVTIPVAPTVVNAAASTTTLTTTTAGTVSSTTEVRERRRSYLTPVRDEESESQRKARSRQARQSRRSTQGVTLTDLQEAEKTIGRSRSTRTREQENEEKEKEEKEKQDKEKQEEKKESETSREDEYKQKYSRTYDETYQRYRPVSTSSSTTPSSSLSTMSSSLYASSQLNRPNSLVGITSAYSRGITKENEREGEKREEEKEGEDKSQPKSIRERRRPREKRRSTGVSFWTQDSDENEQEQQSDTEEGSNKKETQTDSISRYETSSTSAGDRYDSLLGRSGSYSYLEERKPYSSRLEKDDSTDFKKRQERFADRSLLEMEKRERRALERRISEMEEELKMLPDLKADNQRLKDENGALIRVISKLSK

SEQ ID NO: 25847 - protein, 974 aa, Homo sapiens
MKMADAKQKRNEQLKRWIGSETDLEPPVVKRQKTKVKFDDGAVFLAACSSGDTDEVLKLLHRGADINYANVDGLTALHQACIDDNVDMVKFLVENGANINQPDNEGWIPLHAAASCGYLDIAEFLIGQGAHVGAVNSEGDTPLDIAEEEAMEELLQNEVNRQGVDIEAARKEEERIMLRDARQWLNSGHINDVRHAKSGGTALHVAAAKGYTEVLKLLIQAGYDVNIKDYDGWTPLHAAAHWGKEEACRILVDNLCDMEMVNKVGQTAFDVADEDILGYLEELQKKQNLLHSEKRDKKSPLIESTANMDNNQSQKTFKNKETLIIEPEKNASRIESLEQEKVDEEEEGKKDESSCSSEEDEEDDSESEAETDKTKPLASVTNANTSSTQAAPVAVTTPTVSSGQATPTSPIKKFPTTATKISPKEEERKDESPATWRLGLRKTGSYGALAEITASKEGQKEKDTAGVTRSASSPRLSSSLDNKEKEKDSKGTRLAYVAPTIPRRLASTSDIEEKENRDSSSLRTSSSYTRRKWEDDLKKNSSVNEGSTYHKSTSNRLWAEDSTEKEKDSVPTAVTIPVAPTVVNAAASTTTLTTTTAGTVSSTTEVRERRRSYLTPVRDEESESQRKARSRQARQSRRSTQGVTLTDLQEAEKTIGRSRSTRTREQENEEKEKEEKEKQDKEKQEEKKESETSREDEYKQKYSRTYDETYQRYRPVSTSSSTTPSSSLSTMSSSLYASSQLNRPNSLVGITSAYSRGITKENEREGEKREEEKEGEDKSQPKSIRERRRPREKRRSTGVSFWTQDSDENEQEQQSDTEEGSNKKETQTDSISRYETSSTSAGDRYDSLLGRSGSYSYLEERKPYSSRLEKDDSTDFKKLYEQILAENEKLKAQLHDTNMELTDLKLQLEKATQRQERFADRSLLEMEKRERRALERRISEMEEELKMLPDLKADNQRLKDENGALIRVISKLSK

SEQ ID NO: 25848 - protein, 971 aa, Homo sapiens
MKMADAKQKRNEQLKRWIGSETDLEPPVVKRQKTKVKFDDGAVFLAACSSGDTDEVLKLLHRGADINYANVDGLTALHQACIDDNVDMVKFLVENGANINQPDNEGWIPLHAAASCGYLDIAEFLIGQGAHVGAVNSEGDTPLDIAEEEAMEELLQNEVNRQGVDIEAARKEEERIMLRDARQWLNSGHINDVRHAKSGGTALHVAAAKGYTEVLKLLIQAGYDVNIKDYDGWTPLHAAAHWGKEEACRILVDNLCDMEMVNKVGQTAFDVADEDILGYLEELQKKQNLLHSEKRDKKSPLIESTANMDNNQSQKTFKNKETLIIEPEKNASRIESLEQEKVDEEEEGKKDESSCSSEEDEEDDSESEAETDKTKPLASVTNANTSSTQAAPVAVTTPTVSSGQATPTSPIKKFPTTATKISPKEEERKDESPATWRLGLRKTGSYGALAEITASKEGQKEKDTAGVTRSASSPRLSSSLDNKEKEKDSKGTRLAYVAPTIPRRLASTSDIEEKENRDSSSLRTSSSYTRRKWEDDLKKNSSVNEGSTYHKSCSFGRRQDDLISSSVPSTTSTPTVTSAAGLQKSLLSSTSTTTKITTGSSSAGTQSRSYLTPVRDEESESQRKARSRQARQSRRSTQGVTLTDLQEAEKTIGRSRSTRTREQENEEKEKEEKEKQDKEKQEEKKESETSREDEYKQKYSRTYDETYQRYRPVSTSSSTTPSSSLSTMSSSLYASSQLNRPNSLVGITSAYSRGITKENEREGEKREEEKEGEDKSQPKSIRERRRPREKRRSTGVSFWTQDSDENEQEQQSDTEEGSNKKETQTDSISRYETSSTSAGDRYDSLLGRSGSYSYLEERKPYSSRLEKDDSTDFKKLYEQILAENEKLKAQLHDTNMELTDLKLQLEKATQRQERFADRSLLEMEKRERRALERRISEMEEELKMLPDLKADNQRLKDENGALIRVISKLSK

SEQ ID NO: 25849 - protein, 943 aa, Homo sapiens
MVKFLVENGANINQPDNEGWIPLHAAASCGYLDIAEFLIGQGAHVGAVNSEGDTPLDIAEEEAMEELLQNEVNRQGVDIEAARKEEERIMLRDARQWLNSGHINDVRHAKSGGTALHVAAAKGYTEVLKLLIQAGYDVNIKDYDGWTPLHAAAHWGKEEACRILVDNLCDMEMVNKVGQTAFDVADEDILGYLEELQKKQNLLHSEKRDKKSPLIESTANMDNNQSQKTFKNKETLIIEPEKNASRIESLEQEKVDEEEEGKKDESSCSSEEDEEDDSESEAETDKTKPLASVTNANTSSTQAAPVAVTTPTVSSGQATPTSPIKKFPTTATKISPKEEERKDESPATWRLGLRKTGSYGALAEITASKEGQKEKDTAGVTRSASSPRLSSSLDNKEKEKDSKGTRLAYVAPTIPRRLASTSDIEEKENRDSSSLRTSSSYTRRKWEDDLKKNSSVNEGSTYHKSCSFGRRQDDLISSSVPSTTSTPTVTSAAGLQKSLLSSTSTTTKITTGSSSAGTQSSTSNRLWAEDSTEKEKDSVPTAVTIPVAPTVVNAAASTTTLTTTTAGTVSSTTEVRERRRSYLTPVRDEESESQRKARSRQARQSRRSTQGVTLTDLQEAEKTIGRSRSTRTREQENEEKEKEEKEKQDKEKQEEKKESETSREDEYKQKYSRTYDETYQRYRPVSTSSSTTPSSSLSTMSSSLYASSQLNRPNSLVGITSAYSRGITKENEREGEKREEEKEGEDKSQPKSIRERRRPREKRRSTGVSFWTQDSDENEQEQQSDTEEGSNKKETQTDSISRYETSSTSAGDRYDSLLGRSGSYSYLEERKPYSSRLEKDDSTDFKKLYEQILAENEKLKAQLHDTNMELTDLKLQLEKATQRQERFADRSLLEMEKRERRALERRISEMEEELKMLPDLKADNQRLKDENGALIRVISKLSK

SEQ ID NO: 25850 - protein, 982 aa, Homo sapiens
MAELEHLGGKRAESARMRRAEQLRRWRGSLTEQEPAERRGAGRQPLTRRGSPRVRFEDGAVFLAACSSGDTDEVRKLLARGADINTVNVDGLTALHQACIDENLDMVKFLVENRANVNQQDNEGWTPLHAAASCGYLNIAEYFINHGASVGIVNSEGEVPSDLAEEPAMKDLLLEQVKKQGVDLEQSRKEEEQQMLQDARQWLNSGKIEDVRQARSGATALHVAAAKGYSEVLRLLIQAGYELNVQDYDGWTPLHAAAHWGVKEACSILAEALCDMDIRNKLGQTPFDVADEGLVEHLELLQKKQNVLRSEKETRNKLIESDLNSKIQSGFFKNKEKMLYEEETPKSQEMEEENKESSSSSSEEEEGEDEASESETEKEADKKPEAFVNHSNSESKSSITEQIPAPAQNTFSASSARRFSSGLFNKPEEPKDESPSSWRLGLRKTGSHNMLSEVANSREPIRDRGSSIYRSSSSPRISALLDNKDKERENKSYISSLAPRKLNSTSDIEEKENRESAVNLVRSGSYTRQLWRDEAKGNEIPQTIAPSTYVSTYLKRTPHKSQADTTAEKTADNVSSSTPLCVITNRPLPSTANGVTATPVLSITGTDSSVEAREKRRSYLTPVRDEEAESLRKARSRQARQTRRSTQGVTLTDLQEAERTFSRSRAERQAQEQPREKPTDTEGLEGSPEKHEPSAVPATEAGEGQQPWGRSLDEEPICHRLRCPAQPDKPTTPASPSTSRPSLYTSSHLLWTNRFSVPDSESSETTTNTTTAKEMDKNENEEADLDEQSSKRLSIRERRRPKERRRGTGINFWTKDEDETDGSEEVKETWHERLSRLESGGSNPTTSDSYGDRASARARREAREARLATLTSRVEEDSNRDYKKLYESALTENQKLKTKLQEAQLELADIKSKLEKVAQQKQEKTSDRSSVLEMEKRERRALERKMSEMEEEMKVLTELKSDNQRLKDENGALIRVISKLSK

SEQ ID NO: 25851 - protein, 386 aa, Homo sapiens
MAELEHLGGKRAESARMRRAEQLRRWRGSLTEQEPAERRGAGRQPLTRRGSPRVRFEDGAVFLAACSSGDTDEVRKLLARGADINTVNVDGLTALHQACIDENLDMVKFLVENRANVNQQDNEGWTPLHAAASCGYLNIAEYFINHGASVGIVNSEGEVPSDLAEEPAMKDLLLEQVKKQGVDLEQSRKEEEQQMLQDARQWLNSGKIEDVRQARSGATALHVAAAKGYSEVLRLLIQAGYELNVQDYDGWTPLHAAAHWGVKEACSILAEALCDMDIRNKLGQTPFDVADEGLVEHLELLQKKQNVLRSEKETRNKLIESDLNSKIQSGFFKNKEKMLYEEETPKSQEMEEENKESSSSSSEEEEGEDEASESETEKEAVLFWPF

SEQ ID NO: 25852 - protein, 224 aa, Homo sapiens
MDKNENEEADLDEQSSKRLSIRERRRPKERRRGTGINFWTKDEDETDGSEEVKETWHERLSRLESGGSNPTTSDSYGDRASARARREAREARLATLTSRVEEDSNRDYKKLYESALTENQKLKTKLQEAQLELADIKSKLEKVAQQKQEKTSDRSSVLEMEKRERRALERKMSEMEEEMKNLHQLKQIQTLKQMNEQLQAENRALTRVVARLSESIESSDTQEL

SEQ ID NO: 25853 - protein, 208 aa, Homo sapiens
MDKNENEEADLDEQSSKRLSIRERRRPKERRRGTGINFWTKDEDETDGSEEVKETWHERLSRLESGGSNPTTSDSYGDRASARARREAREARLATLTSRVEEDSNRDYKKLYESALTENQKLKTKLQEAQLELADIKSKLEKVAQQKQEKTSDRSSVLEMEKRERRALERKMSEMEEEMKVLTELKSDNQRLKDENGALIRVISKLSK

SEQ ID NO: 25854 - protein, 515 aa, Homo sapiens
MAELEHLGGKRAESARMRRAEQLRRWRGSLTEQEPAERRGAGRQPLTRRGSPRVRFEDGAVFLAACSSGDTDEVRKLLARGADINTVNVDGLTALHQACIDENLDMVKFLVENRANVNQQDNEGWTPLHAAASCGYLNIAEYFINHGASVGIVNSEGEVPSDLAEEPAMKDLLLEQVKKQGVDLEQSRKEEEQQMLQDARQWLNSGKIEDVRQARSGATALHVAAAKGYSEVLRLLIQAGYELNVQDYDGWTPLHAAAHWGVKEACSILAEALCDMDIRNKLGQTPFDVADEGLVEHLELLQKKQNVLRSEKETRNKLIESDLNSKIQSGFFKNKEKMLYEEETPKSQEMEEENKESSSSSSEEEEGEDEASESETEKEADKKPEAFVNHSNSESKSSITEQIPAPAQNTFSASSARRFSSGLFNKPEEPKDESPSSWRLGLRKTGSHNMLSEVANSREPIRDRGSSIYRSSSSPRISALLDNKDKVQFGRVWGNSKAVFFFHENSILGTNENIF

SEQ ID NO: 25855 - protein, 1043 aa, Homo sapiens
MAELEHLGGKRAESARMRRAEQLRRWRGSLTEQEPAERRGAGRQPLTRRGSPRVRFEDGAVFLAACSSGDTDEVRKLLARGADINTVNVDGLTALHQACIDENLDMVKFLVENRANVNQQDNEGWTPLHAAASCGYLNIAEYFINHGASVGIVNSEGEVPSDLAEEPAMKDLLLEQVKKQGVDLEQSRKEEEQQMLQDARQWLNSGKIEDVRQARSGATALHVAAAKGYSEVLRLLIQAGYELNVQDYDGWTPLHAAAHWGVKEACSILAEALCDMDIRNKLGQTPFDVADEGLVEHLELLQKKQNVLRSEKETRNKLIESDLNSKIQSGFFKNKEKMLYEEETPKSQEMEEENKESSSSSSEEEEGEDEASESETEKEADKKPEAFVNHSNSESKSSITEQIPAPAQNTFSASSARRFSSGLFNKPEEPKDESPSSWRLGLRKTGSHNMLSEVANSREPIRDRGSSIYRSSSSPRISALLDNKDKERENKSYISSLAPRKLNSTSDIEEKENRESAVNLVRSGSYTRQLWRDEAKGNEIPQTIAPSTYVSTYLKSASFGRSSDPTSPYISANRNSSPATSPITIGSSTSRGSQWQPASSCPAPISANTTASVHHGRTPHKSQADTTAEKTADNVSSSTPLCVITNRPLPSTANGVTATPVLSITGTDSSVEAREKRRSYLTPVRDEEAESLRKARSRQARQTRRSTQGVTLTDLQEAERTFSRSRAERQAQEQPREKPTDTEGLEGSPEKHEPSAVPATEAGEGQQPWGRSLDEEPICHRLRCPAQPDKPTTPASPSTSRPSLYTSSHLLWTNRFSVPDSESSETTTNTTTAKEMDKNENEEADLDEQSSKRLSIRERRRPKERRRGTGINFWTKDEDETDGSEEVKETWHERLSRLESGGSNPTTSDSYGDRASARARREAREARLATLTSRVEEDSNRDYKKLYESALTENQKLKTKLQEAQLELADIKSKLEKVAQQKQEKTSDRSSVLEMEKRERRALERKMSEMEEEMKVLTELKSDNQRLKDENGALIRVISKLSK

SEQ ID NO: 25856 - protein, 1151 aa, Homo sapiens
MEVVDETEALQRFFEGHDINGALEPSNIDTSILEEYISKEDASDLCFPDISAPASSASYSHGQPAMPGSSGVHHLSPPGGGPSPGRHGPLPPPGYGTPLNCNNNNGMGAAPKPFPGGTGPPIKAEPKAPYAPGTLPDSPPDSGSEAYSPQQVNEPHLLRTITPETLCHVGVPSRLEHPPPPPAHLPGPPPPPPPPPHYPVLQRDLYMKAEPPIPHYAAMGQGLVPTDLHHTQQSQMLHQLLQQHGAELPTHPSKKRKHSESPPSTLNAQMLNGMIKQEPGTVTALPLHPTRAPSPPWPPQGPLSPGPGSLPLSIARVQTPPWHPPGAPSPGLLQDSDSLSGSYLDPNYQSIKWQPHQQNKWATLYDANYKELPMLTYRVDADKGFNFSVGDDAFVCQKKNHFQVTVYIGMLGEPKYVKTPEGLKPLDCFYLKLHGVKLEALNQSINIEQSQSDRSKRPFNPVTVNLPPEQVTKVTVGRLHFSETTANNMRKKGKPNPDQRYFMLVVALQAHAQNQNYTLAAQISERIIVRASNPGQFESDSDVLWQRAQVPDTVFHHGRVGINTDRPDEALVVHGNVKVMGSLMHPSDLRAKEHVQEVDTTEQLKRISRMRLVHYRYKPEFAASAGIEATAPETGVIAQEVKEILPEAVKDTGDMVFANGKTIENFLVVNKERIFMENVGAVKELCKLTDNLETRIDELERWSHKLAKLRRLDSLKSTGSSGAFSHAGSQFSRAGSVPHKKRPPKVASKSSSVVPDQACISQRFLQGTIIALVVVMAFSVVSMSTLYVLSLRTEEDLVDTDGSFAVSTSCLLALLRPQPPGGSEALCPWSSQSFGTTQLRQSPLTTGLPGIQPSLLLVTTSLTSSAPGSAVRTLDMCSSHPCPVICCSSPTTNPTTGPSLGPSFNPGHVLSPSPSPSTNRSGPSQMALLPVTNIRAKSWGLSVNGIGHSKHHKSLEPLASPAVPFPGGQGKAKNSPSLGFHGRARRGALQSSVGPAEPTWAQGQSASLLAEPVPSLTSIQVLENSMSITSQYCAPGDACRPGNFTYHIPVSSGTPLHLSLTLQMNSSSPVSVVLCSLRSKEEPCEEGSLPQSLHTHQDTQGTSHRWPITILSFREFTYHFRVALLGQANCSSEALAQPATDYHFHFYRLCD

SEQ ID NO: 25857 - protein, 1111 aa, Homo sapiens
MHWLPAGHDINGALEPSNIDTSILEEYISKEDASDLCFPDISAPASSASYSHGQPAMPGSSGVHHLSPPGGGPSPGRHGPLPPPGYGTPLNCNNNNGMGAAPKPFPGGTGPPIKAEPKAPYAPGTLPDSPPDSGSEAYSPQQVNEPHLLRTITPETLCHVGVPSRLEHPPPPPAHLPGPPPPPPPPPHYPVLQRDLYMKAEPPIPHYAAMGQGLVPTDLHHTQQSQMLHQLLQQHGAELPTHPSKKRKHSESPPSTLNAQMLNGMIKQEPGTVTALPLHPTRAPSPPWPPQGPLSPGPGSLPLSIARVQTPPWHPPGAPSPGLLQDSDSLSGSYLDPNYQSIKWQPHQQNKWATLYDANYKELPMLTYRVDADKGFNFSVGDDAFVCQKKNHFQVTVYIGMLGEPKYVKTPEGLKPLDCFYLKLHGVKLEALNQSINIEQSQSDRSKRPFNPVTVNLPPEQVTKVTVGRLHFSETTANNMRKKGKPNPDQRYFMLVVALQAHAQNQNYTLAAQISERIIVRASNPGQFESDSDVLWQRAQVPDTVFHHGRVGINTDRPDEALVVHGNVKVMGSLMHPSDLRAKEHVQEVDTTEQLKRISRMRLVHYRYKPEFAASAGIEATAPETGVIAQEVKEILPEAVKDTGDMVFANGKTIENFLVVNKERIFMENVGAVKELCKLTDNLETRIDELERWSHKLAKLRRLDSLKSTGSSGAFSHAGSQFSRAGSVPHKKRPPKVASKSSSVVPDQACISQRFLQGTIIALVVVMAFSVVSMSTLYVLSLRTEEDLVDTDGRSSQSFGTTQLRQSPLTTGLPGIQPSLLLVTTSLTSSAPGSAVRTLDMCSSHPCPVICCSSPTTNPTTGPSLGPSFNPGHVLSPSPSPSTNRSGPSQMALLPVTNIRAKSWGLSVNGIGHSKHHKSLEPLASPAVPFPGGQGKAKNSPSLGFHGRARRGALQSSVGPAEPTWAQGQSEPVPSLTSIQVLENSMSITSQYCAPGDACRPGNFTYHIPVSSGTPLHLSLTLQMNSSSPVSVVLCSLRSKEEPCEEGSLPQSLHTHQDTQGTSHRWPITILSFREFTYHFRVALLGQANCSSEALAQPATDYHFHFYRLCD

SEQ ID NO: 25858 - protein, 188 aa, Homo sapiens
MHRARWLTPVIPALWEAEAGRSRGQEIETILANKKQSAMPWDQDPEQSTGNYSEDEQNGKQKWREEGEAGRKREREKEEKNEKELQDEQENKRKRENEKQKQYPEKRLVSKSLMHTLWAKFKLNRCPTIQESLSLSFEFDMTHKQISQWFCKTRKKYNKEMSKRKHKKKHMRWRSLCCQGWSRTPALK

SEQ ID NO: 25859 - protein, 620 aa, Homo sapiens
MAAVRGLRVSVKAEAPAGPALGLPSPEAESGVDRGEPEPMEVEEGELEIVPVRRSLKELIPDTSRRYENKAGSFITGIDVTSKEAIEKKEQRAKRFHFRSEVNLAQRNVALDRDMMKKAIPKVRLETIYICGVDEMSTQDVFSYFKEYPPAHIEWLDDTSCNVVWLDEMTATRALINMSSLPAQDKIRSRDASEDKSAEKRKKDKQEDSSDDDEAEEGEVEDENSSDVELDTLSQVEEESLLRNDLRPANKLAKGNRLFMRFATKDDKKELGAARRSQYYMKYGNPNYGGMKGILSNSWKRRYHSRRIQRDVIKKRALIGDDVGLTSYKHRHSGLVNVPEEPIEEEEEEEEEEEEEEEEDQDMDADDRVVVEYHEELPALKQPRERSASRRSSASSSDSDEMDYDLELKMISTPSPKKSMKMTMYADEVESQLKNIRNSMRADSVSSSNIKNRIGNKLPPEKFADVRHLLDEKRQHSRPRPPVSSTKSDIRQRLGKRPHSPEKAFSSNPVVRREPSSDVHSRLGVPRQDSKGLYADTREKKSGNLWTRLGSAPKTKEKNTKKVDHRAPGAEEDDSELQRAWGALIKEKEQSRQKKSRLDNLPSLQIEVSRESSSGSEAES

SEQ ID NO: 25860 - protein, 340 aa, Homo sapiens
MKYGNPNYGGMKGILSNSWKRRYHSRRIQRDVIKKRALIGDDVGLTSYKHRHSGLVNVPEEPIEEEEEEEEEEEEEEEEDQDMDADDRVVVEYHEELPALKQPRERSASRRSSASSSDSDEMDYDLELKMISTPSPKKSMKMTMYADEVESQLKNIRNSMRADSVSSSNIKNRIGNKLPPEKFADVRHLLDEKRQHSRPRPPVSSTKSDIRQRLGKRPHSPEKAFSSNPVVRREPSSDVHSRLGVPRQDSKGLYADTREKKSGNLWTRLGSAPKTKEKNTKKVDHRAPGAEEDDSELQRAWGALIKEKEQSRQKKSRLDNLPSLQIEVSRESSSGSEAES

SEQ ID NO: 25861 - protein, 738 aa, Homo sapiens
MQPRWAQGATMWLGVLLTLLLCSSLEGQENSFTINSVDMKSLPDWTVQNGKNLTLQCFADVSTTSHVKPQHQMLFYKDDVLFYNISSMKSTESYFIPEVRIYDSGTYKCTVIVNNKEKTTAEYQVLVEGVPSPRVTLDKKEAIQGGIVRVNCSVPEEKAPIHFTIEKLELNEKMVKLKREKNSRDQNFVILEFPVEEQDRVLSFRCQARIISGIHMQTSESTKSELVTVTESFSTPKFHISPTGMIMEGAQLHIKCTIQVTHLAQEFPEIIIQKDKAIVAHNRHGNKAVYSVMAMVEHSGNYTCKVESSRISKVSSIVVNITELFSKPELESSFTHLDQGERLNLSCSIPGAPPANFTIQKEDTIVSQTQDFTKIASKSDSGTYICTAGIDKVVKKSNTVQIVVCEMLSQPRISYDAQFEVIKGQTIEVRCESISGTLPISYQLLKTSKVLENSTKNSNDPAVFKDNPTEDVEYQCVADNCHSHAKMLSEVLRVKVIAPVDEVQISILSSKVVESGEDIVLQCAVNEGSGPITYKFYREKEGKPFYQMTSNATQAFWTKQKASKEQEGEYYCTAFNRANHASSVPRSKILTVRVILAPWKKGLIAVVIIGVIIALLIIAAKCYFLRKAKAKQMPVEMSRPAVPLLNSNNEKMSDPNMEANSHYGHNDDVRNHAMKPINDNKEPLNSDVQYTEVQVSSAESHKDLGKKDTETVYSEVRKAVPDAVESRYSRTEGSLDGT

SEQ ID NO: 25862 - protein, 720 aa, Homo sapiens
MQPRWAQGATMWLGVLLTLLLCSSLEGQENSFTINSVDMKSLPDWTVQNGKNLTLQCFADVSTTSHVKPQHQMLFYKDDVLFYNISSMKSTESYFIPEVRIYDSGTYKCTVIVNNKEKTTAEYQVLVEGVPSPRVTLDKKEAIQGGIVRVNCSVPEEKAPIHFTIEKLELNEKMVKLKREKNSRDQNFVILEFPVEEQDRVLSFRCQARIISGIHMQTSESTKSELVTVTESFSTPKFHISPTGMIMEGAQLHIKCTIQVTHLAQEFPEIIIQKDKAIVAHNRHGNKAVYSVMAMVEHSGNYTCKVESSRISKVSSIVVNITELFSKPELESSFTHLDQGERLNLSCSIPGAPPANFTIQKEDTIVSQTQDFTKIASKSDSGTYICTAGIDKVVKKSNTVQIVVCEMLSQPRISYDAQFEVIKGQTIEVRCESISGTLPISYQLLKTSKVLENSTKNSNDPAVFKDNPTEDVEYQCVADNCHSHAKMLSEVLRVKVIAPVDEVQISILSSKVVESGEDIVLQCAVNEGSGPITYKFYREKEGKPFYQMTSNATQAFWTKQKASKEQEGEYYCTAFNRANHASSVPRSKILTVRVILAPWKKGLIAVVIIGVIIALLIIAAKCYFLRKAKAKQMPVEMSRPAVPLLNSNNEKMSDPNMEANSHYEPLNSDVQYTEVQVSSAESHKDLGKKDTETVYSEVRKAVPDAVESRYSRTEGSLDGT

SEQ ID NO: 25863 - protein, 717 aa, Homo sapiens
MQPRWAQGATMWLGVLLTLLLCSSLEGQENSFTINSVDMKSLPDWTVQNGKNLTLQCFADVSTTSHVKPQHQMLFYKDDVLFYNISSMKSTESYFIPEVRIYDSGTYKCTVIVNNKEKTTAEYQVLVEGVPSPRVTLDKKEAIQGGIVRVNCSVPEEKAPIHFTIEKLELNEKMVKLKREKNSRDQNFVILEFPVEEQDRVLSFRCQARIISGIHMQTSESTKSELVTVTESFSTPKFHISPTGMIMEGAQLHIKCTIQVTHLAQEFPEIIIQKDKAIVAHNRHGNKAVYSVMAMVEHSGNYTCKVESSRISKVSSIVVNITELFSKPELESSFTHLDQGERLNLSCSIPGAPPANFTIQKEDTIVSQTQDFTKIASKSDSGTYICTAGIDKVVKKSNTVQIVVCEMLSQPRISYDAQFEVIKGQTIEVRCESISGTLPISYQLLKTSKVLENSTKNSNDPAVFKDNPTEDVEYQCVADNCHSHAKMLSEVLRVKVIAPVDEVQISILSSKVVESGEDIVLQCAVNEGSGPITYKFYREKEGKPFYQMTSNATQAFWTKQKASKEQEGEYYCTAFNRANHASSVPRSKILTVRVILAPWKKGLIAVVIIGVIIALLIIAAKCYFLRKAKAKQMPVEMSRPAVPLLNSNNEKMSDPNMEANSHYGHNDDVRNHAMKPINDNKDLGKKDTETVYSEVRKAVPDAVESRYSRTEGSLDGT

SEQ ID NO: 25864 - protein, 719 aa, Homo sapiens
MQPRWAQGATMWLGVLLTLLLCSSLEGQENSFTINSVDMKSLPDWTVQNGKNLTLQCFADVSTTSHVKPQHQMLFYKDDVLFYNISSMKSTESYFIPEVRIYDSGTYKCTVIVNNKEKTTAEYQVLVEGVPSPRVTLDKKEAIQGGIVRVNCSVPEEKAPIHFTIEKLELNEKMVKLKREKNSRDQNFVILEFPVEEQDRVLSFRCQARIISGIHMQTSESTKSELVTVTESFSTPKFHISPTGMIMEGAQLHIKCTIQVTHLAQEFPEIIIQKDKAIVAHNRHGNKAVYSVMAMVEHSGNYTCKVESSRISKVSSIVVNITELFSKPELESSFTHLDQGERLNLSCSIPGAPPANFTIQKEDTIVSQTQDFTKIASKSDSGTYICTAGIDKVVKKSNTVQIVVCEMLSQPRISYDAQFEVIKGQTIEVRCESISGTLPISYQLLKTSKVLENSTKNSNDPAVFKDNPTEDVEYQCVADNCHSHAKMLSEVLRVKVIAPVDEVQISILSSKVVESGEDIVLQCAVNEGSGPITYKFYREKEGKPFYQMTSNATQAFWTKQKASKEQEGEYYCTAFNRANHASSVPRSKILTVRVILAPWKKGLIAVVIIGVIIALLIIAAKCYFLRKAKAKQMPVEMSRPAVPLLNSNNEKMSDPNMEANSHYGHNDDVRNHAMKPINDNKEPLNSDVQYTEVQVSSAESHKDAVESRYSRTEGSLDGT

SEQ ID NO: 25865 - protein, 708 aa, Homo sapiens
MQPRWAQGATMWLGVLLTLLLCSSLEGQENSFTINSVDMKSLPDWTVQNGKNLTLQCFADVSTTSHVKPQHQMLFYKDDVLFYNISSMKSTESYFIPEVRIYDSGTYKCTVIVNNKEKTTAEYQVLVEGVPSPRVTLDKKEAIQGGIVRVNCSVPEEKAPIHFTIEKLELNEKMVKLKREKNSRDQNFVILEFPVEEQDRVLSFRCQARIISGIHMQTSESTKSELVTVTESFSTPKFHISPTGMIMEGAQLHIKCTIQVTHLAQEFPEIIIQKDKAIVAHNRHGNKAVYSVMAMVEHSGNYTCKVESSRISKVSSIVVNITELFSKPELESSFTHLDQGERLNLSCSIPGAPPANFTIQKEDTIVSQTQDFTKIASKSDSGTYICTAGIDKVVKKSNTVQIVVCEMLSQPRISYDAQFEVIKGQTIEVRCESISGTLPISYQLLKTSKVLENSTKNSNDPAVFKDNPTEDVEYQCVADNCHSHAKMLSEVLRVKVIAPVDEVQISILSSKVVESGEDIVLQCAVNEGSGPITYKFYREKEGKPFYQMTSNATQAFWTKQKASKEQEGEYYCTAFNRANHASSVPRSKILTVRVILAPWKKGLIAVVIIGVIIALLIIAAKCYFLRKAKAKQMPVEMSRPAVPLLNSNNEKMSDPNMEANSHYGHNDDVRNHAMKPINDNKEPLNSDVQYTEVQVSSAESHKENGRLP

SEQ ID NO: 25866 - protein, 727 aa, Homo sapiens
MQPRWAQGATMWLGVLLTLLLCSSLEGQENSFTINSVDMKSLPDWTVQNGKNLTLQCFADVSTTSHVKPQHQMLFYKDDVLFYNISSMKSTESYFIPEVRIYDSGTYKCTVIVNNKEKTTAEYQVLVEGVPSPRVTLDKKEAIQGGIVRVNCSVPEEKAPIHFTIEKLELNEKMVKLKREKNSRDQNFVILEFPVEEQDRVLSFRCQARIISGIHMQTSESTKSELVTVTESFSTPKFHISPTGMIMEGAQLHIKCTIQVTHLAQEFPEIIIQKDKAIVAHNRHGNKAVYSVMAMVEHSGNYTCKVESSRISKVSSIVVNITELFSKPELESSFTHLDQGERLNLSCSIPGAPPANFTIQKEDTIVSQTQDFTKIASKSDSGTYICTAGIDKVVKKSNTVQIVVCEMLSQPRISYDAQFEVIKGQTIEVRCESISGTLPISYQLLKTSKVLENSTKNSNDPAVFKDNPTEDVEYQCVADNCHSHAKMLSEVLRVKVIAPVDEVQISILSSKVVESGEDIVLQCAVNEGSGPITYKFYREKEGKPFYQMTSNATQAFWTKQKASKEQEGEYYCTAFNRANHASSVPRSKILTVRVILAPWKKGLIAVVIIGVIIALLIIAAKCYFLRKAKAKQMPVEMSRPAVPLLNSNNEKMSDPNMEANSHYGHNDDVRNHAMKPINDNKEPLNSDVQYTEVQVSSAESHKDLGKKDTETVYSEVRKAVPENGRLP

SEQ ID NO: 25867 - protein, 390 aa, Homo sapiens
MGDTFIRHIALLGFEKRFVPSQHYVYMFLVKWQDLSEKVVYRRFTEIYEFHKTLKEMFPIEAGAINPENRIIPHLPAPKWFDGQRAAENRQGTLTEYCSTLMSLPTKISRCPHLLDFFKVRPDDLKLPTDNQTKKPETYLMPKDGKSTATDITGPIILQTYRAIANYEKTSGSEMALSTGDVVEVVEKSESGWWFCQMKAKRGWIPASFLEPLDSPDETEDPEPNYAGEPYVAIKAYTAVEGDEVSLLEGEAVEVIHKLLDGWWVIRKDDVTGYFPSMYLQKSGQDVSQAQRQIKRGAPPRRSSIRNAHSIHQRSRKRLSQDAYRRNSVRFLQQRRRQARPGPQSPGSPLEEERQTQRSKPQPAVPPRPSADLILNRCSESTKRKLASAV

SEQ ID NO: 25868 - protein, 278 aa, Homo sapiens
MGDTFIRHIALLGFEKRFVPSQHYVYMFLVKWQDLSEKVVYRRFTEIYEFHKTLKEMFPIEAGAINPENRIIPHLPAPKWFDGQRAAENRQGTLTEYCSTLMSLPTKISRCPHLLDFFKVRPDDLKLPTDNQTKKPETYLMPKDGKSTATDITGPIILQTYRAIANYEKTSGSEMALSTGDVVEVVEKSESGQTSHLTGLLPLVLRNPQPQAPCQGSGSLAPGRTPALLGALNVLPTLWVAFCLSVHPVVAVGICAWQAGAGHVCVFCLDGYGTVCSL

SEQ ID NO: 25869 - protein, 173 aa, Homo sapiens
MGTFDLWTDYLGLAHLVRALSGKEGPETRLSPQPEPEPMLEPDQKRSLESSPAPERLCSFCKHNGESRAIYQSHVLKDEAGRVLCPILRDYVCPQCGATRERAHTRRFCPLTGQGYTSVYSHTTRNSAGKKLVRPDKAKTQDTGHRRGGGGGAGFRGAGKSEPSPSCSPSMST

SEQ ID NO: 25870 - protein, 192 aa, Homo sapiens
MGTFDLWTDYLGLAHLVRALSGKEGPETRLSPQPEPEPMLEPVSALEPMPAPESVPVPGPKDQKRSLESSPAPERLCSFCKHNGESRAIYQSHVLKDEAGRVLCPILRDYVCPQCGATRERAHTRRFCPLTGQGYTSVYSHTTRNSAGKKLVRPDKAKTQDTGHRRGGGGGAGFRGAGKSEPSPSCSPSMST

SEQ ID NO: 25871 - protein, 327 aa, Homo sapiens
MQMPAMMSLLLVSVGLMEALQAQSHPITRRDLFSQEIQLDMALASFDDQYAGCAAAMTAALPDLNHTEFQANQVYADSWTLASSQWQERQARWPEWSLSPTRPSPPPLGFRDEHGVALLAYTANSPLHKEFNAAVREAGRSRAHYLHHFSFKTLHFLLTEALQLLGSGQRPPRCHQVFRGVHGLRFRPAGPRATVRLGGFASASLKHVAAQQFGEDTFFGIWTCLGAPIKGYSFFPGEEEVLIPPFETFQVINASRLAQGPARIYLRALGKHSTYNCEYIKDKKCKSGPCHLDNSAMGQSPLSAVWSLLLLLWFLVVRAFPDGPGLL

SEQ ID NO: 25872 - protein, 305 aa, Homo sapiens
MSVDPACPQSLPCFEASDCKESSPMPVICGPEENYPSLQMSSAEMPHTETVSPLPSSMDLLIQDSPDSSTSPKGKQPTSAEKSVAKKEDKVPVKKQKTRTVFSSTQLCVLNDRFQRQKYLSLQQMQELSNILNLSYKQVKTWFQNQRMKSKRWQKNNWPKNSNGVTQKASAPTYPSLYSSYHQGCLVNPTGNLPMWSNQTWNNSTWSNQTQNIQSWSNHSWNTQTWCTQSWNNQAWNSPFYNCGEESLQSCMQFQPNSPASDLEAALEAAGEGLNVIQQTTRYFSTPQTMDLFLNYSMNMQPEDV

SEQ ID NO: 25873 - protein, 289 aa, Homo sapiens
MSVDPACPQSLPCFEASDCKESSPMPVICGPEENYPSLQMSSAEMPHTETVSPLPSSMDLLIQDSPDSSTSPKGKQPTSAEKSVAKKEDKVPVKKQKTRTVFSSTQLCVLNDRFQRQKYLSLQQMQELSNILNLSYKQVKTWFQNQRMKSKRWQKNNWPKNSNGVTQGCLVNPTGNLPMWSNQTWNNSTWSNQTQNIQSWSNHSWNTQTWCTQSWNNQAWNSPFYNCGEESLQSCMQFQPNSPASDLEAALEAAGEGLNVIQQTTRYFSTPQTMDLFLNYSMNMQPEDV

SEQ ID NO: 25874 - protein, 389 aa, Homo sapiens
MKTGHFEIVTMLLATMILVDIFQVKAEVLDMADNAFDDEYLKCTDRMEIKYVPQLLKEEKASHQQLDTVWENAKAKWAARKTQIFLPMNFKDNHGIALMAYISEAQEQTPFYHLFSEAVKMAGQSREDYIYGFQFKAFHFYLTRALQLLRKPCEASSKTVVYRTSQGTSFTFGGLNQARFGHFTLAYSAKPQAANDQLTVLSIYTCLGVDIENFLDKESERITLIPLNEVFQVSQEGAGNNLILQSINKTCSHYECAFLGGLKTENCIENLEYFQPIYVYNPGEKNQKLEDHSEKNWKLEDHGEKNQKLEDHGVKILEPTQIPGMKIPEPFPLPEDKSQGNINNPTPGPVPVPGPKSHPSASSGKLLLPQFGMVIILISVSAINLFVAL

SEQ ID NO: 25875 - protein, 367 aa, Homo sapiens
MKTGHFEIVTMLLATMILVDIFQVKAEVLDMADNAFDDEYLKCTDRMEIKYVPQLLKEEKASHQQLDTVWENAKAKWAARKTQIFLPMNFKDNHGIALMAYISEAQEQTPFYHLFSEAVKMAGQSREDYIYGFQFKAFHFYLTRALQLLRKPCEASSKTVVYRTSQGTSFTFGGLNQARFGHFTLAYSAKPQAANDQLTVLSIYTCLGVDIENFLDKESERITLIPLNEVFQVSQEGAGNNLILQSINKTCSHYECAFLGGLKTENCIENLEYFQPIYVYNPGEKNQKLEDHSEKNWKLEDHGEKNQKLEDHGVKILEPTQIPAPGPVPVPGPKSHPSASSGKLLLPQFGMVIILISVSAINLFVAL

SEQ ID NO: 25876 - protein, 378 aa, Homo sapiens
MKTGHFEIVTMLLATMILVDIFQVKAEVLDMADNAFDDEYLKCTDRMEIKYVPQLLKEEKASHQQLDTVWENAKAKWAARKTQIFLPMNFKDNHGIALMAYISEAQEQTPFYHLFSEAVKMAGQSREDYIYGFQFKAFHFYLTRALQLLRKPCEASSKTVVYRTSQGTSFTFGGLNQARFGHFTLAYSAKPQAANDQLTVLSIYTCLGVDIENFLDKESERITLIPLNEVFQVSQEGAGNNLILQSINKTCSHYECAFLGGLKTENCIENLEYFQPIYVYNPGEKNQKLEDHSEKNWKLEDHGEKNQKLEDHGVKILEPTQIPEDKSQGNINNPTPGPVPVPGPKSHPSASSGKLLLPQFGMVIILISVSAINLFVAL

SEQ ID NO: 25877 - protein, 1208 aa, Homo sapiens
MEPLLLGRGLIVYLMFLLLKFSKAIEIPSSVQQVPTIIKQSKVQVAFPFDEYFQIECEAKGNPEPTFSWTKDGNPFYFTDHRIIPSNNSGTFRIPNEGHISHFQGKYRCFASNKLGIAMSEEIEFIVPSVPKFPKEKIDPLEVEEGDPIVLPCNPPKGLPPLHIYWMNIELEHIEQDERVYMSQKGDLYFANVEEKDSRNDYCCFAAFPRLRTIVQKMPMKLTVNSSNSIKQRKPKLLLPPTESGSESSITILKGEILLLECFAEGLPTPQVDWNKIGGDLPKGRETKENYGKTLKIENVSYQDKGNYRCTASNFLGTATHDFHVIVEEPPRWTKKPQSAVYSTGSNGILLCEAEGEPQPTIKWRVNGSPVDNHPFAGDVVFPREISFTNLQPNHTAVYQCEASNVHGTILANANIDVVDVRPLIQTKDGENYATVVGYSAFLHCEFFASPEAVVSWQKVEEVKPLEGRRYHIYENGTLQINRTTEEDAGSYSCWVENAIGKTAVTANLDIRNATKLRVSPKNPRIPKLHMLELHCESKCDSHLKHSLKLSWSKDGEAFEINGTEDGRIIIDGANLTISNVTLEDQGIYCCSAHTALDSAADITQVTVLDVPDPPENLHLSERQNRSVRLTWEAGADHNSNISEYIVEFEGNKEEPGRWEELTRVQGKKTTVILPLAPFVRYQFRVIAVNEVGRSQPSQPSDHHETPPAAPDRNPQNIRVQASQPKEMIIKWEPLKSMEQNGPGLEYRVTWKPQGAPVEWEEETVTNHTLRVMTPAVYAPYDVKVQAINQLGSGPDPQSVTLYSGEDYPDTAPVIHGVDVINSTLVKVTWSTVPKDRVHGRLKGYQINWWKTKSLLDGRTHPKEVNILRFSGQRNSGMVPSLDAFSEFHLTVLAYNSKGAGPESEPYIFQTPEGVPEQPTFLKVIKVDKDTATLSWGLPKKLNGNLTGYLLQYQIINDTYEIGELNDINITTPSKPSWHLSNLNATTKYKFYLRACTSQGCGKPITEESSTLGEGSKGIGKISGVNLTQKTHPIEVFEPGAEHIVRLMTKNWGDNDSIFQDVIETRGREYAGLYDDISTQGWFIGLMCAIALLTLLLLTVCFVKRNRGGKYSVKEKEDLHPDPEIQSVKDETFGEYSDSDEKPLKGSLRSLNRDMQPTESADSLVEYGEGDHGLFSEDGSFIGAYAGSKEKGSVESNGSSTATFPLRA

SEQ ID NO: 25878 - protein, 1224 aa, Homo sapiens
MEPLLLGRGLIVYLMFLLLKFSKAIEIPSSVQQVPTIIKQSKVQVAFPFDEYFQIECEAKGNPEPTFSWTKDGNPFYFTDHRIIPSNNSGTFRIPNEGHISHFQGKYRCFASNKLGIAMSEEIEFIVPSVPKFPKEKIDPLEVEEGDPIVLPCNPPKGLPPLHIYWMNIELEHIEQDERVYMSQKGDLYFANVEEKDSRNDYCCFAAFPRLRTIVQKMPMKLTVNSLKHANDSSSSTEIGSKANSIKQRKPKLLLPPTESGSESSITILKGEILLLECFAEGLPTPQVDWNKIGGDLPKGRETKENYGKTLKIENVSYQDKGNYRCTASNFLGTATHDFHVIVEEPPRWTKKPQSAVYSTGSNGILLCEAEGEPQPTIKWRVNGSPVDNHPFAGDVVFPREISFTNLQPNHTAVYQCEASNVHGTILANANIDVVDVRPLIQTKDGENYATVVGYSAFLHCEFFASPEAVVSWQKVEEVKPLEGRRYHIYENGTLQINRTTEEDAGSYSCWVENAIGKTAVTANLDIRNATKLRVSPKNPRIPKLHMLELHCESKCDSHLKHSLKLSWSKDGEAFEINGTEDGRIIIDGANLTISNVTLEDQGIYCCSAHTALDSAADITQVTVLDVPDPPENLHLSERQNRSVRLTWEAGADHNSNISEYIVEFEGNKEEPGRWEELTRVQGKKTTVILPLAPFVRYQFRVIAVNEVGRSQPSQPSDHHETPPAAPDRNPQNIRVQASQPKEMIIKWEPLKSMEQNGPGLEYRVTWKPQGAPVEWEEETVTNHTLRVMTPAVYAPYDVKVQAINQLGSGPDPQSVTLYSGEDYPDTAPVIHGVDVINSTLVKVTWSTVPKDRVHGRLKGYQINWWKTKSLLDGRTHPKEVNILRFSGQRNSGMVPSLDAFSEFHLTVLAYNSKGAGPESEPYIFQTPEGVPEQPTFLKVIKVDKDTATLSWGLPKKLNGNLTGYLLQYQIINDTYEIGELNDINITTPSKPSWHLSNLNATTKYKFYLRACTSQGCGKPITEESSTLGEGSKGIGKISGVNLTQKTHPIEVFEPGAEHIVRLMTKNWGDNDSIFQDVIETRGREYAGLYDDISTQGWFIGLMCAIALLTLLLLTVCFVKRNRGGKYSVKEKEDLHPDPEIQSVKDETFGEYSDSDEKPLKGSLRSLNRDMQPTESADSLVEYGEGDHGLFSEDGSFIGAYAGSKEKGSVESNGSSTATFPLRA

SEQ ID NO: 25879 - protein, 1043 aa, Homo sapiens
MNFSVITCPNGGTNQGLLPYLMALDQYQLEEFKLCLEPQQLMDFWSAPQGHFPRIPWANLRAADPLNLSFLLDEHFPKGQAWKVVLGIFQTMNLTSLCEKVRAEMKENVQTQELQDPTQEDLEMLEAAAGNMQTQGCQDPNQEELDELEEETGNVQAQGCQDPNQEEPEMLEEADHRRKYRENMKAELLETWDNISWPKDHVYIRNTSKDEHEELQRLLDPNRTRAQAQTIVLVGRAGVGKTTLAMQAMLHWANGVLFQQRFSYVFYLSCHKIRYMKETTFAELISLDWPDFDAPIEEFMSQPEKLLFIIDGFEEIIISESRSESLDDGSPCTDWYQELPVTKILHSLLKKELVPLATLLITIKTWFVRDLKASLVNPCFVQITGFTGDDLRVYFMRHFDDSSEVEKILQQLRKNETLFHSCSAPMVCWTVCSCLKQPKVRYYDLQSITQTTTSLYAYFFSNLFSTAEVDLADDSWPGQWRALCSLAIEGLWSMNFTFNKEDTEIEGLEVPFIDSLYEFNILQKINDCGGCTTFTHLSFQEFFAAMSFVLEEPREFPPHSTKPQEMKMLLQHVLLDKEAYWTPVVLFFFGLLNKNIARELEDTLHCKISPRVMEELLKWGEELGKAESASLQFHILRLFHCLHESQEEDFTKKMLGRIFEVDLNILEDEELQASSFCLKHCKRLNKLRLSVSSHILERDLEILETSKFDSRMHAWNSICSTLVTNENLHELDLSNSKLHASSVKGLCLALKNPRCKVQKLTCKSVTPEWVLQDLIIALQGNSKLTHLNFSSNKLGMTVPLILKALRHSACNLKYLCLEKCNLSAASCQDLALFLTSIQHVTRLCLGFNRLQDDGIKLLCAALTHPKCALERLELWFCQLAAPACKHLSDALLQNRSLTHLNLSKNSLRDEGVKFLCEALGRPDGNLQSLNLSGCSFTREGCGELANALSHNHNVKILDLGENDLQDDGVKLLCEALKPHRALHTLGLAKCNLTTACCQHLFSVLSSSKSLVNLNLLGNELDTDGVKMLCKALKKSTCRLQKLG

SEQ ID NO: 25880 - protein, 1093 aa, Homo sapiens
MADSSSSSFFPDFGLLLYLEELNKEELNTFKLFLKETMEPEHGLTPWNEVKKARREDLANLMKKYYPGEKAWSVSLKIFGKMNLKDLCERAKEEINWSAQTIGPDDAKAGETQEDQEAVLGDGTEYRNRIKEKFCITWDKKSLAGKPEDFHHGIAEKDRKLLEHLFDVDVKTGAQPQIVVLQGAAGVGKTTLVRKAMLDWAEGSLYQQRFKYVFYLNGREINQLKERSFAQLISKDWPSTEGPIEEIMYQPSSLLFIIDSFDELNFAFEEPEFALCEDWTQEHPVSFLMSSLLRKVMLPEASLLVTTRLTTSKRLKQLLKNHHYVELLGMSEDAREEYIYQFFEDKRWAMKVFSSLKSNEMLFSMCQVPLVCWAACTCLKQQMEKGGDVTLTCQTTTALFTCYISSLFTPVDGGSPSLPNQAQLRRLCQVAAKGIWTMTYVFYRENLRRLGLTQSDVSSFMDSNIIQKDAEYENCYVFTHLHVQEFFAAMFYMLKGSWEAGNPSCQPFEDLKSLLQSTSYKDPHLTQMKCFLFGLLNEDRVKQLERTFNCKMSLKIKSKLLQCMEVLGNSDYSPSQLGFLELFHCLYETQDKAFISQAMRCFPKVAINICEKIHLLVSSFCLKHCRCLRTIRLSVTVVFEKKILKTSLPTNTWDGDRITHCWQDLCSVLHTNEHLRELDLYHSNLDKSAMNILHHELRHPNCKLQKLLLKFITFPDGCQDISTSLIHNKNLMHLDLKGSDIGDNGVKSLCEALKHPECKLQTLRLESCNLTVFCCLNISNALIRSQSLIFLNLSTNNLLDDGVQLLCEALRHPKCYLERLSLESCGLTEAGCEYLSLALISNKRLTHLCLADNVLGDGGVKLMSDALQHAQCTLKSLVLRRCHFTSLSSEYLSTSLLHNKSLTHLDLGSNWLQDNGVKLLCDVFRHPSCNLQDLELMGCVLTNACCLDLASVILNNPNLRSLDLGNNDLQDDGVKILCDALRYPNCNIQRLGLEYCGLTSLCCQDLSSALICNKRLIKMNLTQNTLGYEGIVKLYKVLKSPKCKLQVLGLCKEAFDEEAQKLLEAVGVSNPHLIIKPDCNYHNEEDVSWWWCF

SEQ ID NO: 25881 - protein, 1201 aa, Homo sapiens
MPRGEAPGPGRRGAKDEALGEESGERWSPEFHLQRKLADSSHSEQQDRNRVSEELIMVVQEMKKYFPSERRNKPSTLDALNYALRCVHSVQANSEFFQILSQNGAPQADVSMYSLEELATIASEHTSKNTDTFVAVFSFLSGRLVHISEQAALILNRKKDVLASSHFVDLLAPQDMRVFYAHTARAQLPFWNNWTQRAARYECAPVKPFFCRIRGGEDRKQEKCHSPFRIIPYLIHVHHPAQPELESEPCCLTVVEKIHSGYEAPRIPVNKRIFTTTHTPGCVFLEVDEKAVPLLGYLPQDLIGTSILSYLHPEDRSLMVAIHQKVLKYAGHPPFEHSPIRFCTQNGDYIILDSSWSSFVNPWSRKISFIIGRHKVRTSPLNEDVFATKIKKMNDNDKDITELQEQIYKLLLQPVHVSVSSGYGSLGSSGSQEQLVSIASSSEASGHRVEETKAEQMTLQQVYASVNKIKNLGQQLYIESMTKSSFKPVTGTRTEPNGGGECKTFTSFHQTLKNNSVYTEPCEDLRNDEHSPSYQQINCIDSVIRYLKSYNIPALKRKCISCTNTTSSSSEEDKQNHKADDVQALQAGLQIPAIPKSEMPTNGRSIDTGGGAPQILSTAMLSLGSGISQCGYSSTIVHVPPPETARDATLFCEPWTLNMQPAPLTSEEFKHVGLTAAVLSAHTQKEEQNYVDKFREKILSSPYSSYLQQESRSKAKYSYFQGDSTSKQTRSAGCRKGKHKRKKLPEPPDSSSSNTGSGPRRGAHQNAQPCCPSAASSPHTSSPTFPPAAMVPSQAPYLVPAFPLPAATSPGREYAAPGTAPEGLHGLPLSEGLQPYPAFPFPYLDTFMTVFLPDPPVCPLLSPSFLPCPFLGATASSAISPSMSSAMSPTLDPPPSVTSQRREEEKWEAQSEGHPFITSRSSSPLQLNLLQEEMPRPSESPDQMRRNTCPQTEYCVTGNNGSESSPATTGALSTGSPPRENPSHPTASALSTGSPPMKNPSHPTASALSTGSPPMKNPSHPTASTLSMGLPPSRTPSHPTATVLSTGSPPSESPSRTGSAASGSSDSSIYLTSSVYSSKISQNGQQSQDVQKKETFPNVAEEPIWRMIRQTPERILMTYQVPERVKEVVLKEDLEKLESMRQQQPQFSHGQKEELAKVYNWIQSQTVTQEIDIQACVTCENEDSADGAATSCGQVLVEDSC

SEQ ID NO: 25882 - protein, 1210 aa, Homo sapiens
MPRGEAPGPGRRGAKDEALGEESGERWSPEFHLQRKLADSSHSEQQDRNRVSEELIMVVQEMKKYFPSERRNKPSTLDALNYALRCVHSVQANSEFFQILSQNGAPQADVSMYSLEELATIASEHTSKNTDTFVAVFSFLSGRLVHISEQAALILNRKKDVLASSHFVDLLAPQDMRVFYAHTARAQLPFWNNWTQRAAARYECAPVKPFFCRIRGGEDRKQEKCHSPFRIIPYLIHVHHPAQPELESEPCCLTVVEKIHSGYEAPRIPVNKRIFTTTHTPGCVFLEVDEKAVPLLGYLPQDLIGTSILSYLHPEDRSLMVAIHQKVLKYAGHPPFEHSPIRFCTQNGDYIILDSSWSSFVNPWSRKISFIIGRHKVRTSPLNEDVFATKIKKMNDNDKDITELQEQIYKLLLQPVHVSVSSGYGSLGSSGSQEQLVSIASSSEASGHRVEETKAEQMTLQQVYASVNKIKNLGQQLYIESMTKSSFKPVTGTRTEPNGGGESANGGGECKTFTSFHQTLKNNSVYTEPCEDLRNDEHSPSYQQINCIDSVIRYLKSYNIPALKRKCISCTNTTSSSSEEDKQNHKADDVQALQAGLQIPAIPKSEMPTNGRSIDTGGGAPQILSTAMLSLGSGISQCGYSSTIVHVPPPETARDATLFCEPWTLNMQPAPLTSEEFKHVGLTAAVLSAHTQKEEQNYVDKFREKILSSPYSSYLQQESRSKAKYSYFQGDSTSKQTRSAGCRKGKHKRKKLPEPPDSSSSNTGSGPRRGAHQNAQPCCPSAASSPHTSSPTFPPAAMVPSQAPYLVPAFPLPAATSPGREYAAPGTAPEGLHGLPLSEGLQPYPAFPFPYLDTFMTVFLPDPPVCPLLSPSFLPCPFLGATASSAISPSMSSAMSPTLDPPPSVTSQRREEEKWEAQSEGHPFITSRSSSPLQLNLLQEEMPRPSESPDQMRRNTCPQTEYQCVTGNNGSESSPATTGALSTGSPPRENPSHPTASALSTGSPPMKNPSHPTASALSTGSPPMKNPSHPTASTLSMGLPPSRTPSHPTATVLSTGSPPSESPSRTGSAASGSSDSSIYLTSSVYSSKISQNGQQSQDVQKKETFPNVAEEPIWRMIRQTPERILMTYQVPERVKEVVLKEDLEKLESMRQQQPQFSHGQKEELAKVYNWIQSQTVTQEIDIQACVTCENEDSADGAATSCGQVLVEDSC

SEQ ID NO: 25883 - protein, 661 aa, Homo sapiens
MDLQQSTTITSLEKWCLDESLSGCRRHYSVKKKLKLIRVLGLFMGLVAISTVSFSISAFSETDTQSTGEASVVSGPRVAQGYHQRTLLDLNDKILDYTPQPPLSKEGESENSTDHAQGDYPKDIFSLEERRKGAIILHVIGMIYMFIALAIVCDEFFVPSLTVITEKLGISDDVAGATFMAAGGSAPELFTSLIGVFIAHSNVGIGTIVGSAVFNILFVIGMCALFSREILNLTWWPLFRDVSFYIVDLIMLIIFFLDNVIMWWESLLLLTAYFCYVVFMKFNVQVEKWVKQMINRNKVVKVTAPEAQAKPSAARDKDEPTLPAKPRLQRGGSSASLHNSLMRNSIFQLMIHTLDPLAEELGSYGKLKYYDTMTEEGRFREKASILHKIAKKKCHVDENERQNGAANHVEKIELPNSTSTDVEMTPSSDASEPVQNGNLSHNIEGAEAQTADEEEDQPLSLAWPSETRKQVTFLIVFPIVFPLWITLPDVRKPSSRKFFPITFFGSITWIAVFSYLMVWWAHQVGETIGISEEIMGLTILAAGTSIPDLITSVIVARKGLGDMAVSSSVGSNIFDITVGLPLPWLLYTVIHRFQPVAVSSNGLFCAIVLLFIMLLFVILSIALCKWRMNKILGFIMFGLYFVFLVVSVLLEDRILTCPVSI

SEQ ID NO: 25884 - protein, 644 aa, Homo sapiens
MDLQQSTTITSLEKWCLDESLSGCRRHYSVKKKLKLIRVLGLFMGLVAISTVSFSISAFSETDTQSTGEASVVSGPRVAQGYHQRTLLDLNDKILDYTPQPPLSKEGESENSTDHAQGDYPKDIFSLEERRKGAIILHVIGMIYMFIALAIVCDEFFVPSLTVITEKLGISDDVAGATFMAAGGSAPELFTSLIGVFIAHSNVGIGTIVGSAVFNILFVIGMCALFSREILNLTWWPLFRDVSFYIVDLIMLIIFFLDNVIMWWESLLLLTAYFCYVVFMKFNVQVEKWVKQMINRNKVVKVTAPEAQAKPSAARDKDEPTLPAKPRLQRGGSSASLHNSLMRNSIFQLMIHTLDPLAEGRFREKASILHKIAKKKCHVDENERQNGAANHVEKIELPNSTSTDVEMTPSSDASEPVQNGNLSHNIEGAEAQTADEEEDQPLSLAWPSETRKQVTFLIVFPIVFPLWITLPDVRKPSSRKFFPITFFGSITWIAVFSYLMVWWAHQVGETIGISEEIMGLTILAAGTSIPDLITSVIVARKGLGDMAVSSSVGSNIFDITVGLPLPWLLYTVIHRFQPVAVSSNGLFCAIVLLFIMLLFVILSIALCKWRMNKILGFIMFGLYFVFLVVSVLLEDRILTCPVSI

SEQ ID NO: 25885 - protein, 622 aa, Homo sapiens
MALRGTLRPLKVRRRREMLPQQVGFVCAVLALVCCASGLFGSLGHKTASASKRVLPDTWRNRKLMAPVNGTQTAKNCTDPAIHEFPTDLFSNKERQHGAVLLHILGALYMFYALAIVCDDFFVPSLEKICERLHLSEDVAGATFMAAGSSTPELFASVIGVFITHGDVGVGTIVGSAVFNILCIIGVCGLFAGQVVRLTWWAVCRDSVYYTISVIVLIVFIYDEQIVWWEGLVLIILYVFYILIMKYNVKMQAFFTVKQKSIANGNPVNSELEAGNDFYDGSYDDPSVPLLGQVKEKPQYGKNPVVMVDEIMSSSPPKFTFPEAGLRIMITNKFGPRTRLRMASRIIINERQRLINSANGVSSKPLQNGRHENIENGNVPVENPEDPQQNQEQQPPPQPPPPEPEPVEADFLSPFSVPEARGDKVKWVFTWPLIFLLCVTIPNCSKPRWEKFFMVTFITATLWIAVFSYIMVWLVTIIGYTLGIPDVIMGITFLAAGTSVPDCMASLIVARQGLGDMAVSNTIGSNVFDILVGLGVPWGLQTMVVNYGSTVKINSRGLVYSVVLLLGSVALTVLGIHLNKWRLDRKLGVYVLVLYAIFLCFSIMIEFNVFTFVNLPMCREDD

SEQ ID NO: 25886 - protein, 558 aa, Homo sapiens
MAPVNGTQTAKNCTDPAIHEFPTDLFSNKERQHGAVLLHILGALYMFYALAIVCDDFFVPSLEKICERLHLSEDVAGATFMAAGSSTPELFASVIGVFITHGDVGVGTIVGSAVFNILCIIGVCGLFAGQVVRLTWWAVCRDSVYYTISVIVLIVFIYDEQIVWWEGLVLIILYVFYILIMKYNVKMQAFFTVKQKSIANGNPVNSELEAGNDFYDGSYDDPSVPLLGQVKEKPQYGKNPVVMVDEIMSSSPPKFTFPEAGLRIMITNKFGPRTRLRMASRIIINERQRLINSANGVSSKPLQNGRHENIENGNVPVENPEDPQQNQEQQPPPQPPPPEPEPVEADFLSPFSVPEARGDKVKWVFTWPLIFLLCVTIPNCSKPRWEKFFMVTFITATLWIAVFSYIMVWLVTIIGYTLGIPDVIMGITFLAAGTSVPDCMASLIVARQGLGDMAVSNTIGSNVFDILVGLGVPWGLQTMVVNYGSTVKINSRGLVYSVVLLLGSVALTVLGIHLNKWRLDRKLGVYVLVLYAIFLCFSIMIEFNVFTFVNLPMCREDD

SEQ ID NO: 25887 - protein, 603 aa, Homo sapiens
MALRGTLRPLKVRRRREMLPQQVGFVCAVLALVCCASGLFGSLGHKTASASKRVLPDTWRNRKLMAPVNGTQTAKNCTDPAIHEFPTDLFSNKERQHGAVLLHILGALYMFYALAIVCDDFFVPSLEKICERLHLSEDVAGATFMAAGSSTPELFASVIGVFITHGDVGVGTIVGSAVFNILCIIGVCGLFAGQVVRLTWWAVCRDSVYYTISVIVLIVFIYDEQIVWWEGLVLIILYVFYILIMKYNVKMQAFFTVKQKSIANGNPVNSELEAVKEKPQYGKNPVVMVDEIMSSSPPKFTFPEAGLRIMITNKFGPRTRLRMASRIIINERQRLINSANGVSSKPLQNGRHENIENGNVPVENPEDPQQNQEQQPPPQPPPPEPEPVEADFLSPFSVPEARGDKVKWVFTWPLIFLLCVTIPNCSKPRWEKFFMVTFITATLWIAVFSYIMVWLVTIIGYTLGIPDVIMGITFLAAGTSVPDCMASLIVARQGLGDMAVSNTIGSNVFDILVGLGVPWGLQTMVVNYGSTVKINSRGLVYSVVLLLGSVALTVLGIHLNKWRLDRKLGVYVLVLYAIFLCFSIMIEFNVFTFVNLPMCREDD

SEQ ID NO: 25888 - protein, 474 aa, Homo sapiens
MFYALAIVCDDFFVPSLEKICERLHLSEDVAGATFMAAGSSTPELFASVIGVFITHGDVGVGTISVIVLIVFIYDEQIVWWEGLVLIILYVFYILIMKYNVKMQAFFTVKQKSIANGNPVNSELEAGNDFYDGSYDDPSVPLLGQVKEKPQYGKNPVVMVDEIMSSSPPKFTFPEAGLRIMITNKFGPRTRLRMASRIIINERQRLINSANGVSSKPLQNGRHENIENGNVPVENPEDPQQNQEQQPPPQPPPPEPEPVEADFLSPFSVPEARGDKVKWVFTWPLIFLLCVTIPNCSKPRWEKFFMVTFITATLWIAVFSYIMVWLVTIIGYTLGIPDVIMGITFLAAGTSVPDCMASLIVARQGLGDMAVSNTIGSNVFDILVGLGVPWGLQTMVVNYGSTVKINSRGLVYSVVLLLGSVALTVLGIHLNKWRLDRKLGVYVLVLYAIFLCFSIMIEFNVFTFVNLPMCREDD

SEQ ID NO: 25889 - protein, 99 aa, Homo sapiens
MVLRRLLAALLHSPQLVERLSESRPIRRAAQLTAFALLQAQLRGQDAARRLQDLAAGPVGSLCRRAERFRDAFTQELRRGLRGRSGPPPGSQRGPGANI

SEQ ID NO: 25890 - protein, 1441 aa, Homo sapiens
MSGLGDSSSDPANPDSHKRKGSPCDTLASSTEKRRREQENKYLEELAELLSANISDIDSLSVKPDKCKILKKTVDQIQLMKRMEQEKSTTDDDVQKSDISSSSQGVIEKESLGPLLLEALDGFFFVVNCEGRIVFVSENVTSYLGYNQEELMNTSVYSILHVGDHAEFVKNLLPKSLVNGVPWPQEATRRNSHTFNCRMLIHPPDEPGTENQEACQRYEVMQCFTVSQPKSIQEDGEDFQSCLICIARRLPRPPAITGVESFMTKQDTTGKIISIDTSSLRAAGRTGWEDLVRKCIYAFFQPQGREPSYARQLFQEVMTRGTASSPSYRFILNDGTMLSAHTKCKLCYPQSPDMQPFIMGIHIIDREHSGLSPQDDTNSGMSIPRVNPSVNPSISPAHGVARSSTLPPSNSNMVSTRINRQQSSDLHSSSHSNSSNSQGSFGCSPGSQIVANVALNQGQASSQSSNPSLNLNNSPMEGTGISLAQFMSPRRQVTSGLATRPRMPNNSFPPNISTLSSPVGMTSSACNNNNRSYSNIPVTSLQGMNEGPNNSVGFSASSPVLRQMSSQNSPSRLNIQPAKAESKDNKEIASILNEMIQSDNSSSDGKPLDSGLLHNNDRLSDGDSKYSQTSHKLVQLLTTTAEQQLRHADIDTSCKDVLSCTGTSNSASANSSGGSCPSSHSSLTERHKILHRLLQEGSPSDITTLSVEPDKKDSASTSVSVTGQVQGNSSIKLELDASKKKESKDHQLLRYLLDKDEKDLRSTPNLSLDDVKVKVEKKEQMDPCNTNPTPMTKPTPEEIKLEAQSQFTADLDQFDQLLPTLEKAAQLPGLCETDRMDGAVTSVTIKSEILPASLQSATARPTSRLNRLPELELEAIDNQFGQPGTGDQIPWTNNTVTAINQSKSEDQCISSQLDELLCPPTTVEGRNDEKALLEQLVSFLSGKDETELAELDRALGIDKLVQGGGLDVLSERFPPQQATPPLIMEERPNLYSQPYSSPSPTANLPSPFQGMVRQKPSLGTMPVQVTPPRGAFSPGMGMQPRQTLNRPPAAPNQLRLQLQQRLQGQQQLIHQNRQAILNQFAATAPVGINMRSGMQQQITPQPPLNAQMLAQRQRELYSQQHRQRQLIQQQRAMLMRQQSFGNNLPPSSGLPVQMGNPRLPQGAPQQFPYPPNYGTNPGTPPASTSPFSQLAANPEASLANRNSMVSRGMTGNIGGQFGTGINPQMQQNVFQYPGAGMVPQGEANFAPSLSPGSSMVPMPIPPPQSSLLQQTPPASGYQSPDMKAWQQGAIGNNNVFSQAVQNQPTPAQPGVYNNMSITVSMAGGNTNVQNMNPMMAQMQMSSLQMPGMNTVCPEQINDPALRHTGLYCNQLSSTDLLKTEADGTQQVQQVQVFADVQCTVNLVGGDPYLNQPGPLGTQKPTSGPQTPQAQQKSLLQQLLTE

SEQ ID NO: 25891 - protein, 1399 aa, Homo sapiens
MSGLGDSSSDPANPDSHKRKGSPCDTLASSTEKRRREQENKYLEELAELLSANISDIDSLSVKPDKCKILKKTVDQIQLMKRMEQEKSTTDDDVQKSDISSSSQGVIEKESLGPLLLEALDGFFFVVNCEGRIVFVSENVTSYLGYNQEELMNTSVYSILHVGDHAEFVKNLLPKSLVNGVPWPQEATRRNSHTFNCRMLIHPPDEPGTENQEACQRYEVMQCFTVSQPKSIQEDGEDFQSCLICIARRLPRPPAITGVESFMTKQDTTGKIISIDTSSLRAAGRTGWEDLVRKCIYAFFQPQGREPSYARQLFQEVMTRGTASSPSYRFILNDGTMLSAHTKCKLCYPQSPDMQPFIMGIHIIDREHSGLSPQDDTNSGMSIPRVNPSVNPSISPAHGVARSSTLPPSNSNMVSTRINRQQSSDLHSSSHSNSSNSQGSFGCSPGSQIVANVALNQGQASSQSSNPSLNLNNSPMEGTGISLAQFMSPRRQVTSGLATRPRMPNNSFPPNISTLSSPVGMTSSACNNNNRSYSNIPVTSLQGMNEGPNNSVGFSASSPVLRQMSSQNSPSRLNIQPAKAESKDNKEIASILNEMIQSDNSSSDGKPLDSGLLHNNDRLSDGDSKYSQTSHKLVQLLTTTAEQQLRHADIDTSCKDVLSCTGTSNSASANSSGGSCPSSHSSLTERHKILHRLLQEGSPSDITTLSVEPDKKDSASTSVSVTGQVQGNSSIKLELDASKKKESKDHQLLRYLLDKDEKDLRSTPNLSLDDVKVKVEKKEQMDPCNTNPTPMTKPTPEEIKLEAQSQFTADLDQFDQLLPTLEKAAQLPGLCETDRMDGAVTSVTIKSEILPASLQSATARPTSRLNRLPELELEAIDNQFGQPGTGDQIPWTNNTVTAINQSKSEDQCISSQLDELLCPPTTVEGRNDEKALLEQLVSFLSGKDETELAELDRALGIDKLVQGGGLDVLSERFPPQQATPPLIMEERPNLYSQPYSSPSPTANLPSPFQGMVRQKPSLGTMPVQVTPPRGAFSPGMGMQPRQTLNRPPAAPNQLRLQLQQRLQGQQQLIHQNRQAILNQFAATAPVGINMRSGMQQQITPQPPLNAQMLAQRQRELYSQQHRQRQLIQQQRAMLMRQQSFGNNLPPSSGLPVQMGNPRLPQGAPQQFPYPPNYGTNPGTPPASTSPFSQLAANPEASLANRNSMVSRGMTGNIGGQFGTGINPQMQQNVFQYPGAGMVPQGEANFAPSLSPGSSMVPMPIPPPQSSLLQQTPPASGYQSPDMKAWQQGAIGNNNVFSQAVQNQPTPAQPGVYNNMSITVSMAGGNTNVQNMNPMMAQMQMSSLQMPGMNTVCPEQINDPALRHTGLYCNQLSSTDLLKTEADGTQDKKTEEFFSVVTTD

SEQ ID NO: 25892 - protein, 1440 aa, Homo sapiens
MSGLGDSSSDPANPDSHKRKGSPCDTLASSTEKRRREQENKYLEELAELLSANISDIDSLSVKPDKCKILKKTVDQIQLMKRMEQEKSTTDDDVQKSDISSSSQGVIEKESLGPLLLEALDGFFFVVNCEGRIVFVSENVTSYLGYNQEELMNTSVYSILHVGDHAEFVKNLLPKSLVNGVPWPQEATRRNSHTFNCRMLIHPPDEPGTENQEACQRYEVMQCFTVSQPKSIQEDGEDFQSCLICIARRLPRPPAITGVESFMTKQDTTGKIISIDTSSLRAAGRTGWEDLVRKCIYAFFQPQGREPSYARQLFQEVMTRGTASSPSYRFILNDGTMLSAHTKCKLCYPQSPDMQPFIMGIHIIDREHSGLSPQDDTNSGMSIPRVNPSVNPSISPAHGVARSSTLPPSNSNMVSTRINRQQSSDLHSSSHSNSSNSQGSFGCSPGSQIVANVALNQGQASSQSSNPSLNLNNSPMEGTGISLAQFMSPRRQVTSGLATRPRMPNNSFPPNISTLSSPVGMTSSACNNNNRSYSNIPVTSLQGMNEGPNNSVGFSASSPVLRQMSSQNSPSRLNIQPAKAESKDNKEIASILNEMIQSDNSSSDGKPLDSGLLHNNDRLSDGDSKYSQTSHKLVQLLTTTAEQQLRHADIDTSCKDVLSCTGTSNSASANSSGGSCPSSHSSLTERHKILHRLLQEGSPSDITTLSVEPDKKDSASTSVSVTGQVQGNSSIKLELDASKKKESKDHQLLRYLLDKDEKDLRSTPNLSLDDVKVKVEKKEQMDPCNTNPTPMTKPTPEEIKLEAQSQFTADLDQFDQLLPTLEKAAQLPGLCETDRMDGAVTSVTIKSEILPASLQSATARPTSRLNRLPELELEAIDNQFGQPGTGDQIPWTNNTVTAINQSKSEDQCISSQLDELLCPPTTVEGRNDEKALLEQLVSFLSGKDETELAELDRALGIDKLVQGGGLDVLSERFPPQQATPPLIMEERPNLYSQPYSSPSPTANLPSPFQGMVRQKPSLGTMPVQVTPPRGAFSPGMGMQPRQTLNRPPAAPNQLRLQLQQRLQGQQQLIHQNRQAILNQFAATAPVGINMRSGMQQQITPQPPLNAQMLAQRQRELYSQQHRQRQLIQQQRAMLMRQQSFGNNLPPSSGLPVQMGNPRLPQGAPQQFPYPPNYGTNPGTPPASTSPFSQLAANPEASLANRNSMVSRGMTGNIGGQFGTGINPQMQQNVFQYPGAGMVPQGEANFAPSLSPGSSMVPMPIPPPQSSLLQQTPPASGYQSPDMKAWQQGAIGNNNVFSQAVQNQPTPAQPGVYNNMSITVSMAGGNTNVQNMNPMMAQMQMSSLQMPGMNTVCPEQINDPALRHTGLYCNQLSSTDLLKTEADGTQVQQVQVFADVQCTVNLVGGDPYLNQPGPLGTQKPTSGPQTPQAQQKSLLQQLLTE

SEQ ID NO: 25893 - protein, 614 aa, Homo sapiens
MNTFQDQSGSSSNREPLLRCSDARRDLELAIGGVLRAEQQIKDNLREVKAQIHSCISRHLECLRSREVWLYEQVDLIYQLKEETLQQQAQQLYSLLGQFNCLTHQLECTQNKDLANQVSVCLERLGSLTLKPEDSTVLLFEADTITLRQTITTFGSLKTIQIPEHLMAHASSANIGPFLEKRGCISMPEQKSASGIVAVPFSEWLLGSKPASGYQAPYIPSTDPQDWLTQKQTLENSQTSSRACNFFNNVGGNLKGLENWLLKSEKSSYQKCNSHSTTSSFSIEMEKVGDQELPDQDEMDLSDWLVTPQESHKLRKPENGSRETSEKFKLLFQSYNVNDWLVKTDSCTNCQGNQPKGVEIENLGNLKCLNDHLEAKKPLSTPSMVTEDWLVQNHQDPCKVEEVCRANEPCTSFAECVCDENCEKEALYKWLLKKEGKDKNGMPVEPKPEPEKHKDSLNMWLCPRKEVIEQTKAPKAMTPSRIADSFQVIKNSPLSEWLIRPPYKEGSPKEVPGTEDRAGKQKFKSPMNTSWCSFNTADWVLPGKKMGNLSQLSSGEDKWLLRKKAQEVLLNSPLQEEHNFPPDHYGLPAVCDLFACMQLKVDKEKWLYRTPLQM

SEQ ID NO: 25894 - protein, 287 aa, Homo sapiens
MNTFQDQSGSSSNREPLLRCSDARRDLELAIGGVLRAEQQIKDNLREVKAQIHSCISRHLECLRSREVWLYEQVDLIYQLKEETLQQQAQQLYSLLGQFNCLTHQLECTQNKDLANQVSVCLERLGSLTLKPEDSTVLLFEADTITLRQTITTFGSLKTIQIPEHLMAHASSANIGPFLEKRGCISMPEQKSASGIVAVPFSEWLLGSKPASGYQAPYIPSTDPQDWLTQKQTLENSQQEVLLNSPLQEEHNFPPDHYGLPAVCDLFACMQLKVDKEKWLYRTPLQM

SEQ ID NO: 25895 - protein, 630 aa, Homo sapiens
MGAQLTTFALAGAVRRMNTFQDQSGSSSNREPLLRCSDARRDLELAIGGVLRAEQQIKDNLREVKAQIHSCISRHLECLRSREVWLYEQVDLIYQLKEETLQQQAQQLYSLLGQFNCLTHQLECTQNKDLANQVSVCLERLGSLTLKPEDSTVLLFEADTITLRQTITTFGSLKTIQIPEHLMAHASSANIGPFLEKRGCISMPEQKSASGIVAVPFSEWLLGSKPASGYQAPYIPSTDPQDWLTQKQTLENSQTSSRACNFFNNVGGNLKGLENWLLKSEKSSYQKCNSHSTTSSFSIEMEKVGDQELPDQDEMDLSDWLVTPQESHKLRKPENGSRETSEKFKLLFQSYNVNDWLVKTDSCTNCQGNQPKGVEIENLGNLKCLNDHLEAKKPLSTPSMVTEDWLVQNHQDPCKVEEVCRANEPCTSFAECVCDENCEKEALYKWLLKKEGKDKNGMPVEPKPEPEKHKDSLNMWLCPRKEVIEQTKAPKAMTPSRIADSFQVIKNSPLSEWLIRPPYKEGSPKEVPGTEDRAGKQKFKSPMNTSWCSFNTADWVLPGKKMGNLSQLSSGEDKWLLRKKAQEVLLNSPLQEEHNFPPDHYGLPAVCDLFACMQLKVDKEKWLYRTPLQM

SEQ ID NO: 25896 - protein, 650 aa, Homo sapiens
MGAQLTTFALAGAVRRMNTFQDQSGSSSNREPLLRCSDARRDLELAIGGVLRAEQQIKDNLREVKAQIHSCISRHLECLRSREVWLYEQVDLIYQLKEETLQQQAQQLYSLLGQFNCLTHQLECTQNKDLANQVSVCLERLGSLTLKPEDSTVLLFEADTITLRQTITTFGSLKTIQIPEHLMAHASSANIGPFLEKRGCISMPEQKSASGIVAVPFSEWLLGSKPASGYQAPYIPSTDPQDWLTQKQTLENSQTSSRACNFFNNVGGNLKGLENWLLKSEKSSYQKCNSHSTTSSFSIEMEKVGDQELPDQDEMDLSDWLVTPQESHKLRKPENGSRETSEKFKLLFQSYNVNDWLVKTDSCTNCQGNQPKGVEIENLGNLKCLNDHLEAKKPLSTPSMVTEDWLVQNHQDPCKVEEVCRANEPCTSFAECVCDENCEKEALYKWLLKKEGKDKNGMPVEPKPEPEKHKDSLNMWLCPRKEVIEQTKAPKAMTPSRIADSFQVIKNSPLSEWLIRPPYKEGSPKEVPGTEDRAGKQKFKSPMNTSWCSFNTADWVLPGKKMGNLSQLSSGEDKWLLRKKAQEVLLNSPLQEEHNFPPDHYGLPAVCDLFACMQLKVDKEKWLYRTPLQAYFKMNFQDVTVGNFQIPCGF

SEQ ID NO: 25897 - protein, 432 aa, Homo sapiens
MILLRASEVRQLLHNKFVVILGDSVHRAVYKDLVLLLQKDRLLTPGQLRARGELNFEQDELVDGGQRGHMHNGLNYREVREFRSDHHLVRFYFLTRVYSDYLQTILKELQSGEHAPDLVIMNSCLWDISRYGPNSWRSYLENLENLFQCLGQVLPESCLLVWNTAMPVGEEVTGGFLPPKLRRQKATFLKNEVVKANFHSATEARKHNFDVLDLHFHFRHARENLHWDGVHWNGRVHRCLSQLLLAHVADAWGVELPHRHPVGEWIKKKKPGPRVEGPPQANRNHPALPLSPPLPSPTYRPLLGFPPQRLPLLPLLSPQPPPPILHHQGMPRFPQGPPDACFSSDHTFQSDQFYCHSDVPSSAHAGFFVEDNFMVGPQLPMPFFPTPRYQRPAPVVHRGFGRYRPRGPYTPWGQRPRPSKRRAPANPEPRPQ

SEQ ID NO: 25898 - protein, 478 aa, Homo sapiens
MAAGGSGVGGKRSSKSDADSGFLGLRPTSVDPALRRRRRGPRNKKRGWRRLAQEPLGLEVDQFLEDVRLQERTSGGLLSEAPNEKLFFVDTGSKEKGLTKKRTKVQKKSLLLKKPLRVDLILENTSKVPAPKDVLAHQVPNAKKLRRKEQLWEKLAKQGELPREVRRAQARLLNPSATRAKPGPQDTVERPFYDLWASDNPLDRPLVGQDEFFLEQTKKKGVKRPARLHTKPSQAPAVEVAPAGASYNPSFEDHQTLLSAAHEVELQRQKEAEKLERQLALPATEQAATQESTFQELCEGLLEESDGEGEPGQGEGPEAGDAEVCPTPARLATTEKKTEQQRRREKAVHRLRVQQAALRAARLRHQELFRLRGIKAQVALRLAELARRQRRRQARREAEADKPRRLGRLKYQAPDIDVQLSSELTDSLRTLKPEGNILRDRFKSFQRRNMIEPRERAKFKRKYKVKLVEKRAFREIQL

SEQ ID NO: 25899 - protein, 105 aa, Homo sapiens
MSALTRLASFARVGGRLFRSGCARTAGDGGVRHAGGGVHIEPRYRQFPQLTRSQVFQSEFFSGLMWFWILWRFWHDSEEVLGHFPYPDPSQWTDEELGIPPDDED

SEQ ID NO: 25900 - protein, 129 aa, Homo sapiens
MSFPKYKPSSLRTLPETLDPAEYNISPETRRAQAERLAIRAQLKREYLLQYNDPNRRGLIENPALLRWAYARTINVYPNFRPTPKNSLMGALCGFGPLIFIYYIIKTERDRKEKLIQEGKLDRTFHLSY

SEQ ID NO: 25901 - protein, 120 aa, Homo sapiens
MSFPKYKPSSLRTLPETLDPAEYNISPETRRAQAERLAIRAQLKREYLLQYNDPNRRGLIENPALLRWAYARTINVYPNFRPTPKNSLMGALCGFGPLIFIYYIIKTERVSIQTRCLVFE

SEQ ID NO: 25902 - protein, 108 aa, Homo sapiens
MAAPCLLRQGRAGALKTMLQEAQVFRGLASTVSLSAESGKSEKGQPQNSKKQSPPKKPAPVPAEPFDNTTYKNLQHHDYSTYTFLDLNLELSKFRMPQPSSGRESPRH

SEQ ID NO: 25903 - protein, 473 aa, Homo sapiens
MAAPCLLRQGRAGALKTMLQEAQVFRGLASTVSLSAESGKSEKGQPQNSKKQSPPKNVVEPKERGKLLATQTAAELSKNLSSPSSYPPAVNKGRKVASPSPSGSVLFTDEGVPKFLSRKTLVEFPQKVLSPFRKQGSDSEARQVGRKVTSPSSSSSSSSSDSESDDEADVSEVTPRVVSKGRGGLRKPEASHSFENRAPRVTVSAKEKTLLQKPHVDITDPEKPHQPKKKGSPAKPSEGRENARPKTTMPRSQVDEEFLKQSLKEKQLQKTFRLNEIDKESQKPFEVKGPLPVHTKSGLSAPPKGSPAPAVLAEEARAEGQLQASPPGAAEGHLEKPVPEPQRKAAPPLPRKETSGTQGIEGHLKGGQAIVEDQIPPSNLETVPVENNHGFHEKTAALKLEAEGEAMEDAAAPGDDRGGTQEPAPVPAEPFDNTTYKNLQHHDYSTYTFLDLNLELSKFRMPQPSSGRESPRH

SEQ ID NO: 25904 - protein, 407 aa, Homo sapiens
MDNVLPVDSDLSPNISTNTSEPNQFVQPAWQIVLWAAAYTVIVVTSVVGNVVVMWIILAHKRMRTVTNYFLVNLAFAEASMAAFNTVVNFTYAVHNEWYYGLFYCKFHNFFPIAAVFASIYSMTAVAFDRYMAIIHPLQPRLSATATKVVICVIWVLALLLAFPQGYYSTTETMPSRVVCMIEWPEHPNKIYEKVYHICVTVLIYFLPLLVIGYAYTVVGITLWASEIPGDSSDRYHEQVSAKRKVVKMMIVVVCTFAICWLPFHIFFLLPYINPDLYLKKFIQQVYLAIMWLAMSSTMYNPIIYCCLNDRFRLGFKHAFRCCPFISAGDYEGLEMKSTRYLQTQGSVYKVSRLETTISTVVGAHEEEPEDGPKATPSSLDLTSNCSSRSDSKTMTESFSFSSNVLS

SEQ ID NO: 25905 - protein, 311 aa, Homo sapiens
MDNVLPVDSDLSPNISTNTSEPNQFVQPAWQIVLWAAAYTVIVVTSVVGNVVVMWIILAHKRMRTVTNYFLVNLAFAEASMAAFNTVVNFTYAVHNEWYYGLFYCKFHNFFPIAAVFASIYSMTAVAFDRYMAIIHPLQPRLSATATKVVICVIWVLALLLAFPQGYYSTTETMPSRVVCMIEWPEHPNKIYEKVYHICVTVLIYFLPLLVIGYAYTVVGITLWASEIPGDSSDRYHEQVSAKRKVVKMMIVVVCTFAICWLPFHIFFLLPYINPDLYLKKFIQQVYLAIMWLAMSSTMYNPIIYCCLNDR

SEQ ID NO: 25906 - protein, 411 aa, Homo sapiens
MDGRAELPAFPRAGAPPLAASDTVPAAPEGAGAARPAAPLRPTSFSVLDILDPNKFNSRRRRCVLLGPVAPAACAPCASAPCAPAPAASGRPPRAEELERRALAGAGGVGAAGAEPPNAGDPFKAGEAETNDTNGYSSGGGGHSPSADSGDEVPDDEDDDEDEAPETEAARGAEEARGGGGGLGARGSGCQGAAETDASPGATVDEAAAPGPRENSPVAQGPPGGAAAPGGAGTTPQGTATAAKPKRKRTGSDSKSGKPRRARTAFTYEQLVALENKFKATRYLSVCERLNLALSLSLTETQVKIWFQNRRTKWKKQNPGADTSAPTGGGGGPGPGAGPGTGLPGGLSPLSPSPPMGAPLGMHGPAGYPAHGPGGLVCAAQLPFLSSPAVLSPFVLGSQTYGAPAFYAPHL

SEQ ID NO: 25907 - protein, 240 aa, Homo sapiens
MSKQRGTFSEVSLAQDPKWQQRKPKGNKSSISGTEQEIFQVELNLQNASLNHQGIDKIYDCQGLLPPPEKLTAEVLGIICIVLMATVLKTIVLIPFLEQNNSSPNARTQKARHCGHCPEEWITYSNSCYYIGKERRTWEESLQACASKNSSSLLCIDNEEEMKFLASILPSSWIGVFRNSSHHPWVTINGLAFKHEIKDSDHAERNCAMLHVRGLISDQCGSSRIIRRGFIMLTRLVLNS

SEQ ID NO: 25908 - protein, 257 aa, Homo sapiens
MSKQRGTFSEVSLAQDPKWQQRKPKGNKSSISGTEQEIFQVELNLQNASLNHQGIDKIYDCQGLLPPPEKLTAEVLGIICIVLMATVLKTIVLIPFLEQNNSSPNARTQKARHCGHCPEEWITYSNSCYYIGKERRTWEESLQACASKNSSSLLCIDNEEEMKFLASILPSSWIGVFRNSSHHPWVTINGLAFKHEIKDSDHAERNCAMLHVRGLISDQCGSSRIIVSISFRIKALELAVHQIKFYICSNRNDIMIA

SEQ ID NO: 25909 - protein, 175 aa, Homo sapiens
MGALVIRGIRNFNLENRAEREISKMKPSVAPRHPSTNSLLREQISLYPEVKGEIARKDEKLLSFLKDVYVDSKDPVSSLQVKAAETCQEPKEFRLPKDHHFDMINIKSIPKGKISIVEALTLLNNHKLFPETWTAEKIMQEYQLEQKDVNSLLKYFVTFEVEIFPPEDKKAIRSK

SEQ ID NO: 25910 - protein, 345 aa, Homo sapiens
MLRPAGLWRLCRRPWAARVPAENLGRREVTSGVSPRGSTSPRTLNIFDRDLKRKQKNWAARQPEPTKFDYLKEEVGSRIADRVYDIPRNFPLALDLGCGRGYIAQYLNKETIGKFFQADIAENALKNSSETEIPTVSVLADEEFLPFKENTFDLVVSSLSLHWVNDLPRALEQIHYILKPDGVFIGAMFGGDTLYELRCSLQLAETEREGGFSPHISPFTAVNDLGHLLGRAGFNTLTVDTDEIQVNYPGMFELMEDLQGMGESNCAWNRKALLHRDTMLAAAAVYREMYRNEDGSVPATYQIYYMIGWKYHESQARPAERGSATVSFGELGKINNLMPPGKKSQ

SEQ ID NO: 25911 - protein, 317 aa, Homo sapiens
MLRPAGLWRLCRRPWAARVPAENLGRREVTSGVSPRGSTSPRTLNIFDRDLKRKQKNWAARQPEPTKFDYLKEEVGSRIADRVYDIPRNFPLALDLGCGRGYIAQYLNKLQLFHCRKLLESFSKLTLQKMLCLHWVNDLPRALEQIHYILKPDGVFIGAMFGGDTLYELRCSLQLAETEREGGFSPHISPFTAVNDLGHLLGRAGFNTLTVDTDEIQVNYPGMFELMEDLQGMGESNCAWNRKALLHRDTMLAAAAVYREMYRNEDGSVPATYQIYYMIGWKYHESQARPAERGSATVSFGELGKINNLMPPGKKSQ

SEQ ID NO: 25912 - protein, 364 aa, Homo sapiens
MMLPSPVTSTPFSVKDILNLEQQHQHFHGAHLQADLEHHFHSAPCMLAAAEGTQFSDGGEEDEEDEGEKLSYLNSLAAADGHGDSGLCPQGYVHTVLRDSCSEPKEHEEEPEVVRDRSQKSCQLKKSLETAGDCKAAEESERPKPRSRRKPRVLFSQAQVFELERRFKQQRYLSAPEREHLASSLKLTSTQVKIWFQNRRYKCKRQRQDKSLELGAHAPPPPPRRVAVPVLVRDGKPCVTPSAQAYGAPYSVGASAYSYNSFPAYGYGNSAAAAAAAAAAAAAAAAYSSSYGCAYPAGGGGGGGGTSAATTAMQPACSAAGGGPFVNVSNLGGFGSGGSAQPLHQGTAAGAACAQGTLQGIRAW

SEQ ID NO: 25913 - protein, 123 aa, Homo sapiens
MLGLEGPCWVGPGPDGGLAVSEEFGDVRLFGSARQPLGSLGGWTGHTFGCPAGICSNSEGNVIVADEQRRQVTLFPRAGPPICLVSEGLGQPLGVACAPQGQLLVADAKDNSIKVYQGLKELA

SEQ ID NO: 25914 - protein, 185 aa, Homo sapiens
MEVHGKPKASPSCSSPTRDSSGVPVSKELLTAGSDGRGGIWDRLLINSQPKSRKTSTLQTVRIERSPLLDQVQTFLPQMARANEKLRKEMAAAPPGRFNIENIDGPHSKVIQMDVALFEMNQSDSKEVDSSEESSQDSSENSSESEDEDDSIPSEVTIDNIKLPNSEGGKGKIEVLDSPASKKKK

SEQ ID NO: 25915 - protein, 1299 aa, Homo sapiens [sequence omitted]

SEQ ID NO: 25916 - protein, 1324 aa, Homo sapiens
MHVFVQSTCGEETMDSLDHMLTDPLELGPCGDGHGTRIMEDCLLGGTRVSLPEDLLEDPEIFFDVVSLSTWQEVLSDSQREHLQQFLPQFPEDSAEQQNELILALFSGENFRFGNPLHIAQKLFRDGHFNPEVVKYRQLCFKSQYKRYLNSQQQYFHRLLKQILASRSDLLEMARRSGPALPFRQKRPSPSRTPEEREWRTQQRYLKVLREVKEECGDTALSSDEEATLDLQEQFSFEDLSSWLPSSPARSPSPAVPLRVVPTLSTTDMKTADKVELGDSDLKIMLKKHHEKRKHQPDHPDLLTGDLTLNDIMTRVNAGRKGSLAALYDLAVLKKKVKEKEEKKKKKIKTIKSEAEDLAEPLSSTEGVAPLSQAPSPLAIPAIKEEPLEDLKPCLGINEISSSFFSLLLEILLLESQASLPMLEERVLDWQSSPASSLNSWFSAAPNWAELVLPALQYLAGESRAVPSSFSPFVEFKEKTQQWKLLGQSQDNEKELAALFQLWLETKDQAFCKQENEDSSDATTPVPRVRTDYVVRPSTGEEKRVFQEQERYRYSQPHKAFTFRMHGFESVVGPVKGVFDKETSLNKAREHSLLRSDRPAYVTILSLVRDAAARLPNGEGTRAEICELLKDSQFLAPDVTSTQVNTVVSGALDRLHYEKDPCVKYDIGRKLWIYLHRDRSEEEFERIHQAQAAAAKARKALQQKPKPPSKVKSSSKESSIKVLSSGPSEQSQMSLSDSSMPPTPVTPVTPTTPALPAIPISPPPVSAVNKSGPSTVSEPAKSSSGVLLVSSPTMPHLGTMLSPASSQTAPSSQAAARVVSHSGSAGLSQVRVVAQPSLPAVPQQSGGPAQTLPQMPAGPQIRVPATATQTKVVPQTVMATVPVKAQTTAATVQRPGPGQTGLTVTSLPATASPVSKPATSSPGTSAPSASTAAVIQNVTGQNIIKQVAITGQLGVKPQTGNSIPLTATNFRIQGKDVLRLPPSSITTDAKGQTVLRITPDMMATLAKSQVTTVKLTQDLFGTGGNTTGKGISATLHVTSNPVHAADSPAKASSASAPSSTPTGTTVVKVTPDLKPTEASSSAFRLMPALGVSVADQKGKSTVASSEAKPAATIRIVQGLGVMPPKAGQTITVATHAKQGASVASGSGTVHTSAVSLPSMNAAVSKTVAVASGAASTPISISTGAPTVRQVPVSTTVVSTSQAGKLPTRITVPLSVISQPMKGKSVVTAPIIKGNLGANLSGLGRNIILTTMPAGTKLIAGNKPVSFLTAQQLQQLQQQGQATQVRIQTVPASHLQQGTASGSSKAVSTVVVTTAPSPKQAPEQQ

SEQ ID NO: 25917 - protein, 1298 aa, Homo sapiens
MDSLDHMLTDPLELGPCGDGHGTRIMEDCLLGGTRVSLPEDLLEDPEIFFDVVSLSTWQEVLSDSQREHLQQFLPQFPEDSAEQQNELILALFSGENFRFGNPLHIAQKLFRDGHFNPEVVKYRQLCFKSQYKRYLNSQQQYFHRLLKQILASRSDLLEMARRSGPALPFRQKRPSPSRTPEEREWRTQQRYLKVLREVKEECGDTALSSDEEDLSSWLPSSPARSPSPAVPLRVVPTLSTTDMKTADKVELGDSDLKIMLKKHHEKRKHQPDHPDLLTGDLTLNDIMTRVNAGRKGSLAALYDLAVLKKKVKEKEEKKKKKIKTIKSEAEDLAEPLSSTEGVAPLSQAPSPLAIPAIKEEPLEDLKPCLGINEISSSFFSLLLEILLLESQASLPMLEERVLDWQSSPASSLNSWFSAAPNWAELVLPALQYLAGESRAVPSSFSPFVEFKEKTQQWKLLGQSQDNEKELAALFQLWLETKDQAFCKQENEDSSDATTPVPRVRTDYVVRPSTGEEKRVFQEQERYRYSQPHKAFTFRMHGFESVVGPVKGVFDKETSLNKAREHSLLRSDRPAYVTILSLVRDAAARLPNGEGTRAEICELLKDSQFLAPDVTSTQVNTVVSGALDRLHYEKDPCVKYDIGRKLWIYLHRDRSEEEFERIHQAQAAAAKARKALQQKPKPPSKVSSSKESSIKVLSSGPSEQSQMSLSDSSMPPTPVTPVTPTTPALPAIPISPPPVSAVNKSGPSTVSEPAKSSSGVLLVSSPTMPHLGTMLSPASSQTAPSSQAAARVVSHSGSAGLSQVRVVAQPSLPAVPQQSGGPAQTLPQMPAGPQIRVPATATQTKVVPQTVMATVPVKAQTTAATVQRPGPGQTGLTVTSLPATASPVSKPATSSPGTSAPSASTAAVIQNVTGQNIIKQVAITGQLGVKPQTGNSIPLTATNFRIQGKDVLRLPPSSITTDAKGQTVLRITPDMMATLAKSQVTTVKLTQDLFGTGGNTTGKGISATLHVTSNPVHAADSPAKASSASAPSSTPTGTTVVKVTPDLKPTEASSSAFRLMPALGVSVADQKGKSTVASSEAKPAATIRIVQGLGVMPPKAGQTITVATHAKQGASVASGSGTVHTSAVSLPSMNAAVSKTVAVASGAASTPISISTGAPTVRQVPVSTTVVSTSQAGKLPTRITVPLSVISQPMKGKSVVTAPIIKGNLGANLSGLGRNIILTTMPAGTKLIAGNKPVSFLTAQQLQQLQQQGQATQVRIQTVPASHLQQGTASGSSKAVSTVVVTTAPSPKQAPEQQ

SEQ ID NO: 25918 - protein, 916 aa, Homo sapiens
MSYTLDSLGNPSAYRRVTETRSSFSRVSGSPSSGFRSQSWSRGSPSTVSSSYKRSMLAPRLAYSSAMLSSAESSLDFSQSSSLLNGGSGPGGDYKLSRSNEKEQLQGLNDRFAGYIEKVHYLEQQNKEIEAEIQALRQKQASHAQLGDAYDQEIRELRATLEMVNHEKAQVQLDSDHLEEDIHRLKERFEEEARLRDDTEAAIRALRKDIEEASLVKVELDKKVQSLQDEVAFLRSNHEEEVADLLAQIQASHITVERKDYLKTDISTALKEIRSQLESHSDQNMHQAEEWFKCRYAKLTEAAEQNKEAIRSAKEEIAEYRRQLQSKSIELESVRGTKESLERQLSDIEERHNHDLSSYQDTIQQLENELRGTKWEMARHLREYQDLLNVKMALDIEIAAYRKLLEGEETRFSTFAGSITGPLYTHRPPITISSKIQKPKVEAPKLKVQHKFVEEIIEETKVEDEKSEMEEALTAITEELAVSMKEEKKEAAEEKEEEPEAEEEEVAAKKSPVKATAPEVKEEEGEKEEEEGQEEEEEEDEGAKSDQAEEGGSEKEGSSEKEEGEQEEGETEAEAEGEEAEAKEEKKVEEKSEEVATKEELVADAKVEKPEKAKSPVPKSPVEEKGKSPVPKSPVEEKGKSPVPKSPVEEKGKSPVPKSPVEEKGKSPVSKSPVEEKAKSPVPKSPVEEAKSKAEVGKGEQKEEEEKEVKEAPKEEKVEKKEEKPKDVPEKKKAESPVKEEAVAEVVTITKSVKVHLEKETKEEGKPLQQEKEKEKAGGEGGSEEEGSDKGAKGSRKEDIAVNGEVEGKEEVEQETKEKGSGREEEKGVVTNGLDLSPADEKKGGDKSEEKVVVTKTVEKITSEGGDGATKYITKSVTVTQKVEEHEETFEEKLVSTKKVEKVTSHAIVKEVTQSD

SEQ ID NO: 25919 - protein, 540 aa, Homo sapiens
MARHLREYQDLLNVKMALDIEIAAYRKLLEGEETRFSTFAGSITGPLYTHRPPITISSKIQKPKVEAPKLKVQHKFVEEIIEETKVEDEKSEMEEALTAITEELAVSMKEEKKEAAEEKEEEPEAEEEEVAAKKSPVKATAPEVKEEEGEKEEEEGQEEEEEEDEGAKSDQAEEGGSEKEGSSEKEEGEQEEGETEAEAEGEEAEAKEEKKVEEKSEEVATKEELVADAKVEKPEKAKSPVPKSPVEEKGKSPVPKSPVEEKGKSPVPKSPVEEKGKSPVPKSPVEEKGKSPVSKSPVEEKAKSPVPKSPVEEAKSKAEVGKGEQKEEEEKEVKEAPKEEKVEKKEEKPKDVPEKKKAESPVKEEAVAEVVTITKSVKVHLEKETKEEGKPLQQEKEKEKAGGEGGSEEEGSDKGAKGSRKEDIAVNGEVEGKEEVEQETKEKGSGREEEKGVVTNGLDLSPADEKKGGDKSEEKVVVTKTVEKITSEGGDGATKYITKSVTVTQKVEEHEETFEEKLVSTKKVEKVTSHAIVKEVTQSD

SEQ ID NO: 25920 - protein, 848 aa, Homo sapiens
MWLRLGPPSLSLSPKPTVGRSLCLTLWFLSLALRASTQAPAPTVNTHFGKLRGARVPLPSEILGPVDQYLGVPYAAPPIGEKRFLPPEPPPSWSGIRNATHFPPVCPQNIHTAVPEVMLPVWFTANLDIVATYIQEPNEDCLYLNVYVPTEDVKRISKECARKPNKKICRKGGSGAKKQGEDLADNDGDEDEDIRDSGAKPVMVYIHGGSYMEGTGNMIDGSILASYGNVIVITLNYRVGVLGFLSTGDQAAKGNYGLLDQIQALRWVSENIAFFGGDPRRITVFGSGIGASCVSLLTLSHHSEGLFQRAIIQSGSALSSWAVNYQPVKYTSLLADKVGCNVLDTVDMVDCLRQKSAKELVEQDIQPARYHVAFGPVIDGDVIPDDPEILMEQGEFLNYDIMLGVNQGEGLKFVEGVVDPEDGVSGTDFDYSVSNFVDNLYGYPEGKDTLRETIKFMYTDWADRDNPETRRKTLVALFTDHQWVEPSVVTADLHARYGSPTYFYAFYHHCQSLMKPAWSDAAHGDEVPYVFGVPMVGPTDLFPCNFSKNDVMLSAVVMTYWTNFAKTGDPNKPVPQDTKFIHTKANRFEEVAWSKYNPRDQLYLHIGLKPRVRDHYRATKVAFWKHLVPHLYNLHDMFHYTSTTTKVPPPDTTHSSHITRRPNGKTWSTKRPAISPAYSNENAQGSWNGDQDAGPLLVENPRDYSTELSVTIAVGASLLFLNVLAFAALYYRKDKRRQEPLRQPSPQRGAGAPELGAAPEEELAALQLGPTHHECEAGPPHDTLRLTALPDYTLTLRRSPDDIPLMTPNTITMIPNSLVGLQTLHPYNTFAAGFNSTGLPHSHSTTRV

SEQ ID NO: 25921 - protein, 828 aa, Homo sapiens
MWLRLGPPSLSLSPKPTVGRSLCLTLWFLSLALRASTQAPAPTVNTHFGKLRGARVPLPSEILGPVDQYLGVPYAAPPIGEKRFLPPEPPPSWSGIRNATHFPPVCPQNIHTAVPEVMLPVWFTANLDIVATYIQEPNEDCLYLNVYVPTEDGSGAKKQGEDLADNDGDEDEDIRDSGAKPVMVYIHGGSYMEGTGNMIDGSILASYGNVIVITLNYRVGVLGFLSTGDQAAKGNYGLLDQIQALRWVSENIAFFGGDPRRITVFGSGIGASCVSLLTLSHHSEGLFQRAIIQSGSALSSWAVNYQPVKYTSLLADKVGCNVLDTVDMVDCLRQKSAKELVEQDIQPARYHVAFGPVIDGDVIPDDPEILMEQGEFLNYDIMLGVNQGEGLKFVEGVVDPEDGVSGTDFDYSVSNFVDNLYGYPEGKDTLRETIKFMYTDWADRDNPETRRKTLVALFTDHQWVEPSVVTADLHARYGSPTYFYAFYHHCQSLMKPAWSDAAHGDEVPYVFGVPMVGPTDLFPCNFSKNDVMLSAVVMTYWTNFAKTGDPNKPVPQDTKFIHTKANRFEEVAWSKYNPRDQLYLHIGLKPRVRDHYRATKVAFWKHLVPHLYNLHDMFHYTSTTTKVPPPDTTHSSHITRRPNGKTWSTKRPAISPAYSNENAQGSWNGDQDAGPLLVENPRDYSTELSVTIAVGASLLFLNVLAFAALYYRKDKRRQEPLRQPSPQRGAGAPELGAAPEEELAALQLGPTHHECEAGPPHDTLRLTALPDYTLTLRRSPDDIPLMTPNTITMIPNSLVGLQTLHPYNTFAAGFNSTGLPHSHSTTRV

SEQ ID NO: 25922 - protein, 808 aa, Homo sapiens
MWLRLGPPSLSLSPKPTVGRSLCLTLWFLSLALRASTQAPAPTVNTHFGKLRGARVPLPSEILGPVDQYLGVPYAAPPIGEKRFLPPEPPPSWSGIRNATHFPPVCPQNIHTAVPEVMLPVWFTANLDIVATYIQEPNEDCLYLNVYVPTEDDIRDSGAKPVMVYIHGGSYMEGTGNMIDGSILASYGNVIVITLNYRVGVLGFLSTGDQAAKGNYGLLDQIQALRWVSENIAFFGGDPRRITVFGSGIGASCVSLLTLSHHSEGLFQRAIIQSGSALSSWAVNYQPVKYTSLLADKVGCNVLDTVDMVDCLRQKSAKELVEQDIQPARYHVAFGPVIDGDVIPDDPEILMEQGEFLNYDIMLGVNQGEGLKFVEGVVDPEDGVSGTDFDYSVSNFVDNLYGYPEGKDTLRETIKFMYTDWADRDNPETRRKTLVALFTDHQWVEPSVVTADLHARYGSPTYFYAFYHHCQSLMKPAWSDAAHGDEVPYVFGVPMVGPTDLFPCNFSKNDVMLSAVVMTYWTNFAKTGDPNKPVPQDTKFIHTKANRFEEVAWSKYNPRDQLYLHIGLKPRVRDHYRATKVAFWKHLVPHLYNLHDMFHYTSTTTKVPPPDTTHSSHITRRPNGKTWSTKRPAISPAYSNENAQGSWNGDQDAGPLLVENPRDYSTELSVTIAVGASLLFLNVLAFAALYYRKDKRRQEPLRQPSPQRGAGAPELGAAPEEELAALQLGPTHHECEAGPPHDTLRLTALPDYTLTLRRSPDDIPLMTPNTITMIPNSLVGLQTLHPYNTFAAGFNSTGLPHSHSTTRV

SEQ ID NO: 25923 - protein, 257 aa, Homo sapiens
MVQLRPRASRAPASAEAMVDEGQLASEEEEAEHGLLLGQPSSGAAAEPLEEDEEGDDEFDDEAPEELTFASAQAEAREEERRVRETVRRDKTLLKEKRKRREELFIEQKKRKLLPDTILEKLTTASQTNIKKSPGKVKEVNLQKKNEDCEKGNDSKKVKVQKVQSVSQNKSYLAVRLKDQDLRDSRQQAAQAFIHNSLYGPGTNRTTVNKFLSLANKRLPVKRAAVQFLNNAWGIQKKQNAKRFKRRWMVRKMKTKK

SEQ ID NO: 25924 - protein, 145 aa, Homo sapiens
MVQLRPRASRAPASAEAMVDEGQLASEEEEAEHGLLLGQPSSGAAAEPLEEDEEGDDEFDDEAPEELTFASAQAEAREEERRVRETVRRDKTLLKEKRKRREELFIEQKKRKLLPDTILEKLTTASQTNIKKSPGKVKEGMTILI

SEQ ID NO: 25925 - protein, 186 aa, Homo sapiens
MASILRSPQALQLTLALIKPDAVAHPLILEAVHQQILSNKFLIVRMRELLWRKEDCQRFYREHEGRFFYQRLVEFMASGPIRAYILAHKDAIQLWRTLMGPTRVFRARHVAPDSIRGSFGLTDTRNTTHGSDSVVSASREIAAFFPDFSEQRWYEEEEPQLRCGPVCYSPEGGVHYVAGTGGLGPA

SEQ ID NO: 25926 - protein, 119 aa, Homo sapiens
MASILRSPQALQLTLALIKPDAVAHPLILEAVHQQILSNKFLIVRMRELLWRKEDCQRFYREHEDSVVSASREIAAFFPDFSEQRWYEEEEPQLRCGPVCYSPEGGVHYVAGTGGLGPA

SEQ ID NO: 25927 - protein, 163 aa, Homo sapiens
MASILRSPQALQLTLALIKPDAVAHPLILEAVHQQILSNKFLIVRMRELLWRKEDCQRFYREHEAGQSEPTSLPTRMPSSSGGRSWDPPECSEHAMWPQILSVGVSASLTPATPPMVRTLWFQPAERLQPSSLTSVNSAGMRRKSPSCAVALCAIAQREVSTM

SEQ ID NO: 25928 - protein, 708 aa, Homo sapiens
MDKYDVIKAIGQGAFGKAYLAKGKSDSKHCVIKEINFEKMPIQEKEASKKEVILLEKMKHPNIVAFFNSFQENGRLFIVMEYCDGGDLMKRINRQRGVLFSEDQILGWFVQISLGLKHIHDRKILHRDIKAQNIFLSKNGMVAKLGDFGIARVLNNSMELARTCIGTPYYLSPEICQNKPYNNKTDIWSLGCVLYELCTLKHPFEGNNLQQLVLKICQAHFAPISPGFSRELHSLISQLFQVSPRDRPSINSILKRPFLENLIPKYLTPEVIQEEFSHMLICRAGAPASRHAGKVVQKCKIQKVRFQGKCPPRSRISVPIKRNAILHRNEWRPPAGAQKARSIKMIERPKIAAVCGHYDYYYAQLDMLRRRAHKPSYHPIPQENTGVEDYGQETRHGPSPSQWPAEYLQRKFEAQQYKLKVEKQLGLRPSSAEPNYNQRQELRSNGEEPRFQELPFRKNEMKEQEYWKQLEEIRQQYHNDMKEIRKKMGREPEENSKISHKTYLVKKSNLPVHQDASEGEAPVQMEFRSCCPGWSAMARSWLTATSASQDIEKDLKQMRLQNTKESKNPEQKYKAKKGVKFEINLDKCISDENILQEEEAMDIPNETLTFEDGMKFKEYECVKEHGDYTDKAFEKLHCPEAGFSTQTVAAVGNRRQWDGGAPQTLLQMMAVADITSTCPTGPDSESVLSVSRQEGKTKDPYSPVLILM

SEQ ID NO: 25929 - protein, 458 aa, Homo sapiens
MSTEGGFGGTSSSDAQQSLQSFWPRVMEEIRNLTVKDFRVQELPLARIKKIMKLDEDVKMISAEAPVLFAKAAQIFITELTLRAWIHTEDNKRRTLQRNDIAMAITKFDQFDFLIDIVPRDELKPPKRQEEVRQSVTPAEPVQYYFTLAQQPTAVQVQGQQQGQQTTSSTTTIQPGQIIIAQPQQGQTTPVTMQVGEGQQVQIVQAQPQGQAQQAQSGTGQTMQVMQQIITNTGEIQQIPVQLNAGQLQYIRLAQPVSGTQVVQGQIQTLATNAQQGQRNASQGKPRRCLKETLQITQTEVQQGQQQFSQFTDGQRNSVQQARVSELTGEAEPREVKATGNSTPCTSSLPTTHPPSHRAGASCVCCSQPQQSSTSPPPSDALQWVVVEVSGTPNQLETHRELHAPLPGMTSLSPLHPSQQLYQIQQVTMPAGQDLAQPMFIQSANQPSDGQAPQVTGD

SEQ ID NO: 25930 - protein, 335 aa, Homo sapiens
MSTEGGFGGTSSSDAQQSLQSFWPRVMEEIRNLTVKDFRVQELPLARIKKIMKLDEDVKMISAEAPVLFAKAAQIFITELTLRAWIHTEDNKRRTLQRNDIAMAITKFDQFDFLIDIVPRDELKPPKRQEEVRQSVTPAEPVQYYFTLAQQPTAVQVQGQQQGQQTTSSTTTIQPGQIIIAQPQQGQTTPVTMQVGEGQQVQIVQAQPQGQAQQAQSGTGQTMQVMQQIITNTGEIQQIPVQLNAGQLQYIRLAQPVSGTQVVQGQIQTLATNAQQITQTEVQQGQQQFSQFTDGQQLYQIQQVTMPAGQDLAQPMFIQSANQPSDGQAPQVTGD

SEQ ID NO: 25931 - protein, 439 aa, Homo sapiens
MSTEGGFGGTSSSDAQQSLQSFWPRVMEEIRNLTVKDFRVQELPLARIKKIMKLDEDVKMISAEAPVLFAKAAQIFITELTLRAWIHTEDNKRRTLQRNDIAMAITKFDQFDFLIDIVPRDELKPPKRQEEVRQSVTPAEPVQYYFTLAQQPTAVQVQGQQQGQQTTSSTTTIQPGQIIIAQPQQGQTTPVTMQVGEGQQVQIVQAQPQGQAQQAQSGTGQTMQVMQQIITNTGEIQQIPVQLNAGQLQYIRLAQPVSGTQVVQGQIQTLATNAQQITQTEVQQGQQQFSQFTDGQRNSVQQARVSELTGEAEPREVKATGNSTPCTSSLPTTHPPSHRAGASCVCCSQPQQSSTSPPPSDALQWVVVEVSGTPNQLETHRELHAPLPGMTSLSPLHPSQQLYQIQQVTMPAGQDLAQPMFIQSANQPSDGQAPQVTGD

SEQ ID NO: 25932 - protein, 297 aa, Homo sapiens
MSTEGGFGGTSSSDAQQSLQSFWPRVMEEIRNLTVKDFRVQELPLARIKKIMKLDEDVKRNDIAMAITKFDQFDFLIDIVPRDELKPPKRQEEVRQSVTPAEPVQYYFTLAQQPTAVQVQGQQQGQQTTSSTTTIQPGQIIIAQPQQGQTTPVTMQVGEGQQVQIVQAQPQGQAQQAQSGTGQTMQVMQQIITNTGEIQQIPVQLNAGQLQYIRLAQPVSGTQVVQGQIQTLATNAQQITQTEVQQGQQQFSQFTDGQQLYQIQQVTMPAGQDLAQPMFIQSANQPSDGQAPQVTGD

SEQ ID NO: 25933 - protein, 354 aa, Homo sapiens
MSTEGGFGGTSSSDAQQSLQSFWPRVMEEIRNLTVKDFRVQELPLARIKKIMKLDEDVKMISAEAPVLFAKAAQIFITELTLRAWIHTEDNKRRTLQRNDIAMAITKFDQFDFLIDIVPRDELKPPKRQEEVRQSVTPAEPVQYYFTLAQQPTAVQVQGQQQGQQTTSSTTTIQPGQIIIAQPQQGQTTPVTMQVGEGQQVQIVQAQPQGQAQQAQSGTGQTMQVMQQIITNTGEIQQIPVQLNAGQLQYIRLAQPVSGTQVVQGQIQTLATNAQQGQRNASQGKPRRCLKETLQITQTEVQQGQQQFSQFTDGQQLYQIQQVTMPAGQDLAQPMFIQSANQPSDGQAPQVTGD

SEQ ID NO: 25934 - protein, 301 aa, Homo sapiens
MSTEGGFGGTSSSDAQQSLQSFWPRVMEEIRNLTVKDFRVQELPLARIKKIMKLDEDVKMISAEAPVLFAKAAQIFITELTLRAWIHTEDNKRRTLQRNDIAMAITKFDQFDFLIDIVPRDELKPPKRQEEVRQSVTPAEPVQYYFTLAQQPTAVQVQGQQQGQQTTSSTTTIQPGQIIIAQPQQGQTMQVMQQIITNTGEIQQIPVQLNAGQLQYIRLAQPVSGTQVVQGQIQTLATNAQQITQTEVQQGQQQFSQFTDGQQLYQIQQVTMPAGQDLAQPMFIQSANQPSDGQAPQVTGD

SEQ ID NO: 25935 - protein, 334 aa, Homo sapiens
MSTEGGFGGTSSSDAQQSLQSFWPRVMEEIRNLTVKDFRVQELPLARIKKIMKLDEDVKMISAEAPVLFAKAAQIFITELTLRAWIHTEDNKRRTLQRNDIAMAITKFDQFDFLIDIVPRDELKPPKRQEEVRQSVTPAEPVQYYFTLAQQPTAVQVQGQQQGQQTTSSTTTIQPGQIIIAQPQQGQTTPVTMQVGEGQQVQIVQAQPQGQAQQAQSGTGQTMQVMQQIITNTGEIQQIPVQLNAGQLQYIRLAQPVSGTQVVQGQIQTLATNAQQITQTEVQQGQQQFSQFTDGQLYQIQQVTMPAGQDLAQPMFIQSANQPSDGQAPQVTGD

SEQ ID NO: 25936 - protein, 2253 aa, Homo sapiens
MRPGPALLLLGVGLSLSVGRLPLPPVPRGAQAAVSGAPGGLLRGAPGLGVRGGRALLSLRPSAVRAGGAVLSGRGSLCFPHGGTGRRWYCLDLRVLLSAQRLPWPAAPALALVDLQLSARGGRLSLTWSVRLPRSPGRLAWAFRLRLLGPGAARPASPAARVSPRSAAPGPRPQQGFVARTECPTDGPARVMLQAVNSSSHRAVESSVSCQINACVIQRVRINTDQKGAPVRLSMQAEATINASVQLDCPAARAIAQYWQVFSVPAVGQAPDWTQPLDLPQLEIRNSPLFIHIPNNSLQWGVYVFNFTVSITTGNPKMPEVKDSDAVYVWIVRSSLQAVMLGDANITANFTEQLILDGSTSSDPDADSPLQGLQFFWYCTTDPRNYGGDRIILGSKEVCHPEQANLKWPWASGPVLTLLPETLKGDHVYFFRMVIRKDSRTAFSDKRVHVLQGPKAIAHITCIENCERNFIVSDRFSLFLNCTNCASRDFYKWSILSSSGGEMLFDWMGETVTGRNGAYLSIKAFAFRHFLEAEFSISLYLACWSGVTSVFRHSFIINHGPQIGECKINPAKGIALITKFVVQCSNFRDKHVPLTYKIIVSDLHSVGEISSVKENTLGTILYLGPQSTVPPSFLPVGMLASQYGLKIYAQVYDSLGAFSQVTLHATAQAPTDKNSSKTVLNQLLSFTVGPSSLLSTLIQKKDFLPAGYLLYIVASVLNNMKTELPLRDDRVNLRKHLIDQSFLLPVSTLVEIGQVVMTITKLTQKPSEFTWDAQKRATMRVWQANQALQEYQQKDKRFRSEQIEIVSTGILMSLSNILKMTSPHQVVKDPFYVIESLSDTILANKVPGNKTTSMRTPNFNMYVKKVEKWGINQLFRNEKHCRNCFYPTLNVSSVPGLSANGPISTMFCDFTNDLFPWLNDQENTSVEVSGFRMTGVADNGSVLEITPDVAEVYLVRKNLTFAAFNLTVGPNSEVDGSLKKTTGGFSFQVDSTVLREVLVHIVTEVMVLFTVLVYTGSQITPTALVATFLVPHDIPPFASQSALFDPACTVKKARVVCLPVSLLQLIAQHSHSPHCTVSIVLQAPRFVMKLNDKLVRISIFSVQCLDMYGIQSEWREGYCILGEKTSWYEVHCICKNVVRARRQLGTIGLTGIHLHTHYVMAKVIVIPNPVDLRLNIIKSLHQNPVTLFTVLFIILLYVGLAFWALYRDEMDQHLRGHVIVLPDNDPYDNLCYLVTIFTGSRWGSGTRANVFVQLRGTVSTSDVHCLSHPHFTTLYRGSINTFLLTTKSDLGDIHSIRVWHNNEGRSPSWYLSRIKVENLFSRHIWLFICQKWLSVDTTLDRTFHVTHPDERLTRKDFFFIDVSSNLRKNHMWFSIFASVVAKTFNRLQRLSCCLAMLLSSLLCNIMFFNLNRQEQTESRERKYMRSMMIGIESVLITIPVQLLITFLFTCSQRKPQADLKEVSPQKHPLMSEASEHWEEYLRKWHAYETAKVHPREVAKPASKGKPRLPKASPKATSKPKHRHRKAQIKTPETLGPNTNSNNNIEDDQDVHSEQHPSQKDLQQLKKKPRIVLPWWCVYVAWFLVFATSSISSFFIVFYGLTYGYDKSIEWLFASFCSFCQSVLLVQPSKIILLSGFRTNKPKYCKNLSWSTKYKYTEIRLDGMRMHPEEMQRIHDQIVRIRGTRMYQPLTEDEIRIFKRKKRIKRRALLFLSYILTHFIFLALLLILIVLLRHTDCFYYNQFIRDRFSMDLATVTKLEDIYRWLNSVLLPLLHNDLNPTFLPESSSKILGLPLMRQVRAKSSEKMCLPAEKFVQNSIRREIHCHPKYGIDPEDTKNYSGFWNEVDKQAIDESTNGFTYKPQGTQWLYYSYGLLHTYGSGGYALYFFPEQQRFNSTLRLKELQESNWLDEKTWAVVLELTTFNPDINLFCSISVIFEVSQLGVVNTSISLHSFSLADFDRKASAEIYLYVAILIFFLAYVVDEGCIIMQERASYVRSVYNLLNFALKCIFTVLIVLFLRKHFLATGIIRFYLSNPEDFIPFHAVSQVDHIMRIILGFLLFLTILKTLRYSRFFYDVRLAQRAIQAALPGICHMAFVVSVYFFVYMAFGYLVFGQHEWNYSNLIHSTQTVFSYCVSAFQNTEFSNNRILGVLFLSSFMLVMICVLINLFQAVILSAYEEMKQPVYEEPSDEVEAMTYLCRKLRTMFSFLTSQSKAKDEPEFFIDMLYGQPEKNSHRYLGLKTRNINGKKMVYLVV

SEQ ID NO: 25937 - protein, 78 aa, Homo sapiens
MDCCTENACSKPDDDILDIPLDDPGANAAAAKIQASFRGHMARKKIKSGERGRKGPGPGGPGGAGVARGGAGGGPSGD

SEQ ID NO: 25938 - protein, 872 aa, Homo sapiens
MNLIVKLRRSFRTLIVLLATFCLVSIVISAYFLYSGYKQEMTLIETTAEAECTDIKILPYRSMELKTVKPIDTSKTDPTVLLFVESQYSQLGQDIIAILESSRFQYHMVIAPGKGDIPPLTDNGKGKYTLVIYENILKYVSMDSWNRELLEKYCVEYSVSIIGFHKANENSLPSTQLKGFPLNLFNNLALKDCFVNPQSPLLHITKAPKVEKGPLPGEDWTIFQYNHSTYQPVLLTELQTEKSLSSLSSKTLFATVIQDLGLHDGIQRVLFGNNLNFWLHKLIFIDAISFLSGKRLTLSLDRYILVDIDDIFVGKEGTRMNVKDVKALLETQNLLRTQVANFTFNLGFSGKFYHTGTEEEDEGDDLLLRSVDEFWWFPHMWSHMQPHLFHNESSLVEQMILNKEFALEHGIPINMGYAVAPHHSGVYPVHIQLYAAWKKVWGIQVTSTEEYPHLKPARYRKGFIHNSIMVLPRQTCGLFTHTIFYKEYPGGPQELDKSIRGGELFLTILLNPISIFMTHLSNYGNDRLGLYTFVNLVNFVQSWTNLKLQTLPPVQLAHQYFELFPEQKDPLWQNPCDDKRHKDIWSREKTCDHLPKFLVIGPQKTGTTALYLFLLMHPSIISNLPSPKTFEEVQFFNGNNYHKGIDWYMDFFPTPSNTTSDFLFEKSANYFHSEEAPRRAASLVPKAKIITILIDPSDRAYSWYQHQRSHEDPAALRFNFYEVISTGHWAPSDLKTLQRRCLVPGWYAVHIERWLTYFATSQLLIIDGQQLRSDPATVMDEVQKFLGVTPRYNYSEALTFDPQKGFWCQLLEGGKTKCLGKSKGRKYPPMDPESRTFLSNYYRDHNVELSKLLHRLGQPLPSWLRQELQKVR

SEQ ID NO: 25939 - protein, 369 aa, Homo sapiens
MWSHMQPHLFHNESSLVEQMILNKEFALEHGIPINMGYAVAPHHSGVYPVHIQLYAAWKKVWGIQVTSTEEYPHLKPARYRKGFIHNSIMVLPRQTCGLFTHTIFYKEYPGGPQELDKSIRGGELFLTILLNPISIFMTHLSNYGNDRLGLYTFVNLVNFVQSWTNLKLQTLPPVQLAHQYFELFPEQKDPLWQNPCDDKRHKDIWSREKTCDHLPKFLVIGPQKTGTTALYLFLLMHPSIISNLPSPKTFEEVQFFNGNNYHKGIDWYMDFFPTPSNTTSDFLFEKSANYFHSEEAPRRAASLVPKAKIITILIDPSDRAYSWYQVGVQWRDLGSLQPSPPRFMPFSCLSLLSSWDYSTNDHMKIQLL

SEQ ID NO: 25940 - protein, 382 aa, Homo sapiens
MNPQIRNPMERMYRDTFYDNFENEPILYGRSYTWLCYEVKIKRGRSNLLWDTGVFRGQVYFKPQYHAEMCFLSWFCGNQLPAYKCFQITWFVSWTPCPDCVAKLAEFLSEHPNVTLTISAARLYYYWERDYRRALCRLSQAGARVTIMDYEEFAYCWENFVYNEGQQFMPWYKFDENYAFLHRTLKEILRYLMDPDTFTFNFNNDPLVLRRRQTYLCYEVERLDNGTWVLMDQHMGFLCNEAKNLLCGFYGRHAELRFLDLVPSLQLDPAQIYRVTWFISWSPCFSWGCAGEVRAFLQENTHVRLRIFAARIYDYDPLYKEALQMLRDAGAQVSIMTYDEFEYCWDTFVYRQGCPFQPWDGLEEHSQALSGRLRAILQNQGN

SEQ ID NO: 25941 - protein, 251 aa, Homo sapiens
MNPQIRNPMERMYRDTFYDNFENEPILYGRSYTWLCYEVKIKRGRSNLLWDTGVFRGQVYFKPQYHAEMCFLSWFCGNQLPAYKCFQITWFVSWTPCPDCVAKLAEFLSEHPNVTLTISAARLYYYWERDYRRALCRLSQAGARVTIMDYEEFAYCWENFVYNEGQQFMPWYKFDENYAFLHRTLKEILRLRIFSVAFTAAMRSCASWTWFLLCSWTRPRSTGSLGSSPGAPASPGAVPGKCVRSFRRTHT

SEQ ID NO: 25942 - protein, 357 aa, Homo sapiens
MNPQIRNPMERMYRDTFYDNFENEPILYGRSYTWLCYEVKIKRGRSNLLWDTGVFRGQVYFKPQYHAEMCFLSWFCGNQLPAYKCFQITWFVSWTPCPDCVAKLAEFLSEHPNVTLTISAARLYYYWERDYRRALCRLSQAGARVTIMDYEEFAYCWENFVYNEGQQFMPWYKFDENYAFLHRTLKEILRYLMDPDTFTFNFNNDPLVLRRRQTYLCYEVERLDNGTWVLMDQHMGFLCNELDPAQIYRVTWFISWSPCFSWGCAGEVRAFLQENTHVRLRIFAARIYDYDPLYKEALQMLRDAGAQVSIMTYDEFEYCWDTFVYRQGCPFQPWDGLEEHSQALSGRLRAILQNQGN

SEQ ID NO: 25943 - protein, 926 aa, Homo sapiens
MLQVHRTGLGRLGVSLSKGLHHKAVLAVRREDVNAWERRAPLAPKHIKGITNLGYKVLIQPSNRRAIHDKDYVKAGGILQEDISEACLILGVKRPPEEKLMSRKTYAFFSHTIKAQEANMGLLDEILKQEIRLIDYEKMVDHRGVRVVAFGQWAGVAGMINILHGMGLRLLALGHHTPFMHIGMAHNYRNSSQAVQAVRDAGYEISLGLMPKSIGPLTFVFTGTGNVSKGAQAIFNELPCEYVEPHELKEVSQTGDLRKVYGTVLSRHHHLVRKTDAVYDPAEYDKHPERYISRFNTDIAPYTTCLINGIYWEQNTPRLLTRQDAQSLLAPGKFSPAGVEGCPALPHKLVAICDISADTGGSIEFMTECTTIEHPFCMYDADQHIIHDSVEGSGILMCSIDNLPAQLPIEATECFGDMLYPYVEEMILSDATQPLESQNFSPVVRDAVITSNGTLPDKYKYIQTLRESRERAQSLSMGTRRKVLVLGSGYISEPVLEYLSRDGNIEITVGSDMKNQIEQLGKKYNINPVSMDICKQEEKLGFLVAKQDLVISLLPYVLHPLVAKACITNKVNMVTASYITPALKELEKSVEDAGITIIGELGLDPGLDHMLAMETIDKAKEVGATIESYISYCGGLPAPEHSNNPLRYKFSWSPVGVLMNVMQSATYLLDGKVVNVAGGISFLDAVTSMDFFPGLNLEGYPNRDSTKYAEIYGISSAHTLLRGTLRYKGYMKALNGFVKLGLINREALPAFRPEANPLTWKQLLCDLVGISPSSEHDVLKEAVLKKLGGDNTQLEAAEWLGLLGDEQVPQAESILDALSKHLVMKLSYGPEEKDMIVMRDSFGIRHPSGHLEHKTIDLVAYGDINGFSAMAKTVGLPTAMAAKMLLDGEIGAKGLMGPFSKEIYGPILERIKAEGIIYTTQSTIKP

SEQ ID NO: 25944 - protein, 435 aa, Homo sapiens
MWAPPAAIMGDGPTKKVGNQAPLQTQALQTASLRDGPAKRAVWVRHTSSEPQEPTESKAAKERPKQEVTKAVVVDLGTGYCKCGFAGLPRPTHKISTTVGKPYMETAKTGDNRKETFVGQELNNTNVHLKLVNPLRHGIIVDWDTVQDIWEYLFRQEMKIAPEEHAVLVSDPPLSPHTNREKYAEMLFEAFNTPAMHIAYQSRLSMYSYGRTSGLVVEVGHGVSYVVPIYEGYPLPSITGRLDYAGSDLTAYLLGLLNSAGNEFTQDQMGIVEDIKKKCCFVALDPIEEKKVPLSEHTIRYVLPDGKEIQLCQERFLCSEMFFKPSLIKSMQLGLHTQTVSCLNKCDIALKRDLMGNILLCGGSTMLSGFPNRLQKELSSMCPNDTPQVNVLPERDSAVWTGGSILASLQGFQPLWVHRFEYEEHGPFFLYRRCF

SEQ ID NO: 25945 - protein, 426 aa, Homo sapiens
MSGGVYGGDEVGALVFDIGSFSVRAGYAGEDCPKADFPTTVGLLAAEEGGGLELEGDKEKKGKIFHIDTNALHVPRDGAEVMSPLKNGMIEDWECFRAILDHTYSKHVKSEPNLHPVLMSEAPWNTRAKREKLTELMFEQYNIPAFFLCKTAVLTAFANGRSTGLVLDSGATHTTAIPVHDGYVLQQGIVKSPLAGDFISMQCRELFQEMAIDIIPPYMIAAKEPVREGAPPNWKKKEKLPQVSKSWHNYMCNEVIQDFQASVLQVSDSPYDEQVAAQMPTVHYEMPNGYNTDYGAERLRIPEGLFDPSNVKGLSGNTMLGVGHVVTTSIGMCDIDIRPGLYGSVIVTGGNTLLQGFTDRLNRELSQKTPPSMRLKLIASNSTMERKFSPWIGGSILASLGTFQQMWISKQEYEEGGKQCVERKCP

SEQ ID NO: 25946 - protein, 421 aa, Homo sapiens
MPTLSVFMDVPLAHKLEGSLLKTYKQDDYPNKIFLAYRVCMTNEGHPWVSLVVQKTRLQISQDPSLNYEYLPTMGLKSFIQASLALLFGKHSQAIVENRVGGVHTVGDSGAFQLGVQFLRAWHKDARIVYIISSQKELHGLVFQDMGFTVYEYSVWDPKKLCMDPDILLNVVEQIPHGCVLVMGNIIDCKLTPSGWAKLMSMIKSKQIFPFFDIPCQGLYTSDLEEDTRILQYFVSQGFEFFCSQSLSKNFGIYDEGVGMLVVVAVNNQQLLCVLSQLEGLAQALWLNPPNTGARVITSILCNPALLGEWKQSLKEVVENIMLTKEKVKEKLQLLGTPGSWGHITEQSGTHGYLGLNSQQVEYLVRKKHIYIPKNGQINFSCINANNINYITEGINEAVLLTESSEMCLPKEKKTLIGIKL

SEQ ID NO: 25947 - protein, 413 aa, Homo sapiens
MAPPSVFAEVPQAQPVLVFKLTADFREDPDPRKVNLGVGAYRTDDCHPWVLPVVKKVEQKIANDNSLNHEYLPILGLAEFRSCASRLALGDDSPALKEKRVGGVQSLGGTGALRIGADFLARWYNGTNNKNTPVYVSSPTWENHNAVFSAAGFKDIRSYRYWDAEKRGLDLQGFLNDLENAPEFSIVVLHACAHNPTGIDPTPEQWKQIASVMKHRFLFPFFDSAYQGFASGNLERDAWAIRYFVSEGFEFFCAQSFSKNFGLYNERVGNLTVVGKEPESILQVLSQMEKIVRITWSNPPAQGARIVASTLSNPELFEEWTGNVKTMADRILTMRSELRARLEALKTPGTWNHITDQIGMFSFTGLNPKQVEYLVNEKHIYLLPSGRINVSGLTTKNLDYVATSIHEAVTKIQ

SEQ ID NO: 25948 - protein, 392 aa, Homo sapiens
MQVWSPWKGAMCPRPHKPAYRTDDCHPWVLPVVKKVEQKIANDNSLNHEYLPILGLAEFRSCASRLALGDDSPALKEKRVGGVQSLGGTGALRIGADFLARWYNGTNNKNTPVYVSSPTWENHNAVFSAAGFKDIRSYRYWDAEKRGLDLQGFLNDLENAPEFSIVVLHACAHNPTGIDPTPEQWKQIASVMKHRFLFPFFDSAYQGFASGNLERDAWAIRYFVSEGFEFFCAQSFSKNFGLYNERVGNLTVVGKEPESILQVLSQMEKIVRITWSNPPAQGARIVASTLSNPELFEEWTGNVKTMADRILTMRSELRARLEALKTPGTWNHITDQIGMFSFTGLNPKQVEYLVNEKHIYLLPSGRINVSGLTTKNLDYVATSIHEAVTKIQ

SEQ ID NO: 25949 - protein, 357 aa, Homo sapiens
MDLPVNLTSFSLSTPSPLETNHSLGKDDLRPSSPLLSVFGVLILTLLGFLVAATFAWNLLVLATILRVRTFHRVPHNLVASMAVSDVLVAALVMPLSLVHELSGRRWQLGRRLCQLWIACDVLCCTASIWNVTAIALDRYWSITRHMEYTLRTRKCVSNVMIALTWALSAVISLAPLLFGWGETYSEGSEECQVSREPSYAVFSTVGAFYLPLCVVLFVYWKIYKAAKFRVGSRKTNSVSPISEAVEVKDSAKQPQMVFTVRHATVTFQPEGDTWREQKEQRAALMVGILIGVFVLCWIPFFLTELISPLCSCDIPAIWKSIFLWLGYSNSFFNPLIYTAFNKNYNSAFKNFFSRQH

SEQ ID NO: 25950 - protein, 122 aa, Homo sapiens
MTSPEIASLSWGQMKVKGSNTTYKDCKVWPGGSRTWDWRETGTEHSPGVQPADVKEVVEKGVQTLVIGRGMSEALKVPSSTVEYLKKHGIDVRVLQTEQAVKEYNALVAQGVRVGGVFHSTC

SEQ ID NO: 25951 - protein, 118 aa, Homo sapiens
MTSPEIASLSWGQMKVKGSNTTYKDCKVWPGGSRTWDWRETGTEHSPGVQPADVKEVVEKGVQTLVIGRGMSEALKAPTQQLPSGVHVRAGVQFHLLQLHGTSFERCKTGAGLTSNML

SEQ ID NO: 25952 - protein, 88 aa, Homo sapiens
MTSPEIASLSWGQMKVKGSNTTYKDCKVWPGGSRTWDWRETGTEHSPGVQPADVKEVVEKGVQTLVIGRGMSEALKDGIQGAQLDLNC

SEQ ID NO: 25953 - protein, 368 aa, Homo sapiens
MEPGQPREPQEPREPGPGAETAAAPVWEEAKIFYDNLAPKKKPKSPKPQNAVTIAVSSRALFRMDEEQQIYTEQGVEEYVRYQLEHENEPFSPGPAFPFVKALEAVNRRLRELYPDSEDVFDIVLMTNNHAQVGVRLINSINHYDLFIERFCMTGGNSPICYLKAYHTNLYLSADAEKVREAIDEGIAAATIFSPSRDVVVSQSQLRVAFDGDAVLFSDESERIVKAHGLDRFFEHEKAHENKPLAQGPLKGFLEALGRLQKKFYSKGLRLECPIRTYLVTARSAASSGARALKTLRSWGLETDEALFLAGAPKGPLLEKIRPHIFFDDQMFHVAGAQEMGTVAAHVPYGVAQTPRRTAPAKQAPSAQ

SEQ ID NO: 25954 - protein, 541 aa, Homo sapiens
MVADPPRDSKGLAAAEPTANGGLALASIEDQGAAAGGYCGSRDQVRRCLRANLLVLLTVVAVVAGVALGLGVSGAGGALALGPERLSAFVFPGELLLRLLRMIILPLVVCSLIGGAASLDPGALGRLGAWALLFFLVTTLLASALGVGLALALQPGAASAAINASVGAAGSAENAPSKEVLDSFLDLARNIFPSNLVSAAFRSYSTTYEERNITGTRVKVPVGQEVEGMNILGLVVFAIVFGVALRKLGPEGELLIRFFNSFNEATMVLVSWIMWYAPVGIMFLVAGKIVEMEDVGLLFARLGKYILCCLLGHAIHGLLVLPLIYFLFTRKNPYRFLWGIVTPLATAFGTSSSSATLPLMMKCVEENNGVAKHISRFILPIGATVNMDGAALFQCVAAVFIAQLSQQSLDFVKIITILVTATASSVGAAGIPAGGVLTLAIILEAVNLPVDHISLILAVDWLVDRSCTVLNVEGDALGAGLLQNYVDRTESRSTEPELIQVKSELPLDPLPVPTEEGNPLLKHYRGPAGDATVASEKESVM

SEQ ID NO: 25955 - protein, 339 aa, Homo sapiens
MYSTTYEERNITGTRVKVPVGQEVEGMNILGLVVFAIVFGVALRKLGPEGELLIRFFNSFNEATMVLVSWIMWYAPVGIMFLVAGKIVEMEDVGLLFARLGKYILCCLLGHAIHGLLVLPLIYFLFTRKNPYRFLWGIVTPLATAFGTSSSSATLPLMMKCVEENNGVAKHISRFILPIGATVNMDGAALFQCVAAVFIAQLSQQSLDFVKIITILVTATASSVGAAGIPAGGVLTLAIILEAVNLPVDHISLILAVDWLVDRSCTVLNVEGDALGAGLLQNYVDRTESRSTEPELIQVKSELPLDPLPVPTEEGNPLLKHYRGPAGDATVASEKESVM

SEQ ID NO: 25956 - protein, 313 aa, Homo sapiens
MNILGLVVFAIVFGVALRKLGPEGELLIRFFNSFNEATMVLVSWIMWYAPVGIMFLVAGKIVEMEDVGLLFARLGKYILCCLLGHAIHGLLVLPLIYFLFTRKNPYRFLWGIVTPLATAFGTSSSSATLPLMMKCVEENNGVAKHISRFILPIGATVNMDGAALFQCVAAVFIAQLSQQSLDFVKIITILVTATASSVGAAGIPAGGVLTLAIILEAVNLPVDHISLILAVDWLVDRSCTVLNVEGDALGAGLLQNYVDRTESRSTEPELIQVKSELPLDPLPVPTEEGNPLLKHYRGPAGDATVASEKESVM

SEQ ID NO: 25957 - protein, 711 aa, Homo sapiens
MARSRSRSPRWKHRSLSPVPRNAEHYKQRHSHGHYGCEYRKDPKRPVAWRMDSEKHGQSKPRIPSRGNIYYQSYEHRSPSPNIRNSLENVYMYKPHRGYSPGRGDSNRRAQYMPKYSEGIPYKEHERNSYPQKVQGGHSPDDHRVRGSGKGGKPPQRSIADSFRFEGKWHEDELRHQRIQEEKYSQSTRRGSEDFETRSSFQKRYPEDRDFRKYGHTSKRPKDVERYESREPARNPKWKPEHSLPPYQEDTDQWNLGPQTYRHAEREHPETSSATKVSYDYRHKRPKLLDGDQDFSDGRTQKYCKEEDRKYSFQKGPLNRELDCFNTGRGRETQDGQVKEPFKPSKKDSIACTYSNKNDVDLRSSNDKWKEKIKKEGDCRKESNSSSNQLDKSQKLPDVKPSPINLRKKSLTVKVDVKKTVDTFRVASSYSTERQMSHDLVAVGRKSENFHPVFEHLDSTQNTENKPTGEFAQEIITIIHQVKANYFPSPGITLHERFSTMQDIHKADVNEIPLNSDPEIHRRIDMSLAELQSKQAVIYESEQTLIKIIDPNDLRHDIERRRKERLQNEDEHIFHIASAAERDDQNSSFSKVKNVHTDGFQKPTHFIKSNFRKCIEKPYMNYTTQRKDIITHKPFEVEGNHRNTRVRPFKSNFRGGRCQPNYKSGLVQKSLYIQAKYQRLRFTGPRGFITHKFRERLMRKKKEYTDVATGI

SEQ ID NO: 25958 - protein, 682 aa, Homo sapiens
MARSRSRSPRWKHRSLSPVPRNAEHYKQRHSHGHYGCEYRKDPKRPVAWRMDSEKHGQSKPRIPSRGNIYYQSYEHRSPSPNIRNSLENVYMYKPHRGYSPGRGDSNRRAQYMPKYSEGIPYKEHERNSYPQKVQGGHSPDDHRVRGSGKGGKPPQRSIADSFRFEGKWHEDELRHQRIQEEKYSQSTRRGSEDFETRSSFQKRYPEDRDFRKYGHTSKRPKDVERYESREPARNPKWKPEHSLPPYQEDTDQWNLGPQTYRHAEREHPETSSATKVSYDYRHKRPKLLDGDQDFSDGRTQKYCKEEDRKYSFQKGPLNRELDCFNTGRGRETQDGQVKEPFKPSKKDSIACTYSNKNDVDLRSSNDKWKEKIKKEGDCRKESNSSSNQLDKSQKLPDVKPSPINLRKKSLTVKVDVKKTVDTFRVASSYSTERQMSHDLVAVGRKSENFHPVFEHLDSTQNTENKPTGEFAQEIITIIHQVKANYFPSPGITLHERFSTMQDIHKADVNEIPLNSDPEIHRRIDMSLAELQSKQAVIYESEQTLIKIIDPNDLRHDIERRRKERLQNEDEHIFHIASAAERDDQNSSFSKNYTTQRKDIITHKPFEVEGNHRNTRVRPFKSNFRGGRCQPNYKSGLVQKSLYIQAKYQRLRFTGPRGFITHKFRERLMRKKKEYTDVATGI

SEQ ID NO: 25959 - protein, 625 aa, Homo sapiens
MARSRSRSPRWKHRSLSPVPRNAEHYKQRHSHGHYGCEYRKDPKRPVAWRMDSEKHGQSKPRIPSRGNIYYQSYEHRSPSPNIRNSLENVYMYKPHRGYSPGRGDSNRRAQYMPKYSEGIPYKEHERNSYPQKVQGGHSPDDHRVRGSGKGGKPPQRSIADSFRFEGKWHEDELRHQRIQEEKYSQSTRRGSEDFETRSSFQKRYPEDRDFRKYGHTSKRPKDVERYESREPARNPKWKPEHSLPPYQEDTDQWNLGPQTYRHAEREHPETSSATKVSYDYRHKRPKLLDGDQDFSDGRTQKYCKEEDRKYSFQKGPLNRELDCFNTGRGRETQDGQVKEPFKPSKKDSIACTYSNKNDVDLRSSNDKWKEKIKKEGDCRKESNSSSNQLDKSQKLPDVKPSPINLRKKSLTVKVDVKKTVDTFRVASSYSTERQMSHDLVAVGRKSENFHPVFEHLDSTQNTENKPTGEFAQEIITIIHQVKANYFPSPGITLHERFSTMQDIHKADVNEIPLNSDPEIHRRIDMSLAELQSKQAVIYESEQTLIKIIDPNDLRHDIERRRKERLQNEDEHIFHIASAAERDDQNSSFSKGLALSPRLECGVTITAYCSLYLQDSSYLPPQPPE

SEQ ID NO: 25960 - protein, 391 aa, Homo sapiens
MDMASESVGGKILFATDDFFAPAENLIKSDSPCFKEHEYTEFGKWMDGWETRRKRIPGHDWCVLRLGIQGVIRGFDVDVSYFTGDYAPRVSIQAANLEEDKLPEIPERGTRTGAAATPEEFEAIAELKSDDWSYLVPMTELKPGNPASGHNYFLVNSQQRWTHIRLNIFPDGGIARLRVFGTGQKDWTATDPKEPADLVAIAFGGVCVGFSNAKFGHPNNIIGVGGAKSMADGWETARRLDRPPILENDENGILLVPGCEWAVFRLAHPGVITRIEIDTKYFEGNAPDSCKVDGCILTTQEEEAVIRQKWILPAHKWKPLLPVTKLSPNQSHLFDSLTLELQDVITHARLTIVPDGGVSRLRLRGFPSSICLLRPREKPMLKFSVSFKANP

SEQ ID NO: 25961 - protein, 162 aa, Homo sapiens
MADGWETARRLDRPPILENDENGILLVPGCEWAVFRLAHPGVITRIEIDTKYFEGNAPDSCKVDGCILTTQEEEAVIRQKWILPAHKWKPLLPVTKLSPNQSHLFDSLTLELQDVITHARLTIVPDGGVSRLRLRGFPSSICLLRPREKPMLKFSVSFKANP

SEQ ID NO: 25962 - protein, 198 aa, Homo sapiens [sequence omitted]

SEQ ID NO: 25963 - protein, 188 aa, Homo sapiens
MDSLLMNRRKFLYQFKNVRWAKGRRETYLCYVVKRRDSATSFSLDFGYLRNKNGCHVELLFLRYISDWDLDPGRCYRVTWFTSWSPCYDCARHVADFLRGNPNLSLRIFTARLYFCEDRKAEPEGLRRLHRAGVQIAIMTFKENHERTFKAWEGLHENSVRLSRQLRRILLPLYEVDDLRDAFRTLGL

SEQ ID NO: 25964 - protein, 4168 aa, Homo sapiens
MEPEDLPWPGELEEEEEEEEEEEEEEEEAAAAAAANVDDVVVVEEVEEEAGRELDSDSHYGPQHLESIDDEEDEEAKAWLQAHPGRILPPLSPPQHRYSEGERTSLEKIVPLTCHVWQQIVYQGNSRTQISDTNVVCLETTAQRGSGDDQKTESWHCLPQEMDSSQTLDTSQTRFNVRTEDTEVTDFPSLEEGILTQSENQVKEPNRDLFCSPLLVIQDSFASPDLPLLTCLTQDQEFAPDSLFHQSELSFAPLRGIPDKSEDTEWSSRPSEVSEALFQATAEVASDLASSRFSVSQHPLIGSTAVGSQCPFLPSEQGNNEETISSVDELKIPKDCDRYDDLCSYMSWKTRKDTQWPENNLADKDQVSVATSFDITDENIATKRSDHFDAARSYGQYWTQEDSSKQAETYLTKGLQGKVESDVITLDGLNENAVVCSERVAELQRKPTRESEYHSSDLRMLRMSPDTVPKAPKHLKAGDTSKGGIAKVTQSNLKSGITTTPVDSDIGSHLSLSLEDLSQLAVSSPLETTTGQHTDTLNQKTLADTHLTEETLKVTAIPEPADQKTATPTVLSSSHSHRGKPSIFYQQGLPDSHLTEEALKVSAAPGLADQTTGMSTLTSTSYSHREKPGTFYQQELPESNLTEEPLEVSAAPGPVEQKTGIPTVSSTSHSHVEDLLFFYRQTLPDGHLTDQALKVSAVSGPADQKTGTATVLSTPHSHREKPGIFYQQEFADSHQTEETLTKVSATPGPADQKTEIPAVQSSSYSQREKPSILYPQDLADSHLPEEGLKVSAVAGPADQKTGLPTVPSSAYSHREKLLVFYQQALLDSHLPEEALKVSAVSGPADGKTGTPAVTSTSSASSSLGEKPSAFYQQTLPNSHLTEEALKVSIVPGPGDQKTGIPSAPSSFYSHREKPIIFSQQTLPDFLFPEEALKVSAVSVLAAQKTGTPTVSSNSHSHSEKSSVFYQQELPDSDLPRESLKMSAIPGLTDQKTVPTPTVPSGSFSHREKPSIFYQQEWPDSYATEKALKVSTGPGPADQKTEIPAVQSSSYPQREKPSVLYPQVLSDSHLPEESLKVSAFPGPADQMTDTPAVPSTFYSQREKPGIFYQQTLPESHLPKEALKISVAPGLADQKTGTPTVTSTSYSQHREKPSIFHQQALPGTHIPEEAQKVSAVTGPGNQKTWIPRVLSTFYSQREKPGIFYQQTLPGSHIPEEAQKVSPVLGPADQKTGTPTPTSASYSHTEKPGIFYQQVLPDNHPTEEALKISVASEPVDQTTGTPAVTSTSYSQYREKPSIFYQQSLPSSHLTEEAKNVSAVPGPADQKTVIPILPSTFYSHTEKPGVFYQQVLPHSHPTEEALKISVASEPVDQTTGTPTVTSTSYSQHTEKPSIFYQQSLPGSHLTEEAKNVSAVPGPGDRKTGIPTLPSTFYSHTEKPGSFYQQVLPHSHLPEEALEVSVAPGPVDQTIGTPTVTSPSSSFGEKPIVIYKQAFPEGHLPEESLKVSVAPGPVGQTTGAPTITSPSYSQHRAKSGSFYQLALLGSQIPEEALRVSSAPGPADQTTGIPTITSTSYSFGEKPIVNYKQAFPDGHLPEEALKVSIVSGPTEKKTDIPAGPLGSSALGEKPITFYRQALLDSPLNKEVVKVSAAPGPADQKTETLPVHSTSYSNRGKPVIFYQQTLSDSHLPEEALKVPPVPGPDAQKTETPSVSSSLYSYREKPIVFYQQALPDSELTQEALKVSAVPQPADQKTGLSTVTSSFYSHTEKPNISYQQELPDSHLTEEALKVSNVPGPADQKTGVSTVTSTSYSHREKPIVSYQRELPHFTEAGLKILRVPGPADQKTGINILPSNSYPQREHSVISYEQELPDLTEVTLKAIGVPGPADQKTGIQIASSSSYSNREKASIFHQQELPDVTEEALNVFVVPGQGDRKTEIPTVPLSYYSRREKPSVISQQELPDSHLTEEALKVSPVSIPAEQKTGIPIGLSSSYSHSHKEKLKISTVHIPDDQKTEFPAATLSSYSQIEKPKISTVIGPNDQKTPSQTAFHSSYSQTVKPNILFQQQLPDRDQSKGILKISAVPELTDVNTGKPVSLSSSYFHREKSNIFSPQELPGSHVTEDVLKVSTIPGPAGQKTVLPTALPSSFSHREKPDIFYQKDLPDRHLTEDALKISSALGQADQITGLQTVPSGTYSHGENHKLVSEHVQRLIDNLNSSDSSVSSNNVLLNSQADDRVVINKPESAGFRDVGSEEIQDAENSAKTLKEIRTLLMEAENMALKRCNFPAPLARFRDISDISFIQSKKVVCFKEPSSTGVSNGDLLHRQPFTEESPSSRCIQKDIGTQTNLKCRRGIENWEFISSTTVRSPLQEAESKVSMALEETLRQYQAAKSVMRSEPEGCSGTIGNKIIIPMMTVIKSDSSSDASDGNGSCSWDSNLPESLESVSDVLLNFFPYVSPKTSITDSREEEGVSESEDGGGSSVDSLAAHVKNLLQCESSLNHAKEILRNAEEEESRVRAHAWNMKFNLAHDCGYSISELNEDDRRKVEEIKAELFGHGRTTDLSKGLQSPRGMGCKPEAVCSHIIIESHEKGCFRTLTSEHPQLDRHPCAFRSAGPSEMTRGRQNPSSCRAKHVNLSASLDQNNSHFKVWNSLQLKSHSPFQNFIPDEFKISKGLRMPFDEKMDPWLSELVEPAFVPPKEVDFHSSSQMPSPEPMKKFTTSITFSSHRHSKCISNSSVVKVGVTEGSQCTGASVGVFNSHFTEEQNPPRDLKQKTSSPSSFKMHSNSQDKEVTILAEGRRQSQKLPVDFERSFQEEKPLERSDFTGSHSEPSTRANCSNFKEIQISDNHTLISMGRPSSTLGVNRSSSRLGVKEKNVTITPDLPSCIFLEQRELFEQSKAPRADDHVRKHHSPSPQHQDYVAPDLPSCIFLEQRELFEQCKAPYVDHQMRENHSPLPQGQDSIASDLPSPISLEQCQSKAPGVDDQMNKHHFPLPQGQDCVVEKNNQHKPKSHISNINVEAKFNTVVSQSAPNHCTLAASASTPPSNRKALSCVHITLCPKTSSKLDSGTLDERFHSLDAASKARMNSEFNFDLHTVSSRSLEPTSKLLTSKPVAQDQESLGFLGPKSSLDFQVVQPSLPDSNTITQDLKTIPSQNSQIVTSRQIQVNISDFEGHSNPEGTPVFADRLPEKMKTPLSAFSEKLSSDAVTQITTESPEKTLFSSEIFINAEDRGHEIIEPGNQKLRKAPVKFASSSSVQQVTFSRGTDGQPLLLPYKPSGSTKMYYVPQLRQIPPSPDSKSDTTVESSHSGSNDAIAPDFPAQVLGTRDDDLSATVNIKHKEGIYSKRVVTKASLPVGEKPLQNENADASVQVLITGDENLSDKKQQEIHSTRAVTEAAQAKEKESLQKDTADSSAAAAAEHSAQVGDPEMKNLPDTKAITQKEEIHRKKTVPEEAWPNNKESLQINIEESECHSEFENTTRSVFRSAKFYIHHPVHLPSDQDICHESLGKSVFMRHSWKDFFQHHPDKHREHMCLPLPYQNMDKTKTDYTRIKSLSINVNLGNKEVMDTTKSQVRDYPKHNGQISDPQRDQKVTPEQTTQHTVSLNELWNKYRERQRQQRQPELGDRKELSLVDRLDRLAKILQNPITHSLQVSESTHDDSRGERSVKEWSGRQQQRNKLQKKKRFKSLEKSHKNTGELKKSKVLSHHRAGRSNQIKIEQIKFDKYILSKQPGFNYISNTSSDCRPSEESELLTDTTTNILSGTTSTVESDILTQTDREVALHERSSSVSTIDTARLIQAFGHERVCLSPRRIKLYSSITNQQRRYLEKRSKHSKKVLNTGHPLVTSEHTRRRHIQVANHVISSDSISSSASSFLSSNSTFCNKQNVHMLNKGIQAGNLEIVNGAKKHTRDVGITFPTPSSSEAKLEENSDVTSWSEEKREEKMLFTGYPEDRKLKKNKKNSHEGVSWFVPVENVESRSKKENVPNTCGPGISWFEPITKTRPWREPLREQNCQGQHLDGRGYLAGPGREAGRDLLRPFVRATLQESLQFHRPDFISRSGERIKRLKLIVQERKLQSMLQTERDALFNIDRERQGHQNRMCPLPKRVFLAIQKNKPISKKEMIQRSKRIYEQLPEVQKKREEEKRKSEYKSYRLRAQLYKKRVTNQLLGRKVPWD

SEQ ID NO: 25965 - protein, 4122 aa, Homo sapiens
MEPEDLPWPGELEEEEEEEEEEEEEEEEAAAAAAANVDDVVVVEEVEEEAGRELDSDSHYGPQHLESIDDEEDEEAKAWLQAHPGRILPPLSPPQHRYSEGERTSLEKIVPLTCHVWQQIVYQGNSRTQISDTNVVCLETTAQRGSGDDQKTESWHCLPQEMDSSQTLDTSQTRFNVRTEDTEVTDFPSLEEGILTQSENQVKEPNRDLFCSPLLVIQDSFASPDLPLLTCLTQDQEFAPDSLFHQSELSFAPLRGIPDKSEDTEWSSRPSEVSEALFQATAEVASDLASSRFSVSQHPLIGSTAVGSQCPFLPSEQGNNEETISSVDELKIPKDCDRYDDLCSYMSWKTRKDTQWPENNLADKDQVSVATSFDITDENIATKRSDHFDAARSYGQYWTQEDSSKQAETYLTKGLQGKVESDVITLDGLNENAVVCSERVAELQRKPTRESEYHSSDLRMLRMSPDTVPKAPKHLKAGDTSKGGIAKVTQSNLKSGITTTPVDSDIGSHLSLSLEDLSQLAVSSPLETTTGQHTDTLNQKTLADTHLTEETLKVTAIPEPADQKTATPTVLSSSHSHRGKPSIFYQQGLPDSHLTEEALKVSAAPGLADQTTGMSTLTSTSYSHREKPGTFYQQELPESNLTEEPLEVSAAPGPVEQKTGIPTVSSTSHSHVEDLLFFYRQTLPDGHLTDQALKVSAVSGPADQKTGTATVLSTPHSHREKPGIFYQQEFADSHQTEETLTKVSATPGPADQKTEIPAVQSSSYSQREKPSILYPQDLADSHLPEEGLKVSAVAGPADQKTGLPTVPSSAYSHREKLLVFYQQALLDSHLPEEALKVSAVSGPADGKTGTPAVTSTSSASSSLGEKPSAFYQQTLPNSHLTEEALKVSIVPGPGDQKTGIPSAPSSFYSHREKPIIFSQQTLPDFLFPEEALKVSAVSVLAAQKTGTPTVSSNSHSHSEKSSVFYQQELPDSDLPRESLKMSAIPGLTDQKTVPTPTVPSGSFSHREKPSIFYQQEWPDSYATEKALKVSTGPGPADQKTEIPAVQSSSYPQREKPSVLYPQVLSDSHLPEESLKVSAFPGPADQMTDTPAVPSTFYSQREKPGIFYQQTLPESHLPKEALKISVAPGLADQKTGTPTVTSTSYSQHREKPSIFHQQALPGTHIPEEAQKVSAVTGPGNQKTWIPRVLSTFYSQREKPGIFYQQTLPGSHIPEEAQKVSPVLGPADQKTGTPTPTSASYSHTEKPGIFYQQVLPDNHPTEEALKISVASEPVDQTTGTPAVTSTSYSQYREKPSIFYQQSLPSSHLTEEAKNVSAVPGPADQKTVIPILPSTFYSHTEKPGVFYQQVLPHSHPTEEALKISVASEPVDQTTGTPTVTSTSYSQHTEKPSIFYQQSLPGSHLTEEAKNVSAVPGPGDRKTGIPTLPSTFYSHTEKPGSFYQQVLPHSHLPEEALEVSVAPGPVDQTIGTPTVTSPSSSFGEKPIVIYKQAFPEGHLPEESLKVSVAPGPVGQTTGAPTITSPSYSQHRAKSGSFYQLALLGSQIPEEALRVSSAPGPADQTTGIPTITSTSYSFGEKPIVNYKQAFPDGHLPEEALKVSIVSGPTEKKTDIPAGPLGSSALGEKPITFYRQALLDSPLNKEVVKVSAAPGPADQKTETLPVHSTSYSNRGKPVIFYQQTLSDSHLPEEALKVPPVPGPDAQKTETPSVSSSLYSYREKPIVFYQQALPDSELTQEALKVSAVPQPADQKTGLSTVTSSFYSHTEKPNISYQQELPDSHLTEEALKVSNVPGPADQKTGVSTVTSTSYSHREKPIVSYQRELPHFTEAGLKILRVPGPADQKTGINILPSNSYPQREHSVISYEQELPDLTEVTLKAIGVPGPADQKTGIQIASSSSYSNREKASIFHQQELPDVTEEALNVFVVPGQGDRKTEIPTVPLSYYSRREKPSVISQQELPDSHLTEEALKVSPVSIPAEQKTGIPIGLSSSYSHSHKEKLKISTVHIPDDQKTEFPAATLSSYSQIEKPKISTVIGPNDQKTPSQTAFHSSYSQTVKPNILFQQQLPDRDQSKGILKISAVPELTDVNTGKPVSLSSSYFHREKSNIFSPQELPGSHVTEDVLKVSTIPGPAGQKTVLPTALPSSFSHREKPDIFYQKDLPDRHLTEDALKISSALGQADQITGLQTVPSGTYSHGENHKLVSEHVQRLIDNLNSSDSSVSSNNVLLNSQADDRVVINKPESAGFRDVGSEEIQDAENSAKTLKEIRTLLMEAENMALKRCNFPAPLARFRDISDISFIQSKKVVCFKEPSSTGVSNGDLLHRQPFTEESPSSRCIQKDIGTQTNLKCRRGIENWEFISSTTVRSPLQEAESKVSMALEETLRQYQAAKSVMRSEPEGCSGTIGNKIIIPMMTVIKSDSSSDASDGNGSCSWDSNLPESLESVSDVLLNFFPYVSPKTSITDSREEEGVSESEDGGGSSVDSLAAHVKNLLQCESSLNHAKEILRNAEEEESRVRAHAWNMKFNLAHDCGYSISELNEDDRRKVEEIKAELFGHGRTTDLSKGLQSPRGMGCKPEAVCSHIIIESHEKGCFRTLTSEHPQLDRHPCAFRSAGPSEMTRGRQNPSSCRAKHVNLSASLDQNNSHFKVWNSLQLKSHSPFQNFIPDEFKISKGLRMPFDEKMDPWLSELVEPAFVPPKEVDFHSSSQMPSPEPMKKFTTSITFSSHRHSKCISNSSVVKVGVTEGSQCTGASVGVFNSHFTEEQNPPRDLKQKTSSPSSFKMHSNSQDKEVTILAEGRRQSQKLPVDFERSFQEEKPLERSDFTGSHSEPSTRANCSNFKEIQISDNHTLISMGRPSSTLGVNRSSSRLGVKEKNVTITPDLPSCIFLEQRELFEQSKAPRADDHVRKHHSPSPQHQDYVAPDLPSCIFLEQRELFEQCKAPYVDHQMRENHSPLPQGQDSIASDLPSPISLEQCQSKAPGVDDQMNKHHFPLPQGQDCVVEKNNQHKPKSHISNINVEAKFNTVVSQSAPNHCTLAASASTPPSNRKALSCVHITLCPKTSSKLDSGTLDERFHSLDAASKARMNSEFNFDLHTVSSRSLEPTSKLLTSKPVAQDQESLGFLGPKSSLDFQVVQPSLPDSNTITQDLKTIPSQNSQIVTSRQIQVNISDFEGHSNPEGTPVFADRLPEKMKTPLSAFSEKLSSDAVTQITTESPEKTLFSSEIFINAEDRGHEIIEPGNQKLRKAPVKFASSSSVQQVTFSRGTDGQPLLLPYKPSGSTKMYYVPQLRQIPPSPDSKSDTTVESSHSGSNDAIAPDFPAQVLGTRDDDLSATVNIKHKEGIYSKRVVTKASLPVGEKPLQNENADASVQVLITGDENLSDKKQQEIHSTRAVTEAAQAKEKESLQKDTADSSAAAAAEHSAQVGDPEMKNLPDTKAITQKEEIHRKKTVPEEAWPNNKESLQINIEESECHSEFENTTRSVFRSAKFYIHHPVHLPSDQDICHESLGKSVFMRHSWKDFFQHHPDKHREHMCLPLPYQNMDKTKTDYTRIKSLSINVNLGNKEVMDTTKSQVRDYPKHNGQISDPQRDQKVTPEQTTQHTVSLNELWNKYRERQRQQRQPELGDRKELSLVDRLDRLAKILQNPITHSLQVSESTHDDSRGERSVKEWSGRQQQRNKLQKKKRFKSLEKSHKNTGELKKSKVLSHHRAGRSNQIKIEQIKFDKYILSKQPGFNYISNTSSDCRPSEESELLTDTTTNILSGTTSTVESDILTQTDREVALHERSSSVSTIDTARLIQAFGHERVCLSPRRIKLYSSITNQQRRYLEKRSKHSKKVLNTGHPLVTSEHTRRRHIQVANHVISSDSISSSASSFLSSNSTFCNKQNVHMLNKGIQAGNLEIVNGAKKHTRDVGITFPTPSSSEAKLEENSDVTSWSEEKREEKMLFTGYPEDRKLKKNKKNSHEGVSWFVPVENVESRSKKENVPNTCGPGISWFEPITKTRPWREPLREQNCQGQHLDGRGYLAGPGREAGRDLLRPFVRATLQESLQFHRPDFISRSGERIKRLKLIVQERKLQSMLQTERDALFNIDRERQGHQNRMCPLPKRVFLAIQKNKPISKKEMIQRSKRD

SEQ ID NO: 25966 - protein, 3860 aa, Homo sapiens
MEPEDLPWPGELEEEEEEEEEEEEEEEEAAAAAAANVDDVVVVEEVEEEAGRELDSDSHYGPQHLESIDDEEDEEAKAWLQAHPGRILPPLSPPQHRYSEGERTSLEKIVPLTCHVWQQIVYQGNSRTQISDTNVVCLETTAQRGSGDDQKTESWHCLPQEMDSSQTLDTSQTRFNVRTEDTEVTDFPSLEEGILTQSENQVKEPNRDLFCSPLLVIQDSFASPDLPLLTCLTQDQEFAPDSLFHQSELSFAPLRGIPDKSEDTEWSSRPSEVSEALFQATAEVASDLASSRFSVSQHPLIGSTAVGSQCPFLPSEQGNNEETISSVDELKIPKDCDRYDDLCSYMSWKTRKDTQWPENNLADKDQVSVATSFDITDENIATKRSDHFDAARSYGQYWTQEDSSKQAETYLTKGLQGKVESDVITLDGLNENAVVCSERVAELQRKPTRESEYHSSDLRMLRMSPDTVPKAPKHLKAGDTSKGGIAKVTQSNLKSGITTTPVDSDIGSHLSLSLEDLSQLAVSSPLETTTGQHTDTLNQKTLADTHLTEETLKVTAIPEPADQKTATPTVLSSSHSHRGKPSIFYQQGLPDSHLTEEALKVSAAPGLADQTTGMSTLTSTSYSHREKPGTFYQQELPESNLTEEPLEVSAAPGPVEQKTGIPTVSSTSHSHVEDLLFFYRQTLPDGHLTDQALKVSAVSGPADQKTGTATVLSTPHSHREKPGIFYQQEFADSHQTEETLTKVSATPGPADQKTEIPAVQSSSYSQREKPSILYPQDLADSHLPEEGLKVSAVAGPADQKTGLPTVPSSAYSHREKLLVFYQQALLDSHLPEEALKVSAVSGPADGKTGTPAVTSTSSASSSLGEKPSAFYQQTLPNSHLTEEALKVSIVPGPGDQKTGIPSAPSSFYSHREKPIIFSQQTLPDFLFPEEALKVSAVSVLAAQKTGTPTVSSNSHSHSEKSSVFYQQELPDSDLPRESLKMSAIPGLTDQKTVPTPTVPSGSFSHREKPSIFYQQEWPDSYATEKALKVSTGPGPADQKTEIPAVQSSSYPQREKPSVLYPQVLSDSHLPEESLKVSAFPGPADQMTDTPAVPSTFYSQREKPGIFYQQTLPESHLPKEALKISVAPGLADQKTGTPTVTSTSYSQHREKPSIFHQQALPGTHIPEEAQKVSAVTGPGNQKTWIPRVLSTFYSQREKPGIFYQQTLPGSHIPEEAQKVSPVLGPADQKTGTPTPTSASYSHTEKPGIFYQQVLPDNHPTEEALKISVASEPVDQTTGTPAVTSTSYSQYREKPSIFYQQSLPSSHLTEEAKNVSAVPGPADQKTVIPILPSTFYSHTEKPGVFYQQVLPHSHPTEEALKISVASEPVDQTTGTPTVTSTSYSQHTEKPSIFYQQSLPGSHLTEEAKNVSAVPGPGDRKTGIPTLPSTFYSHTEKPGSFYQQVLPHSHLPEEALEVSVAPGPVDQTIGTPTVTSPSSSFGEKPIVIYKQAFPEGHLPEESLKVSVAPGPVGQTTGAPTITSPSYSQHRAKSGSFYQLALLGSQIPEEALRVSSAPGPADQTTGIPTITSTSYSFGEKPIVNYKQAFPDGHLPEEALKVSIVSGPTEKKTDIPAGPLGSSALGEKPITFYRQALLDSPLNKEVVKVSAAPGPADQKTETLPVHSTSYSNRGKPVIFYQQTLSDSHLPEEALKVPPVPGPDAQKTETPSVSSSLYSYREKPIVFYQQALPDSELTQEALKVSAVPQPADQKTGLSTVTSSFYSHTEKPNISYQQELPDSHLTEEALKVSNVPGPADQKTGVSTVTSTSYSHREKPIVSYQRELPHFTEAGLKILRVPGPADQKTGINILPSNSYPQREHSVISYEQELPDLTEVTLKAIGVPGPADQKTGIQIASSSSYSNREKASIFHQQELPDVTEEALNVFVVPGQGDRKTEIPTVPLSYYSRREKPSVISQQELPDSHLTEEALKVSPVSIPAEQKTGIPIGLSSSYSHSHKEKLKISTVHIPDDQKTEFPAATLSSYSQIEKPKISTVIGPNDQKTPSQTAFHSSYSQTVKPNILFQQQLPDRDQSKGILKISAVPELTDVNTGKPVSLSSSYFHREKSNIFSPQELPGSHVTEDVLKVSTIPGPAGQKTVLPTALPSSFSHREKPDIFYQKDLPDRHLTEDALKISSALGQADQITGLQTVPSGTYSHGENHKLVSEHVQRLIDNLNSSDSSVSSNNVLLNSQADDRVVINKPESAGFRDVGSEEIQDAENSAKTLKEIRTLLMEAENMALKRCNFPAPLARFRDISDISFIQSKKVVCFKEPSSTGVSNGDLLHRQPFTEESPSSRCIQKDIGTQTNLKCRRGIENWEFISSTTVRSPLQEAESKVSMALEETLRQYQAAKSVMRSEPEGCSGTIGNKIIIPMMTVIKSDSSSDASDGNGSCSWDSNLPESLESVSDVLLNFFPYVSPKTSITDSREEEGVSESEDGGGSSVDSLAAHVKNLLQCESSLNHAKEILRNAEEEESRVRAHAWNMKFNLAHDCGYSISELNEDDRRKVEEIKAELFGHGRTTDLSKGLQSPRGMGCKPEAVCSHIIIESHEKGCFRTLTSEHPQLDRHPCAFRSAGPSEMTRGRQNPSSCRAKHVNLSASLDQNNSHFKVWNSLQLKSHSPFQNFIPDEFKISKGLRMPFDEKMDPWLSELVEPAFVPPKEVDFHSSSQMPSPEPMKKFTTSITFSSHRHSKCISNSSVVKVGVTEGSQCTGASVGVFNSHFTEEQNPPRDLKQKTSSPSSFKMHSNSQDKEVTILAEGRRQSQKLPVDFERSFQEEKPLERSDFTGSHSEPSTRANCSNFKEIQISDNHTLISMGRPSSTLGVNRSSSRLGVKEKNVTITPDLPSCIFLEQRELFEQSKAPRADDHVRKHHSPSPQHQDYVAPDLPSCIFLEQRELFEQCKAPYVDHQMRENHSPLPQGQDSIASDLPSPISLEQCQSKAPGVDDQMNKHHFPLPQGQDCVVEKNNQHKPKSHISNINVEAKFNTVVSQSAPNHCTLAASASTPPSNRKALSCVHITLCPKTSSKLDSGTLDERFHSLDAASKARMNSEFNFDLHTVSSRSLEPTSKLLTSKPVAQDQESLGFLGPKSSLDFQVVQPSLPDSNTITQDLKTIPSQNSQIVTSRQIQVNISDFEGHSNPEGTPVFADRLPEKMKTPLSAFSEKLSSDAVTQITTESPEKTLFSSEIFINAEDRGHEIIEPGNQKLRKAPVKFASSSSVQQVTFSRGTDGQPLLLPYKPSGSTKMYYVPQLRQIPPSPDSKSDTTVESSHSGSNDAIAPDFPAQVLGTRDDDLSATVNIKHKEGIYSKRVVTKASLPVGEKPLQNENADASVQVLITGDENLSDKKQQEIHSTRAVTEAAQAKEKESLQKDTADSSAAAAAEHSAQVGDPEMKNLPDTKAITQKEEIHRKKTVPEEAWPNNKESLQINIEESECHSEFENTTRSVFRSAKFYIHHPVHLPSDQDICHESLGKSVFMRHSWKDFFQHHPDKHREHMCLPLPYQNMDKTKTDYTRIKSLSINVNLGNKEVMDTTKSQVRDYPKHNGQISDPQRDQKVTPEQTTQHTVSLNELWNKYRERQRQQRQPELGDRKELSLVDRLDRLAKILQNPITHSLQVSESTHDDSRGERSVKEWSGRQQQRNKLQKKKRFKSLEKSHKNTGELKKSKVLSHHRAGRSNQIKIEQIKFDKYILSKQPGFNYISNTSSDCRPSEESELLTDTTTNILSGTTSTVESDILTQTDREVALHERSSSVSTIDTARLIQAFGHERVCLSPRRIKLYSSITNQQRRYLEKRSKHSKKVLNTGHPLVTSEHTRRRHIQVHGYRFHLAMD

SEQ ID NO: 25967 - protein, 102 aa, Homo sapiens
MALLKANKDLISAGLKEFSVLLNQQVFNDPLVSEEDMVTVVEDWMNFYINYYRQQVTGEPQERDKALQELRQELNTLANPFLAKYRDFLKSHELPSHPPPSS

SEQ ID NO: 25968 - protein, 549 aa, Homo sapiens
MATPRGLGALLLLLLLPTSGQEKPTEGPRNTCLGSNNMYDIFNLNDKALCFTKCRQSGSDSCNVENLQRYWLNYEAHLMKEGLTQKVNTPFLKALVQNLSTNTAEDFYFSLEPSQVPRQVMKDEDKPPDRVRLPKSLFRSLPGNRSVVRLAVTILDIGPGTLFKGPRLGLGDGSGVLNNRLVGLSVGQMHVTKLAEPLEIVFSHQRPPPNMTLTCVFWDVTKGTTGDWSSEGCSTEVRPEGTVCCCDHLTFFALLLRPTLDQSTVHILTRISQAGCGVSMIFLAFTIILYAFLRLSRERFKSEDAPKIHVALGGSLFLLNLAFLVNVGSGSKGSDAACWARGAVFHYFLLCAFTWMGLEAFHLYLLAVRVFNTYFGHYFLKLSLVGWGLPALMVIGTGSANSYGLYTIRDRENRTSLELCWFREGTTMYALYITVHGYFLITFLFGMVVLALVVWKIFTLSRATAVKERGKNRKKVLTLLGLSSLVGVTWGLAIFTPLGLSTVYIFALFNSLQGVFICCWFTILYLPSQSTTVSSSTARLDQAHSASQE

SEQ ID NO: 25969 - protein, 352 aa, Homo sapiens
MRSLGALLLLLSACLAVSAGPVPTPPDNIQVQENFNISRIYGKWYNLAIGSTCPWLKKIMDRMTVSTLVLGEGATEAEISMTSTRWRKGVCEETSGAYEKTDTDGKFLYHKSKWNITMESYVVHTNYDEYAIFLTKKFSRHHGPTITAKLYGRAPQLRETLLQDFRVVAQGVGIPEDSIFTMADRGECVPGEQEPEPILIPRVRRAVLPQEEEGSGGGQLVTEVTKKEDSCQLGYSAGPCMGMTSRYFYNGTSMACETFQYGGCMGNGNNFVTEKECLQTCRTVAACNLPIVRGPCRAFIQLWAFDAVKGKCVLFPYGGCQGNGNKFYSEKECREYCGVPGDGDEELLRFSN

SEQ ID NO: 25970 - protein, 690 aa, Homo sapiens
MKRLPLLVVFSTLLNCSYTQNCTKTPCLPNAKCEIRNGIEACYCNMGFSGNGVTICEDDNECGNLTQSCGENANCTNTEGSYYCMCVPGFRSSSNQDRFITNDGTVCIENVNANCHLDNVCIAANINKTLTKIRSIKEPVALLQEVYRNSVTDLSPTDIITYIEILAESSSLLGYKNNTISAKDTLSNSTLTEFVKTVNNFVQRDTFVVWDKLSVNHRRTHLTKLMHTVEQATLRISQSFQKTTEFDTNSTDIALKVFFFDSYNMKHIHPHMNMDGDYINIFPKRKAAYDSNGNVAVAFVYYKSIGPLLSSSDNFLLKPQNYDNSEEEERVISSVISVSMSSNPPTLYELEKITFTLSHRKVTDRYRSLCAFWNYSPDTMNGSWSSEGCELTYSNETHTSCRCNHLTHFAILMSSGPSIGIKDYNILTRITQLGIIISLICLAICIFTFWFFSEIQSTRTTIHKNLCCSLFLAELVFLVGINTNTNKLFCSIIAGLLHYFFLAAFAWMCIEGIHLYLIVVGVIYNKGFLHKNFYIFGYLSPAVVVGFSAALGYRYYGTTKVCWLSTENNFIWSFIGPACLIILVNLLAFGVIIYKVFRHTAGLKPEVSCFENIRSCARGALALLFLLGTTWIFGVLHVVHASVVTAYLFTVSNAFQGMFIFLFLCVLSRKIQEEYYRLFKNVPCCFGCLR

SEQ ID NO: 25971 - protein, 1907 aa, Homo sapiens
MEVAWLVYVLGQQPLARQGEGQSRLVPGRGLVLWLPGLPRSSPSWPAVDLAPLAPARPRGPLICHTGHEQAGREPGPGSSTKGPVLHDQDTRCAFLPRPPGPLQTRRYCRHQGRQGSGLGAGPGAGTWAPAPPGVSKPRCPGRARPGEGQQQVTTARPPAINRGARQPRAGAAAAGRGPGAGAWRTGEAAASAGPAVGEGGAMGSRRAPSRGWGAGGRSGAGGDGEDDGPVWIPSPASRSYLLSVRPETSLSSNRLSHPSSGRSTFCSIIAQLTEETQPLFETTLKSRSVSEDSDVRFTCIVTGYPEPEVTWYKDDTELDRYCGLPKYEITHQGNRHTLQLYRCREEDAAIYQASAQNSKGIVSCSGVLEVGTMTEYKIHQRWFAKLKRKAAAKLREIEQSWKHEKAVPGEVDTLRKLSPDRFQRKRRLSGAQAPGPSVPTREPEGGTLAAWQEGETETAQHSGLGLINSFASGEVTTNGEAAPENGEDGEHGLLTYICDAMELGPQRALKEESGAKKKKKDEESKQGLRKPELEKAAQSRRSSENCIPSSDEPDSCGTQGPVGVEQVQTQPRGRAARGPGSSGTDSTRKPASAVGTPDKAQKAPGPGPGQEVYFSLKDMYLENTQAVRPLGEEGPQTLSVRAPGESPKGKAPLRARSEGVPGAPGQPTHSLTPQPTRPFNRKRFAPPKPKGEATTDSKPISSLSQAPECGAQSLGKAPPQASVQVPTPPARRRHGTRDSTLQGQAGHRTPGEVLECQTTTAPTMSASSSSDVASIGVSTSGSQGIIEPMDMETQEDGRTSANQRTGSKKNVQADGKIQVDGRTRGDGTQTAQRTRADRKTQVDAGTQESKRPQSDRSAQKGMMTQGRAETQLETTQAGEKIQEDRKAQADKGTQEDRRMQGEKGMQGEKGTQSEGSAPTAMEGQSEQEVATSLGPPSRTPKLPPTAGPRAPLNIECFVQTPEGSCFPKKPGCLPRSEEAVVTASRNHEQTVLGPLSGNLMLPAQPPHEGSVEQVGGERCRGPQSSGPVEAKQEDSPFQCPKEERPGGVPCMDQGGCPLAGLSQEVPTMPSLPGTGLTASPKAGPCSTPTSQHGSTATFLPSEDQVLMSSAPTLHLGLGTPTQSHPPETMATSSEGACAQVPDVEGRTPGPRSCDPGLIDSLKNYLLLLLKLSSTETSGAGGESQVGAATGGLVPSATLTPTVEVAGLSPRTSRRILERVENNHLVQSAQTLLLSPCTSRRLTGLLDREVQAGRQALAAARGSWGPGPSSLTVPAIVVDEEDPGLASEGASEGEGEVSPEGPGLLGASQESSMAGRLGEAGGQAAPGQGPSAESIAQEPSQEEKFPGEALTGLPAATPEELALGARRKRFLPKVRAAGDGEATTPEERESPTVSPRGPRKSLVPGSPGTPGRERRSPTQGRKASMLEVPRAEEELAAGDLGPSPKAGGLDTEVALDEGKQETLAKPRKAKDLLKAPQVIRKIRVEQFPDASGSLKLWCQFFNILSDSVLTWAKDQRPVGEVGRSAGDEGPAALAIVQASPVDCGVYRCTIHNEHGSASTDFCLSPEVLSGFISREEGEVGEEIEMTPMVFAKGLADSGCWGDKLFGRLVSEELRGGGYGCGLRKASQAKVIYGLEPIFESGRTCIIKVSSLLVFGPSSETSLVGRNYDVTIQGCKIQNMSREYCKIFAAEARAAPGFGEVPEIIPLYLIYRPANNIPYATLEEDLGKPLESYCSREWGCAEAPTASGSSEAMQKCQTFQHWLYQWTNGSFLVTDLAGVDWKMTDVQIATKLRGYQGLKESCFPALLDRFASSHQCNAYCELLGLTPLKGPEAAHPQAKAKGSKSPSAGRKGSQLSPQPQKKGLPSPQGTRKSAPSSKATPQASEPVTTQLLGQPPTQEEGSKAQGMR

SEQ ID NO: 25972 - protein, 923 aa, Homo sapiens
MLRRGSQALRRFSTGRVYFKNKLKLALIGQSLFGQEVYSHLRKEGHRVVGVFTVPDKDGKADPLALAAEKDGTPVFKLPKWRVKGKTIKEVAEAYRSVGAELNVLPFCTQFIPMDIIDSPKHGSIIYHPSILPRHRGASAINWTLIMGDKKAGFSVFWADDGLDTGPILLQRSCDVEPNDTVDALYNRFLFPEGIKAMVEAVQLIADGKAPRIPQPEEGATYEGIQKKENAEISWDQSAEVLHNWIRGHDKVPGAWTEINGQMVTFYGSTLLNSSVPPGEPLEIKGAKKPGLVTKNGLVLFGNDGKALTVRNLQFEDGKMIPASQYFSTGETSVVELTAEEVKVAETIKVIWAGILSNVPIIEDSTDFFKSGASSMDVARLVEEIRQKCGGLQLQNEDVYMATKFEGFIQKVVRKLRGEDQEVELVVDYISKEVNEIMVKMPYQCFINGQFTDADDGKTYDTINPTDGSTICKVSYASLADVDKAVAAAKDAFENGEWGRMNARERGRLMYRLADLLEENQEELATIEALDSGAVYTLALKTHIGMSVQTFRYFAGWCDKIQGSTIPINQARPNRNLTFTKKEPLGVCAIIIPWNYPLMMLAWKSAACLAAGNTLVLKPAQVTPLTALKFAELSVKAGFPKGVINIIPGSGGIAGQRLSEHPDIRKLGFTGSTPIGKQIMKSCAVSNLKKVSLELGGKSPLIIFNDCELDKAVRMGMGAVFFNKGENCIAAGRLFVEESIHDEFVTRVVEEIKKMKIGDPLDRSTDHGPQNHKAHLEKLLQYCETGVKEGATLVYGGRQVQRPGFFMEPTVFTDVEDYMYLAKEESFGPIMVISKFQNGDIDGVLQRANSTEYGLASGVFTRDINKAMYVSEKLEAGTVFINTYNKTDVAAPFGGVKQSGFGKDLGEEALNEYLKTKTVTLEY

SEQ ID NO: 25973 - protein, 203 aa, Homo sapiens
MLRRGSQALRRFSTGRVYFKNKLKLALIGQSLFGQEVYSHLRKEGHRVVGVFTVPDKDGKADPLALAAEKDGTPVFKLPKWRVKGKTIKEVAEAYRSVGAELNVLPFCTQFIPMDIIDSPKHGSIIYHPSILPRHRGASAINWTLIMGDKKAGFSVFWADDGLDTGPILLQRSCDVEPNDTVDALYNRFLFPEGIKAMKLSNS

SEQ ID NO: 25974 - protein, 516 aa, Homo sapiens
MLRRGSQALRRFSTGRVYFKNKLKLALIGQSLFGQEVYSHLRKEGHRVVGVFTVPDKDGKADPLALAAEKDGTPVFKLPKWRVKGKTIKEVAEAYRSVGAELNVLPFCTQFIPMDIIDSPKHGSIIYHPSILPRHRGASAINWTLIMGDKKAGFSVFWADDGLDTGPILLQRSCDVEPNDTVDALYNRFLFPEGIKAMVEAVQLIADGKAPRIPQPEEGATYEGIQKKENAEISWDQSAEVLHNWIRGHDKVPGAWTEINGQMVTFYGSTLLNSSVPPGEPLEIKGAKKPGLVTKNGLVLFGNDGKALTVRNLQFEDGKMIPASQYFSTGETSVVELTAEEVKVAETIKVIWAGILSNVPIIEDSTDFFKSGASSMDVARLVEEIRQKCGGLQLQNEDVYMATKFEGFIQKVVRKLRGEDQEVELVVDYISKEVNEIMVKMPYQCFINGQFTDADDGKTYDTINPTDGSTICKVSYASLADVDKAVAAAKDAFENGEWGRMNARERGRLMYSMRMN

SEQ ID NO: 25975 - protein, 312 aa, Homo sapiens
MANNDAVLKRLEQKGAEADQIIEYLKQQVSLLKEKAILQATLREEKKLRVENAKLKKEIEELKQELIQAEIQNGVKQIPFPSGTPLHANSMVSENVIQSTAVTTVSSGTKEQIKGGTGDEKKAKEKIEKKGEKKEKKQQSIAGSADSKPIDVSRLDLRIGCIITARKHPDADSLYVEEVDVGEIAPRTVVSGLVNHVPLEQMQNRMVILLCNLKPAKMRGVLSQAMVMCASSPEKIEILAPPNGSVPGDRITFDAFPGEPDKELNPKKKIWEQIQPDLHTNDECVATYKGVPFEVKGKGVCRAQTMSNSGIK

SEQ ID NO: 25976 - protein, 336 aa, Homo sapiens
MLPAVAVSEPVVLRFMIFCRLLAKMANNDAVLKRLEQKGAEADQIIEYLKQQVSLLKEKAILQATLREEKKLRVENAKLKKEIEELKQELIQAEIQNGVKQIPFPSGTPLHANSMVSENVIQSTAVTTVSSGTKEQIKGGTGDEKKAKEKIEKKGEKKEKKQQSIAGSADSKPIDVSRLDLRIGCIITARKHPDADSLYVEEVDVGEIAPRTVVSGLVNHVPLEQMQNRMVILLCNLKPAKMRGVLSQAMVMCASSPEKIEILAPPNGSVPGDRITFDAFPGEPDKELNPKKKIWEQIQPDLHTNDECVATYKGVPFEVKGKGVCRAQTMSNSGIK

SEQ ID NO: 25977 - protein, 955 aa, Homo sapiens
MPGGAGAARLCLLAFALQPLRPRAAREPGWTRGSEEGSPKLQHELIIPQWKTSESPVREKHPLKAELRVMAEGRELILDLEKNEQLFAPSYTETHYTSSGNPQTTTRKLEDHCFYHGTVRETELSSVTLSTCRGIRGLITVSSNLSYVIEPLPDSKGQHLIYRSEHLKPPPGNCGFEHSKPTTRDWALQFTQQTKKRPRRMKREDLNSMKYVELYLVADYLEFQKNRRDQDATKHKLIEIANYVDKFYRSLNIRIALVGLEVWTHGNMCEVSENPYSTLWSFLSWRRKLLAQKYHDNAQLITGMSFHGTTIGLAPLMAMCSVYQSGGVNMDHSENAIGVAATMAHEMGHNFGMTHDSADCCSASAADGGCIMAAATGHPFPKVFNGCNRRELDRYLQSGGGMCLSNMPDTRMLYGGRRCGNGYLEDGEECDCGEEEECNNPCCNASNCTLRPGAECAHGSCCHQCKLLAPGTLCREQARQCDLPEFCTGKSPHCPTNFYQMDGTPCEGGQAYCYNGMCLTYQEQCQQLWGPGARPAPDLCFEKVNVAGDTFGNCGKDMNGEHRKCNMRDAKCGKIQCQSSEARPLESNAVPIDTTIIMNGRQIQCRGTHVYRGPEEEGDMLDPGLVMTGTKCGYNHICFEGQCRNTSFFETEGCGKKCNGHGVCNNNQNCHCLPGWAPPFCNTPGHGGSIDSGPMPPESVGPVVAGVLVAILVLAVLMLMYYCCRQNNKLGQLKPSALPSKLRQQFSCPFRVSQNSGTGHANPTFKLQTPQGKRKVINTPEILRKPSQPPPRPPPDYLRGGSPPAPLPAHLSRAARNSPGPGSQIERTESSRRPPPSRPIPPAPNCIVSQDFSRPRPPQKALPANPVPGRRSLPRPGGASPLRPPGAGPQQSRPLAALAPKVSPREALKVKAGTRGLQGGRCRVEKTKQFMLLVVWTELPEQKPRAKHSCFLVPA

SEQ ID NO: 25978 - protein, 918 aa, Homo sapiens
MPGGAGAARLCLLAFALQPLRPRAAREPGWTRGSEEGSPKLQHELIIPQWKTSESPVREKHPLKAELRVMAEGRELILDLEKNEQLFAPSYTETHYTSSGNPQTTTRKLEDHCFYHGTVRETELSSVTLSTCRGIRGLITVSSNLSYVIEPLPDSKGQHLIYRSEHLKPPPGNCGFEHSKPTTRDWALQFTQQTKKRPRRMKREDLNSMKYVELYLVADYLEFQKNRRDQDATKHKLIEIANYVDKFYRSLNIRIALVGLEVWTHGNMCEVSENPYSTLWSFLSWRRKLLAQKYHDNAQLITGMSFHGTTIGLAPLMAMCSVYQSGGVNMDHSENAIGVAATMAHEMGHNFGMTHDSADCCSASAADGGCIMAAATGHPFPKVFNGCNRRELDRYLQSGGGMCLSNMPDTRMLYGGRRCGNGYLEDGEECDCGEEEECNNPCCNASNCTLRPGAECAHGSCCHQCKLLAPGTLCREQARQCDLPEFCTGKSPHCPTNFYQMDGTPCEGGQAYCYNGMCLTYQEQCQQLWGPGARPAPDLCFEKVNVAGDTFGNCGKDMNGEHRKCNMRDAKCGKIQCQSSEARPLESNAVPIDTTIIMNGRQIQCRGTHVYRGPEEEGDMLDPGLVMTGTKCGYNHICFEGQCRNTSFFETEGCGKKCNGHGVCNNNQNCHCLPGWAPPFCNTPGHGGSIDSGPMPPESVGPVVAGVLVAILVLAVLMLMYYCCRQNNKLGQLKPSALPSKLRQQFSCPFRVSQNSGTGHANPTFKLQTPQGKRKVINTPEILRKPSQPPPRPPPDYLRGGSPPAPLPAHLSRAARNSPGPGSQIERTESSRRPPPSRPIPPAPNCIVSQDFSRPRPPQKALPANPVPGRRSLPRPGGASPLRPPGAGPQQSRPLAALAPKFPEYRSQRAGGMISSKI

SEQ ID NO: 25979 - protein, 572 aa, Homo sapiens
MTFRDLLSVSFEGPRPDSSAGGSSAGGGGGSAGGAAPSEGPAVGGVPGGAGGGGGVVGAGSGEDNRSSAGEPGSAGAGGDVNGTAAVGGLVVSAQGVGVGVFLAAFILMAVAGNLLVILSVACNRHLQTVTNYFIVNLAVADLLLSATVLPFSATMEVLGFWAFGRAFCDVWAAVDVLCCTASILSLCTISVDRYVGVRHSLKYPAIMTERKAAAILALLWVVALVVSVGPLLGWKEPVPPDERFCGITEEAGYAVFSSVCSFYLPMAVIVVMYCRVYVVARSTTRSLEAGVKRERGKASEVVLRIHCRGAATGADGAHGMRSAKGHTFRSSLSVRLLKFSREKKAAKTLAIVVGVFVLCWFPFFFVLPLGSLFPQLKPSEGVFKVIFWLGYFNSCVNPLIYPCSSREFKRAFLRLLRCQCRRRRRRRPLWRVYGHHWRASTSGLRQDCAPSSGDAPPGAPLALTALPDPDPEPPGTPEMQAPVASRRKPPSAFREWRLLGPFRRPTTQLRAKVSSLSHKIRAGGAQRAEAACAQRSEVEAVSLGVPHEVAEGATCQAYELADYSNLRETDI

SEQ ID NO: 25980 - protein, 465 aa, Homo sapiens
MFRQEQPLAEGSFAPMGSLQPDAGNASWNGTEAPGGGARATPYSLQVTLTLVCLAGLLMLLTVFGNVLVIIAVFTSRALKAPQNLFLVSLASADILVATLVIPFSLANEVMGYWYFGKAWCEIYLALDVLFCTSSIVHLCAISLDRYWSITQAIEYNLKRTPRRIKAIIITVWVISAVISFPPLISIEKKGGGGGPQPAEPRCEINDQKWYVISSCIGSFFAPCLIMILVYVRIYQIAKRRTRVPPSRRGPDAVAAPPGGTERRPNGLGPERSAGPGGAEAEPLPTQLNGAPGEPAPAGPRDTDALDLEESSSSDHAERPPGPRRPERGPRGKGKARASQVKPGDSLPRRGPGATGIGTPAAGPGEERVGAAKASRWRGRQNREKRFTFVLAVVIGVFVVCWFPFFFTYTLTAVGCSVPRTLFKFFFWFGYCNSSLNPVIYTIFNHDFRRAFKKILCRGDRKRIV

SEQ ID NO: 25981 - protein, 238 aa, Homo sapiens
MEEQDARVPALEPFRVEQAPPVIYYVPDFISKEEEEYLLRQVFNAPKPKWTQLSGRKLQNWGGLPHPRGMVPERLPPWLQRYVDKVSNLSLFGGLPANHVLVNQYLPGEGIMPHEDGPLYYPTVSTISLGSHTVLDFYEPRRPEDDDPTEQPRPPPRPTTSLLLEPRSLLVLRGPAYTRLLHGIAAARVDALDAASSPPNAAACPSARPGACLVRGTRVSLTIRRVPRVLRAGLLLGK

SEQ ID NO: 25982 - protein, 266 aa, Homo sapiens
MAGRGMGMLNLEIGGDAGGRIGCKELVLMEEQDARVPALEPFRVEQAPPVIYYVPDFISKEEEEYLLRQVFNAPKPKWTQLSGRKLQNWGGLPHPRGMVPERLPPWLQRYVDKVSNLSLFGGLPANHVLVNQYLPGEGIMPHEDGPLYYPTVSTISLGSHTVLDFYEPRRPEDDDPTEQPRPPPRPTTSLLLEPRSLLVLRGPAYTRLLHGIAAARVDALDAASSPPNAAACPSARPGACLVRGTRVSLTIRRVPRVLRAGLLLGK

SEQ ID NO: 25983 - protein, 140 aa, Homo sapiens
MAGRGMGMLNLEIGGDAGGRIGCKELVLMEEQDARVPALEPFRVEQAPPVIYYVPDFISKEEEEYLLRQVFNAPKPKWTQLSGRKLQNWGGPSGPHCLPQVGFLIPEGWFLSGCPHGSSATWTKCQTSASLEASQLTMSS

SEQ ID NO: 25984 - protein, 319 aa, Homo sapiens
MCSLPVPREPLRRVAVTGGTHGNEMSGVYLARHWLHAPAELQRASFSAVPVLANPAATSGCRRYVDHDLNRTFTSSFLNSRPTPDDPYEVTRARELNQLLGPKASGQAFDFVLDLHNTTANMGTCLIAKSSHEVFAMHLCRHLQLQYPELSCQVFLYQRSGEESYNLDSVAKNGLGLELGPQPQGVLRADIFSRMRTLVATVLDFIELFNQGTAFPAFEMEAYRPVGVVDFPRTEAGHLAGTVHPQLQDRDFQPLQPGAPIFQMFSGEDLLYEGESTVYPVFINEAAYYEKGVAFVQTEKFTFTVPAMPALTPAPSPAS

SEQ ID NO: 25985 - protein, 599 aa, Homo sapiens
MKLLKLTGFIFFLFFLTESLTLPTQPRDIENFNSTQKFIEDNIEYITIIAFAQYVQEATFEEMEKLVKDMVEYKDRCMADKTLPECSKLPNNVLQEKICAMEGLPQKHNFSHCCSKVDAQRRLCFFYNKKSDVGFLPPFPTLDPEEKCQAYESNRESLLNHFLYEVARRNPFVFAPTLLTVAVHFEEVAKSCCEEQNKVNCLQTRAIPVTQYLKAFSSYQKHVCGALLKFGTKVVHFIYIAILSQKFPKIEFKELISLVEDVSSNYDGCCEGDVVQCIRDTSKVMNHICSKQDSISSKIKECCEKKIPERGQCIINSNKDDRPKDLSLREGKFTDSENVCQERDADPDTFFAKFTFEYSRRHPDLSIPELLRIVQIYKDLLRNCCNTENPPGCYRYAEDKFNETTEKSLKMVQQECKHFQNLGKDGLKYHYLIRLTKIAPQLSTEELVSLGEKMVTAFTTCCTLSEEFACVDNLADLVFGELCGVNENRTINPAVDHCCKTNFAFRRPCFESLKADKTYVPPPFSQDLFTFHADMCQSQNEELQRKTDRFLVNLVKLKHELTDEELQSLFTNFANVVDKCCKAESPEVCFNEESPKIGN

SEQ ID NO: 25986 - protein, 860 aa, Homo sapiens
MEIGSAGPAGAQPLLMVPRRPGYGTMGKPIKLLANCFQVEIPKIDVYLYEVDIKPDKCPRRVNREVVDSMVQHFKVTIFGDRRPVYDGKRSLYTANPLPVATTGVDLDVTLPGEGGKDRPFKVSIKFVSRVSWHLLHEVLTGRTLPEPLELDKPISTNPVHAVDVVLRHLPSMKYTPVGRSFFSAPEGYDHPLGGGREVWFGFHQSVRPAMWKMMLNIDVSATAFYKAQPVIQFMCEVLDIHNIDEQPRPLTDSHRVKFTKEIKGLKVEVTHCGTMRRKYRVCNVTRRPASHQTFPLQLENGQTVERTVAQYFREKYTLQLKYPHLPCLQVGQEQKHTYLPLEVCNIVAGQRCIKKLTDNQTSTMIKATARSAPDRQEEISRLVRSANYETDPFVQEFQFKVRDEMAHVTGRVLPAPMLQYGGRNRTVATPSHGVWDMRGKQFHTGVEIKMWAIACFATQRQCREEILKGFTDQLRKISKDAGMPIQGQPCFCKYAQGADSVEPMFRHLKNTYSGLQLIIVILPGKTPVYAEVKRVGDTLLGMATQCVQVKNVIKTSPQTLSNLCLKINVKLGGINNILVPHQRPSVFQQPVIFLGADVTHPPAGDGKKPSIAAVVGSMDAHPSRYCATVRVQRPRQEIIQDLASMVRELLIQFYKSTRFKPTRIIFYRDGVSEGQFRQVLYYELLAIREACISLEKDYQPGITYIVVQKRHHTRLFCADRTERVGRSGNIPAGTTVDTDITHPYEFDFYLCSHAGIQGTSRPSHYHVLWDDNCFTADELQLLTYQLCHTYVRCTRSVSIPAPAYYAHLVAFRARYHLVDKEHDSAEGSHVSGQSNGRDPQALAKAVQIHQDTLRTMYFA

SEQ ID NO: 25987 - protein, 626 aa, Homo sapiens
MCEVLDIHNIDEQPRPLTDSHRVKFTKEIKGLKVEVTHCGTMRRKYRVCNVTRRPASHQTFPLQLENGQTVERTVAQYFREKYTLQLKYPHLPCLQVGQEQKHTYLPLEVCNIVAGQRCIKKLTDNQTSTMIKATARSAPDRQEEISRLVRSANYETDPFVQEFQFKVRDEMAHVTGRVLPAPMLQYGGRNRTVATPSHGVWDMRGKQFHTGVEIKMWAIACFATQRQCREEILKGFTDQLRKISKDAGMPIQGQPCFCKYAQGADSVEPMFRHLKNTYSGLQLIIVILPGKTPVYAEVKRVGDTLLGMATQCVQVKNVIKTSPQTLSNLCLKINVKLGGINNILVPHQRPSVFQQPVIFLGADVTHPPAGDGKKPSIAAVVGSMDAHPSRYCATVRVQRPRQEIIQDLASMVRELLIQFYKSTRFKPTRIIFYRDGVSEGQFRQVLYYELLAIREACISLEKDYQPGITYIVVQKRHHTRLFCADRTERVGRSGNIPAGTTVDTDITHPYEFDFYLCSHAGIQGTSRPSHYHVLWDDNCFTADELQLLTYQLCHTYVRCTRSVSIPAPAYYAHLVAFRARYHLVDKEHDSAEGSHVSGQSNGRDPQALAKAVQIHQDTLRTMYFA

SEQ ID NO: 25988 - protein, 375 aa, Homo sapiens
MDDDIAALVVDNGSGMCKAGFAGDDAPRAVFPSIVGRPRHQGVMVGMGQKDSYVGDEAQSKRGILTLKYPIEHGIVTNWDDMEKIWHHTFYNELRVAPEEHPVLLTEAPLNPKANREKMTQIMFETFNTPAMYVAIQAVLSLYASGRTTGIVMDSGDGVTHTVPIYEGYALPHAILRLDLAGRDLTDYLMKILTERGYSFTTTAEREIVRDIKEKLCYVALDFEQEMATAASSSSLEKSYELPDGQVITIGNERFRCPEALFQPSFLGMESCGIHETTFNSIMKCDVDIRKDLYANTVLSGGTTMYPGIADRMQKEITALAPSTMKIKIIAPPERKYSVWIGGSILASLSTFQQMWISKQEYDESGPSIVHRKCF

SEQ ID NO: 25989 - protein, 3907 aa, Homo sapiens
MEDEERQKKLEAGKAKLAQFRQRKAQSDGQSPSKKQKKKRKTSSSKHDVSAHHDLNIDQSQCNEMYINSSQRVESTVIPESTIMRTLHSGEITSHEQGFSVELESEISTTADDCSSEVNGCSFVMRTGKPTNLLREEEFGVDDSYSEQGAQDSPTHLEMMESELAGKQHEIEELNRELEEMRVTYGTEGLQQLQEFEAAIKQRDGIITQLTANLQQARREKDETMREFLELTEQSQKLQIQFQQLQASETLRNSTHSSTAADLLQAKQQILTHQQQLEEQDHLLEDYQKKKEDFTMQISFLQEKIKVYEMEQDKKVENSNKEEIQEKETIIEELNTKIIEEEKKTLELKDKLTTADKLLGELQEQIVQKNQEIKNMKLELTNSKQKERQSSEEIKQLMGTVEELQKRNHKDSQFETDIVQRMEQETQRKLEQLRAELDEMYGQQIVQMKQELIRQHMAQMEEMKTRHKGEMENALRSYSNITVNEDQIKLMNVAINELNIKLQDTNSQKEKLKEELGLILEEKCALQRQLEDLVEELSFSREQIQRARQTIAEQESKLNEAHKSLSTVEDLKAEIVSASESRKELELKHEAEVTNYKIKLEMLEKEKNAVLDRMAESQEAELERLRTQLLFSHEEELSKLKEDLEIEHRINIEKLKDNLGIHYKQQIDGLQNEMSQKIETMQFEKDNLITKQNQLILEISKLKDLQQSLVNSKSEEMTLQINELQKEIEILRQEEKEKGTLEQEVQELQLKTELLEKQMKEKENDLQEKFAQLEAENSILKDEKKTLEDMLKIHTPVSQEERLIFLDSIKSKSKDSVWEKEIEILIEENEDLKQQCIQLNEEIEKQRNTFSFAEKNFEVNYQELQEEYACLLKVKDDLEDSKNKQELEYKSKLKALNEELHLQRINPTTVKMKSSVFDEDKTFVAETLEMGEVVEKDTTELMEKLEVTKREKLELSQRLSDLSEQLKQKHGEISFLNEEVKSLKQEKEQVSLRCRELEIIINHNRAENVQSCDTQVSSLLDGVVTMTSRGAEGSVSKVNKSFGEESKIMVEDKVSFENMTVGEESKQEQLILDHLPSVTKESSLRATQPSENDKLQKELNVLKSEQNDLRLQMEAQRICLSLVYSTHVDQVREYMENEKDKALCSLKEELIFAQEEKIKELQKIHQLELQTMKTQETGDEGKPLHLLIGKLQKAVSEECSYFLQTLCSVLGEYYTPALKCEVNAEDKENSGDYISENEDPELQDYRYEVQDFQENMHTLLNKVTEEYNKLLVLQTRLSKIWGQQTDGMKLEFGEENLPKEETEFLSIHSQMTNLEDIDVNHKSKLSSLQDLEKTKLEEQVQELESLISSLQQQLKETEQNYEAEIHCLQKRLQAVSESTVPPSLPVDSVVITESDAQRTMYPGSCVKKNIDGTIEFSGEFGVKEETNIVKLLEKQYQEQLEEEVAKVIVSMSIAFAQQTELSRISGGKENTASSKQAHAVCQQEQHYFNEMKLSQDQIGFQTFETVDVKFKEEFKPLSKELGEHGKEILLSNSDPHDIPESKDCVLTISEEMFSKDKTFIVRQSIHDEISVSSMDASRQLMLNEEQLEDMRQELVRQYQEHQQATELLRQAHMRQMERQREDQEQLQEEIKRLNRQLAQRSSIDNENLVSERERVLLEELEALKQLSLAGREKLCCELRNSSTQTQNGNENQGEVEEQTFKEKELDRKPEDVPPEILSNERYALQKANNRLLKILLEVVKTTAAVEETIGRHVLGILDRSSKSQSSASLIWRSEAEASVKSCVHEEHTRVTDESIPSYSGSDMPRNDINMWSKVTEEGTELSQRLVRSGFAGTEIDPENEELMLNISSRLQAAVEKLLEAISETSSQLEHAKVTQTELMRESFRQKQEATESLKCQEELRERLHEESRAREQLAVELSKAEGVIDGYADEKTLFERQIQEKTDIIDRLEQELLCASNRLQELEAEQQQIQEERELLSRQKEAMKAEAGPVEQQLLQETEKLMKEKLEVQCQAEKVRDDLQKQVKALEIDVEEQVSRFIELEQEKNTELMDLRQQNQALEKQLEKMRKFLDEQAIDREHERDVFQQEIQKLEQQLKVVPRFQPISEHQTREVEQLANHLKEKTDKCSELLLSKEQLQRDIQERNEEIEKLEFRVRELEQALLVSADTFQKVEDRKHFGAVEAKPELSLEVQLQAERDAIDRKEKEITNLEEQLEQFREELENKNEEVQQLHMQLEIQKKESTTRLQELEQENKLFKDDMEKLGLAIKESDAMSTQDQHVLFGKFAQIIQEKEVEIDQLNEQVTKLQQQLKITTDNKVIEEKNELIRDLETQIECLMSDQECVKRNREEEIEQLNEVIEKLQQELANIGQKTSMNAHSLSEEADSLKHQLDVVIAEKLALEQQVETANEEMTFMKNVLKETNFKMNQLTQELFSLKRERESVEKIQSIPENSVNVAIDHLSKDKPELEVVLTEDALKSLENQTYFKSFEENGKGSIINLETRLLQLESTVSAKDLELTQCYKQIKDMQEQGQFETEMLQKKIVNLQKIVEEKVAAALVSQIQLEAVQEYAKFCQDNQTISSEPERTNIQNLNQLREDELGSDISALTLRISELESQVVEMHTSLILEKEQVEIAEKNVLEKEKKLLELQKLLEGNEKKQREKEKKRSPQDVEVLKTTTELFHSNEESGFFNELEALRAESVATKAELASYKEKAEKLQEELLVKETNMTSLQKDLSQVRDHLAEAKEKLSILEKEDETEVQESKKACMFEPLPIKLSKSIASQTDGTLKISSSNQTPQILVKNAGIQINLQSECSSEEVTEIISQFTEKIEKMQELHAAEILDMESRHISETETLKREHYVAVQLLKEECGTLKAVIQCLRSKEGSSIPELAHSDAYQTREICSSDSGSDWGQGIYLTHSQGFDIASEGRGEESESATDSFPKKIKGLLRAVHNEGMQVLSLTESPYSDGEDHSIQQVSEPWLEERKAYINTISSLKDLITKMQLQREAEVYDSSQSHESFSDWRGELLLALQQVFLEERSVLLAAFRTELTALGTTDAVGLLNCLEQRIQEQGVEYQAAMECLQKADRRSLLSEIQALHAQMNGRKITLKREQESEKPSQELLEYNIQQKQSQMLEMQVELSSMKDRATELQEQLSSEKMVVAELKSELAQTKLELETTLKAQHKHLKELEAFRLEVKDKTDEVHLLNDTLASEQKKSRELQWALEKEKAKLGRSEERDKEELEDLKFSLESQKQRNLQLNLLLEQQKQLLNESQQKIESQRMLYDAQLSEEQGRNLELQVLLESEKVRIREMSSTLDRERELHAQLQSSDGTGQSRPPLPSEDLLKELQKQLEEKHSRIVELLNETEKYKLDSLQTRQQMEKDRQVHRKTLQTEQEANTEGQKKMHELQSKVEDLQRQLEEKRQQVYKLDLEGQRLQGIMQEFQKQELEREEKRESRRILYQNLNEPTTWSLTSDRTRNWVLQQKIEGETKESNYAKLIEMNGGGTGCNHELEMIRQKLQCVASKLQVLPQKASERLQFETADDEDFIWVQENIDEIILQLQKLTGQQGEEPSLVSPSTSCGSLTERLLRQNAELTGHISQLTEEKNDLRNMVMKLEEQIRWYRQTGAGRDNSSRFSLNGGANIEAIIASEKEVWNREKLTLQKSLKRAEAEVYKLKAELRNDSLLQTLSPDSEHVTLKRIYGKYLRAESFRKALIYQKKYLLLLLGGFQECEDATLALLARMGGQPAFTDLEVITNRPKGFTRFRSAVRVSIAISRMKFLVRRWHRVTGSVSININRDGFGLNQGAEKTDSFYHSSGGLELYGEPRHTTYRSRSDLDYIRSPLPFQNRYPGTPADFNPGSLACSQLQNYDPDRALTDYITRLEALQRRLGTIQSGSTTQFHAGMRR

SEQ ID NO: 25990 - protein, 3911 aa, Homo sapiens
MEDEERQKKLEAGKAKIEELSLAFLVRQLAQFRQRKAQSDGQSPSKKQKKKRKTSSSKHDVSAHHDLNIDQSQCNEMYINSSQRVESTVIPESTIMRTLHSGEITSHEQGFSVELESEISTTADDCSSEVNGCSFVMRTGKPTNLLREEEFGVDDSYSEQGAQDSPTHLEMMESELAGKQHEIEELNRELEEMRVTYGTEGLQQLQEFEAAIKQRDGIITQLTANLQQARREKDETMREFLELTEQSQKLQIQFQQLQASETLRNSTHSSTAADLLQAKQQILTHQQQLEEQDHLLEDYQKKKEDFTMQISFLQEKIKVYEMEQDKKVENSNKEEIQEKETIIEELNTKIIEEEKKTLELKDKLTTADKLLGELQEQIVQKNQEIKNMKLELTNSKQKERQSSEEIKQLMGTVEELQKRNHKDSQFETDIVQRMEQETQRKLEQLRAELDEMYGQQIVQMKQELIRQHMAQMEEMKTRHKGEMENALRSYSNITVNEDQIKLMNVAINELNIKLQDTNSQKEKLKEELGLILEEKCALQRQLEDLVEELSFSREQIQRARQTIAEQESKLNEAHKSLSTVEDLKAEIVSASESRKELELKHEAEVTNYKIKLEMLEKEKNAVLDRMAESQEAELERLRTQLLFSHEEELSKLKEDLEIEHRINIEKLKDNLGIHYKQQIDGLQNEMSQKIETMQFEKDNLITKQNQLILEISKLKDLQQSLVNSKSEEMTLQINELQKEIEILRQEEKEKGTLEQEVQELQLKTELLEKQMKEKENDLQEKFAQLEAENSILKDEKKTLEDMLKIHTPVSQEERLIFLDSIKSKSKDSVWEKEIEILIEENEDLKQQCIQLNEEIEKQRNTFSFAEKNFEVNYQELQEEYACLLKVKDDLEDSKNKQELEYKSKLKALNEELHLQRINPTTVKMKSSVFDEDKTFVAETLEMGEVVEKDTTELMEKLEVTKREKLELSQRLSDLSEQLKQKHGEISFLNEEVKSLKQEKEQVSLRCRELEIIINHNRAENVQSCDTQVSSLLDGVVTMTSRGAEGSVSKVNKSFGEESKIMVEDKVSFENMTVGEESKQEQLILDHLPSVTKESSLRATQPSENDKLQKELNVLKSEQNDLRLQMEAQRICLSLVYSTHVDQVREYMENEKDKALCSLKEELIFAQEEKIKELQKIHQLELQTMKTQETGDEGKPLHLLIGKLQKAVSEECSYFLQTLCSVLGEYYTPALKCEVNAEDKENSGDYISENEDPELQDYRYEVQDFQENMHTLLNKVTEEYNKLLVLQTRLSKIWGQQTDGMKLEFGEENLPKEETEFLSIHSQMTNLEDIDVNHKSKLSSLQDLEKTKLEEQVQELESLISSLQQQLKETEQNYEAEIHCLQKRLQAVSESTVPPSLPVDSVVITESDAQRTMYPGSCVKKNIDGTIEFSGEFGVKEETNIVKLLEKQYQEQLEEEVAKVIVSMSIAFAQQTELSRISGGKENTASSKQAHAVCQQEQHYFNEMKLSQDQIGFQTFETVDVKFKEEFKPLSKELGEHGKEILLSNSDPHDIPESKDCVLTISEEMFSKDKTFIVRQSIHDEISVSSMDASRQLMLNEEQLEDMRQELVRQYQEHQQATELLRQAHMRQMERQREDQEQLQEEIKRLNRQLAQRSSIDNENLVSERERVLLEELEALKQLSLAGREKLCCELRNSSTQTQNGNENQGEVEEQTFKEKELDRKPEDVPPEILSNERYALQKANNRLLKILLEVVKTTAAVEETIGRHVLGILDRSSKSQSSASLIWRSEAEASVKSCVHEEHTRVTDESIPSYSGSDMPRNDINMWSKVTEEGTELSQRLVRSGFAGTEIDPENEELMLNISSRLQAAVEKLLEAISETSSQLEHAKVTQTELMRESFRQKQEATESLKCQEELRERLHEESRAREQLAVELSKAEGVIDGYADEKTLFERQIQEKTDIIDRLEQELLCASNRLQELEAEQQQIQEERELLSRQKEAMKAEAGPVEQQLLQETEKLMKEKLEVQCQAEKVRDDLQKQVKALEIDVEEQVSRFIELEQEKNTELMDLRQQNQALEKQLEKMRKFLDEQAIDREHERDVFQQEIQKLEQQLKVVPRFQPISEHQTREVEQLANHLKEKTDKCSELLLSKEQLQRDIQERNEEIEKLEFRVRELEQALLVSADTFQKVEDRKHFGAVEAKPELSLEVQLQAERDAIDRKEKEITNLEEQLEQFREELENKNEEVQQLHMQLEIQKKESTTRLQELEQENKLFKDDMEKLGLAIKESDAMSTQDQHVLFGKFAQIIQEKEVEIDQLNEQVTKLQQQLKITTDNKVIEEKNELIRDLETQIECLMSDQECVKRNREEEIEQLNEVIEKLQQELANIGQKTSMNAHSLSEEADSLKHQLDVVIAEKLALEQQVETANEEMTFMKNVLKETNFKMNQLTQELFSLKRERESVEKIQSIPENSVNVAIDHLSKDKPELEVVLTEDALKSLENQTYFKSFEENGKGSIINLETRLLQLESTVSAKDLELTQCYKQIKDMQEQGQFETEMLQKKIVNLQKIVEEKVAAALVSQIQLEAVQEYAKFCQDNQTISSEPERTNIQNLNQLREDELGSDISALTLRISELESQVVEMHTSLILEKEQVEIAEKNVLEKEKKLLELQKLLEGNEKKQREKEKKRSPQDVEVLKTTTELFHSNEESGFFNELEALRAESVATKAELASYKEKAEKLQEELLVKETNMTSLQKDLSQVRDHLAEAKEKLSILEKEDETEVQESKKACMFEPLPIKLSKSIASQTDGTLKISSSNQTPQILVKNAGIQINLQSECSSEEVTEIISQFTEKIEKMQELHAAEILDMESRHISETETLKREHYVAVQLLKEECGTLKAVIQCLRSKEVFGFYNMCFSTLCDSGSDWGQGIYLTHSQGFDIASEGRGEESESATDSFPKKIKGLLRAVHNEGMQVLSLTESPYSDGEDHSIQQVSEPWLEERKAYINTISSLKDLITKMQLQREAEVYDSSQSHESFSDWRGELLLALQQVFLEERSVLLAAFRTELTALGTTDAVGLLNCLEQRIQEQGVEYQAAMECLQKADRRSLLSEIQALHAQMNGRKITLKREQESEKPSQELLEYNIQQKQSQMLEMQVELSSMKDRATELQEQLSSEKMVVAELKSELAQTKLELETTLKAQHKHLKELEAFRLEVKDKTDEVHLLNDTLASEQKKSRELQWALEKEKAKLGRSEERDKEELEDLKFSLESQKQRNLQLNLLLEQQKQLLNESQQKIESQRMLYDAQLSEEQGRNLELQVLLESEKVRIREMSSTLDRERELHAQLQSSDGTGQSRPPLPSEDLLKELQKQLEEKHSRIVELLNETEKYKLDSLQTRQQMEKDRQVHRKTLQTEQEANTEGQKKMHELQSKVEDLQRQLEEKRQQVYKLDLEGQRLQGIMQEFQKQELEREEKRESRRILYQNLNEPTTWSLTSDRTRNWVLQQKIEGETKESNYAKLIEMNGGGTGCNHELEMIRQKLQCVASKLQVLPQKASERLQFETADDEDFIWVQENIDEIILQLQKLTGQQGEEPSLVSPSTSCGSLTERLLRQNAELTGHISQLTEEKNDLRNMVMKLEEQIRWYRQTGAGRDNSSRFSLNGGANIEAIIASEKEVWNREKLTLQKSLKRAEAEVYKLKAELRNDSLLQTLSPDSEHVTLKRIYGKYLRAESFRKALIYQKKYLLLLLGGFQECEDATLALLARMGGQPAFTDLEVITNRPKGFTRFRSAVRVSIAISRMKFLVRRWHRVTGSVSININRDGFGLNQGAEKTDSFYHSSGGLELYGEPRHTTYRSRSDLDYIRSPLPFQNRYPGTPADFNPGSLACSQLQNYDPDRALTDYITRLEALQRRLGTIQSGSTTQFHAGMRR

SEQ ID NO: 25991 - protein, 3899 aa, Homo sapiens
MEDEERQKKLEAGKAKLAQFRQRKAQSDGQSPSKKQKKKRKTSSSKHDVSAHHDLNIDQSQCNEMYINSSQRVESTVIPESTIMRTLHSGEITSHEQGFSVELESEISTTADDCSSEVNGCSFVMRTGKPTNLLREEEFGVDDSYSEQGAQDSPTHLEMMESELAGKQHEIEELNRELEEMRVTYGTEGLQQLQEFEAAIKQRDGIITQLTANLQQARREKDETMREFLELTEQSQKLQIQFQQLQASETLRNSTHSSTAADLLQAKQQILTHQQQLEEQDHLLEDYQKKKEDFTMQISFLQEKIKVYEMEQDKKVENSNKEEIQEKETIIEELNTKIIEEEKKTLELKDKLTTADKLLGELQEQIVQKNQEIKNMKLELTNSKQKERQSSEEIKQLMGTVEELQKRNHKDSQFETDIVQRMEQETQRKLEQLRAELDEMYGQQIVQMKQELIRQHMAQMEEMKTRHKGEMENALRSYSNITVNEDQIKLMNVAINELNIKLQDTNSQKEKLKEELGLILEEKCALQRQLEDLVEELSFSREQIQRARQTIAEQESKLNEAHKSLSTVEDLKAEIVSASESRKELELKHEAEVTNYKIKLEMLEKEKNAVLDRMAESQEAELERLRTQLLFSHEEELSKLKEDLEIEHRINIEKLKDNLGIHYKQQIDGLQNEMSQKIETMQFEKDNLITKQNQLILEISKLKDLQQSLVNSKSEEMTLQINELQKEIEILRQEEKEKGTLEQEVQELQLKTELLEKQMKEKENDLQEKFAQLEAENSILKDEKKTLEDMLKIHTPVSQEERLIFLDSIKSKSKDSVWEKEIEILIEENEDLKQQCIQLNEEIEKQRNTFSFAEKNFEVNYQELQEEYACLLKVKDDLEDSKNKQELEYKSKLKALNEELHLQRINPTTVKMKSSVFDEDKTFVAETLEMGEVVEKDTTELMEKLEVTKREKLELSQRLSDLSEQLKQKHGEISFLNEEVKSLKQEKEQVSLRCRELEIIINHNRAENVQSCDTQVSSLLDGVVTMTSRGAEGSVSKVNKSFGEESKIMVEDKVSFENMTVGEESKQEQLILDHLPSVTKESSLRATQPSENDKLQKELNVLKSEQNDLRLQMEAQRICLSLVYSTHVDQVREYMENEKDKALCSLKEELIFAQEEKIKELQKIHQLELQTMKTQETGDEGKPLHLLIGKLQKAVSEECSYFLQTLCSVLGEYYTPALKCEVNAEDKENSGDYISENEDPELQDYRYEVQDFQENMHTLLNKVTEEYNKLLVLQTRLSKIWGQQTDGMKLEFGEENLPKEETEFLSIHSQMTNLEDIDVNHKSKLSSLQDLEKTKLEEQVQELESLISSLQQQLKETEQNYEAEIHCLQKRLQAVSESTVPPSLPVDSVVITESDAQRTMYPGSCVKKNIDGTIEFSGEFGVKEETNIVKLLEKQYQEQLEEEVAKVIVSMSIAFAQQTELSRISGGKENTASSKQAHAVCQQEQHYFNEMKLSQDQIGFQTFETVDVKFKEEFKPLSKELGEHGKEILLSNSDPHDIPESKDCVLTISEEMFSKDKTFIVRQSIHDEISVSSMDASRQLMLNEEQLEDMRQELVRQYQEHQQATELLRQAHMRQMERQREDQEQLQEEIKRLNRQLAQRSSIDNENLVSERERVLLEELEALKQLSLAGREKLCCELRNSSTQTQNGNENQGEVEEQTFKEKELDRKPEDVPPEILSNERYALQKANNRLLKILLEVVKTTAAVEETIGRHVLGILDRSSKSQSSASLIWRSEAEASVKSCVHEEHTRVTDESIPSYSGSDMPRNDINMWSKVTEEGTELSQRLVRSGFAGTEIDPENEELMLNISSRLQAAVEKLLEAISETSSQLEHAKVTQTELMRESFRQKQEATESLKCQEELRERLHEESRAREQLAVELSKAEGVIDGYADEKTLFERQIQEKTDIIDRLEQELLCASNRLQELEAEQQQIQEERELLSRQKEAMKAEAGPVEQQLLQETEKLMKEKLEVQCQAEKVRDDLQKQVKALEIDVEEQVSRFIELEQEKNTELMDLRQQNQALEKQLEKMRKFLDEQAIDREHERDVFQQEIQKLEQQLKVVPRFQPISEHQTREVEQLANHLKEKTDKCSELLLSKEQLQRDIQERNEEIEKLEFRVRELEQALLVEDRKHFGAVEAKPELSLEVQLQAERDAIDRKEKEITNLEEQLEQFREELENKNEEVQQLHMQLEIQKKESTTRLQELEQENKLFKDDMEKLGLAIKESDAMSTQDQHVLFGKFAQIIQEKEVEIDQLNEQVTKLQQQLKITTDNKVIEEKNELIRDLETQIECLMSDQECVKRNREEEIEQLNEVIEKLQQELANIGQKTSMNAHSLSEEADSLKHQLDVVIAEKLALEQQVETANEEMTFMKNVLKETNFKMNQLTQELFSLKRERESVEKIQSIPENSVNVAIDHLSKDKPELEVVLTEDALKSLENQTYFKSFEENGKGSIINLETRLLQLESTVSAKDLELTQCYKQIKDMQEQGQFETEMLQKKIVNLQKIVEEKVAAALVSQIQLEAVQEYAKFCQDNQTISSEPERTNIQNLNQLREDELGSDISALTLRISELESQVVEMHTSLILEKEQVEIAEKNVLEKEKKLLELQKLLEGNEKKQREKEKKRSPQDVEVLKTTTELFHSNEESGFFNELEALRAESVATKAELASYKEKAEKLQEELLVKETNMTSLQKDLSQVRDHLAEAKEKLSILEKEDETEVQESKKACMFEPLPIKLSKSIASQTDGTLKISSSNQTPQILVKNAGIQINLQSECSSEEVTEIISQFTEKIEKMQELHAAEILDMESRHISETETLKREHYVAVQLLKEECGTLKAVIQCLRSKEGSSIPELAHSDAYQTREICSSDSGSDWGQGIYLTHSQGFDIASEGRGEESESATDSFPKKIKGLLRAVHNEGMQVLSLTESPYSDGEDHSIQQVSEPWLEERKAYINTISSLKDLITKMQLQREAEVYDSSQSHESFSDWRGELLLALQQVFLEERSVLLAAFRTELTALGTTDAVGLLNCLEQRIQEQGVEYQAAMECLQKADRRSLLSEIQALHAQMNGRKITLKREQESEKPSQELLEYNIQQKQSQMLEMQVELSSMKDRATELQEQLSSEKMVVAELKSELAQTKLELETTLKAQHKHLKELEAFRLEVKDKTDEVHLLNDTLASEQKKSRELQWALEKEKAKLGRSEERDKEELEDLKFSLESQKQRNLQLNLLLEQQKQLLNESQQKIESQRMLYDAQLSEEQGRNLELQVLLESEKVRIREMSSTLDRERELHAQLQSSDGTGQSRPPLPSEDLLKELQKQLEEKHSRIVELLNETEKYKLDSLQTRQQMEKDRQVHRKTLQTEQEANTEGQKKMHELQSKVEDLQRQLEEKRQQVYKLDLEGQRLQGIMQEFQKQELEREEKRESRRILYQNLNEPTTWSLTSDRTRNWVLQQKIEGETKESNYAKLIEMNGGGTGCNHELEMIRQKLQCVASKLQVLPQKASERLQFETADDEDFIWVQENIDEIILQLQKLTGQQGEEPSLVSPSTSCGSLTERLLRQNAELTGHISQLTEEKNDLRNMVMKLEEQIRWYRQTGAGRDNSSRFSLNGGANIEAIIASEKEVWNREKLTLQKSLKRAEAEVYKLKAELRNDSLLQTLSPDSEHVTLKRIYGKYLRAESFRKALIYQKKYLLLLLGGFQECEDATLALLARMGGQPAFTDLEVITNRPKGFTRFRSAVRVSIAISRMKFLVRRWHRVTGSVSININRDGFGLNQGAEKTDSFYHSSGGLELYGEPRHTTYRSRSDLDYIRSPLPFQNRYPGTPADFNPGSLACSQLQNYDPDRALTDYITRLEALQRRLGTIQSGSTTQFHAGMRR

SEQ ID NO: 25992 - protein, 1643 aa, Homo sapiens
MEDEERQKKLEAGKAKIEELSLAFLVRQLAQFRQRKAQSDGQSPSKKQKKKRKTSSSKHDVSAHHDLNIDQSQCNEMYINSSQRVESTVIPESTIMRTLHSGEITSHEQGFSVELESEISTTADDCSSEVNGCSFVMRTGKPTNLLREEEFGVDDSYSEQGAQDSPTHLEMMESELAGKQHEIEELNRELEEMRVTYGTEGLQQLQEFEAAIKQRDGIITQLTANLQQARREKDETMREFLELTEQSQKLQIQFQQLQASETLRNSTHSSTAADLLQAKQQILTHQQQLEEQDHLLEDYQKKKEDFTMQISFLQEKIKVYEMEQDKKVENSNKEEIQEKETIIEELNTKIIEEEKKTLELKDKLTTADKLLGELQEQIVQKNQEIKNMKLELTNSKQKERQSSEEIKQLMGTVEELQKRNHKDSQFETDIVQRMEQETQRKLEQLRAELDEMYGQQIVQMKQELIRQHMAQMEEMKTRHKGEMENALRSYSNITVNEDQIKLMNVAINELNIKLQDTNSQKEKLKEELGLILEEKCALQRQLEDLVEELSFSREQIQRARQTIAEQESKLNEAHKSLSTVEDLKAEIVSASESRKELELKHEAEVTNYKIKLEMLEKEKNAVLDRMAESQEAELERLRTQLLFSHEEELSKLKEDLEIEHRINIEKLKDNLGIHYKQQIDGLQNEMSQKIETMQFEKDNLITKQNQLILEISKLKDLQQSLVNSKSEEMTLQINELQKEIEILRQEEKEKGTLEQEVQELQLKTELLEKQMKEKENDLQEKFAQLEAENSILKDEKKTLEDMLKIHTPVSQEERLIFLDSIKSKSKDSVWEKEIEILIEENEDLKQQCIQLNEEIEKQRNTFSFAEKNFEVNYQELQEEYACLLKVKDDLEDSKNKQELEYKSKLKALNEELHLQRINPTTVKMKSSVFDEDKTFVAETLEMGEVVEKDTTELMEKLEVTKREKLELSQRLSDLSEQLKQKHGEISFLNEEVKSLKQEKEQVSLRCRELEIIINHNRAENVQSCDTQVSSLLDGVVTMTSRGAEGSVSKVNKSFGEESKIMVEDKVSFENMTVGEESKQEQLILDHLPSVTKESSLRATQPSENDKLQKELNVLKSEQNDLRLQMEAQRICLSLVYSTHVDQVREYMENEKDKALCSLKEELIFAQEEKIKELQKIHQLELQTMKTQETGDEGKPLHLLIGKLQKAVSEECSYFLQTLCSVLGEYYTPALKCEVNAEDKENSGDYISENEDPELQDYRYEVQDFQENMHTLLNKVTEEYNKLLVLQTRLSKIWGQQTDGMKLEFGEENLPKEETEFLSIHSQMTNLEDIDVNHKSKLSSLQDLEKTKLEEQVQELESLISSLQQQLKETEQNYEAEIHCLQKRLQAVSESTVPPSLPVDSVVITESDAQRTMYPGSCVKKNIDGTIEFSGEFGVKEETNIVKLLEKQYQEQLEEEVAKVIVSMSIAFAQQTELSRISGGKENTASSKQAHAVCQQEQHYFNEMKLSQDQIGFQTFETVDVKFKEEFKPLSKELGEHGKEILLSNSDPHDIPESKDCVLTISEEMFSKDKTFIVRQSIHDEISVSSMDASRQLMLNEEQLEDMRQELVRQYQEHQQATELLRQAHMRQMERQREDQELAQVRVL

SEQ ID NO: 25993 - protein, 3857 aa, Homo sapiens
MEDEERQKKLEAGKAKIEELSLAFLVRQLAQFRQRKAQSDGQSPSKKQKKKRKTSSSKHDVSAHHDLNIDQSQCNEMYINSSQRVESTVIPESTIMRTLHSGEITSHEQGFSVELESEISTTADDCSSEVNGCSFVMRTGKPTNLLREEEFGVDDSYSEQGAQDSPTHLEMMESELAGKQHEIEELNRELEEMRVTYGTEGLQQLQEFEAAIKQRDGIITQLTANLQQARREKDETMREFLELTEQSQKLQIQFQQLQASETLRNSTHSSTAADLLQAKQQILTHQQQLEEQDHLLEDYQKKKEDFTMQISFLQEKIKVYEMEQDKKVENSNKEEIQEKETIIEELNTKIIEEEKKTLELKDKLTTADKLLGELQEQIVQKNQEIKNMKLELTNSKQKERQSSEEIKQLMGTVEELQKRNHKDSQFETDIVQRMEQETQRKLEQLRAELDEMYGQQIVQMKQELIRQHMAQMEEMKTRHKGEMENALRSYSNITVNEDQIKLMNVAINELNIKLQDTNSQKEKLKEELGLILEEKCALQRQLEDLVEELSFSREQIQRARQTIAEQESKLNEAHKSLSTVEDLKAEIVSASESRKELELKHEAEVTNYKIKLEMLEKEKNAVLDRMAESQEAELERLRTQLLFSHEEELSKLKEDLEIEHRINIEKLKDNLGIHYKQQIDGLQNEMSQKIETMQFEKDNLITKQNQLILEISKLKDLQQSLVNSKSEEMTLQINELQKEIEILRQEEKEKGTLEQEVQELQLKTELLEKQMKEKENDLQEKFAQLEAENSILKDEKKTLEDMLKIHTPVSQEERLIFLDSIKSKSKDSVWEKEIEILIEENEDLKQQCIQLNEEIEKQRNTFSFAEKNFEVNYQELQEEYACLLKVKDDLEDSKNKQELEYKSKLKALNEELHLQRINPTTVKMKSSVFDEDKTFVAETLEMGEVVEKDTTELMEKLEVTKREKLELSQRLSDLSEQLKQKHGEISFLNEEVKSLKQEKEQVSLRCRELEIIINHNRAENVQSCDTQVSSLLDGVVTMTSRGAEGSVSKVNKSFGEESKIMVEDKVSFENMTVGEESKQEQLILDHLPSVTKESSLRATQPSENDKLQKELNVLKSEQNDLRLQMEAQRICLSLVYSTHVDQVREYMENEKDKALCSLKEELIFAQEEKIKELQKIHQLELQTMKTQETGDEGKPLHLLIGKLQKAVSEECSYFLQTLCSVLGEYYTPALKCEVNAEDKENSGDYISENEDPELQDYRYEVQDFQENMHTLLNKVTEEYNKLLVLQTRLSKIWGQQTDGMKLEFGEENLPKEETEFLSIHSQMTNLEDIDVNHKSKLSSLQDLEKTKLEEQVQELESLISSLQQQLKETEQNYEAEIHCLQKRLQAVSESTVPPSLPVDSVVITESDAQRTMYPGSCVKKNIDGTIEFSGEFGVKEETNIVKLLEKQYQEQLEEEVAKVIVSMSIAFAQQTELSRISGGKENTASSKQAHAVCQQEQHYFNEMKLSQDQIGFQTFETVDVKFKEEFKPLSKELGEHGKEILLSNSDPHDIPESKDCVLTISEEMFSKDKTFIVRQSIHDEISVSSMDASRQLMLNEEQLEDMRQELVRQYQEHQQATELLRQAHMRQMERQREDQEQLQEEIKRLNRQLAQRSSIDNENLVSERERVLLEELEALKQLSLAGREKLCCELRNSSTQTQNGNENQGEVEEQTFKEKELDRKPEDVPPEILSNERYALQKANNRLLKILLEVVKTTAAVEETIGRHVLGILDRSSKSQSSASLIWRSEAEASVKSCVHEEHTRVTDESIPSYSGSDMPRNDINMWSKVTEEGTELSQRLVRSGFAGTEIDPENEELMLNISSRLQAAVEKLLEAISETSSQLEHAKVTQTELMRESFRQKQEATESLKCQEELRERLHEESRAREQLAVELSKAEGVIDGYADEKTLFERQIQEKTDIIDRLEQELLCASNRLQELEAEQQQIQEERELLSRQKEAMKAEAGPVEQQLLQETEKLMKEKLEVQCQAEKVRDDLQKQVKALEIDVEEQVSRFIELEQEKNTELMDLRQQNQALEKQLEKMRKFLDEQAIDREHERDVFQQEIQKLEQQLKVVPRFQPISEHQTREVEQLANHLKEKTDKCSELLLSKEQLQRDIQERNEEIEKLEFRVRELEQALLVSADTFQKVEDRKHFGAVEAKPELSLEVQLQAERDAIDRKEKEITNLEEQLEQFREELENKNEEVQQLHMQLEIQKKESTTRLQELEQENKLFKDDMEKLGLAIKESDAMSTQDQHVLFGKFAQIIQEKEVEIDQLNEQVTKLQQQLKITTDNKVIEEKNELIRDLETQIECLMSDQECVKRNREEEIEQLNEVIEKLQQELANIGQKTSMNAHSLSEEADSLKHQLDVVIAEKLALEQQVETANEEMTFMKNVLKETNFKMNQLTQELFSLKRERESVEKIQSIPENSVNVAIDHLSKDKPELEVVLTEDALKSLENQTYFKSFEENGKGSIINLETRLLQLESTVSAKDLELTQCYKQIKDMQEQGQFETEMLQKKIVNLQKIVEEKVAAALVSQIQLEAVQEYAKFCQDNQTISSEPERTNIQNLNQLREDELGSDISALTLRISELESQVVEMHTSLILEKEQVEIAEKNVLEKEKKLLELQKLLEGNEKKQREKEKKRSPQDVEVLKTTTELFHSNEESGFFNELEALRAESVATKAELASYKEKAEKLQEELLVKETNMTSLQKDLSQVRDHLAEAKEKLSILEKEDETEVQESKKACMFEPLPIKLSKSIASQTDGTLKISSSNQTPQILVKNAGIQINLQSECSSEEVTEIISQFTEKIEKMQELHAAEILDMESRHISETETLKREHYVAVQLLKEECGTLKAVIQCLRSKEGLLRAVHNEGMQVLSLTESPYSDGEDHSIQQVSEPWLEERKAYINTISSLKDLITKMQLQREAEVYDSSQSHESFSDWRGELLLALQQVFLEERSVLLAAFRTELTALGTTDAVGLLNCLEQRIQEQGVEYQAAMECLQKADRRSLLSEIQALHAQMNGRKITLKREQESEKPSQELLEYNIQQKQSQMLEMQVELSSMKDRATELQEQLSSEKMVVAELKSELAQTKLELETTLKAQHKHLKELEAFRLEVKDKTDEVHLLNDTLASEQKKSRELQWALEKEKAKLGRSEERDKEELEDLKFSLESQKQRNLQLNLLLEQQKQLLNESQQKIESQRMLYDAQLSEEQGRNLELQVLLESEKVRIREMSSTLDRERELHAQLQSSDGTGQSRPPLPSEDLLKELQKQLEEKHSRIVELLNETEKYKLDSLQTRQQMEKDRQVHRKTLQTEQEANTEGQKKMHELQSKVEDLQRQLEEKRQQVYKLDLEGQRLQGIMQEFQKQELEREEKRESRRILYQNLNEPTTWSLTSDRTRNWVLQQKIEGETKESNYAKLIEMNGGGTGCNHELEMIRQKLQCVASKLQVLPQKASERLQFETADDEDFIWVQENIDEIILQLQKLTGQQGEEPSLVSPSTSCGSLTERLLRQNAELTGHISQLTEEKNDLRNMVMKLEEQIRWYRQTGAGRDNSSRFSLNGGANIEAIIASEKEVWNREKLTLQKSLKRAEAEVYKLKAELRNDSLLQTLSPDSEHVTLKRIYGKYLRAESFRKALIYQKKYLLLLLGGFQECEDATLALLARMGGQPAFTDLEVITNRPKGFTRFRSAVRVSIAISRMKFLVRRWHRVTGSVSININRDGFGLNQGAEKTDSFYHSSGGLELYGEPRHTTYRSRSDLDYIRSPLPFQNRYPGTPADFNPGSLACSQLQNYDPDRALTDYITRLEALQRRLGTIQSGSTTQFHAGMRR

SEQ ID NO: 25994 - protein, 3929 aa, Homo sapiens
MEDEERQKKLEAGKAKIEELSLAFLVRQLAQFRQRKAQSDGQSPSKKQKKKRKTSSSKHDVSAHHDLNIDQSQCNEMYINSSQRVESTVIPESTIMRTLHSGEITSHEQGFSVELESEISTTADDCSSEVNGCSFVMRTGKPTNLLREEEFGVDDSYSEQGAQDSPTHLEMMESELAGKQHEIEELNRELEEMRVTYGTEGLQQLQEFEAAIKQRDGIITQLTANLQQARREKDETMREFLELTEQSQKLQIQFQQLQASETLRNSTHSSTAADLLQAKQQILTHQQQLEEQDHLLEDYQKKKEDFTMQISFLQEKIKVYEMEQDKKVENSNKEEIQEKETIIEELNTKIIEEEKKTLELKDKLTTADKLLGELQEQIVQKNQEIKNMKLELTNSKQKERQSSEEIKQLMGTVEELQKRNHKDSQFETDIVQRMEQETQRKLEQLRAELDEMYGQQIVQMKQELIRQHMAQMEEMKTRHKGEMENALRSYSNITVNEDQIKLMNVAINELNIKLQDTNSQKEKLKEELGLILEEKCALQRQLEDLVEELSFSREQIQRARQTIAEQESKLNEAHKSLSTVEDLKAEIVSASESRKELELKHEAEVTNYKIKLEMLEKEKNAVLDRMAESQEAELERLRTQLLFSHEEELSKLKEDLEIEHRINIEKLKDNLGIHYKQQIDGLQNEMSQKIETMQFEKDNLITKQNQLILEISKLKDLQQSLVNSKSEEMTLQINELQKEIEILRQEEKEKGTLEQEVQELQLKTELLEKQMKEKENDLQEKFAQLEAENSILKDEKKTLEDMLKIHTPVSQEERLIFLDSIKSKSKDSVWEKEIEILIEENEDLKQQCIQLNEEIEKQRNTFSFAEKNFEVNYQELQEEYACLLKVKDDLEDSKNKQELEYKSKLKALNEELHLQRINPTTVKMKSSVFDEDKTFVAETLEMGEVVEKDTTELMEKLEVTKREKLELSQRLSDLSEQLKQKHGEISFLNEEVKSLKQEKEQVSLRCRELEIIINHNRAENVQSCDTQVSSLLDGVVTMTSRGAEGSVSKVNKSFGEESKIMVEDKVSFENMTVGEESKQEQLILDHLPSVTKESSLRATQPSENDKLQKELNVLKSEQNDLRLQMEAQRICLSLVYSTHVDQVREYMENEKDKALCSLKEELIFAQEEKIKELQKIHQLELQTMKTQETGDEGKPLHLLIGKLQKAVSEECSYFLQTLCSVLGEYYTPALKCEVNAEDKENSGDYISENEDPELQDYRYEVQDFQENMHTLLNKVTEEYNKLLVLQTRLSKIWGQQTDGMKLEFGEENLPKEETEFLSIHSQMTNLEDIDVNHKSKLSSLQDLEKTKLEEQVQELESLISSLQQQLKETEQNYEAEIHCLQKRLQAVSESTVPPSLPVDSVVITESDAQRTMYPGSCVKKNIDGTIEFSGEFGVKEETNIVKLLEKQYQEQLEEEVAKVIVSMSIAFAQQTELSRISGGKENTASSKQAHAVCQQEQHYFNEMKLSQDQIGFQTFETVDVKFKEEFKPLSKELGEHGKEILLSNSDPHDIPESKDCVLTISEEMFSKDKTFIVRQSIHDEISVSSMDASRQLMLNEEQLEDMRQELVRQYQEHQQATELLRQAHMRQMERQREDQEQLQEEIKRLNRQLAQRSSIDNENLVSERERVLLEELEALKQLSLAGREKLCCELRNSSTQTQNGNENQGEVEEQTFKEKELDRKPEDVPPEILSNERYALQKANNRLLKILLEVVKTTAAVEETIGRHVLGILDRSSKSQSSASLIWRSEAEASVKSCVHEEHTRVTDESIPSYSGSDMPRNDINMWSKVTEEGTELSQRLVRSGFAGTEIDPENEELMLNISSRLQAAVEKLLEAISETSSQLEHAKVTQTELMRESFRQKQEATESLKCQEELRERLHEESRAREQLAVELSKAEGVIDGYADEKTLFERQIQEKTDIIDRLEQELLCASNRLQELEAEQQQIQEERELLSRQKEAMKAEAGPVEQQLLQETEKLMKEKLEVQCQAEKVRDDLQKQVKALEIDVEEQVSRFIELEQEKNTELMDLRQQNQALEKQLEKMRKFLDEQAIDREHERDVFQQEIQKLEQQLKVVPRFQPISEHQTREVEQLANHLKEKTDKCSELLLSKEQLQRDIQERNEEIEKLEFRVRELEQALLVEDRKHFGAVEAKPELSLEVQLQAERDAIDRKEKEITNLEEQLEQFREELENKNEEVQQLHMQLEIQKKESTTRLQELEQENKLFKDDMEKLGLAIKESDAMSTQDQHVLFGKFAQIIQEKEVEIDQLNEQVTKLQQQLKITTDNKVIEEKNELIRDLETQIECLMSDQECVKRNREEEIEQLNEVIEKLQQELANIGQKTSMNAHSLSEEADSLKHQLDVVIAEKLALEQQVETANEEMTFMKNVLKETNFKMNQLTQELFSLKRERESVEKIQSIPENSVNVAIDHLSKDKPELEVVLTEDALKSLENQTYFKSFEENGKGSIINLETRLLQLESTVSAKDLELTQCYKQIKDMQEQGQFETEMLQKKIVNLQKIVEEKVAAALVSQIQLEAVQEYAKFCQDNQTISSEPERTNIQNLNQLREDELGSDISALTLRISELESQVVEMHTSLILEKEQVEIAEKNVLEKEKKLLELQKLLEGNEKKQREKEKKRSPQDVEVLKTTTELFHSNEESGFFNELEALRAESVATKAELASYKEKAEKLQEELLVKETNMTSLQKDLSQVRDHLAEAKEKLSILEKEDETEVQESKKACMFEPLPIKLSKSIASQTDGTLKISSSNQTPQILVKNAGIQINLQSECSSEEVTEIISQFTEKIEKMQELHAAEILDMESRHISETETLKREHYVAVQLLKEECGTLKAVIQCLRSKEGSSIPELAHSDAYQTREICSSDSGSDWGQGIYLTHSQGFDIASEGRGEESESATDSFPKKIKGLLRAVHNEGMQVLSLTESPYSDGEDHSIQQVSEPWLEERKAYINTISSLKDLITKMQLQREAEVYDSSQSHESFSDWRGELLLALQQVFLEERSVLLAAFRTELTALGTTDAVGLLNCLEQRIQEQGVEYQAAMECLQKADRRSLLSEIQALHAQMNGRKITLKREQESEKPSQELLEYNIQQKQSQMLEMQVELSSMKDRATELQEQLSSEKMVVAELKSELAQTKLELETTLKAQHKHLKELEAFRLEVKDKTDEVHLLNDTLASEQKKSRELQWALEKEKAKLGRSEERDKEELEDLKFSLESQKQRNLQLNLLLEQQKQLLNESQQKIESQRMLYDAQLSEEQGRNLELQVLLESEKVRIREMSSTLDRERELHAQLQSSDGTGQSRPPLPSEDLLKELQKQLEEKHSRIVELLNETEKYKLDSLQTRQQMEKDRQVHRKTLQTEQEANTEGQKKMHELQSKVEDLQRQLEEKRQQVYKLDLEGQRLQGIMQEFQKQELEREEKRESRRILYQNLNEPTTWSLTSDRTRNWVLQQKIEGETKESNYAKLIEMNGGGTGCNHELEMIRQKLQCVASKLQVLPQKASERLQFETADDEDFIWVQENIDEIILQLQKLTGQQGEEPSLVSPSTSCGSLTERLLRQNAELTGHISQLTEEKNDLRNMVMKLEEQIRWYRQTGAGRDNSSRFSLNGGANIEAIIASEKEVWNREKLTLQKSLKRAEAEVYKLKAELRNDSLLQTLSPDSEHVTLKRIYGKYLRAESFRKALIYQKKYLLLLLGGFQECEDATLALLARMGGQPAFTDLEVITNRPKGFTRFRSAVRVSIAISRMKFLVRRWHRVTGSVSININRDGFGLNQGAEKTDSFYHSSGGLELYGEPRHTTYRSRSDLDYIRSPLPFQNRYPGTPADFNPGSLACSQLQNYDPDRALTDYITRLEALQRRLGTIQSGALSLTTSWQHHSARPTAPLFFEILSHSLG

SEQ ID NO: 25995 - protein, 819 aa, Homo sapiens
MGSGARFPSGTLRVRWLLLLGLVGPVLGAARPGFQQTSHLSSYEIITPWRLTRERREAPRPYSKQVSYVIQAEGKEHIIHLERNKDLLPEDFVVYTYNKEGTLITDHPNIQNHCHYRGYVEGVHNSSIALSDCFGLRGLLHLENASYGIEPLQNSSHFEHIIYRMDDVYKEPLKCGVSNKDIEKETAKDEEEEPPSMTQLLRRRRAVLPQTRYVELFIVVDKERYDMMGRNQTAVREEMILLANYLDSMYIMLNIRIVLVGLEIWTNGNLINIVGGAGDVLGNFVQWREKFLITRRRHDSAQLVLKKGFGGTAGMAFVGTVCSRSHAGGINVFGQITVETFASIVAHELGHNLGMNHDDGRDCSCGAKSCIMNSGASGSRNFSSCSAEDFEKLTLNKGGNCLLNIPKPDEAYSAPSCGNKLVDAGEECDCGTPKECELDPCCEGSTCKLKSFAECAYGDCCKDCRFLPGGTLCRGKTSECDVPEYCNGSSQFCQPDVFIQNGYPCQNNKAYCYNGMCQYYDAQCQVIFGSKAKAAPKDCFIEVNSKGDRFGNCGFSGNEYKKCATGNALCGKLQCENVQEIPVFGIVPAIIQTPSRGTKCWGVDFQLGSDVPDPGMVNEGTKCGAGKICRNFQCVDASVLNYDCDVQKKCHGHGVCNSNKNCHCENGWAPPNCETKGYGGSVDSGPTYNEMNTALRDGLLVFFFLIVPLIVCAIFIFIKRDQLWRSYFRKKRSQTYESDGKNQANPSRQPGSVPRHVSPVTPPREVPIYANRFAVPTYAAKQPQQFPSRPPPPQPKVSSQGNLIPARPAPAPPLYSSLT

SEQ ID NO: 25996 - protein, 655 aa, Homo sapiens
MGSGARFPSGTLRVRWLLLLGLVGPVLGAARPGFQQTSHLSSYEIITPWRLTRERREAPRPYSKQVSYVIQAEGKEHIIHLERNKDLLPEDFVVYTYNKEGTLITDHPNIQNHCHYRGYVEGVHNSSIALSDCFGLRGLLHLENASYGIEPLQNSSHFEHIIYRMDDVYKEPLKCGVSNKDIEKETAKDEEEEPPSMTQLLRRRRAVLPQTRYVELFIVVDKERYDMMGRNQTAVREEMILLANYLDSMYIMLNIRIVLVGLEIWTNGNLINIVGGAGDVLGNFVQWREKFLITRRRHDSAQLVLKKGFGGTAGMAFVGTVCSRSHAGGINVFGQITVETFASIVAHELGHNLGMNHDDGRDCSCGAKSCIMNSGASGSRNFSSCSAEDFEKLTLNKGGNCLLNIPKPDEAYSAPSCGNKLVDAGEECDCGTPKECELDPCCEGSTCKLKSFAECAYGDCCKDCRFLPGGTLCRGKTSECDVPEYCNGSSQFCQPDVFIQNGYPCQNNKAYCYNGMCQYYDAQCQVIFGSKAKAAPKDCFIEVNSKGDRFGNCGFSGNEYKKCATGNALCGKLQCENVQEIPVFGIVPAIIQTPSRGTKCWGVDFQLGSDVPDPGMVNEGTKCGAGKICRNFQCVDASVLNYDCDVQKKCHGHGK

SEQ ID NO: 25997 - protein, 861 aa, Homo sapiens
MEALGPGPPASLFQPPRRPGLGTVGKPIRLLANHFQVQIPKIDVYHYDVDIKPEKRPRRVNREVVDTMVRHFKMQIFGDRQPGYDGKRNMYTAHPLPIGRDRVDMEVTLPGEGKDQTFKVSVQWVSVVSLQLLLEALAGHLNEVPDDSVQALDVITRHLPSMRYTPVGRSFFSPPEGYYHPLGGGREVWFGFHQSVRPAMWNMMLNIDVSATAFYRAQPIIEFMCEVLDIQNINEQTKPLTDSQRVKFTKEIRGLKVEVTHCGQMKRKYRVCNVTRRPASHQTFPLQLENGQAMECTVAQYFKQKYSLQLKYPHLPCLQVGQEQKHTYLPLEVCNIVAGQRCIKKLTDNQTSTMIKATARSAPDRQEEISRLVKSNSMVGGPDPYLKEFGIVVHNEMTELTGRVLPAPMLQYGGRNKTVATPNQGVWDMRGKQFYAGIEIKVWAVACFAPQKQCREDLLKSFTDQLRKISKDAGMPIQGQPCFCKYAQGADSVEPMFKHLKMTYVGLQLIVVILPGKTPVYAEVKRVGDTLLGMATQCVQVKNVVKTSPQTLSNLCLKINAKLGGINNVLVPHQRPSVFQQPVIFLGADVTHPPAGDGKKPSIAAVVGSMDGHPSRYCATVRVQTSRQEISQELLYSQEVIQDLTNMVRELLIQFYKSTRFKPTRIIYYRGGVSEGQMKQVAWPELIAIRKACISLEEDYRPGITYIVVQKRHHTRLFCADKTERVGKSGNVPAGTTVDSTITHPSEFDFYLCSHAGIQGTSRPSHYQVLWDDNCFTADELQLLTYQLCHTYVRCTRSVSIPAPAYYARLVAFRARYHLVDKDHDSAEGSHVSGQSNGRDPQALAKAVQIHHDTQHTMYFA

SEQ ID NO: 25998 - protein, 530 aa, Homo sapiens
MARKALKLASWTSMALAASGIYFYSNKYLDPNDFGAVRVGRAVATTAVISYDYLTSLKSVPYGSEEYLQLRSKSWPVFLQVHLRSARRLCELCCANRGTFIKVGQHLGALDYLLPEEYTSTLKVLHSQAPQSSMQEIRQVIREDLGKEIHDLFQSFDDTPLGTASLAQVHKAVLHDGRTVAVKVQHPKVRAQSSKDILLMEVLVLAVKQLFPEFEFMWLVDEAKKNLPLELDFLNEGRNAEKVSQMLRHFDFLKVPRIHWDLSTERVLLMEFVDGGQVNDRDYMERNKIDVNEISRHLGKMYSEMIFVNGFVHCDPHPGNVLVRKHPGTGKAEIVLLDHGLYQMLTEEFRLNYCHLWQSLIWTDMKRVKEYSQRLGAGDLYPLFACMLTARSWDSVNRGISQAPVTATEDLEIRNNAANYLPQISHLLNHVPRQMLLILKTNDLLRGIEAALGTRASASSFLNMSRCCIRALAEHKKKNTCSFFRRTQISFSEAFNLWQINLHELILRVKGLKLADRVLALICWLFPAPL

SEQ ID NO: 25999 - protein, 523 aa, Homo sapiens
MARKALKLASWTSMALAASGIYFYSNKYLDPNDFGAVRVGRAVATTAVISYDYLTSLKSVPYGSEEYLQLRSKVHLRSARRLCELCCANRGTFIKVGQHLGALDYLLPEEYTSTLKVLHSQAPQSSMQEIRQVIREDLGKEIHDLFQSFDDTPLGTASLAQVHKAVLHDGRTVAVKVQHPKVRAQSSKDILLMEVLVLAVKQLFPEFEFMWLVDEAKKNLPLELDFLNEGRNAEKVSQMLRHFDFLKVPRIHWDLSTERVLLMEFVDGGQVNDRDYMERNKIDVNEISRHLGKMYSEMIFVNGFVHCDPHPGNVLVRKHPGTGKAEIVLLDHGLYQMLTEEFRLNYCHLWQSLIWTDMKRVKEYSQRLGAGDLYPLFACMLTARSWDSVNRGISQAPVTATEDLEIRNNAANYLPQISHLLNHVPRQMLLILKTNDLLRGIEAALGTRASASSFLNMSRCCIRALAEHKKKNTCSFFRRTQISFSEAFNLWQINLHELILRVKGLKLADRVLALICWLFPAPL

SEQ ID NO: 26000 - protein, 455 aa, Homo sapiens
MARKALKLASWTSMALAASGIYFYSNKYLDPNDFGAVRVGRAVATTAVISYDYLTSLKSVPYGSEEYLQLRSKIHDLFQSFDDTPLGTASLAQVHKAVLHDGRTVAVKVQHPKVRAQSSKDILLMEVLVLAVKQLFPEFEFMWLVDEAKKNLPLELDFLNEGRNAEKVSQMLRHFDFLKVPRIHWDLSTERVLLMEFVDGGQVNDRDYMERNKIDVNEISRHLGKMYSEMIFVNGFVHCDPHPGNVLVRKHPGTGKAEIVLLDHGLYQMLTEEFRLNYCHLWQSLIWTDMKRVKEYSQRLGAGDLYPLFACMLTARSWDSVNRGISQAPVTATEDLEIRNNAANYLPQISHLLNHVPRQMLLILKTNDLLRGIEAALGTRASASSFLNMSRCCIRALAEHKKKNTCSFFRRTQISFSEAFNLWQINLHELILRVKGLKLADRVLALICWLFPAPL

SEQ ID NO: 26001 - protein, 298 aa, Homo sapiens
MTEQAISFAKDFLAGGIAAAISKTAVAPIERVKLLLQVQHASKQIAADKQYKGIVDCIVRIPKEQGVLSFWRGNLANVIRYFPTQALNFAFKDKYKQIFLGGVDKHTQFWRYFAGNLASGGAAGATSLCFVYPLDFARTRLAADVGKSGTEREFRGLGDCLVKITKSDGIRGLYQGFSVSVQGIIIYRAAYFGVYDTAKGMLPDPKNTHIVVSWMIAQTVTAVAGVVSYPFDTVRRRMMMQSGRKGADIMYTGTVDCWRKIFRDEGGKAFFKGAWSNVLRGMGGAFVLVLYDELKKVI

SEQ ID NO: 26002 - protein, 376 aa, Homo sapiens
MCEEETTALVCDNGSGLCKAGFAGDDAPRAVFPSIVGRPRHQGVMVGMGQKDSYVGDEAQSKRGILTLKYPIEHGIITNWDDMEKIWHHSFYNELRVAPEEHPTLLTEAPLNPKANREKMTQIMFETFNVPAMYVAIQAVLSLYASGRTTGIVLDSGDGVTHNVPIYEGYALPHAIMRLDLAGRDLTDYLMKILTERGYSFVTTAEREIVRDIKEKLCYVALDFENEMATAASSSSLEKSYELPDGQVITIGNERFRCPETLFQPSFIGMESAGIHETTYNSIMKCDIDIRKDLYANNVLSGGTTMYPGIADRMQKEITALAPSTMKIKIIAPPERKYSVWIGGSILASLSTFQQMWISKPEYDEAGPSIVHRKCF

SEQ ID NO: 26003 - protein, 333 aa, Homo sapiens
MCEEETTALVCDNGSGLCKAGFAGDDAPRAVFPSIVGRPRHQIWHHSFYNELRVAPEEHPTLLTEAPLNPKANREKMTQIMFETFNVPAMYVAIQAVLSLYASGRTTGIVLDSGDGVTHNVPIYEGYALPHAIMRLDLAGRDLTDYLMKILTERGYSFVTTAEREIVRDIKEKLCYVALDFENEMATAASSSSLEKSYELPDGQVITIGNERFRCPETLFQPSFIGMESAGIHETTYNSIMKCDIDIRKDLYANNVLSGGTTMYPGIADRMQKEITALAPSTMKIKIIAPPERKYSVWIGGSILASLSTFQQMWISKPEYDEAGPSIVHRKCF

SEQ ID NO: 26004 - protein, 936 aa, Homo sapiens
MEPDIIRMYSSSPPPLDNGAEDDDDDEFGEFGGFSEVSPSGVGFVDFDTPDYTRPKEEFVPSNHFMPIHEFSENVDSLTSFKSIKNGNDKDITAELSAPVKGQSDVLLSTTSKEIISSEMLATSIDGMERPGNLNKVVEQRQNVGTLESFSPGDFRTNMNVVHQNKQLESCNGEKPPCLEILTNGFAVLETVNPQGTDDLDNVADSKGRKPLSTHSTEYNLDSVPSPAEEFADFATFSKKERIQLEEIECAVLNDREALTIRENNKINRVNELNSVKEVALGRSLDNKGDTDGEDQVCVSEISIVTNRGFSVEKQGLPTLQQDEFLQSGVQSKAWSLVDSADNSEAIRREQCKTEEKLDLLTSKCAHLCMDSVKTSDDEVGSPKEESRKFTNFQSPNIDPTEENDLDDSLSVKNGDSSNDFVTCNDINEDDFGDFGDFGSASGSTPPFVTGTQDSMSDATFEESSEHFPHFSEPGDDFGEFGDINAVSCQEETILTKSDLKQTSDNLSEECQLARKSSGTGTEPVAKLKNGQEGEIGHFDSVPNIQDDCNGFQDSDDFADFSSAGPSQVVDWNAFEDEQKDSCSWAAFGDQQATESHHRKEAWQSHRTDENIDTPGTPKTHSVPSATSKGAVASGHLQESATSVQTALLNRLERIFEACFPSILVPDAEEEVTSLKHLLETSTLPIKTREALPESGELLDVWTELQDIHDAHGLRYQWGGSHSNKKLLSSLGIDTRNILFTGNKKQPVIVPMYAAGLGMLEPTKEPLKPLSAAEKIASIGQTATMSPDMNTCTSDQFQESLPPVQFDWSSSGLTNPLDASGGSTLLNLDFFGPVDDSSSSSSTTIPGVDPELYELTTSKLEISTSSLKVTDAFARLMSTVEKTSTSTRKPKREEHLSEEAIKVIAGLPDLTFMHAKVLMFPATLTPSTSSQEKADG

SEQ ID NO: 26005 - protein, 909 aa, Homo sapiens
MEPDIIRMYSSSPPPLDNGAEDDDDDEFGEFGGFSEVSPSGVGFVDFDTPDYTRPKEEFVPSNHFMPIHEFSENVDSLTSFKSIKNGNDKDITAELSAPVKGQSDVLLSTTSKEIISSEMLATSIDGMERPGNLNKVVEQRQNVGTLESFSPGDFRTNMNVVHQNKQLESCNGEKPPCLEILTNGFAVLETVNPQGTDDLDNVADSKGRKPLSTHSTEYNLDSVPSPAEEFADFATFSKKERIQLEEIECAVLNDREALTIRENNKINRVNELNSVKEVALGRSLDNKGDTDGEDQVCVSEISIVTNRGFSVEKQGLPTLQQDEFLQSGVQSKAWSLVDSADNSEAIRREQCKTEEKLDLLTSKCAHLCMDSVKTSDDEVGSPKEESRKFTNFQSPNIDPTEENDLDDSLSVKNGDSSNDFVTCNDINEDDFGDFGDFGSASGSTPPFVTGTQDSMSDATFEESSEHFPHFSEPGDDFGEFGDINAVSCQEETILTKSDLKQTSDNLSEECQLARKSSGTGTEPVAKLKNGQEGEIGHFDSVPNIQDDCNGFQDSDDFADFSSAGPSQVVDWNAFEDEQKDSCSWAAFGDQQATESHHRKEAWQSHRTDENIDTPGTPKTHSVPSATSKGAVASGHLQESATSVQTALLNRLERIFEACFPSILVPDAEEEVTSLKHLLETSTLPIKTREALPESGELLDVWTELQDIHDAHGLRYQWGGSHSNKKLLSSLGIDTRNILFTGNKKQPVIVPMYAAGLGMLEPTKEPLKPLSAAEKIASIGQTATMSPDMNTCTSDQFQESLPPVQFDWSSSGLTNPLDGVDPELYELTTSKLEISTSSLKVTDAFARLMSTVEKTSTSTSRKPKREEHLSEEAIKVIAGLPDLTFMHAKVLMFPATLTPSTSSQEKADG

SEQ ID NO: 26006 - protein, 820 aa, Homo sapiens
MEPDIIRMYSSSPPPLDNGAEDDDDDEFGEFGGFSEVSPSGVGFVDFDTPDYTRPKEEFVPSNHFMPIHEFSENVDSLTSFKSIKNGNDKDITAELSAPVKGQSDVLLSTTSKEIISSEMLATSIDGMERPGNLNKVVEQRQNVGTLESFSPGDFRTNMNVVHQNKQLESCNGEKPPCLEILTNGFAVLETVNPQGTDDLDNVADSKGRKPLSTHSTEYNLDSVPSPAEEFADFATFSKKERIQLEEIECAVLNDREALTIRENNKINRVNELNSVKEVALGRSLDNKGDTDGEDQVCVSEISIVTNRGFSVEKQGLPTLQQDEFLQSGVQSKAWSLVDSADNSEAIRREQCKTEEKLDLLTSKCAHLCMDSVKTSDDEVGSPKEESRKFTNFQSPNIDPTEENDLDDSLSVKNGDSSNDFVTCNDINEDDFGDFGDFGSASGSTPPFVTGTQDSMSDATFEESSEHFPHFSEPGDDFGEFGDINAVSCQEETILTKSDLKQTSDNLSEECQLARKSSGTGTEPVAKLKNGQEGEIGHFDSVPNIQDDCNGFQDSDDFADFSSAGPSQVVDWNAFEDEQKDSCSWAAFGDQQATESHHRKEAWQSHRTDENIDTPGTPKTHSVPSATSKGAVASGHLQESATSVQTALLNRLERIFEACFPSILVPDAEEEVTSLKHLLETSTLPIKTREALPESGELLDVWTELQDIHDAHGLRYQWGGSHSNKKLLSSLGIDTRNILFTGNKKQPVIVPMYAAGLGMLEPTKEPLKPLSAAEKIASIGQTATMSPDMNTCTSDQFQESLPPVQFDWSSSGLTNPLDGT

SEQ ID NO: 26007 - protein, 908 aa, Homo sapiens
MEPDIIRMYSSSPPPLDNGAEDDDDDEFGEFGGFSEVSPSGVGFVDFDTPDYTRPKEEFVPSNHFMPIHEFSENVDSLTSFKSIKNGNDKDITAELSAPVKGQSDVLLSTTSKEIISSEMLATSIDGMERPGNLNKVVEQRQNVGTLESFSPGDFRTNMNVVHQNKQLESCNGEKPPCLEILTNGFAVLETVNPQGTDDLDNVADSKGRKPLSTHSTEYNLDSVPSPAEEFADFATFSKKERIQLEEIECAVLNDREALTIRENNKINRVNELNSVKEVALGRSLDNKGDTDGEDQVCVSEISIVTNRGFSVEKQGLPTLQQDEFLQSGVQSKAWSLVDSADNSEAIRREQCKTEEKLDLLTSKCAHLCMDSVKTSDDEVGSPKEESRKFTNFQSPNIDPTEENDLDDSLSVKNGDSSNDFVTCNDINEDDFGDFGDFGSASGSTPPFVTGTQDSMSDATFEESSEHFPHFSEPGDDFGEFGDINAVSCQEETILTKSDLKQTSDNLSEECQLARKSSGTGTEPVAKLKNGQEGEIGHFDSVPNIQDDCNGFQDSDDFADFSSAGPSQVVDWNAFEDEQKDSCSWAAFGDQQATESHHRKEAWQSHRTDENIDTPGTPKTHSVPSATSKGAVASGHLQESATSVQTALLNRLERIFEACFPSILVPDAEEEVTSLKHLLETSTLPIKTREALPESGELLDVWTELQDIHDAHGLRYQWGGSHSNKKLLSSLGIDTRNILFTGNKKQPVIVPMYAAGLGMLEPTKEPLKPLSAAEKIASIGQTATMSPDMNTCTSDQFQESLPPVQFDWSSSGLTNPLDGVDPELYELTTSKLEISTSSLKVTDAFARLMSTVEKTSTSTRKPKREEHLSEEAIKVIAGLPDLTFMHAKVLMFPATLTPSTSSQEKADG

SEQ ID NO: 26008 - protein, 937 aa, Homo sapiens
MEPDIIRMYSSSPPPLDNGAEDDDDDEFGEFGGFSEVSPSGVGFVDFDTPDYTRPKEEFVPSNHFMPIHEFSENVDSLTSFKSIKNGNDKDITAELSAPVKGQSDVLLSTTSKEIISSEMLATSIDGMERPGNLNKVVEQRQNVGTLESFSPGDFRTNMNVVHQNKQLESCNGEKPPCLEILTNGFAVLETVNPQGTDDLDNVADSKGRKPLSTHSTEYNLDSVPSPAEEFADFATFSKKERIQLEEIECAVLNDREALTIRENNKINRVNELNSVKEVALGRSLDNKGDTDGEDQVCVSEISIVTNRGFSVEKQGLPTLQQDEFLQSGVQSKAWSLVDSADNSEAIRREQCKTEEKLDLLTSKCAHLCMDSVKTSDDEVGSPKEESRKFTNFQSPNIDPTEENDLDDSLSVKNGDSSNDFVTCNDINEDDFGDFGDFGSASGSTPPFVTGTQDSMSDATFEESSEHFPHFSEPGDDFGEFGDINAVSCQEETILTKSDLKQTSDNLSEECQLARKSSGTGTEPVAKLKNGQEGEIGHFDSVPNIQDDCNGFQDSDDFADFSSAGPSQVVDWNAFEDEQKDSCSWAAFGDQQATESHHRKEAWQSHRTDENIDTPGTPKTHSVPSATSKGAVASGHLQESATSVQTALLNRLERIFEACFPSILVPDAEEEVTSLKHLLETSTLPIKTREALPESGELLDVWTELQDIHDAHGLRYQWGGSHSNKKLLSSLGIDTRNILFTGNKKQPVIVPMYAAGLGMLEPTKEPLKPLSAAEKIASIGQTATMSPDMNTCTSDQFQESLPPVQFDWSSSGLTNPLDASGGSTLLNLDFFGPVDDSSSSSSTTIPGVDPELYELTTSKLEISTSSLKVTDAFARLMSTVEKTSTSTSRKPKREEHLSEEAIKVIAGLPDLTFMHAKVLMFPATLTPSTSSQEKADG

SEQ ID NO: 26009 - protein, 319 aa, Homo sapiens
MATKGGTVKAASGFNAMEDAQTLRKAMKGLGTDEDAIISVLAYRNTAQRQEIRTAYKSTIGRDLIDDLKSELSGNFEQVIVGMMTPTVLYDVQELRRAMKGAGTDEGCLIEILASRTPEEIRRISQTYQQQYGRSLEDDIRSDTSFMFQRVLVSLSAGGRDEGNYLDDALVRQDAQDLYEAGEKKWGTDEVKFLTVLCSRNRNHLLHVFDEYKRISQKDIEQSIKSETSGSFEDALLAIVKCMRNKSAYFAEKLYKSMKGLGTDDNTLIRVMVSRAEIDMLDIRAHFKRLYGKSLYSFIKGDTSGDYRKVLLVLCGGDD

SEQ ID NO: 26010 - protein, 237 aa, Homo sapiens
MMTPTVLYDVQELRRAMKGAGTDEGCLIEILASRTPEEIRRISQTYQQQYGRSLEDDIRSDTSFMFQRVLVSLSAGGRDEGNYLDDALVRQDAQDLYEAGEKKWGTDEVKFLTVLCSRNRNHLLHVFDEYKRISQKDIEQSIKSETSGSFEDALLAIVKCMRNKSAYFAEKLYKSMKGLGTDDNTLIRVMVSRAEIDMLDIRAHFKRLYGKSLYSFIKGDTSGDYRKVLLVLCGGDD

SEQ ID NO: 26011 - protein, 366 aa, Homo sapiens
MASMAAVLTWALALLSAFSATQARKGFWDYFSQTSGDKGRVEQIHQQKMAREPATLKDSLEQDLNNMNKFLEKLRPLSGSEAPRLPQDPVGMRRQLQEELEEVKARLQPYMAEAHELVGWNLEGLRQQLKPYTMDLMEQVALRVQELQEQLRVVGEDTKAQLLGGVDEAWALLQGLQSRVVHHTGRFKELFHPYAESLVSGIGRHVQELHRSVAPHAPASPARLSRCVQVLSRKLTLKAKALHARIQQNLDQLREELSRAFAGTGTEEGAGPDPQMLSEEVRQRLQAFRQDTYLQIAAFTRAIDQETEEVQQQLAPPPPGHSAFAPEFQQTDSGKVLSKLQARLDDLWEDITHSLHDQGHSHLGDP

SEQ ID NO: 26012 - protein, 351 aa, Homo sapiens
MEGAALLKIFVVCIWVQQNHPGWTVAGQFQEKKRFTEEVIEYFQKKVSPVHLKILLTSDEAWKRFVRVAELPREEADALYEALKNLTPYVAIEDKDMQQKEQQFREWFLKEFPQIRWKIQESIERLRVIANEIEKVHRGCVIANVVSGSTGILSVIGVMLAPFTAGLSLSITAAGVGLGIASATAGIASSIVENTYTRSAELTASRLTATSTDQLEALRDILRDITPNVLSFALDFDEATKMIANDVHTLRRSKATVGRPLIAWRYVPINVVETLRTRGAPTRIVRKVARNLGKATSGVLVVLDVVNLVQDSLDLHKGAKSESAESLRQWAQELEENLNELTHIHQSLKAG

SEQ ID NO: 26013 - protein, 348 aa, Homo sapiens
MGSWVQLITSVGVQQNHPGWTVAGQFQEKKRFTEEVIEYFQKKVSPVHLKILLTSDEAWKRFVRVAELPREEADALYEALKNLTPYVAIEDKDMQQKEQQFREWFLKEFPQIRWKIQESIERLRVIANEIEKVHRGCVIANVVSGSTGILSVIGVMLAPFTAGLSLSITAAGVGLGIASATAGIASSIVENTYTRSAELTASRLTATSTDQLEALRDILRDITPNVLSFALDFDEATKMIANDVHTLRRSKATVGRPLIAWRYVPINVVETLRTRGAPTRIVRKVARNLGKATSGVLVVLDVVNLVQDSLDLHKGAKSESAESLRQWAQELEENLNELTHIHQSLKAG

SEQ ID NO: 26014 - protein, 347 aa, Homo sapiens
MGSWVQLITSVGVQQNHPGWTVAGQFQEKKRFTEEVIEYFQKKVSPVHLKILLTSDEAWKRFVRVAELPREEADALYEALKNLTPYVAIEDKDMQQKEQQFREWFLKFPQIRWKIQESIERLRVIANEIEKVHRGCVIANVVSGSTGILSVIGVMLAPFTAGLSLSITAAGVGLGIASATAGIASSIVENTYTRSAELTASRLTATSTDQLEALRDILRDITPNVLSFALDFDEATKMIANDVHTLRRSKATVGRPLIAWRYVPINVVETLRTRGAPTRIVRKVARNLGKATSGVLVVLDVVNLVQDSLDLHKGAKSESAESLRQWAQELEENLNELTHIHQSLKAG

SEQ ID NO: 26015 - protein, 670 aa, Homo sapiens
MIASCLCYLLLPATRLFRALSDAFFTCRKNVLLANSSSPQVEGDFAMAPRGPEQEECEGLLQQWREEGLSQVLSTASEGPLIDKGLAQSSLALLMDNPGEENAASEDRWSSRQLSDLRAAENLDEPFPEMLGEEPLLEVEGVEGSMWAAIPMQSEPQYADCAALPVGALATEQWEEDPAVLAWSIAPEPVPQEEASIWPFEGLGQLQPPAVEIPYHEILWREWEDFSTQPDAQGLKAGDGPQFQFTLMSYNILAQDLMQQSSELYLHCHPDILNWNYRFVNLMQEFQHWDPDILCLQEVQEDHYWEQLEPSLRMMGFTCFYKRRTGCKTDGCAVCYKPTRFRLLCASPVEYFRPGLELLNRDNVGLVLLLQPLVPEGLGQVSVAPLCVANTHILYNPRRGDVKLAQMAILLAEVDKVARLSDGSHCPIILCGDLNSVPDSPLYNFIRDGELQYHGMPAWKVSGQEDFSHQLYQRKLQAPLWPSSLGITDCCQYVTSCHPKRSERRKYGRDFLLRFRFCSIACQRPVGLVLMEGVTDTKPERPAGWAESVLEEDASELEPAFSRTVGTIQHCLHLTSVYTHFLPQRGRPEVTTMPLGLGMTVDYIFFSAESCENGNRTDHRLYRDGTLKLLGRLSLLSEEILWAANGLPNPFCSSDHLCLLASFGMEVTAP

SEQ ID NO: 26016 - protein, 100 aa, Homo sapiens
MKLLAATVLLLTICSLEGALVRRQAKEPCVESLVSQYFQTVTDYGKDLMEKVKSPELQAEAKSYFEKSKEQLTPLIKKAGTELVNFLSYFVELGTQPATQ

SEQ ID NO: 26017 - protein, 271 aa, Homo sapiens
MEDSHKSTTSETAPQPGSAVQGAHISHIAQQVSSLSESEESQDSSDSIGSSQKAHGILARRPSYRKILKDLSSEDTRGRKGDGENSGVSAAVTSMSVPTPIYQTSSGQYIAIAPNGALQLASPGTDGVQGLQTLTMTNSGSTQQGTTILQYAQTSDGQQILVPSNQVVVQTASGDMQTYQIRTTPSATSLPQTVVMTSPVTLTSQTTKTDDPQLKREIRLMKNREAARECRRKKKEYVKCLENRVAVLENQNKTLIEELKTLKDLYSNKSV

SEQ ID NO: 26018 - protein, 136 aa, Homo sapiens
MTNSGSTQQGTTILQYAQTSDGQQILVPSNQVVVQTASGDMQTYQIRTTPSATSLPQTVVMTSPVTLTSQTTKTDDPQLKREIRLMKNREAARECRRKKKEYVKCLENRVAVLENQNKTLIEELKTLKDLYSNKSV

SEQ ID NO: 26019 - protein, 1188 aa, Homo sapiens
MLNGAGLDKALKMSLPRRSRIRSSVGPVRSSLGYKKAEDEMSRATSVGDQLEAPARTIYLNQPHLNKFRDNQISTAKYSVLTFLPRFLYEQIRRAANAFFLFIALLQQIPDVSPTGRYTTLVPLIIILTIAGIKEIVEDFKRHKADNAVNKKKTIVLRNGMWHTIMWKEVAVGDIVKVVNGQYLPADVVLLSSSEPQAMCYVETANLDGETNLKIRQGLSHTADMQTREVLMKLSGTIECEGPNRHLYDFTGNLNLDGKSLVALGPDQILLRGTQLRNTQWVFGIVVYTGHDTKLMQNSTKAPLKRSNVEKVTNVQILVLFGILLVMALVSSAGALYWNRSHGEKNWYIKKMDTTSDNFGYNLLTFIILYNNLIPISLLVTLEVVKYTQALFINWDTDMYYIGNDTPAMARTSNLNEELGQVKYLFSDKTGTLTCNIMNFKKCSIAGVTYGHFPELAREPSSDDFCRMPPPCSDSCDFDDPRLLKNIEDRHPTAPCIQEFLTLLAVCHTVVPEKDGDNIIYQASSPDEAALVKGAKKLGFVFTARTPFSVIIEAMGQEQTFGILNVLEFSSDRKRMSVIVRTPSGRLRLYCKGADNVIFERLSKDSKYMEETLCHLEYFATEGLRTLCVAYADLSENEYEEWLKVYQEASTILKDRAQRLEECYEIIEKNLLLLGATAIEDRLQAGVPETIATLLKAEIKIWVLTGDKQETAINIGYSCRLVSQNMALILLKEDSLDATRAAITQHCTDLGNLLGKENDVALIIDGHTLKYALSFEVRRSFLDLALSCKAVICCRVSPLQKSEIVDVVKKRVKAITLAIGDGANDVGMIQTAHVGVGISGNEGMQATNNSDYAIAQFSYLEKLLLVHGAWSYNRVTKCILYCFYKNVVLYIIELWFAFVNGFSGQILFERWCIGLYNVIFTALPPFTLGIFERSCTQESMLRFPQLYKITQNGEGFNTKVFWGHCINALVHSLILFWFPMKALEHDTVLTSGHATDYLFVGNIVYTYVVVTVCLKAGLETTAWTKFSHLAVWGSMLTWLVFFGIYSTIWPTIPIAPDMRGQATMVLSSAHFWLGLFLVPTACLIEDVAWRAAKHTCKKTLLEEVQELETKSRVLGKAVLRDSNGKRLNERDRLIKRLGRKTPPTLFRGSSLQQGVPHGYAFSQEEHGAVSQEEVIRAYDTTKKKSRKK

SEQ ID NO: 26020 - protein, 1148 aa, Homo sapiens
MSRATSVGDQLEAPARTIYLNQPHLNKFRDNQISTAKYSVLTFLPRFLYEQIRRAANAFFLFIALLQQIPDVSPTGRYTTLVPLIIILTIAGIKEIVEDFKRHKADNAVNKKKTIVLRNGMWHTIMWKEVAVGDIVKVVNGQYLPADVVLLSSSEPQAMCYVETANLDGETNLKIRQGLSHTADMQTREVLMKLSGTIECEGPNRHLYDFTGNLNLDGKSLVALGPDQILLRGTQLRNTQWVFGIVVYTGHDTKLMQNSTKAPLKRSNVEKVTNVQILVLFGILLVMALVSSAGALYWNRSHGEKNWYIKKMDTTSDNFGYNLLTFIILYNNLIPISLLVTLEVVKYTQALFINWDTDMYYIGNDTPAMARTSNLNEELGQVKYLFSDKTGTLTCNIMNFKKCSIAGVTYGHFPELAREPSSDDFCRMPPPCSDSCDFDDPRLLKNIEDRHPTAPCIQEFLTLLAVCHTVVPEKDGDNIIYQASSPDEAALVKGAKKLGFVFTARTPFSVIIEAMGQEQTFGILNVLEFSSDRKRMSVIVRTPSGRLRLYCKGADNVIFERLSKDSKYMEETLCHLEYFATEGLRTLCVAYADLSENEYEEWLKVYQEASTILKDRAQRLEECYEIIEKNLLLLGATAIEDRLQAGVPETIATLLKAEIKIWVLTGDKQETAINIGYSCRLVSQNMALILLKEDSLDATRAAITQHCTDLGNLLGKENDVALIIDGHTLKYALSFEVRRSFLDLALSCKAVICCRVSPLQKSEIVDVVKKRVKAITLAIGDGANDVGMIQTAHVGVGISGNEGMQATNNSDYAIAQFSYLEKLLLVHGAWSYNRVTKCILYCFYKNVVLYIIELWFAFVNGFSGQILFERWCIGLYNVIFTALPPFTLGIFERSCTQESMLRFPQLYKITQNGEGFNTKVFWGHCINALVHSLILFWFPMKALEHDTVLTSGHATDYLFVGNIVYTYVVVTVCLKAGLETTAWTKFSHLAVWGSMLTWLVFFGIYSTIWPTIPIAPDMRGQATMVLSSAHFWLGLFLVPTACLIEDVAWRAAKHTCKKTLLEEVQELETKSRVLGKAVLRDSNGKRLNERDRLIKRLGRKTPPTLFRGSSLQQGVPHGYAFSQEEHGAVSQEEVIRAYDTTKKKSRKK

SEQ ID NO: 26021 - protein, 528 aa, Homo sapiens
MSRATSVGDQLEAPARTIYLNQPHLNKFRDNQISTAKYSVLTFLPRFLYEQIRRAANAFFLFIALLQQIPDVSPTGRYTTLVPLIIILTIAGIKEIVEDFKRHKADNAVNKKKTIVLRNGMWHTIMWKEVAVGDIVKVVNGQYLPADVVLLSSSEPQAMCYVETANLDGETNLKIRQGLSHTADMQTREVLMKLSGTIECEGPNRHLYDFTGNLNLDGKSLVALGPDQILLRGTQLRNTQWVFGIVVYTGHDTKLMQNSTKAPLKRSNVEKVTNVQILVLFGILLVMALVSSAGALYWNRSHGEKNWYIKKMDTTSDNFGYNLLTFIILYNNLIPISLLVTLEVVKYTQALFINWDTDMYYIGNDTPAMARTSNLNEELGQVKYLFSDKTGTLTCNIMNFKKCSIAGVTYGHFPELAREPSSDDFCRMPPPCSDSCDFDDPRLLKNIEDRHPTAPCIQEFLTLLAVCHTVVPEKDGDNIIYQASSPDEAALVKGAKKLGFVFTARTPFSVIIEAVSNMRVHISDHLLL

SEQ ID NO: 26022 - protein, 662 aa, Homo sapiens
MEGAPTVRQVMNEGDSSLATDLQEDVEENPSPTVEENNVVVKKQGPNLHNWSGDWSFWISSSTYKDRNEEYRRQFTHLPDTERLIADYACALQRDILLQGRLYLSENWLCFYSNIFRWETTISIALKNITFMTKEKTARLIPNAIQIVTESEKFFFTSFGARDRSYLSIFRLWQNVLLDKSLTRQEFWQLLQQNYGTELGLNAEEMENLSLSIEDVQPRSPGRSSLDDSGERDEKLSKSISFTSESISRVSETESFDGNSSKGGLGKEESQNEKQTKKSLLPTLEKKLTRVPSKSLDLNKNEYLSLDKSSTSDSVDEENVPEKDLHGRLFINRIFHISADRMFELLFTSSRFMQKFASSRNIIDVVSTPWTAELGGDQLRTMTYTIVLNSPLTGKCTAATEKQTLYKESREARFYLVDSEVLTHDVPYHDYFYTVNRYCIIRSSKQKCRLRVSTDLKYRKQPWGLVKSLIEKNSWSSLEDYFKQLESDLLIEESVLNQAIEDPGKLTGLRRRRRTFNRTAETVPKLSSQHSSGDVGLGAKGDITGKKKEMENYNVTLIVVMSIFVLLLVLLNVTLFLKLSKIEHAAQSFYRLRLQEEKSLNLASDMVSRAETIQKNKDQAHRLKGVLRDSIVMLEQLKSSLIMLQKTFDLLNKNKTGMAVES

SEQ ID NO: 26023 - protein, 457 aa, Homo sapiens
MENLSLSIEDVQPRSPGRSSLDDSGERDEKLSKSISFTSESISRVSETESFDGNSSKGGLGKEESQNEKQTKKSLLPTLEKKLTRVPSKSLDLNKNEYLSLDKSSTSDSVDEENVPEKDLHGRLFINRIFHISADRMFELLFTSSRFMQKFASSRNIIDVVSTPWTAELGGDQLRTMTYTIVLNSPLTGKCTAATEKQTLYKESREARFYLVDSEVLTHDVPYHDYFYTVNRYCIIRSSKQKCRLRVSTDLKYRKQPWGLVKSLIEKNSWSSLEDYFKQLESDLLIEESVLNQAIEDPGKLTGLRRRRRTFNRTAETVPKLSSQHSSGDVGLGAKGDITGKKKEMENYNVTLIVVMSIFVLLLVLLNVTLFLKLSKIEHAAQSFYRLRLQEEKSLNLASDMVSRAETIQKNKDQAHRLKGVLRDSIVMLEQLKSSLIMLQKTFDLLNKNKTGMAVES

SEQ ID NO: 26024 - protein, 551 aa, Homo sapiens
MMALVRDRRAHYVMSIVIRWVHCFSSSLRGTFGTRWEAMKAKATELRVCCARRKREAREFKPPQMRGSTRLNISDDLKIGFFSTDHATQTDSSEILSVKELSSSTQKLAQMMKSLQVDFGFLKQLLQLKFEDRLKEESLSLFTILHDRILEIEKHYQQNEDKMRKSFNQQLADAIAVIKGMYQQFFEVEEENVSLQDASTVKTNILLRKLKEKEEVIKELKEELDQYKDFGFHKMESFAKETSSPKSNLEKENLEYKVENERLLQIISELEEEIQINLKENSGLEDELISMKEMAEKDHKTIQKLMDSRDRLREELHYEKSLVQDVINKQKEDKEMRKKYGSLSVKVARSAKGREASLSPWPKSPPSTTALRPHSATMSVSSAGAQKAKMPKKALKEDQAVVEDKHGLESQIEALKANLENEKKKVERFRKEADRLNKSWEKRFFILRNSFHVLKNEMFTRHTLFRQFAVLADTSFNYIKVKPLLVQSRTTMTAISSSSHCTSSIDGKHVDVVSDQAALQLSPKGKLSESPKEESLEEPSMRQSSPAETVD

SEQ ID NO: 26025 - protein, 185 aa, Homo sapiens
MMALVRDRRAHYVMSIVIRWVHCFSSSLRGTFGTRWEAMKAKATELRVCCARRKREAREFKPPQMRGSTRLNISDDLKIGFFSTDHATQTDSSEILSVKELSSSTQKLAQMMKSLQVDFGFLKQLLQLKFEDRLKEESLSLFTILHDRILEIEKHYQQNEDKMRKSFNQQLADAIAVIKGMYQPL

SEQ ID NO: 26026 - protein, 467 aa, Homo sapiens
MLMSWSPEECKGQGEPLDDRHPLCARLVEKPSRGSEEHLKSGPGPIVTRTASGPALAFWQAVLAGDVGCVSRILADSSTGLAPDSVFDTSDPERWRDFRFNIRALRLWSLTYEEELTTPLHVAASRGHTEVLRLLLRRRARPDSAPGGRTALHEACAAGHTACVHVLLVAGADPNIADQDGKRPLHLCRGPGTLECAELLLRFGARVDGRSEEEEETPLHVAARLGHVELADLLLRRGACPDARNAEGWTPLLAACDVRCQSITDAEATTARCLQLCSLLLSAGADADAADQDKQRPLHLACRRGHAAVVELLLSCGVSANTMDYGGHTPLHCALQGPAAALAQSPEHVVRALLNHGAVRVWPGALPKVLERWSTCPRTIEVLMNTYSVVQLPEEAVGLVTPETLQKHQRFYSSLFALVRQPRSLQHLSRCALRSHLEGSLPQALPRLPLPPRLLRYLQLDFEGVLY

SEQ ID NO: 26027 - protein, 429 aa, Homo sapiens
MLMSWSPEECKGQGEPLDDRHPLCARLVEKPSRGSEEHLKSGPGPIVTRTASGPALAFWQAVLAGDVGCVSRILADSSTGLAPDSVFDTSDPERWRDFRFNIRALRLWSLTYEEELTTPLHVAASRGHTEVLRLLLRRRARPDSAPGGRTALHEACAAGHTACVHVLLVAGADPNIADQDGKRPLHLCRGPGTLECAELLLRFGARVDGRSEEEEETPLHVAARLGHVELADLLLRRGACPDARNAEGWTPLLAACDVRCQSITDAEATTARCLQLCSLLLSAGADADAADQDKQRPLHLACRRGHAAVVELLLSCGVSANTMDYGGHTPLHCALQGPAAALAQSPEHVVRALLNHGAVRVWPGALPKKHQRFYSSLFALVRQPRSLQHLSRCALRSHLEGSLPQALPRLPLPPRLLRYLQLDFEGVLY

SEQ ID NO: 26028 - protein, 452 aa, Homo sapiens
MPWGKNSSPHWGHHLGCLPSAPACRIWRPHSRPAWEPPRPSPLLCQDMALQNALYTGDLARLQELFPPHSTADLLLESRAAEPRWSSHQRGLWSLTYEEELTTPLHVAASRGHTEVLRLLLRRRARPDSAPGGRTALHEACAAGHTACVHVLLVAGADPNIADQDGKRPLHLCRGPGTLECAELLLRFGARVDGRSEEEEETPLHVAARLGHVELADLLLRRGACPDARNAEGWTPLLAACDVRCQSITDAEATTARCLQLCSLLLSAGADADAADQDKQRPLHLACRRGHAAVVELLLSCGVSANTMDYGGHTPLHCALQGPAAALAQSPEHVVRALLNHGAVRVWPGALPKVLERWSTCPRTIEVLMNTYSVVQLPEEAVGLVTPETLQKHQRFYSSLFALVRQPRSLQHLSRCALRSHLEGSLPQALPRLPLPPRLLRYLQLDFEGVLY

SEQ ID NO: 26029 - protein, 294 aa, Homo sapiens
MDGKQGGMDGSKPAGPRDFPGIRLLSNPLMGDAVSDWSPMHEAAIHGHQLSLRNLISQGWAVNIITADHVSPLHEACLGGHLSCVKILLKHGAQVNGVTADWHTPLFNACVSGSWDCVNLLLQHGASVQPESDLASPIHEAARRGHVECVNSLIAYGGNIDHKISHLGTPLYLACENQQRACVKKLLESGADVNQGKGQDSPLHAVARTASEELACLLMDFGADTQAKNAEGKRPVELVPPESPLAQLFLEREGPPSLMQLCRLRIRKCFGIQQHHKITKLVLPEDLKQFLLHL

SEQ ID NO: 26030 - protein, 262 aa, Homo sapiens
MDGKQGGMDGSKPAGPRDFPGIRLLSNPLMGDAVSDWSPMHEAAIHGHQLSLRNLISQGWAVNIITADHVSPLHEACLGGHLSCVKILLKHGAQVNGVTADWHTPLFNACVSGSWDCVNLLLQHGASVQPESDLASPIHEAARRGHVECVNSLIAYGGNIDHKISHLGTPLYLACENQQRACVKKLLESGADVNQGKGQDSPLHAVARTASEELACLLMDFGADTQAKNAEGKRPVELVPPESPLAQLFLEREGASLPKPKP

SEQ ID NO: 26031 - protein, 252 aa, Homo sapiens
MDGKQGGMDGSKPAGPRDFPGIRLLSNPLMGDAVSDWSPMHEAAIHGHQLSLRNLISQGWAVNIITADHVSPLHEACLGGHLSCVKILLKHGAQVNGVTADWHTPLFNACVSGSWDCVNLLLQHGASVQPESDLASPIHEAARRAYGGNIDHKISHLGTPLYLACENQQRACVKKLLESGADVNQGKGQDSPLHAVARTASEELACLLMDFGADTQAKNAEGKRPVELVPPESPLAQLFLEREGASLPKPKP

SEQ ID NO: 26032 - protein, 455 aa, Homo sapiens
MRLLAWLIFLANWGGARAEPGKFWHIADLHLDPDYKVSKDPFQVCPSAGSQPVPDAGPWGDYLCDSPWALINSSIYAMKEIEPEPDFILWTGDDTPHVPDEKLGEAAVLEIVERLTKLIREVFPDTKVYAALGNHDFHPKNQFPAGSNNIYNQIAELWKPWLSNESIALFKKGAFYCEKLPGPSGAGRIVVLNTNLYYTSNALTADMADPGQQFQWLEDVLTDASKAGDMVYIVGHVPPGFFEKTQNKAWFREGFNEKYLKVVRKHHRVIAGQFFGHHHTDSFRMLYDDAGVPISAMFITPGVTPWKTTLPGVVNGANNPAIRVFEYDRATLSLKDMVTYFMNLSQANAQGTPRWELEYQLTEAYGVPDASAHSMHTVLDRIAGDQSTLQRYYVYNSVSYSAGVCDEACSMQHVCAMRQVDIDAYTTCLYASGTTPVPQLPLLLMALLGLCTLVL

SEQ ID NO: 26033 - protein, 373 aa, Homo sapiens
MRLLAWLIFLANWGGARAEPGKFWHIADLHLDPDYKVSKDPFQVCPSAGSQPVPDAGPWGDYLCDSPWALINSSIYAMKEIEPEPDFILWTGDDTPHVPDEKLGEAAVLEIVERLTKLIREVFPDTKVYAALGNHDFHPKNQFPAGSNNIYNQIAELWKPWLSNESIALFKKGAFYCEKLPGPSGAGRIVVLNTNLYYTSNALTADMADPGQQFQWLEDVLTDASKAGDMVYIVGHVPPGFFEKTQNKAWFREGFNEKYLKVVRKHHRVIAGQFFGHHHTDSFRMLYDDAGVPISAMFITPGVTPWKTTLPGVVNGANNPAIRVFEYDRATLSLKVRSPAEARGGGWEGLKCITTFPHSQLIHLPLTTEPQEG

SEQ ID NO: 26034 - protein, 1134 aa, Homo sapiens
MDCSLVRTLVHRYCAGEENWVDSRTIYVGHREPPPGAEAYIPQRYPDNRIVSSKYTFWNFIPKNLFEQFRRVANFYFLIIFLVQLIIDTPTSPVTSGLPLFFVITVTAIKQGYEDWLRHKADNAMNQCPVHFIQHGKLVRKQSRKLRVGDIVMVKEDETFPCDLIFLSSNRGDGTCHVTTASLDGESSHKTHYAVQDTKGFHTEEDIGGLHATIECEQPQPDLYKFVGRINVYSDLNDPVVRPLGSENLLLRGATLKNTEKIFGVAIYTGMETKMALNYQSKSQKRSAVEKSMNAFLIVYLCILISKALINTVLKYMWQSEPFRDEPWYNQKTESERQRNLFLKAFTDFLAFMVLFNYIIPVSMYVTVEMQKFLGSYFITWDEDMFDEETGEGPLVNTSDLNEELGQVEYIFTDKTGTLTENNMEFKECCIEGHVYVPHVICNGQVLPESSGIDMIDSSPSVNGREREELFFRALCLCHTVQVKDDDSVDGPRKSPDGGKSCVYISSSPDEVALVEGVQRLGFTYLRLKDNYMEILNRENHIERFELLEILSFDSVRRRMSVIVKSATGEIYLFCKGADSSIFPRVIEGKVDQIRARVERNAVEGLRTLCVAYKRLIQEEYEGICKLLQAAKVALQDREKKLAEAYEQIEKDLTLLGATAVEDRLQEKAADTIEALQKAGIKVWVLTGDKMETAAATCYACKLFRRNTQLLELTTKRIEEQSLHDVLFELSKTVLRHSGSLTRDNLSGLSADMQDYGLIIDGAALSLIMKPREDGSSGNYRELFLEICRSCSAVLCCRMAPLQKAQIVKLIKFSKEHPITLAIGDGANDVSMILEAHVGIGVIGKEGRQAARNSDYAIPKFKHLKKMLLVHGHFYYIRISELVQYFFYKNVCFIFPQFLYQFFCGFSQQTLYDTAYLTLYNISFTSLPILLYSLMEQHVGIDVLKRDPTLYRDVAKNALLRWRVFIYWTLLGLFDALVFFFGAYFVFENTTVTSNGQIFGNWTFGTLVFTVMVFTVTLKLALDTHYWTWINHFVIWGSLLFYVVFSLLWGGVIWPFLNYQRMYYVFIQMLSSGPAWLAIVLLVTISLLPDVLKKVLCRQLWPTATERVQTKSQCLSVEQSTIFMLSQTSSSLSF

SEQ ID NO: 26035 - protein, 251 aa, Homo sapiens
MTQLPELGLRSPNNKSPTGPHPLEHLLARLLKRRRRSTLMSSPRSLLCSISGPGSHLLSTHPILCHSVYQPPQPASRPQAKRYQGLLPVPLAPHPLCLSGQLYLPNIPCTVIDGCGPVISHLKLTMYPWGLPPSHLGSSSPFSANMEQWDYYKSQTRFAPFLPESFCGSPLPSEQSSRPFGLAFKVLCAATCQPPQFQLLWLCPYKLDLHQRICLPPNLALVLLGALWTSPPPGSFLQPPYNRPYKLYKTN

SEQ ID NO: 26036 - protein, 2202 aa, Homo sapiens
MALPRLTGALRSFSNVTKQDNYNEEVADLKIKRSKLHEQVLDLGLTWKKIIKFLNEKLEKSKMQSINEDLKDILHAAKQIVGTDNGREAIESGAAFLFMTFHLKDSVGHKETKAIKQMFGPFPSSSATAACNATNRIISHFSQDDLTALVQMTEKEHGDRVFFGKNLAFSFDMHDLDHFDELPINGETQKTISLDYKKFLNEHLQEACTPELKPVEKTNGSFLWCEVEKYLNSTLKEMTEVPRVEDLCCTLYDMLASIKSGDELQDELFELLGPEGLELIEKLLQNRITIVDRFLNSSNDHRFQALQDNCKKILGENAKPNYGCQVTIQSEQEKQLMKQYRREEKRIARREKKAGEDLEVSEGLMCFDPKELRIQREQALLNARSVPILSRQRDADVEKIHYPHVYDSQAEAMKTSAFIAGAKMILPEGIQRENNKLYEEVRIPYSEPMPLSFEEKPVYIQDLDEIGQLAFKGMKRLNRIQSIVFETAYNTNENMLICAPTGAGKTNIAMLTVLHEIRQHFQQGVIKKNEFKIVYVAPMKALAAEMTDYFSRRLEPLGIIVKELTGDMQLSKSEILRTQMLVTTPEKWDVVTRKSVGDVALSQIVRLLILDEVHLLHEDRGPVLESIVARTLRQVESTQSMIRILGLSATLPNYLDVATFLHVNPYIGLFFFDGRFRPVPLGQTFLGIKCANKMQQLNNMDEVCYENVLKQVKAGHQVMVFVHARNATVRTAMSLIERAKNCGHIPFFFPTQGHDYVLAEKQVQRSRNKQVRELFPDGFSIHHAGMLRQDRNLVENLFSNGHIKVLVCTATLAWGVNLPAHAVIIKGTQIYAAKRGSFVDLGILDVMQIFGRAGRPQFDKFGEGIIITTHDKLSHYLTLLTQRNPIESQFLESLADNLNAEIALGTVTNVEEAVKWISYTYLYVRMRANPLAYGISHKAYQIDPTLRKHREQLVIEVGRKLDKAQMIRFEERTGYFSSTDLGRTASHYYIKYNTIETFNELFDAHKTEGDIFAIVSKAEEFDQIKVREEEIEELDTLLSNFCELSTPGGVENSYGKINILLQTYISRGEMDSFSLISDSAYVAQNAARIVRALFEIALRKRWPTMTYRLLNLSKVIDKRLWGWASPLRQFSILPPHILTRLEEKKLTVDKLKDMRKDEIGHILHHVNIGLKVKQCVHQIPSVMMEASIQPITRTVLRVTLSIYADFTWNDQVHGTVGEPWWIWVEDPTNDHIYHSEYFLALKKQVISKEAQLLVFTIPIFEPLPSQYYIRAVSDRWLGAEAVCIINFQHLILPERHPPHTELLDLQPLPITALGCKAYEALYNFSHFNPVQTQIFHTLYHTDCNVLLGAPTGSGKTVAAELAIFRVFNKYPTSKAVYIAPLKALVRERMDDWKVRIEEKLGKKVIELTGDVTPDMKSIAKADLIVTTPEKWDGVSRSWQNRNYVQQVTILIIDEIHLLGEERGPVLEVIVSRTNFISSHTEKPVRIVGLSTALANARDLADWLNIKQMGLFNFRPSVRPVPLEVHIQGFPGQHYCPRMASMNKPAFQAIRSHSPAKPVLIFVSSRRQTRLTALELIAFLATEEDPKQWLNMDEREMENIIATVRDSNLKLTLAFGIGMHHAGLHERDRKTVEELFVNCKVQVLIATSTLAWGVNFPAHLVIIKGTEYYDGKTRRYVDFPITDVLQMMGRAGRPQFDDQGKAVILVHDIKKDFYKKFLYEPFPVESSLLGVLSDHLNAEIAGGTITSKQDALDYITWTYFFRRLIMNPSYYNLGDVSHDSVNKFLSHLIEKSLIELELSYCIEIGEDNRSIEPLTYGRIASYYYLKHQTVKMFKDRLKPECSTEELLSILSDAEEYTDLPVRHNEDHMNSELAKCLPIESNPHSFDSPHTKAHLLLQAHLSRAMLPCPDYDTDTKTVLDQALRVCQAMLDVAANQGWLVTVLNITNLIQMVIQGRWLKDSSLLTLPNIENHHLHLFKKWKPIMKGPHARGRTSIESLPELIHACGGKDHVFSSMVESELHAAKTKQAWNFLSHLPVINVGISVKGSWDDLVEGHNELSVSTLTADKRDDNKWIKLHADQEYVLQVSLQRVHFGFHKGKPESCAVTPRFPKSKDEGWFLILGEVDKRELIALKRVGYIRNHHVASLSFYTPEIPGRYIYTLYFMSDCYLGLDQQYDIYLNVTQASLSAQVNTKVSDSLTDLALK

SEQ ID NO: 26037 - protein, 111 aa, Homo sapiens
MALPRLTGALRSFSNVTKQDNYNEEVADLKIKRSKLHEQVLDLGLTWKKIIKFLNEKLEKSKMQSINEDLKDILHAAKQIEVNCPFQKRRLDGKEEDEKMSRASDRFRGLR

SEQ ID NO: 26038 - protein, 731 aa, Homo sapiens
MALPRLTGALRSFSNVTKQDNYNEEVADLKIKRSKLHEQVLDLGLTWKKIIKFLNEKLEKSKMQSINEDLKDILHAAKQIVGTDNGREAIESGAAFLFMTFHLKDSVGHKETKAIKQMFGPFPSSSATAACNATNRIISHFSQDDLTALVQMTEKEHGDRVFFGKNLAFSFDMHDLDHFDELPINGETQKTISLDYKKFLNEHLQEACTPELKPVEKTNGSFLWCEVEKYLNSTLKEMTEVPRVEDLCCTLYDMLASIKSGDELQDELFELLGPEGLELIEKLLQNRITIVDRFLNSSNDHRFQALQDNCKKILGENAKPNYGCQVTIQSEQEKQLMKQYRREEKRIARREKKAGEDLEVSEGLMCFDPKELRIQREQALLNARSVPILSRQRDADVEKIHYPHVYDSQAEAMKTSAFIAGAKMILPEGIQRENNKLYEEVRIPYSEPMPLSFEEKPVYIQDLDEIGQLAFKGMKRLNRIQSIVFETAYNTNENMLICAPTGAGKTNIAMLTVLHEIRQHFQQGVIKKNEFKIVYVAPMKALAAEMTDYFSRRLEPLGIIVKELTGDMQLSKSEILRTQMLVTTPEKWDVVTRKSVGDVALSQIVRLLILDEVHLLHEDRGPVLESIVARTLRQVESTQSMIRILGLSATLPNYLDVATFLHVNPYIGLFFFDGRFRPVPLGQTFLGIKCANKMQQLNNMDEVCYENVLKQVKAGHQVHLFYLLLHLFICF

SEQ ID NO: 26039 - protein, 288 aa, Homo sapiens
MSSSMWYIMQSIQSKYSLSERLIRTIAAIRSFPHDNVEDLIRGGADVNCTHGTLKPLHCACMVSDADCVELLLEKGAEVNALDGYNRTALHYAAEKDEACVEVLLEYGANPNALDGNRDTPLHWAAFKNNAECVRALLESGASVNALDYNNDTPLSWAAMKGNLESVSILLDYGAEVRVINLIGQTPISRLVALLVRGLGTEKEDSCFELLHRAVGHFELRKNGTMPREVARDPQLCEKLTVLCSAPGTLKTLARYAVRRSLGLQYLPDAVKGLPLPASLKEYLLLLE

SEQ ID NO: 26040 - protein, 1196 aa, Homo sapiens
MGHFEKGQHALLNEGEENEMEIFGYRTQGCRKSLCLAGSIFSFGILPLVFYWRPAWHVWAHCVPCSLQEADTVLLRTTDEFQIYSWKKVIWIYLSALNSAFGLTPDHPLMTDEEYIINRAIRKPDLKVRCIKVQKIRYVWNYLEGQFQKIGSLEDWLSSAKIHQKFGSGLTREEQEIRRLICGPNTIDVEVTPIWKLLIKEVLNPFYIFQLFSVCLWFSEDYKEYAFAIIIMSIISISLTVYDLREQSVKLHHLVESHNSITVSVCGRKAGVQELESRVLVPGDLLILTGNKVLMPCDAVLIEGSCVVDEGMLTGESIPVTKTPLPKMDSSVPWKTQSEADYKRHVLFCGTEVIQAKAACSGTVRAVVLQTGFNTAKGDLVRSILYPKPVNFQLYRDAIRFLLCLVGTATIGMIYTLCVYVLSGEPPEEVVRKALDVITIAVPPALPAALTTGIIYAQRRLKKRGIFCISPQRINVCGQLNLVCFDKTGTLTRDGLDLWGVVSCDRNGFQEVHSFASGQALPWGPLCAAMASCHSLILLDGTIQGDPLDLKMFEATTWEMAFSGDDFHIKGVPAHAMVVKPCRTASQVPVEGIAILHQFPFSSALQRMTVIVQEMGGDRLAFMKGAPERVASFCQPETVPTSFVSELQIYTTQGFRVIALAYKKLENDHHATTLTRETVESDLIFLGLLILENRLKEETKPVLEELISARIRTVMITGDNLQTAITVARKSGMVSESQKVILIEANETTGSSSASISWTLVEEKKHIMYGNQDNYINIRDEVSDKGREGSYHFALTGKSFHVISQHFSSLLPKILINGTIFARMSPGQKSSLVEEFQKLDYFVGMCGDGANDCGALKMAHVGISLSEQEASVASPFTSKTPNIECVPHLIKEGRAALVTSFCMFKYMALYSMIQYVGVLLLYWETNSLSNYQFLFQDLAITTLIGVTMNLNGAYPKLVPFRPAGRLISPPLLLSVIFNILLSLAMHIAGFILVQRQPWYSVEIHSACTVQNESISELTMSPTAPEKMESNSTFTSFENTTVWFLGTINCITVALVFSKGKPFRQPTYTNYIFVLVLIIQLGVCLFILFADIPELYRRLDLLCTPVLWRASIVIMLSLNFIVSLVAEEAVIENRALWMMIKRCFGYQSKSQYRIWQRDLANDPSWPPLNQTSHSDMPECGRGVSYSNPVFESNEEQL

SEQ ID NO: 26041 - protein, 840 aa, Homo sapiens
MGHFEKGQHALLNEGEENEMEIFGYRTQGCRKSLCLAGSIFSFGILPLVFYWRPAWHVWAHCVPCSLQEADTVLLRTTDEFQIYSWKKVIWIYLSALNSAFGLTPDHPLMTDEEYIINRAIRKPDLKVRCIKVQKIRYVWNYLEGQFQKIGSLEDWLSSAKIHQKFGSGLTREEQEIRRLICGPNTIDVEVTPIWKLLIKEVLNPFYIFQLFSVCLWFSEDYKEYAFAIIIMSIISISLTVYDLREQSVKLHHLVESHNSITVSVCGRKAGVQELESRVLVPGDLLILTGNKVLMPCDAVLIEGSCVVDEGMLTGESIPVTKTPLPKMDSSVPWKTQSEADYKRHVLFCGTEVIQAKAACSGTVRAVVLQTGFNTAKGDLVRSILYPKPVNFQLYRDAIRFLLCLVGTATIGMIYTLCVYVLSGEPPEEVVRKALDVITIAVPPALPAALTTGIIYAQRRLKKRGIFCISPQRINVCGQLNLVCFDKTGTLTRDGLDLWGVVSCDRNGFQEVHSFASGQALPWGPLCAAMASCHSLILLDGTIQGDPLDLKMFEATTWEMAFSGDDFHIKGVPAHAMVVKPCRTASQVPVEGIAILHQFPFSSALQRMTVIVQEMGGDRLAFMKGAPERVASFCQPETVPTSFVSELQIYTTQGFRVIALAYKKLENDHHATTLTRETVESDLIFLGLLILENRLKEETKPVLEELISARIRTVMITGDNLQTAITVARKSGMVSESQKVILIEANETTGSSSASISWTLVEEKKHIMYGNQDNYINIRDEVSDKGREGSYHFALTGKSFHVISQHFSSLLPKILINGTIFARMSPGQKSSLVEEFQKLD

SEQ ID NO: 26042 - protein, 576 aa, Homo sapiens
MGHFEKGQHALLNEGEENEMEIFGYRTQGCRKSLCLAGSIFSFGILPLVFYWRPAWHVWAHCVPCSLQEADTVLLRTTDEFQIYSWKKVIWIYLSALNSAFGLTPDHPLMTDEEYIINRAIRKPDLKVRCIKVQKIRYVWNYLEGQFQKIGSLEDWLSSAKIHQKFGSGLTREEQEIRRLICGPNTIDVEVTPIWKLLIKEVLNPFYIFQLFSVCLWFSEDYKEYAFAIIIMSIISISLTVYDLREQSVKLHHLVESHNSITVSVCGRKAGVQELESRVLVPGDLLILTGNKVLMPCDAVLIEGSCVVDEGMLTGESIPVTKTPLPKMDSSVPWKTQSEADYKRHVLFCGTEVIQAKAACSGTVRAVVLQTGFNTAKGDLVRSILYPKPVNFQLYRDAIRFLLCLVGTATIGMIYTLCVYVLSGEPPEEVVRKALDVITIAVPPALPAALTTGIIYAQRRLKKRGIFCISPQRINVCGQLNLVCFDKTGTLTRDGLDLWGVVSCDRNGFQEVHSFASGQALPWGPLCAAMASCHSLILLDGTIQGDPLDLKMFEATTWVSLCSSENLRSFFNARAT

SEQ ID NO: 26043 - protein, 212 aa, Homo sapiens
MHIAGFILVQRQPWYSVEIHSACTVQNESISELTMSPTAPEKMESNSTFTSFENTTVWFLGTINCITVALVFSKGKPFRQPTYTNYIFVLVLIIQLGVCLFILFADIPELYRRLDLLCTPVLWRASIVIMLSLNFIVSLVAEEAVIENRALWMMIKRCFGYQSKSQYRIWQRDLANDPSWPPLNQTSHSDMPECGRGVSYSNPVFESNEEQL

SEQ ID NO: 26044 - protein, 202 aa, Homo sapiens
MAKVSVLNVAVLENPSPFHSPFRFEISFECSEALADDLEWKIIYVGSAESEEFDQILDSVLVGPVPAGRHMFVFQADAPNPSLIPETDAVGVTVVLITCTYHGQEFIRVGYYVNNEYLNPELRENPPMKPDFSQLQRNILASNPRVTRFHINWDNNMDRLEAIETQDPSLGCGLPLNCTPIKGLGLPGCIPGLLPENSMDCI

SEQ ID NO: 26045 - protein, 2969 aa, Homo sapiens
MDPRNTAMLGLGSDSEGFSRKSPSAISTGTLVSKREVELEKNTKEEEDLRKRNRERNIEAGKDDGLTDAQQQFSVKETNFSEGNLKLKIGLQAKRTKKPPKNLENYVCRPAIKTTIKHPRKALKSGKMTDEKNEHCPSKRDPSKLYKKADDVAAIECQSEEVIRLHSQGENNPLSKKLSPVHSEMADYINATPSTLLGSRDPDLKDRALLNGGTSVTEKLAQLIATCPPSKSSKTKPKKLGTGTTAGLVSKDLIRKAGVGSVAGIIHKDLIKKPTISTAVGLVTKDPGKKPVFNAAVGLVNKDSVKKLGTGTTAVFINKNLGKKPGTITTVGLLSKDSGKKLGIGIVPGLVHKESGKKLGLGTVVGLVNKDLGKKLGSTVGLVAKDCAKKIVASSAMGLVNKDIGKKLMSCPLAGLISKDAINLKAEALLPTQEPLKASCSTNINNQESQELSESLKDSATSKTFEKNVVRQNKESILEKFSVRKEIINLEKEMFNEGTCIQQDSFSSSEKGSYETSKHEKQPPVYCTSPDFKMGGASDVSTAKSPFSAVGESNLPSPSPTVSVNPLTRSPPETSSQLAPNPLLLSSTTELIEEISESVGKNQFTSESTHLNVGHRSVGHSISIECKGIDKEVNDSKTTHIDIPRISSSLGKKPSLTSESSIHTITPSVVNFTSLFSNKPFLKLGAVSASDKHCQVAESLSTSLQSKPLKKRKGRKPRWTKVVARSTCRSPKGLELERSELFKNVSCSSLSNSNSEPAKFMKNIGPPSFVDHDFLKRRLPKLSKSTAPSLALLADSEKPSHKSFATHKLSSSMCVSSDLLSDIYKPKRGRPKSKEMPQLEGPPKRTLKIPASKVFSLQSKEEQEPPILQPEIEIPSFKQGLSVSPFPKKRGRPKRQMRSPVKMKPPVLSVAPFVATESPSKLESESDNHRSSSDFFESEDQLQDPDDLDDSHRPSVCSMSDLEMEPDKKITKRNNGQLMKTIIRKINKMKTLKRKKLLNQILSSSVESSNKGKVQSKLHNTVSSLAATFGSKLGQQINVSKKGTIYIGKRRGRKPKTVLNGILSGSPTSLAVLEQTAQQAAGSALGQILPPLLPSSASSSEILPSPICSQSSGTSGGQSPVSSDAGFVEPSSVPYLHLHSRQGSMIQTLAMKKASKGRRRLSPPTLLPNSPSHLSELTSLKEATPSPISESHSDETIPSDSGIGTDNNSTSDRAEKFCGQKKRRHSFEHVSLIPPETSTVLSSLKEKHKHKCKRRNHDYLSYDKMKRQKRKRKKKYPQLRNRQDPDFIAELEELISRLSEIRITHRSHHFIPRDLLPTIFRINFNSFYTHPSFPLDPLHYIRKPDLKKKRGRPPKMREAMAEMPFMHSLSFPLSSTGFYPSYGMPYSPSPLTAAPIGLGYYGRYPPTLYPPPPSPSFTTPLPPPSYMHAGHLLLNPAKYHKKKHKLLRQEAFLTTSRTPLLSMSTYPSVPPEMAYGWMVEHKHRHRHKHREHRSSEQPQVSMDTGSSRSVLESLKRYRFGKDAVGERYKHKEKHRCHMSCPHLSPSKSLINREEQWVHREPSESSPLALGLQTPLQIDCSESSPSLSLGGFTPNSEPASSDEHTNLFTSAIGSCRVSNPNSSGRKKLTDSPGLFSAQDTSLNRLHRKESLPSNERAVQTLAGSQPTSDKPSQRPSESTNCSPTRKRSSSESTSSTVNGVPSRSPRLVASGDDSVDSLLQRMVQNEDQEPMEKSIDAVIATASAPPSSSPGRSHSKDRTLGKPDSLLVPAVTSDSCNNSISLLSEKLTSSCSPHHIKRSVVEAMQRQARKMCNYDKILATKKNLDHVNKILKAKKLQRQARTGNNFVKRRPGRPRKCPLQAVVSMQAFQAAQFVNPELNRDEEGAALHLSPDTVTDVIEAVVQSVNLNPEHKKGLKRKGWLLEEQTRKKQKPLPEEEEQENNKSFNEAPVEIPSPSETPAKPSEPESTLQPVLSLIPREKKPPRPPKKKYQKAGLYSDVYKTTDPKSRLIQLKKEKLEYTPGEHEYGLFPAPIHVVFFVSGKYLRQKRIDFQLPYDILWQWKHNQLYKKPDVPLYKKIRSNVYVDVKPLSGYEATTCNCKKPDDDTRKGCVDDCLNRMIFAECSPNTCPCGEQCCNQRIQRHEWVQCLERFRAEEKGWGIRTKEPLKAGQFIIEYLGEVVSEQEFRNRMIEQYHNHSDHYCLNLDSGMVIDSYRMGNEARFINHSCDPNCEMQKWSVNGVYRIGLYALKDMPAGTELTYDYNFHSFNVEKQQLCKCGFEKCRGIIGGKSQRVNGLTSSKNSQPMATHKKSGRSKEKRKSKHKLKKRRGHLSEEPSENINTPTRLTPQLQMKPMSNRERNFVLKHHVFLVRNWEKIRQKQEEVKHTSDNIHSASLYTRWNGICRDDGNIKSDVFMTQFSALQTARSVRTRRLAAAEENIEVARAARLAQIFKEICDGIISYKDSSRQALAAPLLNLPPKKKNADYYEKISDPLDLITIEKQILTGYYKTVEAFDADMLKVFRNAEKYYGRKSPVGRDVCRLRKAYYNARHEASAQIDEIVGETASEADSSETSVSEKENGHEKDDDVIRCICGLYKDEGLMIQCDKCMVWQHCDCMGVNSDVEHYLCEQCDPRPVDREVPMIPRPHYAQPGCVYFICLLRDDLLLRQGDCVYLMRDSRRTPDGHPVRQSYRLLSHINRDKLDIFRIEKLWKNEKEERFAFGHHYFRPHETHHSPSRRFYHNELFRVPLYEIIPLEAVVGTCCVLDLYTYCKGRPKGVKEQDVYICDYRLDKSAHLFYKIHRNRYPVCTKPYAFDHFPKKLTPKKDFSPHYVPDNYKRNGGRSSWKSERSKPPLKDLGQEDDALPLIEEVLASQEQAANEIPSLEEPEREGATANVSEGEKKTEESSQEPQSTCTPEERRHNQRERLNQILLNLLEKIPGKNAIDVTYLLEEGSGRKLRRRTLFIPENSFRK

SEQ ID NO: 26046 - protein, 2964 aa, Homo sapiens
MDPRNTAMLGLGSDSEGFSRKSPSAISTGTLVSKREVELEKNTKEEEDLRKRNRERNIEAGKDDGLTDAQQQFSVKETNFSEGNLKLKIGLQAKRTKKPPKNLENYVCRPAIKTTIKHPRKALKSGKMTDEKNEHCPSKRDPSKLYKKADDVAAIECQSEEVIRLHSQGENNPLSKKLSPVHSEMADYINATPSTLLGSRDPDLKDRALLNGGTSVTEKLAQLIATCPPSKSSKTKPKKLGTGTTAGLVSKDLIRKAGVGSVAGIIHKDLIKKPTISTAVGLVTKDPGKKPVFNAAVGLVNKDSVKKLGTGTTAVFINKNLGKKPGTITTVGLLSKDSGKKLGIGIVPGLVHKESGKKLGLGTVVGLVNKDLGKKLGSTVGLVAKDCAKKIVASSAMGLVNKDIGKKLMSCPLAGLISKDAINLKAEALLPTQEPLKASCSTNINNQESQELSESLKDSATSKTFEKNVVRQNKESILEKFSVRKEIINLEKEMFNEGTCIQQDSFSSSEKGSYETSKHEKQPPVYCTSPDFKMGGASDVSTAKSPFSAVGESNLPSPSPTVSVNPLTRSPPETSSQLAPNPLLLSSTTELIEEISESVGKNQFTSESTHLNVGHRSVGHSISIECKGIDKEVNDSKTTHIDIPRISSSLGKKPSLTSESSIHTITPSVVNFTSLFSNKPFLKLGAVSASDKHCQVAESLSTSLQSKPLKKRKGRKPRWTKVVARSTCRSPKGLELERSELFKNVSCSSLSNSNSEPAKFMKNIGPPSFVDHDFLKRRLPKLSKSTAPSLALLADSEKPSHKSFATHKLSSSMCVSSDLLSDIYKPKRGRPKSKEMPQLEGPPKRTLKIPASKVFSLQSKEEQEPPILQPEIEIPSFKQGLSVSPFPKKRGRPKRQMRSPVKMKPPVLSVAPFVATESPSKLESESDNHRSSSDFFESEDQLQDPDDLDDSHRPSVCSMSDLEMEPDKKITKRNNGQLMKTIIRKINKMKTLKRKKLLNQILSSSVESSNKGKVQSKLHNTVSSLAATFGSKLGQQINVSKKGTIYIGKRRGRKPKTVLNGILSGSPTSLAVLEQTAQQAAGSALGQILPPLLPSSASSSEILPSPICSQSSGTSGGQSPVSSDAGFVEPSSVPYLHLHSRQGSMIQTLAMKKASKGRRRLSPPTLLPNSPSHLSELTSLKEATPSPISESHSDETIPSDSGIGTDNNSTSDRAEKFCGQKKRRHSFEHVSLIPPETSTVLSSLKEKHKHKCKRRNHDYLSYDKMKRQKRKRKKKYPQLRNRQDPDFIAELEELISRLSEIRITHRSHHFIPRDLLPTIFRINFNSFYTHPSFPLDPLHYIRKPDLKKKRGRPPKMREAMAEMPFMHSLSFPLSSTGFYPSYGMPYSPSPLTAAPIGLGYYGRYPPTLYPPPPSPSFTTPLPPPSYMHAGHLLLNPAKYHKKKHKLLRQEAFLTTSRTPLLSMSTYPSVPPEMAYGWMVEHKHRHRHKHREHRSSEQPQVSMDTGSSRSVLESLKRYRFGKDAVGERYKHKEKHRCHMSCPHLSPSKSLINREEQWVHREPSESSPLALGLQTPLQIDCSESSPSLSLGGFTPNSEPASSDEHTNLFTSAIGSCRVSNPNSSGRKKLTDSPGLFSAQDTSLNRLHRKESLPSNERAVQTLAGSQPTSDKPSQRPSESTNCSPTRKRSSSESTSSTVNGVPSRSPRLVASGDDSVDSLLQRMVQNEDQEPMEKSIDAVIATASAPPSSSPGRSHSKDRTLGKPDSLLVPAVTSDSCNNSISLLSEKLTSSCSPHHIKRSVVEAMQRQARKMCNYDKILATKKNLDHVNKILKAKKLQRQARTGNNFVKRRPGRPRKCPLQAVVSMQAFQAAQFVNPELNRDEEGAALHLSPDTVTDVIEAVVQSVNLNPEHKKGLKRKGWLLEEQTRKKQKPLPEEEEQENNKSFNEAPVEIPSPSETPAKPSEPESTLQPVLSLIPREKKPPRPPKKKYQKAGLYSDVYKTTDPKSRLIQLKKEKLEYTPGEHEYGLFPAPIHVGKYLRQKRIDFQLPYDILWQWKHNQLYKKPDVPLYKKIRSNVYVDVKPLSGYEATTCNCKKPDDDTRKGCVDDCLNRMIFAECSPNTCPCGEQCCNQRIQRHEWVQCLERFRAEEKGWGIRTKEPLKAGQFIIEYLGEVVSEQEFRNRMIEQYHNHSDHYCLNLDSGMVIDSYRMGNEARFINHSCDPNCEMQKWSVNGVYRIGLYALKDMPAGTELTYDYNFHSFNVEKQQLCKCGFEKCRGIIGGKSQRVNGLTSSKNSQPMATHKKSGRSKEKRKSKHKLKKRRGHLSEEPSENINTPTRLTPQLQMKPMSNRERNFVLKHHVFLVRNWEKIRQKQEEVKHTSDNIHSASLYTRWNGICRDDGNIKSDVFMTQFSALQTARSVRTRRLAAAEENIEVARAARLAQIFKEICDGIISYKDSSRQALAAPLLNLPPKKKNADYYEKISDPLDLITIEKQILTGYYKTVEAFDADMLKVFRNAEKYYGRKSPVGRDVCRLRKAYYNARHEASAQIDEIVGETASEADSSETSVSEKENGHEKDDDVIRCICGLYKDEGLMIQCDKCMVWQHCDCMGVNSDVEHYLCEQCDPRPVDREVPMIPRPHYAQPGCVYFICLLRDDLLLRQGDCVYLMRDSRRTPDGHPVRQSYRLLSHINRDKLDIFRIEKLWKNEKEERFAFGHHYFRPHETHHSPSRRFYHNELFRVPLYEIIPLEAVVGTCCVLDLYTYCKGRPKGVKEQDVYICDYRLDKSAHLFYKIHRNRYPVCTKPYAFDHFPKKLTPKKDFSPHYVPDNYKRNGGRSSWKSERSKPPLKDLGQEDDALPLIEEVLASQEQAANEIPSLEEPEREGATANVSEGEKKTEESSQEPQSTCTPEERRHNQRERLNQILLNLLEKIPGKNAIDVTYLLEEGSGRKLRRRTLFIPENSFRK

SEQ ID NO: 26047 - protein, 357 aa, Homo sapiens
MRRQLRSRRAPSFPYSYRYRLDDPDEANQNYLADEEEEAEEEARVTVVPKSEEEEEEEEKEEEEEEEKEEEEGQGQPTGNAWWQKLQIMSEYLWDPERRMFLARTGQSWSLILLIYFFFYASLAAVITLCMYTLFLTISPYIPTFTERVKPPGVMIRPFAHSLNFNFNVSEPDTWQHYVISLNGFLQGYNDSLQEEMNVDCPPGQYFIQDGNEDEDKKACQFKRSFLKNCSGLEDPTFGYSTGQPCILLKMNRIVGFRPELGDPVKVSCKVQRGDENDIRSISYYPESASFDLRYYPYYGKLTHVNYTSPLVAMHFTDVVKNQAVPVQCQLKGKGVINDVINDRFVGRVIFTLNIET

SEQ ID NO: 26048 - protein, 353 aa, Homo sapiens
MRRQLRSRRAPSFPYSYRYRLDDPDEANQNYLADEEEEAEEEARVTVVPKSEEEEEEEEKEEEEEEEKEEEEGQGQPTGNAWWQKLQIMSEYLWDPERRMFLARTGLILLIYFFFYASLAAVITLCMYTLFLTISPYIPTFTERVKPPGVMIRPFAHSLNFNFNVSEPDTWQHYVISLNGFLQGYNDSLQEEMNVDCPPGQYFIQDGNEDEDKKACQFKRSFLKNCSGLEDPTFGYSTGQPCILLKMNRIVGFRPELGDPVKVSCKVQRGDENDIRSISYYPESASFDLRYYPYYGKLTHVNYTSPLVAMHFTDVVKNQAVPVQCQLKGKGVINDVINDRFVGRVIFTLNIET

SEQ ID NO: 26049 - protein, 528 aa, Homo sapiens
MELKAEEEEVGGVQPVSIQAFASSSTLHGLAHIFSYERLSLKRALWALCFLGSLAVLLCVCTERVQYYFHYHHVTKLDEVAASQLTFPAVTLCNLNEFRFSQVSKNDLYHAGELLALLNNRYEIPDTQMADEKQLEILQDKANFRSFKPKPFNMREFYDRAGHDIRDMLLSCHFRGEVCSAEDFKVVFTRYGKCYTFNSGRDGRPRLKTMKGGTGNGLEIMLDIQQDEYLPVWGETDETSFEAGIKVQIHSQDEPPFIDQLGFGVAPGFQTFVACQEQRLIYLPPPWGTCKAVTMDSDLDFFDSYSITACRIDCETRYLVENCNCRMVHMPGDAPYCTPEQYKECADPALDFLVEKDQEYCVCEMPCNLTRYGKELSMVKIPSKASAKYLAKKFNKSEQYIGENILVLDIFFEVLNYETIEQKKAYEIAGLLGDIGGQMGLFIGASILTVLELFDYAYEVIKHKLCRRGKCQKEAKRSSADKGVALSLDDVKRHNPCESLRGHPAGMTYAANILPHHPARGTFEDFTC

SEQ ID NO: 26050 - protein, 574 aa, Homo sapiens
MELKAEEEEVGGVQPVSIQAFASSSTLHGLAHIFSYERLSLKRALWALCFLGSLAVLLCVCTERVQYYFHYHHVTKLDEVAASQLTFPAVTLCNLNEFRFSQVSKNDLYHAGELLALLNNRYEIPDTQMADEKQLEILQDKANFRSFKPKPFNMREFYDRAGHDIRDMLLSCHFRGEVCSAEDFKVVFTRYGKCYTFNSGRDGRPRLKTMKGGTGNGLEIMLDIQQDEYLPVWGETDETSFEAGIKVQIHSQDEPPFIDQLGFGVAPGFQTFVACQEQRLIYLPPPWGTCKAVTMDSDLDFFDSYSITACRIDCETRYLVENCNCRMVHMPGDAPYCTPEQYKECADPALDFLVEKDQEYCVCEMPCNLTRYGKELSMVKIPSKASAKYLAKKFNKSEQYIGENILVLDIFFEVLNYETIEQKKAYEIAGLLGELLMTPVPFSCHGHGVAPYHPKAGCSLLSHEGPPPQRPFPKPCCLGDIGGQMGLFIGASILTVLELFDYAYEVIKHKLCRRGKCQKEAKRSSADKGVALSLDDVKRHNPCESLRGHPAGMTYAANILPHHPARGTFEDFTC

SEQ ID NO: 26051 - protein, 562 aa, Homo sapiens
MPIQIFCSMSFSSGEEAPGPLGDIWGPHHHQQQQDISESEEEEEEKEKEAVRKEASEGHSPMDLVAFANSCTLHGTNHIFVEGGPGPRQVLWAVAFVLALGAFLCQVGDRVAYYLSYPHVTLLNEVATTELAFPAVTLCNTNAVRLSQLSYPDLLYLAPMLGLDESDDPGVPLAPPGPEAFSGEPFNLHRFYNRSCHRLEDMLLYCSYQGGPCGPHNFSVVFTRYGKCYTFNSGRDGRPRLKTMKGGTGNGLEIMLDIQQDEYLPVWGETDETSFEAGIKVQIHSQDEPPFIDQLGFGVAPGFQTFVACQEQRLIYLPPPWGTCKAVTMDSDLDFFDSYSITACRIDCETRYLVENCNCRMVHMPGDAPYCTPEQYKECADPALDFLVEKDQEYCVCEMPCNLTRYGKELSMVKIPSKASAKYLAKKFNKSEQYIGENILVLDIFFEVLNYETIEQKKAYEIAGLLGDIGGQMGLFIGASILTVLELFDYAYEVIKHKLCRRGKCQKEAKRSSADKGVALSLDDVKRHNPCESLRGHPAGMTYAANILPHHPARGTFEDFTC

SEQ ID NO: 26052 - protein, 324 aa, Homo sapiens
MEVLGFSNSKMDVRAKRQLEIWMEMAPSKPEPQGKAQQSQPTSVLSAANAAQRGKCCCCREGHSPEDYGRQWAENVENHPEVAAHTSCLQSITPHFIAGEMGCTAKESQEQVPASITQILRNPWFSRLDSPRSRCLHLASSVDPIPGLQFFIVIVSDHQKVDREEEWKQGKIRKEIHWIPLFTMWSWLQCVEDRSIAGIPKLEHGDSHQTESLLDVLVGGFWGVPHTAPPRLQEAGGPTGGCGVGGQPLGGRGQWVGEETGPVGGPHAWWVPPTAPGTSLVLLVLLAQPFQSSEWMPVSSHTPPGTQTNTAALLNVCTSYSEYV

SEQ ID NO: 26053 - protein, 206 aa, Homo sapiens
MAVKKIAIFGATGQTGLTTLAQAVQAGYEVTVLVRDSSRLPSEGPRPAHVVVGDVLQAADVDKTVAGQDAVIVLLGTRNDLSPTTVMSEGARNIVAAMKAHGVDKVVACTSAFLLWDPTKVPPRLQAVTDDHIRMHKVLRESGLKYVAVMPPHIGDQPLTGAYTVTLDGRGPSRVISKHDLGHFMLRCLTTDEYDGHSTYPSHQYQ

SEQ ID NO: 26054 - protein, 236 aa, Homo sapiens
MTGYEARLITFGTWMYSVNKEQLARAGFYAIGQEDKVQCFHCGGGLANWKPKEDPWEQHAKWYPGCKYLLEEKGHEYINNIHLTRSLEGALVQTTKKTPSLTKRISDTIFPNPMLQEAIRMGFDFKDVKKIMEERIQTSGSNYKTLEVLVADLVSAQKDTTENELNQTSLQREISPEEPLRRLQEEKLCKICMDRHIAVVFIPCGHLVTCKQCAEAVDRCPMCSAVIDFKQRVFMS

SEQ ID NO: 26055 - protein, 411 aa, Homo sapiens
MIAPSPKSSEEEGQKDEEVLQGEQGDFNDNDTEPENLGHRPLLMDSEDEEEEEKRSSDSDYEQAKAKYSDMSPVYRDKSGSGPTQDINTILLTSAQLSSDVGVETPKQEFDIFGAVPFFAVCAQQPQQEKNEKSLPQHRFPATGLQQEEFDVFTKAPFSKKVNVQECHAVGPETHPKSIDIFDFTPFQPFLTSTSKSESNEDLFGLVPFEEIMGSQQQKVKQRSLQKLSSRQRRTKQDMSKSNGKRHHGTPTSKKKTLKPTYRTPERARRHKKVGRRVSQTSNEFVTISDSKENIGAAVTDGNDRGNVLQLEESLLDPFGAKPFHPPDLSWHPLHQGLNDIRADHNTVLPKQPRQNSLHGSFHSADVLTMDDFGAMPFTELVVQSITLQQSQQSQPVELDPFGAAPFPSKQ

SEQ ID NO: 26056 - protein, 3046 aa, Homo sapiens
MRGRRGRPPKQPAAPAAERCAPAPPPPPPPPTSGPIGGLRSRHRGSSRGRWAAAQAEVAPKTRLSSPRGGSSSRRKPPPPPPAPPSTSAPGRGGRGGGGGRTGGGGGGGHLARTTAARRAVNKVVYDDHESEEEEEEEDMVSEEEEEEDGDAEETQDSEDDEEDEMEEDDDDSDYPEEMEDDDDDASYCTESSFRSHSTYSSTPGRRKPRVHRPRSPILEEKDIPPLEFPKSSEDLMVPNEHIMNVIAIYEVLRNFGTVLRLSPFRFEDFCAALVSQEQCTLMAEMHVVLLKAVLREEDTSNTTFGPADLKDSVNSTLYFIDGMTWPEVLRVYCESDKEYHHVLPYQEAEDYPYGPVENKIKVLQFLVDQFLTTNIAREELMSEGVIQYDDHCRVCHKLGDLLCCETCSAVYHLECVKPPLEEVPEDEWQCEVCVAHKVPGVTDCVAEIQKNKPYIRHEPIGYDRSRRKYWFLNRRLIIEEDTENENEKKIWYYSTKVQLAELIDCLDKDYWEAELCKILEEMREEIHRHMDITEDLTNKARGSNKSFLAAANEEILESIRAKKGDIDNVKSPEETEKDKNETENDSKDAEKNREEFEDQSLEKDSDDKTPDDDPEQGKSEEPTEVGDKGNSVSANLGDNTTNATSEETSPSEGRSPVGCLSETPDSSNMAEKKVASELPQDVPEEPNKTCESSNTSATTTSIQPNLENSNSSSELNSSQSESAKAADDPENGERESHTPVSIQEEIVGDFKSEKSNGELSESPGAGKGASGSTRIITRLRNPDSKLSQLKSQQVAAAAHEANKLFKEGKEVLVVNSQGEISRLSTKKEVIMKGNINNYFKLGQEGKYRVYHNQYSTNSFALNKHQHREDHDKRRHLAHKFCLTPAGEFKWNGSVHGSKVLTISTLRLTITQLENNIPSSFLHPNWASHRANWIKAVQMCSKPREFALALAILECAVKPVVMLPIWRESLGHTRLHRMTSIEREEKEKVKKKEKKQEEEETMQQATWVKYTFPVKHQVWKQKGEEYRVTGYGGWSWISKTHVYRFVPKLPGNTNVNYRKSLEGTKNNMDENMDESDKRKCSRSPKKIKIEPDSEKDEVKGSDAAKGADQNEMDISKITEKKDQDVKELLDSDSDKPCKEEPMEVDDDMKTESHVNCQESSQVDVVNVSEGFHLRTSYKKKTKSSKLDGLLERRIKQFTLEEKQRLEKIKLEGGIKGIGKTSTNSSKNLSESPVITKAKEGCQSDSMRQEQSPNANNDQPEDLIQGCSESDSSVLRMSDPSHTTNKLYPKDRVLDDVSIRSPETKCPKQNSIENDIEEKVSDLASRGQEPSKSKTKGNDFFIDDSKLASADDIGTLICKNKKPLIQEESDTIVSSSKSALHSSVPKSTNDRDATPLSRAMDFEGKLGCDSESNSTLENSSDTVSIQDSSEEDMIVQNSNESISEQFRTREQDVEVLEPLKCELVSGESTGNCEDRLPVKGTEANGKKPSQQKKLEERPVNKCSDQIKLKNTTDKKNNENRESEKKGQRTSTFQINGKDNKPKIYLKGECLKEISESRVVSGNVEPKVNNINKIIPENDIKSLTVKESAIRPFINGDVIMEDFNERNSSETKSHLLSSSDAEGNYRDSLETLPSTKESDSTQTTTPSASCPESNSVNQVEDMEIETSEVKKVTSSPITSEEESNLSNDFIDENGLPINKNENVNGESKRKTVITEVTTMTSTVATESKTVIKVEKGDKQTVVSSTENCAKSTVTTTTTTVTKLSTPSTGGSVDIISVKEQSKTVVTTTVTDSLTTTGGTLVTSMTVSKEYSTRDKVKLMKFSRPKKTRSGTALPSYRKFVTKSSKKSIFVLPNDDLKKLARKGGIREVPYFNYNAKPALDIWPYPSPRPTFGITWRYRLQTVKSLAGVSLMLRLLWASLRWDDMAAKAPPGGGTTRTETSETEITTTEIIKRRDVGPYGIRSEYCIRKIICPIGVPETPKETPTPQRKGLRSSALRPKRPETPKQTGPVIIETWVAEEELELWEIRAFAERVEKEKAQAVEQQAKKRLEQQKPTVIATSTTSPTSSTTSTISPAQKVMVAPISGSVTTGTKMVLTTKVGSPATVTFQQNKNFHQTFATWVKQGQSNSGVVQVQQKVLGIIPSSTGTSQQTFTSFQPRTATVTIRPNTSGSGGTTSNSQVITGPQIRPGMTVIRTPLQQSTLGKAIIRTPVMVQPGAPQQVMTQIIRGQPVSTAVSAPNTVSSTPGQKSLTSATSTSNIQSSASQPPRPQQGQVKLTMAQLTQLTQGHGGNQGLTVVIQGQGQTTGQLQLIPQGVTVLPGPGQQLMQAAMPNGTVQRFLFTPLATTATTASTTTTTVSTTAAGTGEQRQSKLSPQMQVHQDKTLPPAQSSSVGPAEAQPQTAQPSAQPQPQTQPQSPAQPEVQTQPEVQTQTTVSSHVPSEAQPTHAQSSKPQVAAQSQPQSNVQGQSPVRVQSPSQTRIRPSTPSQLSPGQQSQVQTTTSQPIPIQPHTSLQIPSQGQPQSQPQVQSSTQTLSSGQTLNQVTVSSPSRPQLQIQQPQPQVIAVPQLQQQVQVLSQIQSQVVAQIQAQQSGVPQQIKLQLPIQIQQSSAVQTHQIQNVVTVQAASVQEQLQRVQQLRDQQQKKKQQQIEIKREHTLQASNQSEIIQKQVVMKHNAVIEHLKQKKSMTPAEREENQRMIVCNQVMKYILDKIDKEEKQAAKKRKREESVEQKRSKQNATKLSALLFKHKEQLRAEILKKRALLDKDLQIEVQEELKRDLKIKKEKDLMQLAQATAVAAPCPPVTPAPPAPPAPPPSPPPPPAVQHTGLLSTPTLPAASQKRKREEEKDSSSKSKKKKMISTTSKETKKDTKLYCICKTPYDESKFYIGCDRCQNWYHGRCVGILQSEAELIDEYVCPQCQSTEDAMTVLTPLTEKDYEGLKRVLRSLQAHKMAWPFLEPVDPNDAPDYYGVIKEPMDLATMEERVQRRYYEKLTEFVADMTKIFDNCRYYNPSDSPFYQCAEVLESFFVQKLKGFKASRSHNNKLQSTAS

SEQ ID NO: 26057 - protein, 2920 aa, Homo sapiens
MRGRRGRPPKQPAAPAAERCAPAPPPPPPPPTSGPIGGLRSRHRGSSRGRWAAAQAEVAPKTRLSSPRGGSSSRRKPPPPPPAPPSTSAPGRGGRGGGGGRTGGGGGGGHLARTTAARRAVNKVVYDDHESEEEEEEEDMVSEEEEEEDGDAEETQDSEDDEEDEMEEDDDDSDYPEEMEDDDDDASYCTESSFRSHSTYSSTPGRRKPRVHRPRSPILEEKDIPPLEFPKSSEDLMVPNEHIMNVIAIYEVLRNFGTVLRLSPFRFEDFCAALVSQEQCTLMAEMHVVLLKAVLREEDTSNTTFGPADLKDSVNSTLYFIDGMTWPEVLRVYCESDKEYHHVLPYQEAEDYPYGPVENKIKVLQFLVDQFLTTNIAREELMSEGVIQYDDHCRVCHKLGDLLCCETCSAVYHLECVKPPLEEVPEDEWQCEVCVAHKVPGVTDCVAEIQKNKPYIRHEPIGYDRSRRKYWFLNRRLIIEEDTENENEKKIWYYSTKVQLAELIDCLDKDYWEAELCKILEEMREEIHRHMDITEDLTNKARGSNKSFLAAANEEILESIRAKKGDIDNVKSPEETEKDKNETENDSKDAEKNREEFEDQSLEKDSDDKTPDDDPEQGKSEVGDFKSEKSNGELSESPGAGKGASGSTRIITRLRNPDSKLSQLKSQQVAAAAHEANKLFKEGKEVLVVNSQGEISRLSTKKEVIMKGNINNYFKLGQEGKYRVYHNQYSTNSFALNKHQHREDHDKRRHLAHKFCLTPAGEFKWNGSVHGSKVLTISTLRLTITQLENNIPSSFLHPNWASHRANWIKAVQMCSKPREFALALAILECAVKPVVMLPIWRESLGHTRLHRMTSIEREEKEKVKKKEKKQEEEETMQQATWVKYTFPVKHQVWKQKGEEYRVTGYGGWSWISKTHVYRFVPKLPGNTNVNYRKSLEGTKNNMDENMDESDKRKCSRSPKKIKIEPDSEKDEVKGSDAAKGADQNEMDISKITEKKDQDVKELLDSDSDKPCKEEPMEVDDDMKTESHVNCQESSQVDVVNVSEGFHLRTSYKKKTKSSKLDGLLERRIKQFTLEEKQRLEKIKLEGGIKGIGKTSTNSSKNLSESPVITKAKEGCQSDSMRQEQSPNANNDQPEDLIQGCSESDSSVLRMSDPSHTTNKLYPKDRVLDDVSIRSPETKCPKQNSIENDIEEKVSDLASRGQEPSKSKTKGNDFFIDDSKLASADDIGTLICKNKKPLIQEESDTIVSSSKSALHSSVPKSTNDRDATPLSRAMDFEGKLGCDSESNSTLENSSDTVSIQDSSEEDMIVQNSNESISEQFRTREQDVEVLEPLKCELVSGESTGNCEDRLPVKGTEANGKKPSQQKKLEERPVNKCSDQIKLKNTTDKKNNENRESEKKGQRTSTFQINGKDNKPKIYLKGECLKEISESRVVSGNVEPKVNNINKIIPENDIKSLTVKESAIRPFINGDVIMEDFNERNSSETKSHLLSSSDAEGNYRDSLETLPSTKESDSTQTTTPSASCPESNSVNQVEDMEIETSEVKKVTSSPITSEEESNLSNDFIDENGLPINKNENVNGESKRKTVITEVTTMTSTVATESKTVIKVEKGDKQTVVSSTENCAKSTVTTTTTTVTKLSTPSTGGSVDIISVKEQSKTVVTTTVTDSLTTTGGTLVTSMTVSKEYSTRDKVKLMKFSRPKKTRSGTALPSYRKFVTKSSKKSIFVLPNDDLKKLARKGGIREVPYFNYNAKPALDIWPYPSPRPTFGITWRYRLQTVKSLAGVSLMLRLLWASLRWDDMAAKAPPGGGTTRTETSETEITTTEIIKRRDVGPYGIRSEYCIRKIICPIGVPETPKETPTPQRKGLRSSALRPKRPETPKQTGPVIIETWVAEEELELWEIRAFAERVEKEKAQAVEQQAKKRLEQQKPTVIATSTTSPTSSTTSTISPAQKVMVAPISGSVTTGTKMVLTTKVGSPATVTFQQNKNFHQTFATWVKQGQSNSGVVQVQQKVLGIIPSSTGTSQQTFTSFQPRTATVTIRPNTSGSGGTTSNSQVITGPQIRPGMTVIRTPLQQSTLGKAIIRTPVMVQPGAPQQVMTQIIRGQPVSTAVSAPNTVSSTPGQKSLTSATSTSNIQSSASQPPRPQQGQVKLTMAQLTQLTQGHGGNQGLTVVIQGQGQTTGQLQLIPQGVTVLPGPGQQLMQAAMPNGTVQRFLFTPLATTATTASTTTTTVSTTAAGTGEQRQSKLSPQMQVHQDKTLPPAQSSSVGPAEAQPQTAQPSAQPQPQTQPQSPAQPEVQTQPEVQTQTTVSSHVPSEAQPTHAQSSKPQVAAQSQPQSNVQGQSPVRVQSPSQTRIRPSTPSQLSPGQQSQVQTTTSQPIPIQPHTSLQIPSQGQPQSQPQVQSSTQTLSSGQTLNQVTVSSPSRPQLQIQQPQPQVIAVPQLQQQVQVLSQIQSQVVAQIQAQQSGVPQQIKLQLPIQIQQSSAVQTHQIQNVVTVQAASVQEQLQRVQQLRDQQQKKKQQQIEIKREHTLQASNQSEIIQKQVVMKHNAVIEHLKQKKSMTPAEREENQRMIVCNQVMKYILDKIDKEEKQAAKKRKREESVEQKRSKQNATKLSALLFKHKEQLRAEILKKRALLDKDLQIEVQEELKRDLKIKKEKDLMQLAQATAVAAPCPPVTPAPPAPPAPPPSPPPPPAVQHTGLLSTPTLPAASQKRKREEEKDSSSKSKKKKMISTTSKETKKDTKLYCICKTPYDESKFYIGCDRCQNWYHGRCVGILQSEAELIDEYVCPQCQSTEDAMTVLTPLTEKDYEGLKRVLRSLQAHKMAWPFLEPVDPNDAPDYYGVIKEPMDLATMEERVQRRYYEKLTEFVADMTKIFDNCRYYNPSDSPFYQCAEVLESFFVQKLKGFKASRSHNNKLQSTAS

SEQ ID NO: 26058 - protein, 2903 aa, Homo sapiens
MRGRRGRPPKQPAAPAAERCAPAPPPPPPPPTSGPIGGLRSRHRGSSRGRWAAAQAEVAPKTRLSSPRGGSSSRRKPPPPPPAPPSTSAPGRGGRGGGGGRTGGGGGGGHLARTTAARRAVNKVVYDDHESEEEEEEEDMVSEEEEEEDGDAEETQDSEDDEEDEMEEDDDDSDYPEEMEDDDDDASYCTESSFRSHSTYSSTPGRRKPRVHRPRSPILEEKDIPPLEFPKSSEDLMVPNEHIMNVIAIYEVLRNFGTVLRLSPFRFEDFCAALVSQEQCTLMAEMHVVLLKAVLREEDTSNTTFGPADLKDSVNSTLYFIDGMTWPEVLRVYCESDKEYHHVLPYQEAEDYPYGPVENKIKVLQFLVDQFLTTNIAREELMSEGVIQYDDHCRVCHKLGDLLCCETCSAVYHLECVKPPLEEVPEDEWQCEVCVAHKVPGVTDCVAEIQKNKPYIRHEPIGYDRSRRKYWFLNRRLIIEEDTENENEKKIWYYSTKVQLAELIDCLDKDYWEAELCKILEEMREEIHRHMDITEDLTNKARGSNKSFLAAANEEILESIRAKKGDIDNVKSPEETEKDKNETENDSKDAEKNREEFEDQSLEKDSDDKTPDDDPEQGKSEEPTEVGDKGNSVSANLGDNTTNATSEETSPSEGRSPVGCLSETPDSSNMAEKKVASELPQDVPEEPNKTCESSNTSATTTSIQPNLENSNSSSELNSSQSESAKAADDPENGERESHTPVSIQEEIVGDFKSEKSNGELSESPGAGKGASGSTRIITRLRNPDSKLSQLKSQQVAAAAHEANKLFKEGKEVLVVNSQGEISRLSTKKEVIMKGNINNYFKLGQEGKYRVYHNQYSTNSFALNKHQHREDHDKRRHLAHKFCLTPAGEFKWNGSVHGSKVLTISTLRLTITQLENNIPSSFLHPNWASHRANWIKAVQMCSKPREFALALAILECAVKPVVMLPIWRESLGHTRLHRMTSIEREEKEKVKKKEKKQEEEETMQQATWVKYTFPVKHQVWKQKGEEYRVTGYGGWSWISKTHVYRFVPKLPGNTNVNYRKSLEGTKNNMDENMDESDKRKCSRSPKKIKIEPDSEKDEVKGSDAAKGADQNEMDISKITEKKDQDVKELLDSDSDKPCKEEPMEVDDDMKTESHVNCQESSQVDVVNVSEGFHLRTSYKKKTKSSKLDGLLERRIKQFTLEEKQRLEKIKLEGGIKGIGKTSTNSSKNLSESPVITKAKEGCQSDSMRQEQSPNANNDQPEDLIQGCSESDSSVLRMSDPSHTTNKLYPKDRVLDDVSIRSPETKCPKQNSIENDIEEKVSDLASRGQEPSKSKTKGNDFFIDDSKLASADDIGTLICKNKKPLIQEESDTIVSSSKSALHSSVPKSTNDRDATPLSRAMDFEGKLGCDSESNSTLENSSDTVSIQDSSEEDMIVQNSNESISEQFRTREQDVEVLEPLKCELVSGESTGNCEDRLPVKGTEANGKKPSQQKKLEERPVNKCSDQIKLKNTTDKKNNENRESEKKGQRTSTFQINGKDNKPKIYLKGECLKEISESRVVSGNVEPKVNNINKIIPENDIKSLTVKESAIRPFINGDVIMEDFNERNSSETKSHLLSSSDAEGNYRDSLETLPSTKESDSTQTTTPSASCPESNSVNQVEDMEIETSEVKKVTSSPITSEEESNLSNDFIDENGLPINKNENVNGESKRKTVITEVTTMTSTVATESKTVIKVEKGDKQTVVSSTENCAKSTVTTTTTTVTKLSTPSTGGSVDIISVKEQSKTVVTTTVTDSLTTTGGTLVTSMTVSKEYSTRDKVKLMKFSRPKKTRSGTALPSYRKFVTKSSKKSIFVLPNDDLKKLARKGGIREVPYFNYNAKPALDIWPYPSPRPTFGITWRYRLQTVKSLAGVSLMLRLLWASLRWDDMAAKAPPGGGTTRTETSETEITTTEIIKRRDVGPYGIRSEYCIRKIICPIGVPETPKETPTPQRKGLRSSALRPKRPETPKQTGPVIIETWVAEEELELWEIRAFAERVEKEKAQAVEQQAKKRLEQQKPTVIATSTTSPTSSTTSTISPAQKVMVAPISGSVTTGTKMVLTTKVGSPATVTFQQNKNFHQTFATWVKQGQSNSGVVQVQQKVLGIIPSSTGTSQQTFTSFQPRTATVTIRPNTSGSGGTTSNSQVITGPQIRPGMTVIRTPLQQSTLGKAIIRTPVMVQPGAPQQVMTQIIRGQPVSTAVSAPNTVSSTPGQKSLTSATSTSNIQSSASQPPRPQQGQVKLTMAQLTQLTQGHGGNQGLTVVIQGQGQTTGQLQLIPQGVTVLPGPGQQLMQAAMPNGTVQRFLFTPLATTATTASTTTTTVSTTAAGTGEQRQSKLSPQMQVHQDKTLPPAQSSSVGPAEAQPQTAQPSAQPQPQTQPQSPAQPEVQTQPEVQTQTTVSSHVPSEAQPTHAQSSKPQVAAQSQPQSNVQGQSPVRVQSPSQTRIRPSTPSQLSPGQQSQVQTTTSQPIPIQPHTSLQIPSQGQPQSQPQVVMKHNAVIEHLKQKKSMTPAEREENQRMIVCNQVMKYILDKIDKEEKQAAKKRKREESVEQKRSKQNATKLSALLFKHKEQLRAEILKKRALLDKDLQIEVQEELKRDLKIKKEKDLMQLAQATAVAAPCPPVTPAPPAPPAPPPSPPPPPAVQHTGLLSTPTLPAASQKRKREEEKDSSSKSKKKKMISTTSKETKKDTKLYCICKTPYDESKFYIGCDRCQNWYHGRCVGILQSEAELIDEYVCPQCQSTEDAMTVLTPLTEKDYEGLKRVLRSLQAHKMAWPFLEPVDPNDAPDYYGVIKEPMDLATMEERVQRRYYEKLTEFVADMTKIFDNCRYYNPSDSPFYQCAEVLESFFVQKLKGFKASRSHNNKLQSTAS

SEQ ID NO: 26059 - protein, 585 aa, Homo sapiens
MTITYTSQVANARLGSFSRLLLCWRGSIYKLLYGEFLIFLLCYYIIRFIYRLALTEEQQLMFEKLTLYCDSYIQLIPISFVLGFYVTLVVTRWWNQYENLPWPDRLMSLVSGFVEGKDEQGRLLRRTLIRYANLGNVLILRSVSTAVYKRFPSAQHLVQAGFMTPAEHKQLEKLSLPHNMFWVPWVWFANLSMKAWLGGRIRDPILLQSLLNEMNTLRTQCGHLYAYDWISIPLVYTQVVTVAVYSFFLTCLVGRQFLNPAKAYPGHELDLVVPVFTFLQFFFYVGWLKVAEQLINPFGEDDDDFETNWIVDRNLQVSLLAVDEMHQDLPRMEPDMYWNKPEPQPPYTAASAQFRRASFMGSTFNISLNKEEMEFQPNQEDEEDAHAGIIGRFLGLQSHDHHPPRANSRTKLLWPKRESLLHEGLPKNHKAAKQNVRGQEDNKAWKLKAVDAFKSAPLYQRPGYYSAPQTPLSPTPMFFPLEPSAPSKLHSVTGIDTKDKSLKTVSSGAKKSFELLSESDGALMEHPEVSQVRRKTVEFNLTDMPEIPENHLKEPLEQSPTNIHTTLKDHMDPYWALENRDEAHS

SEQ ID NO: 26060 - protein, 604 aa, Homo sapiens
MFEKLTLYCDSYIQLIPISFVLGFYVTLVVTRWWNQYENLPWPDRLMSLVSGFVEGKDEQGRLLRRTLIRYANLGNVLILRSVSTAVYKRFPSAQHLVQAGFMTPAEHKQLEKLSLPHNMFWVPWVWFANLSMKAWLGGRIRDPILLQSLLNEMNTLRTQCGHLYAYDWISIPLVYTQVVTVAVYSFFLTCLVGRQFLNPAKAYPGHELDLVVPVFTFLQFFFYVGWLKVAEQLINPFGEDDDDFETNWIVDRNLQVSLLAVDEMHQDLPRMEPDMYWNKPEPQPPYTAASAQFRRASFMGSTFNISLNKEEMEFQPNQEDEEDAHAGIIGRFLGLQSHDHHPPRANSRTKLLWPKRESLLHEGLPKNHKAAKQNVRGQEDNKAWKLKAVDAFKSAPLYQRPGYYSAPQTPLSPTPMFFPLEPSAPSKLHSVTGIDTKDKSLKTVSSGAKKSFELLSESDGALMEHPEVSQVRRKTVEFNLTDMPEIPENHLKEPLEQSPTNIHTTLKDHMDPYWALENRSVLHLNQGHCIALCPTPASLALSLPFLHNFLGFHHCQSTLDLRPALAWGIYLATFTGILGKCSGPFLTSPWYHPEDFLGPGEGR

SEQ ID NO: 26061 - protein, 498 aa, Homo sapiens
MFEKLTLYCDSYIQLIPISFVLGFYVTLVVTRWWNQYENLPWPDRLMSLVSGFVEGKDEQGRLLRRTLIRYANLGNVLILRSVSTAVYKRFPSAQHLVQAGFMTPAEHKQLEKLSLPHNMFWVPWVWFANLSMKAWLGGRIRDPILLQSLLNEMNTLRTQCGHLYAYDWISIPLVYTQVVTVAVYSFFLTCLVGRQFLNPAKAYPGHELDLVVPVFTFLQFFFYVGWLKVSLLAVDEMHQDLPRMEPDMYWNKPEPQPPYTAASAQFRRASFMGSTFNISLNKEEMEFQPNQEDEEDAHAGIIGRFLGLQSHDHHPPRANSRTKLLWPKRESLLHEGLPKNHKAAKQNVRGQEDNKAWKLKAVDAFKSAPLYQRPGYYSAPQTPLSPTPMFFPLEPSAPSKLHSVTGIDTKDKSLKTVSSGAKKSFELLSESDGALMEHPEVSQVRRKTVEFNLTDMPEIPENHLKEPLEQSPTNIHTTLKDHMDPYWALENRDEAHS

SEQ ID NO: 26062 - protein, 357 aa, Homo sapiens
MESSRGRPGPETDLLAVAEHQALVFGGGPGRTSSEPPAGLRVSGEEETENVGGANRHPRTSPKTSSCGVVHRPEREALENEPGPQGTLSGAGSRRGAPGAEHEPSLSSRHKNPAPPEGKPSSGRDCRRGGPGGGMDVEQQEEEDNDEEAAAGSRAGRSFSSRLQDSRSLDGLSEACGGAGSSGSAESGAGGGRRATISSPLELEGTVSRHGDLTHFVANNLQLKIRLSGAPPPPPSAPARPCPAPAPTPTPAIPPIDPEVLRDLERLSRELGGRVDRLLRGLGGAVQELTALSVGCIQTYRDAVDSLGEAVDMSIKGMYTLLARCEELERALQPVQGLARQVRDIRRTLEVLEALCK

SEQ ID NO: 26063 - protein, 382 aa, Homo sapiens
MGDWSALGKLLDKVQAYSTAGGKVWLSVLFIFRILLLGTAVESAWGDEQSAFRCNTQQPGCENVCYDKSFPISHVRFWVLQIIFVSVPTLLYLAHVFYVMRKEEKLNKKEEELKVAQTDGVNVDMHLKQIEIKKFKYGIEEHGKVKMRGGLLRTYIISILFKSIFEVAFLLIQWYIYGFSLSAVYTCKRDPCPHQVDCFLSRPTEKTIFIIFMLVVSLVSLALNIIELFYVFFKGVKDRVKGKSDPYHATSGALSPAKDCGSQKYAYFNGCSSPTAPLSPMSPPGYKLVTGDRNNSSCRNYNKQASEQNWANYSAEQNRMGQAGSTISNSHAQPFDFPDDNQNSKKLAAGHELQPLAIVDQRPSSRASSRASSRPRPDDLEI

SEQ ID NO: 26064 - protein, 706 aa, Homo sapiens
MASPADSCIQFTRHASDVLLNLNRLRSRDILTDVVIVVSREQFRAHKTVLMACSGLFYSIFTDQLKCNLSVINLDPEINPEGFCILLDFMYTSRLNLREGNIMAVMATAMYLQMEHVVDTCRKFIKASEAEMVSAIKPPREEFLNSRMLMPQDIMAYRGREVVENNLPLRSAPGCESRAFAPSLYSGLSTPPASYSMYSHLPVSSLLFSDEEFRDVRMPVANPFPKERALPCDSARPVPGEYSRPTLEVSPNVCHSNIYSPKETIPEEARSDMHYSVAEGLKPAAPSARNAPYFPCDKASKEEERPSSEDEIALHFEPPNAPLNRKGLVSPQSPQKSDCQPNSPTESCSSKNACILQASGSPPAKSPTDPKACNWKKYKFIVLNSLNQNAKPEGPEQAELGRLSPRAYTAPPACQPPMEPENLDLQSPTKLSASGEDSTIPQASRLNNIVNRSMTGSPRSSSESHSPLYMHPPKCTSCGSQSPQHAEMCLHTAGPTFPEEMGETQSEYSDSSCENGAFFCNECDCRFSEEASLKRHTLQTHSDKPYKCDRCQASFRYKGNLASHKTVHTGEKPYRCNICGAQFNRPANLKTHTRIHSGEKPYKCETCGARFVQVAHLRAHVLIHTGEKPYPCEICGTRFRHLQTLKSHLRIHTGEKPYHCEKCNLHFRHKSQLRLHLRQKHGAITNTKVQYRVSATDLPPELPKAC

SEQ ID NO: 26065 - protein, 650 aa, Homo sapiens
MASPADSCIQFTRHASDVLLNLNRLRSRDILTDVVIVVSREQFRAHKTVLMACSGLFYSIFTDQLKCNLSVINLDPEINPEGFCILLDFMYTSRLNLREGNIMAVMATAMYLQMEHVVDTCRKFIKASEAEMVSAIKPPREEFLNSRMLMPQDIMAYRGREVVENNLPLRSAPGCESRAFAPSLYSGLSTPPASYSMYSHLPVSSLLFSDEEFRDVRMPVANPFPKERALPCDSARPVPGEYSRPTLEVSPNVCHSNIYSPKETIPEEARSDMHYSVAEGLKPAAPSARNAPYFPCDKASKEEERPSSEDEIALHFEPPNAPLNRKGLVSPQSPQKSDCQPNSPTESCSSKNACILQASGSPPAKSPTDPKACNWKKYKFIVLNSLNQNAKPEGPEQAELGRLSPRAYTAPPACQPPMEPENLDLQSPTKLSASGEDSTIPQASRLNNIVNRSMTGSPRSSSESHSPLYMHPPKCTSCGSQSPQHAEMCLHTAGPTFPEEMGETQSEYSDSSCGEKPYRCNICGAQFNRPANLKTHTRIHSGEKPYKCETCGARFVQVAHLRAHVLIHTGEKPYPCEICGTRFRHLQTLKSHLRIHTGEKPYHCEKCNLHFRHKSQLRLHLRQKHGAITNTKVQYRVSATDLPPELPKAC

SEQ ID NO: 26066 - protein, 199 aa, Homo sapiens
MASPKGFFNYLTYFLAAGAVTLGIGFFALASALWFLICKRREIFQNSKFKAIDERCRQRPSMAKIKSHSQCVFISRNFHTGRFQLQEEQRKKEAAHIKAIKDHSKDEPQLATKNIICDPSETSSTTNRSSVTLSLSTLPSDSYYSQSIEAADDWFSDDSLVKRNSPMPSLGEPLMEKVFSYLSTISLEEGTESVLNDTL

SEQ ID NO: 26067 - protein, 1372 aa, Homo sapiens
MAKPSVELTRELQDSIRRCLSQGAVLQQHHVKLETKPKKFEDRVLALTSWRLHLFLLKVPAKVESSFNVLEIRAFNTLSQNQILVETERGMVSMRLPSAESVDQVTRHVSSALSKVCPGPGCLIRRGNADTPEGPRDTSPNSETSTSTTHSVCGGFSETYAALCDYNGLHCREEVQWDVDTIYHAEDNREFNLLDFSHLESRDLALMVAALAYNQWFTKLYCKDLRLGSEVLEQVLHTLSKSGSLEELVLDNAGLKTDFVQKLAGVFGENGSCVLHALTLSHNPIEDKGFLSLSQQLLCFPSGLTKLCLAKTAISPRGLQALGQTFGANPAFASSLRYLDLSKNPGLLATDEANALYSFLAQPNALVHLDLSGTDCVIDLLLGALLHGCCSHLTYLNLARNSCSHRKGREAPPAFKQFFSSAYTLSHVNLSATKLPLEALRALLQGLSLNSHLSDLHLDLSSCELRSAGAQALQEQLGAVTCVGSLDLSDNGFDSDLLTLVPALGKNKSLKHLFLGKNFNVKAKTLEEILHKLVQLIQEEDCSLQSLSVADSRLKLRTSILINALGSNTCLAKVDLSGNGMEDIGAKMLSKALQINSSLRTILWDRNNTSALGFLDIARALESNHTLRFMSFPVSDISQAYRSAPERTEDVWQKIQWCLVRNNHSQTCPQEQAFRLQQGLVTSSAEQMLQRLCGRVQEEVRALRLCPLEPVQDELLYARDLIKDAKNSRALFPSLYELGHVLANDGPVRQRLESVASEVSKAVDKELQVILESMVSLTQELCPVAMRVAEGHNKMLSNVAERVTVPRNFIRGALLEQAGQDIQNKLDEVKLSVVTYLTSSIVDEILQELYHSHKSLARHLTQLRTLSDPPGCPGQGQDLSSRGRGRNHDHEETTDDELGTNIDTMAIKKQKRCRKIRPVSAFISGSPQDMESQLGNLGIPPGWFSGLGGSQPTASGSWEGLSELPTHGYKLRHQTQGRPRPPRTTPPGPGRPSMPAPGTRQENGMATRLDEGLEDFFSRRVLEESSSYPRTLRTVRPGLSEAPLPPLQKKRRRGLFHFRRPRSFKGDRGPGSPTTGLLLPPPPPPPPTQESPPSPDPPSLGNNSSPCWSPEEESSLLPGFGGGRGPSFRRKMGTEGSEPGEGGPAPGTAQQPRVHGVALPGLERAKGWSFDGKREGPGPDQEGSTQAWQKRRSSDDAGPGSWKPPPPPQSTKPSFSAMRRAEATWHIAEESAPNHSCQSPSPASQDGEEEKEGTLFPERTLPARNAKLQDPALAPWPPKPVAVPRGRQPPQEPGVREEAEAGDAAPGVNKPRLRLSSQQDQEEPEVQGPPDPGRRTAPLKPKRTRRAQSCDKLEPDRRRPPDPTGTSEPGTD

SEQ ID NO: 26068 - protein, 425 aa, Homo sapiens
MAIKKQKRCRKIRPVSAFISGSPQDMESQLGNLGIPPGWFSGLGGSQPTASGSWEGLSELPTHGYKLRHQTQGRPRPPRTTPPGPGRPSMPAPGTRQENGMATRLDEGLEDFFSRRVLEESSSYPRTLRTVRPGLSEAPLPPLQKKRRRGLFHFRRPRSFKGDRGPGSPTTGLLLPPPPPPPPTQESPPSPDPPSLGNNSSPCWSPEEESSLLPGFGGGRGPSFRRKMGPGPDQEGSTQAWQKRRSSDDAGPGSWKPPPPPQSTKPSFSAMRRAEATWHIAEESAPNHSCQSPSPASQDGEEEKEGTLFPERTLPARNAKLQDPALAPWPPKPVAVPRGRQPPQEPGVREEAEAGDAAPGVNKPRLRLSSQQDQEEPEVQGPPDPGRRTAPLKPKRTRRAQSCDKLEPDRRRPPDPTGTSEPGTD

SEQ ID NO: 26069 - protein, 173 aa, Homo sapiens
MEDIGAKMLSKALQINSSLRTILWDRNNTSALGFLDIARALESNHTLRFMSFPVSDISQAYRSAPERTEDVWQKIQWCLVRNNHSQTCPQEQAFRLQQGLVTSSAEQMLQRLCGRVQEEVRALRLCPLEPVQDELLYARDLIKDAKNSRAVSPPQATLPLKSGEPKKADHAKP

SEQ ID NO: 26070 - protein, 243 aa, Homo sapiens
MRSRKLTGAVRSSARLKARSCSAARLASAQEVAGSTSAKTACLTSSSHKATDTRTSKKFKCDKGHLVKSELQKLVPKNDSASLPKVTPETPCENEFAEGSALLPGSEAGVSVQQGAASLPLGGCRVVSDSRLAKTRDGLSVPKHSAGSGAEESNSSSTVQKQNEPGLQTEDVQKPPLQMDNSVFLDDDSNQPMPVSRFFGNVELMQDLPPASSSCPSMSRREFRKMHFRAKDDDDDDDDDAEM

SEQ ID NO: 26071 - protein, 291 aa, Homo sapiens
MVAVLGGRGVLRLRLLLSALKPGIHVPRAGPAAAFGTSVTSAKVAVNGVQLHYQQTGEGDHAVLLLPGMLGSGETDFGPQLKNLNKKLFTVVAWDPRGYGHSRPPDRDFPADFFERDAKDAVDLMKALKFKKVSLLGWSDGGITALIAAAKYPSYIHKMVIWGANAYVTDEDSMIYEGIRDVSKWSERTRKPLEALYGYDYFARTCEKWVDGIRQFKHLPDGNICRHLLPRVQCPALIVHGEKDPLVPRFHADFIHKHVKGSRLHLMPEGKHNLHLRFADEFNKLAEDFLQ

SEQ ID NO: 26072 - protein, 274 aa, Homo sapiens
MPRNLLYSLLSSHLSPHFSTSVTSAKVAVNGVQLHYQQTGEGDHAVLLLPGMLGSGETDFGPQLKNLNKKLFTVVAWDPRGYGHSRPPDRDFPADFFERDAKDAVDLMKALKFKKVSLLGWSDGGITALIAAAKYPSYIHKMVIWGANAYVTDEDSMIYEGIRDVSKWSERTRKPLEALYGYDYFARTCEKWVDGIRQFKHLPDGNICRHLLPRVQCPALIVHGEKDPLVPRFHADFIHKHVKGSRLHLMPEGKHNLHLRFADEFNKLAEDFLQ

SEQ ID NO: 26073 - protein, 101 aa, Homo sapiens
MSVEKMTKVEESFQKAMGLKKTVDRWRNSHTHCLWQMALGQRRNPYATLRMQDTMVQELALAKKQLLMVRQAALHQLFEKEHQQYQQELNQMGKAFYVERF

SEQ ID NO: 26074 - protein, 271 aa, Homo sapiens
MAGPQQQPPYLHLAELTASQFLEIWKHFDADGNGYIEGKELENFFQELEKARKGSGMMSKSDNFGEKMKEFMQKYDKNSDGKIEMAELAQILPTEENFLLCFRQHVGSSAEFMEAWRKYDTDRSGYIEANELKGFLSDLLKKANRPYDEPKLQEYTQTILRMFDLNGDGKLGLSEMSRLLPVQENFLLKFQGMKLTSEEFNAIFTFYDKDRSGYIDEHELDALLKDLYEKNKKEMNIQQLTNYRKSVMSLAEAGKLYRKDLEIVLCSEPPM

SEQ ID NO: 26075 - protein, 334 aa, Homo sapiens
MNLSLVLAAFCLGIASAVPKFDQNLDTKWYQWKATHRRLYGANEEGWRRAVWEKNMKMIELHNGEYSQGKHGFTMAMNAFGDMTNEEFRQMMGCFRNQKFRKGKVFREPLFLDLPKSVDWRKKGYVTPVKNQKQCGSCWAFSATGALEGQMFRKTGKLVSLSEQNLVDCSRPQGNQGCNGGFMARAFQYVKENGGLDSEESYPYVAVDEICKYRPENSVANDTGFTVVAPGKEKALMKAVATVGPISVAMDAGHSSFQFYKSGIYFEPDCSSKNLDHGVLVVGYGFEGANSNNSKYWLVKNSWGPEWGSNGYVKIAKDKNNHCGIATAASYPNV

SEQ ID NO: 26076 - protein, 354 aa, Homo sapiens
MPRRSLHAAAVLLLVILKEQPSSPAPVNGSKWTYFGPDGENSWSKKYPSCGGLLQSPIDLHSDILQYDASLTPLEFQGYNLSANKQFLLTNNGHSVKLNLPSDMHIQGLQSRYSATQLHLHWGNPNDPHGSEHTVSGQHFAAELHIVHYNSDLYPDASTASNKSEGLAVLAVLIEMGSFNPSYDKIFSHLQHVKYKGQEAFVPGFNIEELLPERTAEYYRYRGSLTTPPCNPTVLWTVFRNPVQISQEQLLALETALYCTHMDDPSPREMINNFRQVQKFDERLVYTSFSQVQVCTAAGLSLGIILSLALAGILGICIVVVVSIWLFRRKSIKKGDNKGVIYKPATKMETEAHA

SEQ ID NO: 26077 - protein, 343 aa, Homo sapiens
MPRRSLHAAAVLLLVILKEQPSSPAPVNGSKWTYFGPDGENSWSKKYPSCGGLLQSPIDLHSDILQYDASLTPLEFQGYNLSANKQFLLTNNGHSVKLNLPSDMHIQGLQSRYSATQLHLHWGNPNDPHGSEHTVSGQHFAAELHIVHYNSDLYPDASTASNKSEGLAVLAVLIEMGSFNPSYDKIFSHLQHVKYKGQEAFVPGFNIEELLPERTAEYYRYRGSLTTPPCNPTVLWTVFRNPVQISQEQLLALETALYCTHMDDPSPREMINNFRQVQKFDERLVYTSFSQGIILSLALAGILGICIVVVVSIWLFRRKSIKKGDNKGVIYKPATKMETEAHA

SEQ ID NO: 26078 - protein, 552 aa, Homo sapiens
MDTSSEMLVRFGRRCGRAKESTEIRNSEEDQVLYLPLLPSKVDLQQVTIIPHDEWKRIQDSLDRLTREAACLRAERKAKKEMHLRSQEVVKHWTNTYAGMKEQKLEAKKKRDEEIEAERQILDLEEEIYKQGKRKKAIENAKQYQFYQTERVKNFHSGLLLSRVMKERDAQIEFRKSKIKSDKKWEEQLKLNIEKAFKEEQEKAEKRHRERVALAKDHLKQIKEHEEEEERRKKYEEKDAEEIKRQNALYEIEMRKKLEKKREEMHESRRRFLEHMQDKHIIKAVEQQQQEEEDEKMRKFIKAKKRLIQMGKEKEAETHRLMEKRRERIHNFLSELLKEKLDNEDMIIARDIAEAEAEWEKREREKDEKNKAELKTIAEYRAIVMKNKEEEERQRKIEAKEQLLAVMKADQIFWEHEKEKKCKADKEHQEVQDAHIQQMAKNKFNAKQAKQAELDYCRLTEALVAEKEKEFQDYAREVIELESETTNKYIYPLVKAVQEGPGGGRGPVFVDRGGLRPSYQANDVTGVQLPFYNSQGPKYNFQKSKRRLGFTW

SEQ ID NO: 26079 - protein, 314 aa, Homo sapiens
MASRSKRRAVESGVPQPPDPPVQRDEEEEKEVENEDEDDDDSDKEKDEEDEVIDEEVNIEFEAYSLSDNDYDGIKKLLQQLFLKAPVNTAELTDLLIQQNHIGSVIKQTDVSEDSNDDMDEDEVFGFISLLNLTERKGTQCVEQIQELVLRFCEKNCEKSMVEQLDKFLNDTTKPVGLLLSERFINVPPQIALPMYQQLQKELAGAHRTNKPCGKCYFYLLISKTFVEAGKNNSKKKPSNKKKAALMFANAEEEFFYEKAILKFNYSVQEESDTCLGGKWSFDDVPMTPLRTVMLIPGDKMNEIMDKLKEYLSV

SEQ ID NO: 26080 - protein, 322 aa, Homo sapiens
MASRSKRRAVESGVPQPPDPPVQRDEEEEKEVENEDEDDDDSDKEKDEEDEVIDEEVNIEFEAYSLSDNDYDGIKKLLQQLFLKAPVNTAELTDLLIQQNHIGSVIKQTDVSEDSNDDMDEDEVFGFISLLNLTERKGTQCVEQIQELVLRFCEKNCEKSMVEQLDKFLNDTTKPVGLLLSERFINVPPQIALPMYQQLQKELAGAHRTNKPCGKCYFYLLISKTFVEAGKNNSKKKPSNKKKAALMFANAEEEFFYEEQGKPEVLGGPDTRRGLEPVPIQHNGGSRGQVTALVSLKAGLIQSRSTLSDFQGTFMTVGIALS

SEQ ID NO: 26081 - protein, 292 aa, Homo sapiens
MASRSKRRAVESGVPQPPDPPVQRDEEEEKEVENEDEDDDDSDKEKDEEDEVIDEEVNIEFEAYSLSDNDYDGIKKLLQQLFLKAPVNTAELTDLLIQQNHIGSVIKQTDVSEDSNDDMDEDEVFGFISLLNLTERKGTQCVEQIQELVLRFCEKNCEKSMVEQLDKFLNDTTKPVGLLLSERFINVPPQIALPMYQQLQKELAGAHRTNKPCGKCYFYLLISKTFVEAGKNNSKKKPSNKKKAALMFANAEEEFFYEKAILKFNYSVQEESDTCLGGKWSFDDWSVPPVLE

SEQ ID NO: 26082 - protein, 292 aa, Homo sapiens
MASRSKRRAVESGVPQPPDPPVQRDEEEEKEVENEDEDDDDSDKEKDEEDEVIDEEVNIEFEAYSLSDNDYDGIKKLLQQLFLKAPVNTAELTDLLIQQNHIGSVIKQTDVSEDSNDDMDEDEVFGFISLLNLTERKGTQCVEQIQELVLRFCEKNCEKSMVEQLDKFLNDTTKPVGLLLSERFINVPPQIALPMYQQLQKELAGAHRTNKPCGKCYFYLLISKTFVEAGKNNSKKKPSNKKKAALMFANAEEEFFYEEQGKPEVLGGPDTRRGLEPVPIQHNGWSVPPVLE

SEQ ID NO: 26083 - protein, 453 aa, Homo sapiens
MLRILCLALCSLLTGTRADPGALLRLGMDIMNQVQSAMDESHILEKMAAEAGKKQPGMKPIKGITNLKVKDVQLPVITLNFVPGVGIFQCVSTGMTVTGKSFMGGNMEIIVALNITATNRLLRDEETGLPVFKSEGCEVILVNVKTNLPSNMLPKMVNKFLDSTLHKVLPGLMCPAIDAVLVYVNRKWTNLSDPMPVGQMGTVKYVLMSAPATTASYIQLDFSPVVQQQKGKTIKLADAGEALTFPEGYAKGSSQLLLPATFLSAELALLQKSFHVNIQDTMIGELPPQTTKTLARFIPEVAVAYPKSKPLTTQIKIKKPPKVTMKTGKSLLHLHSTLEMFAARWRSKAPMSLFLLEVHFNLKVQYSVHENQLQMATSLDRLLSLSRKSSSIGNFNERELTGFITSYLEEAYIPVVNDVLQVGLPLPDFLAMNYNLAELDIVENALMLDLKLG

SEQ ID NO: 26084 - protein, 1063 aa, Homo sapiens
MPTLVVGTPPTCLGDTPQPCHKNSQRQGPFSHGAPGRAADWKAVAKPRLCAPAAEDDVAALRWPGPSQQPDPPWAAPHVVGSDDLKEPGPWGKACSLPMWSTGPEARDGDSSVSSGRLSCSSGGHDVCVSWKERPPQVLGPQQRPRKSDARLEQLRDKIRAQAWQQGSCASLGTSAPSSASRLHKASTLMLRRKGQEAKNPPPAPECSGFSILSAAERRVEAKASHGQGRELSRVSQHQVPVLREKPKRVKSSSCKREKTPKLPSPRRAAKDKHKDEDSELVGVYAWRKGQALVRSLLGPPPVLRRHHSKDPSRDPALTVDLGDSEKVIAAKCSPVCAQLPDATSAYSDQQVSGNTPSLASFDQPATIQTAMAILQDLRQQIQAGLELAQARKGGQELGPSKRRLQDVAGRGCCRDPNAQSSFSKSPWAMTERKHSSLERARSVHTWEPWSSSTARESCPQRAWGAQGQDRSFQRPESPHERLGHFSQRPWSALAGQACSPQRAWGAQRQGPSSQRPGSPPEKRSPFPQQPWSAVATQPCPRRAWTACETWEDPGPRLRNPLERPSPPAQRPWSSSGVQRAGPQGKGRGIGSPVSAAKHALPRPTGSFPQNPLGKEKDTLRPCPRSRGLLGPSHSSESLREFMRQKAQARRRQALEEKASALRTRELRSRRLQEVYRQQREAVLGRAVPVVSRTTPGIVTFVPSSAQSGGLEASGSLESPVLEWSKVTSGMVLGGQEAPGSFCLCLNRAWNHAETLDPPGMGGPQDGRDAPVLLSASPSLGSLELQDLTTRYLPRGMCIYLDPKEAEHLGTSSSLHLRHKQAQLQALETTAKVLKQRVDSLTAKLQGAEALDTVRDPAVGLLRSCPHSLPAAPTLATPTLATPACPGALGPNWGRGAPGEWVSMQPQPLLPPTYFLDGETLSWGPSWEQQQSVSPRAHCESKPRGFPEEGHVDVKPDKRLQRGVAPFQALSPSAGSSYAGPATLHPIWGSLGLEETPSVGGADSVAPCTPRSCGKGDPADRPWAGWSGGRGIHREHLPLPSTRAWPYGVEKSFSTWRASTPRY

SEQ ID NO: 26085 - protein, 965 aa, Homo sapiens
MWSTGPEARDGDSSVSSGRLSCSSGGHDVCVSWKERPPQVLGPQQRPRKSDARLEQLRDKIRAQAWQQGSCASLGTSAPSSASRLHKASTLMLRRKGQEAKNPPPAPECSGFSILSAAERRVEAKASHGQGRELSRVSQHQVPVLREKPKRVKSSSCKREKTPKLPSPRRAAKDKHKDEDSELVGVYAWRKGQALVRSLLGPPPVLRRHHSKDPSRDPALTVDLGDSEKVIAAKCSPVCAQLPDATSAYSDQQVSGNTPSLASFDQPATIQTAMAILQDLRQQIQAGLELAQARKGGQELGPSKRRLQDVAGRGCCRDPNAQSSFSKSPWAMTERKHSSLERARSVHTWEPWSSSTARESCPQRAWGAQGQDRSFQRPESPHERLGHFSQRPWSALAGQACSPQRAWGAQRQGPSSQRPGSPPEKRSPFPQQPWSAVATQPCPRRAWTACETWEDPGPRLRNPLERPSPPAQRPWSSSGVQRAGPQGKGRGIGSPVSAAKHALPRPTGSFPQNPLGKEKDTLRPCPRSRGLLGPSHSSESLREFMRQKAQARRRQALEEKASALRTRELRSRRLQEVYRQQREAVLGRAVPVVSRTTPGIVTFVPSSAQSGGLEASGSLESPVLEWSKVTSGMVLGGQEAPGSFCLCLNRAWNHAETLDPPGMGGPQDGRDAPVLLSASPSLGSLELQDLTTRYLPRGMCIYLDPKEAEHLGTSSSLHLRHKQAQLQALETTAKVLKQRVDSLTAKLQGAEALDTVRDPAVGLLRSCPHSLPAAPTLATPTLATPACPGALGPNWGRGAPGEWVSMQPQPLLPPTYFLDGETLSWGPSWEQQQSVSPRAHCESKPRGFPEEGHVDVKPDKRLQRGVAPFQALSPSAGSSYAGPATLHPIWGSLGLEETPSVGGADSVAPCTPRSCGKGDPADRPWAGWSGGRGIHREHLPLPSTRAWPYGVEKSFSTWRASTPRY

SEQ ID NO: 26086 - protein, 941 aa, Homo sapiens
MKGSNRNKDHSAEGEGVGKRPKRKCLQWHPLLAKKLLDFSEEEEEEDEEEDIDKVQLLGADGLEQDVGETEDDESPEQRARRPMNAFLLFCKRHRSLVRQEHPRLDNRGATKILADWWAVLDPKEKQKYTDMAKEYKDAFMKANPGYKWCPTTNKPVKSPTPTVNPRKKLWAFPSDSSRDLPSPKKAKTEEMPQLNFGMADPTQMGGLSMLLLAGEHALGTPEVSSGTCRPDVSESPELRQKSPLFQFAEISSSTSHSDASTKQCQTSALFQFAEISSNTSQLGGAEPVKRCGKSALFQLAEMCLASEGMKMEESKLIKAKESDGGRIKELEKGKEEKEIKMEKTDETRLQKEAEFEKSAKENLRDSKELRNFEALQIDDIMAIKMEDPKEIRKEELEEDHKCSHFPDFSYSASSKIIISDVPSRKDHMCHPHGIMIIEDPAALNKPEKLKKKKKKSKMDRHGNDKSTPKKTCKKRQSSESDIESVIYTIEAVAKGDWGIEKLGDTPRKKVRTSSSGKGSILDAKPPKKKVKSREKKMSKEKSSDTTKESRPPDFISISASKNISGETPEGIKAEPLTPMEDALPPSLSGQAKPEDSDCHRKIETCGSRKSERSCKGALYKTLVSEGMLTSLRANVDRGKRSSGKGNSSDHEGCWNEESWTFSQSGTSGSKKFKKTKPKEDCLLGSAKLDEEFEKKFNSLPQYSPVTFDRKCVPVPRKKKKTGNVSSEPTKTSKGPFQSQKKNLFHKIVSKYKHKKEKPNVPEKGSGDKWSNKQLFLDAIHPTEAIFSEDRNTMEPVHKVKNIPSIFNTPEPTTTQEPLVGSQKRKARKTKITHLVRTADGRVSPAGGTLDDKPKEQLQRSLPKATETDCNDKCSHNTEVGETRSSTPEMPAVSAFFSLAALAEVAAMENVHRGQRSTPLTHDGQPKEMPQAPVLISCADQ

SEQ ID NO: 26087 - protein, 911 aa, Homo sapiens
MKGSNRNKDHSAEGEGVGKRPKRKCLQWHPLLAKKLLDFSEEEEEEDEEEDIDKVQLLGADGLEQDVGETEDDESPEQRARRPMNAFLLFCKRHRSLVRQEHPRLDNRGATKILADWWAVLDPKEKQKYTDMAKEYKDAFMKANPGYKWCPTTNKPVKSPTPTVNPRKKLWAFPSDSSRDLPSPKKAKTEEMPQLNFGMADPTQMGGLSMLLLAGEHALGTPEVSSGTCRPDVSESPELRQKSPLFQFAEISSSTSHSDASTKQCQTSALFQFAEISSNTSQLGGAEPVKRCGKSALFQLAEMCLASEGMKMEESKLIKAKESDGGRIKELEKGKEEKEIKMEKTDETRLQKEAEFEKSAKENLRDSKELRNFEALQIDDIMAIKMEDPKEIRKEELEEDHKCSHFPDFSYSASSKIIISDVPSRKDHMCHPHGIMIIEDPAALNKPEKLKKKKKKSKMDRHGNDKSTPKKTCKKRQSSESDIESVIYTIEAVAKGDWGIEKLGDTPRKKVRTSSSGKGSILDAKPPKKKVKSREKKMSKEKSSDTTKESRPPDFISISASKNISGETPEGIKAEPLTPMEDALPPSLSGQAKPEDSDCHRKIETCGSRKSERSCKGALYKTLVSEGMLTSLRANVDRGKRSSGKGNSSDHEGCWNEESWTFSQSGTSGSKKFKKTKPKEDCLLGSAKLDEEFEKKFNSLPQYSPVTFDRKCVPVPRKKKKTGNVSSEPTKTSKGSGDKWSNKQLFLDAIHPTEAIFSEDRNTMEPVHKVKNIPSIFNTPEPTTTQEPLVGSQKRKARKTKITHLVRTADGRVSPAGGTLDDKPKEQLQRSLPKATETDCNDKCSHNTEVGETRSSTPEMPAVSAFFSLAALAEVAAMENVHRGQRSTPLTHDGQPKEMPQAPVLISCADQ

SEQ ID NO: 26088 - protein, 628 aa, Homo sapiens
MKGSNRNKDHSAEGEGVGKRPKRKCLQWHPLLAKKLLDFSEEEEEEDEEEDIDKVQLLGADGLEQDVGETEDDESPEQRARRPMNAFLLFCKRHRSLVRQEHPRLDNRGATKILADWWAVLDPKEKQKYTDMAKEYKDAFMKANPGYKWCPTTNKPVKSPTPTVNPRKKLWAFPSDSSRDLPSPKKAKTEEMPQLNFGMADPTQMGGLSMLLLAGEHALGTPEVSSGTCRPDVSESPELRQKSPLFQFAEISSSTSHSDASTKQCQTSALFQFAEISSNTSQLGGAEPVKRCGKSALFQLAEENEAQEKETPLIMKGVGMKKAGHLVRVGPVGARSSRRQSQKKTVSLAPQSWMKNLKKNSTASLNIVLLHLTGNVYLSQEKRRRLEMCPQNRLKPAKVLSSLRKRTYSTKLSANISTKRRSPMFRKKEVGINGQTSNSSWMPFTLQKPYFQKTETPWSLFIRLKISHPFSTLQSQQQRKNLWWAAKREKQGKPRLHTLSGQQMAGYHQQEVLWMTNQRNNCRGVSLKQLRQTAMTNAHTTPRSGRRGAVLQKCLPCLRSLASLRWLKWQPWKMCTEVRGQLRSPMMDSQKKCRRLLYLFPALTSEAPFHCKTLCFTYYPSLVFTEGC

SEQ ID NO: 26089 - protein, 331 aa, Homo sapiens
MLNRKTSHFLGMRVQSELEHLSELRREAGKDRSSVHGSAARTRASVRTQWTTAAAAKADEDPGANLFPPPLPRPRICMWKYLDVHSMHQLEKTTNAEMREVLAELLELGCPEQSLRDAITLDLFCHALIFCRQQGFSLEQTSAACALLQDLHKACIATPLGNVEECYRYFTSVLFCHGVRRPPFSIDLFKEEQLLALEDYVVNTYFRHFKLYKYVFTPQVRLDLSLTYMGLQPPKLWPESETEKEESKEMEEQAVTPQKEELETVAPPEPEPSHIHVLRAYIKTQVNKELEQLQGLVEERLKASEERLSSKLTALERPFQLPPGKGKSKTK

SEQ ID NO: 26090 - protein, 294 aa, Homo sapiens
MASYSGFSGLLEIRYGPGHRSCLPQFAFFPQPPLPRPRICMWKYLDVHSMHQLEKTTNAEMREVLAELLELGCPEQSLRDAITLDLFCHALIFCRQQGFSLEQTSAACALLQDLHKACIATPLGNVEECYRYFTSVLFCHGVRRPPFSIDLFKEEQLLALEDYVVNTYFRHFKLYKYVFTPQVRLDLSLTYMGLQPPKLWPESETEKEESKEMEEQAVTPQKEELETVAPPEPEPSHIHVLRAYIKTQVNKELEQLQGLVEERLKASEERLSSKLTALERPFQLPPGKGKSKTK

SEQ ID NO: 26091 - protein, 103 aa, Homo sapiens
MGLQPPKLWPESETEKEESKEMEEQAVTPQKEELETVAPPEPEPSHIHVLRAYIKTQVNKELEQLQGLVEERLKASEERLSSKLTALERPFQLPPGKGKSKTK

SEQ ID NO: 26092 - protein, 177 aa, Homo sapiens
MLNRKTSHFLGMRVQSELEHLSELRREAGKDRSSVHGSAARTRASVRTQWTTAAAAKADEDPGANLFPPPLPRPRICMWKYLDVHSMHQLEKTTNAEMREVLAELLELGCPEQSLRDAITLDLFCHALIFCRQQGFSLEQTSAACALLQDLHKACIGERGQLPGLSPREKRNRAWHK

SEQ ID NO: 26093 - protein, 187 aa, Homo sapiens
MEPGVQDLGLSSSEDESPSLAIRSPTLRKPLKHSTPEEAALGWSPRPSGGASYLSGSPMPAHFSQDLASHPAGVSPPATVRKRRLSTLWASKESSLDLSAPGEEPPTSASLTQRQRQRQQQQQQQESLRAKSWAQNPGLPGILNTTGRKRRDPKKRAAAMERVRQWEIYVLQNIEEATQHELTIEDD

SEQ ID NO: 26094 - protein, 303 aa, Homo sapiens
MARRGPGWRPLLLLVLLAGAAQGGLYFRRGQTCYRPLRGDGLAPLGRSTYPRPHEYLSPADLPKSWDWRNVDGVNYASITRNQHIPQYCGSCWAHASTSAMADRINIKRKGAWPSTLLSVQNVIDCGNAGSCEGGNDLSVWDYAHQHGIPDETCNNYQAKDQECDKFNQCGTCNEFKECHAIRNYTLWRVGDYGSLSGREKMMAEIYANGPISCGIMATERLANYTGGIYAEYQDTTYINHVVSVAGWGISDGTEYWIVRNSWGEPWGERGWLRIVTSTYKDGKGARYNLAIEEHCTFGDPIV

SEQ ID NO: 26095 - protein, 217 aa, Homo sapiens
MVKLGCSFSGKPGKDPGDQDGAAMDSVPLISPLDISQLQPPLPDQVVIKTQTEYQLSSPDQQNFPDLEGQRLNCSHPEEGRRLPTARMIAFAMALLGCVLIMYKAIWYDQFTCPDGFLLRHKICTPLTLEMYYTEMDPERHRSILAAIGAYPLSRKHGTETPAAWGDGYRAAKEERKGPTQAGAAAAATEPPGKPSAKAEKEAARKAAGSAAPPPAQ

SEQ ID NO: 26096 - protein, 124 aa, Homo sapiens
MVKLGCSFSGKPGKDPGDQDGAAMDSVPLISPLDISQLQPPLPDQVVIKTQTEYQLSSPDQQNFPDLEGQRLNCSHPEEGRRLPTARMIAFAMALLGCVLIMYKAIWYDQFTCPDGFLLRGPEF

SEQ ID NO: 26097 - protein, 158 aa, Homo sapiens
MVKLGCSFSGKPGKDPGDQDGAAMDSVPLISPLDISQLQPPLPDQVVIKTQTEYQLSSPDQQNFPDLEGQRLNCSHPEEGRRVTTPTPPTVGTQDRRRRWKAAGGAWVPSRPVWGPLALREERVAVSHPAQSWPHRLPCTHQAPSRGCRCRLTKQWRS

SEQ ID NO: 26098 - protein, 1476 aa, Homo sapiens
MEGGKGPRLRDFLSGSLATWALGLAGLVGEAEDSEGEEEEEEEEPPLWLEKRFLRLSDGALLLRVLGIIAPSSRGGPRMLRGLDGPAAWRVWNLNHLWGRLRDFYQEELQLLILSPPPDLQTLGFDPLSEEAVEQLEGVLRLLLGASVQCEHRELFIRHIQGLSLEVQSELAAAIQEVTQPGAGVVLALSGPDPGELAPAELEMLSRSLMGTLSKLARERDLGAQRLAELLLEREPLCLRPEAPSRAPAEGPSHHLALQLANAKAQLRRLRQELEEKAELLLDSQAEVQGLEAEIRRLRQEAQALSGQAKRAELYREEAEALRERAGRLPRLQEELRRCRERLQAAEAYKSQLEEERVLSGVLEASKALLEEQLEAARERCARLHETQRENLLLRTRLGEAHAELDSLRHQVDQLAEENVELELELQRSLEPPPGSPGEAPLAGAAPSLQDEVREAEAGRLRTLERENRELRGLLQVLQGQPGGQHPLLEAPREDPVLPVLEEAPQTPVAFDHSPQGLVQKARDGGPQALDLAPPALDSVLEASAECPQAPDSDPQEAESPLQAAAMDPQASDWSPQESGSPVETQESPEKAGRRSSLQSPASVAPPQGPGTKIQAPQLLGGETEGREAPQGELVPEAWGLRQEGPEHKPGPSEPSSVQLEEQEGPNQGLDLATGQAEAREHDQRLEGTVRDPAWQKPQQKSEGALEVQVWEGPIPGESLASGVAEQEALREEVAQLRRKAEALGDELEAQARKLEAQNTEAARLSKELAQARRAEAEAHREAEAQAWEQARLREAVEAAGQELESASQEREALVEALAAAGRERRQWEREGSRLRAQSEAAEERMQVLESEGRQHLEEAERERREKEALQAELEKAVVRGKELGDRLEHLQRELEQAALERQEFLREKESQHQRYQGLEQRLEAELQAAATSKEEALMELKTRALQLEEELFQLRQGPAGLGPKKRAEPQLVETQNVRLIEVERSNAMLVAEKAALQGQLQHLEGQLGSLQGRAQELLLQSQRAQEHSSRLQAEKSVLEIQGQELHRKLEVLEEEVRAARQSQEETRGQQQALLRDHKALAQLQRRQEAELEGLLVRHRDLKANMRALELAHRELQGRHEQLQAQRASVEAQEVALLAERERLMQDGHRQRGLEEELRRLQSEHDRAQMLLAELSRERGELQGERGELRGRLARLELERAQLEMQSQQLRESNQQLDLSACRLTTQCELLTQLRSAQEEENRQLLAEVQALSRENRELLERSLESRDHLHREQREYLDQLNALRREKQKLVEKIMDQYRVLEPVPLPRTKKGSWLADKVKRLMRPRREGGPPGGLRLGADGAGSTESLGGPPETELPEGREADGTGSPSPAPMRRAQSSLCLRDETLAGGQRRKLSSRFPVGRSSESFSPGDTPRQRFRQRHPGPLGAPVSHSKGPGVGWENSAETLQEHETDANREGPEVQEPEKRPLTPSLSQ

SEQ ID NO: 26099 - protein, 1034 aa, Homo sapiens
MEGGKGPRLRDFLSGSLATWALGLAGLVGEAEDSEGEEEEEEEEPPLWLEKRFLRLSDGALLLRVLGIIAPSSRGGPRMLRGLDGPAAWRVWNLNHLWGRLRDFYQEELQLLILSPPPDLQTLGFDPLSEEAVEQLEGVLRLLLGASVQCEHRELFIRHIQGLSLEVQSELAAAIQEVTQPGAGVVLALSGPDPGELAPAELEMLSRSLMGTLSKLARERDLGAQRLAELLLEREPLCLRPEAPSRAPAEGPSHHLALQLANAKAQLRRLRQELEEKAELLLDSQAEVQGLEAEIRRLRQEAQALSGQAKRAELYREEAEALRERAGRLPRLQEELRRCRERLQAAEAYKSQLEEERVLSGVLEASKALLEEQLEAARERCARLHETQRENLLLRTRLGEAHAELDSLRHQVDQLAEENVELELELQRSLEPPPGSPGEAPLAGAAPSLQDEVREAEAGRLRTLERENRELRGLLQVLQGQPGGQHPLLEAPREDPVLPVLEEAPQTPVAFDHSPQGLVQKARDGGPQALDLAPPALDSVLEASAECPQAPDSDPQEAESPLQAAAMDPQASDWSPQESGSPVETQESPEKAGRRSSLQSPASVAPPQGPGTKIQAPQLLGGETEGREAPQGELVPEAWGLRQEGPEHKPGPSEPSSVQLEEQEGPNQGLDLATGQAEAREHDQRLEGTVRDPAWQKPQQKSEGALEVQVWEGPIPGESLASGVAEQEALREEVAQLRRKAEALGDELEAQARKLEAQNTEAARLSKELAQARRAEAEAHREAEAQAWEQARLREAVEAAGQELESASQEREALVEALAAAGRERRQWEREGSRLRAQSEAAEERMQVLESEGRQHLEEAERERREKEALQAELEKAVVRGKELGDRLEHLQRELEQAALERQEFLREKESQHQRYQGLEQRLEAELQAAATSKEEALMELKTRALQLEEELFQLRQGPAGLGPKKRAEPQLVETQNVRLIEVERSVSVGPQWALGRCPVQCECGSTVDPGLGGIPCSVSVDSQWARGWGCPMQ

SEQ ID NO: 26100 - protein, 621 aa, Homo sapiens
MGGAGALGGAGGVQGAAGRAAGGCPRALRPAARDPAREPAAANPAGRGPCGKELDSLRHQVDQLAEENVELELELQRSLEPPPGSPGEAPLAGAAPSLQDEVREAEAGRLRTLERENRELRGLLQVLQGQPGGQHPLLEAPREDPVLPVLEEAPQTPVAFDHSPQGLVQKARDGGPQALDLAPPALDSVLEASAECPQAPDSDPQEAESPLQAAAMDPQASDWSPQESGSPVETQESPEKAGRRSSLQSPASVAPPQGPGTKIQAPQLLGGETEGREAPQGELVPEAWGLRQEGPEHKPGPSEPSSVQLEEQEGPNQGLDLATGQAEAREHDQRLEGTVRDPAWQKPQQKSEGALEVQVWEGPIPGESLASGVAEQEALREEVAQLRRKAEALGDELEAQARKLEAQNTEAARLSKELAQARRAEAEAHREAEAQAWEQARLREAVEAAGQELESASQEREALVEALAAAGRERRQWEREGSRLRAQSEAAEERMQVLESEGRQHLEEAERERREKEALQAELEKAVVRGKELGDRLEHLQRELEQAALERQEFLREKESQHQRYQGLEQRLEAELQAAATSKEEALMELKTRALQLEEELFQVMPARLGAGGHATLPSIP

SEQ ID NO: 26101 - protein, 1358 aa, Homo sapiens
MEGGKGPRLRDFLSGSLATWALGLAGLVGEAEDSEGEEEEEEEEPPLWLEKRFLRLSDGALLLRVLGIIAPSSRGGPRMLRGLDGPAAWRVWNLNHLWGRLRDFYQEELQLLILSPPPDLQTLGFDPLSEEAVEQLEGVLRLLLGASVQCEHRELFIRHIQGLSLEVQSELAAAIQEVTQPGAGVVLALSGPDPGELAPAELEMLSRSLMGTLSKLARERDLGAQRLAELLLEREPLCLRPEAPSRAPAEGPSHHLALQLANAKAQLRRLRQELEEKAELLLDSQAEVQGLEAEIRRLRQEAQALSGQAKRAELYREEAEALRERAGRLPRLQEELRRCRERLQAAEAYKSQLEEERVLSGVLEASKALLEEQLEAARERCARLHETQRENLLLRTRLGEAHAELDSLRHQVDQLAEENVELELELQRSLEPPPGSPGEAPLAGAAPSLQDEVREAEAGRLRTLERENRELRGLLQVLQGQPGGQHPLLEAPREDPVLPVLEEAPQTPVAFDHSPQGLVQKARDGGPQALDLAPPALDSVLEASAECPQAPDSDPQEAESPLQAAAMDPQASDWSPQESGSPVETQESPEKAGRRSSLQSPASVAPPQGPGTKIQAPQLLGGETEGREAPQGELVPEAWGLRQEGPEHKPGPSEPSSVQLEEQEGPNQGLDLATGQAEAREHDQRLEGTVRDPAWQKPQQKSEGALEVQVWEGPIPGESLASGVAEQEALREEVAQLRRKAEALGDELEAQARKLEAQNTEAARLSKELAQARRAEAEAHREAEAQAWEQARLREAVEAAGQELESASQEREALVEALAAAGRERRQWEREGSRLRAQSEAAEERMQVLESEGRQHLEEAERERREKEALQAELEKAVVRGKELGDRLEHLQRELEQAALERQEFLREKESQHQRYQGLEQRLEAELQAAATSKEEALMELKTRALQLEEELFQLRQGPAGLGPKKRAEPQLVETQNVRLIEVERSNAMLVAEKAALQGQLQHLEGQLGSLQGRAQELLLAERERLMQDGHRQRGLEEELRRLQSEHDRAQMLLAELSRERGELQGERGELRGRLARLELERAQLEMQSQQLRESNQQLDLSACRLTTQCELLTQLRSAQEEENRQLLAEVQALSRENRELLERSLESRDHLHREQREYLDQLNALRREKQKLVEKIMDQYRVLEPVPLPRTKKGSWLADKVKRLMRPRREGGPPGGLRLGADGAGSTESLGGPPETELPEGREADGTGSPSPAPMRRAQSSLCLRDETLAGGQRRKLSSRFPVGRSSESFSPGDTPRQRFRQRHPGPLGAPVSHSKGPGVGWENSAETLQEHETDANREGPEVQEPEKRPLTPSLSQ

SEQ ID NO: 26102 - protein, 696 aa, Homo sapiens
MKNRGLREELEKAVVRGKELGDRLEHLQRELEQAALERQEFLREKESQHQRYQGLEQRLEAELQAAATSKEEALMELKTRALQLEEELFQLRQGPAGLGPKKRAEPQLVETQNVRLIEVERSNAMLVAEKAALQGQLQHLEGQLGSLQGRAQELLLQSQRAQEHSSRLQAEKSVLEIQGQELHRKLEVLEEEVRAARQSQEETRGQQQALLRDHKALAQLQRRQEAELEGLLVRHRDLKANMRALELAHRELQGRHEQLQAQRASVEAQEVALLAERERLMQDGHRQRGLEEELRRLQSEHDRAQMLLAELSRERGELQGERGELRGRLARLELERAQLEMQSQQLRESNQQLDLSACRLTTQCELLTQLRSAQEEENRQLLAEVQALSRENRELLERSLESRDHLHREQREYLDQLNALRREKQKLVEKIMDQYRVLEPVPLPRTKKGSWLADKGPLPRHPCAGPRAPSACGMRPWQAGSGGNSAQGSRWGEALSHSALGTPLGNDSDSAIQAPWGRPSPTAKDLVWDGRTPLRPCRNTKQMPTERALRYRNRRNVPSPHPSASDTVGTAGLGVQPSRHWSVSGGPRQPKSSGSQGPQGESLDKEAWALRSSTVSAGARRWSWDECVDRGDGWPPRAAPGWSSGSSRWLPLRQRSLGDPPAEGGWQELAREPPALSRWEAESQCWGTVAWADLEP

SEQ ID NO: 26103 - protein, 139 aa, Homo sapiens
MPCAARSRSSWRRSWTNTACWSLCPCPGPRSPSPAPMRRAQSSLCLRDETLAGGQRRKLSSRFPVGRSSESFSPGDTPRQRFRQRHPGPLGAPVSHSKGPGVGWENSAETLQEHETDANREGPEVQEPEKRPLTPSLSQ

SEQ ID NO: 26104 - protein, 296 aa, Homo sapiens
MESMAVATDGGERPGVPAGSGLSASQRRAELRRRKLLMNSEQRINRIMGFHRPGSGAEEESQTKSKQQDSDKLNSLSVPSVSKRVVLGDSVSTGTTDQQGGVAEVKGTQLGDKLDSFIKPPECSSDVNLELRQRNRGDLTADSVQRGSRHGLEQYLSRFEEAMKLRKQLISEKPSQEDGNTTEEFDSFRIFRLVGCALLALGVRAFVCKYLSIFAPFLTLQLAYMGLYKYFPKSEKKIKTTVLTAALLLSGIPAEVINRSMDTYSKMGEVFTDLCVYFFTFIFCHELLDYWGSEVP

SEQ ID NO: 26105 - protein, 390 aa, Homo sapiens
MEDPTLYIVERPLPGYPDAEAPEPSSAGAQAAEEPSGAGSEELIKSDQVNGVLVLSLLDKIIGAVDQIQLTQAQLEERQAEMEGAVQSIQGELSKLGKAHATTSNTVSKLLEKVRKVSVNVKTVRGSLERQAGQIKKLEVNEAELLRRRNFKVMIYQDEVKLPAKLSISKSLKESEALPEKEGEELGEGERPEEDAAALELSSDEAVEVEEVIEESRAERIKRSGLRRVDDFKKAFSKEKMEKTKVRTRENLEKTRLKTKENLEKTRHTLEKRMNKLGTRLVPAERREKLKTSRDKLRKSFTPDHVVYARSKTAVYKVPPFTFHVKKIREGQVEVLKATEMVEVGADDDEGGAERGEAGDLRRGSSPDVHALLEITEESDAVLVDKSDSD

SEQ ID NO: 26106 - protein, 300 aa, Homo sapiens
MEDPTLYIVERPLPGYPDAEAPEPSSAGAQAAEEPSGAGSEELIKSDQVNGVLVLSLLDKIIGAVDQIQLTQAQLEERQAEMEGAVQSIQGELSKLGEGERPEEDAAALELSSDEAVEVEEVIEESRAERIKRSGLRRVDDFKKAFSKEKMEKTKVRTRENLEKTRLKTKENLEKTRHTLEKRMNKLGTRLVPAERREKLKTSRDKLRKSFTPDHVVYARSKTAVYKVPPFTFHVKKIREGQVEVLKATEMVEVGADDDEGGAERGEAGDLRRGSSPDVHALLEITEESDAVLVDKSDSD

SEQ ID NO: 26107 - protein, 198 aa, Homo sapiens
MEDAAALELSSDEAVEVEEVIEESRAERIKRSGLRRVDDFKKAFSKEKMEKTKVRTRENLEKTRLKTKENLEKTRHTLEKRMNKLGTRLVPAERREKLKTSRDKLRKSFTPDHVVYARSKTAVYKVPPFTFHVKKIREGQVEVLKATEMVEVGADDDEGGAERGEAGDLRRGSSPDVHALLEITEESDAVLVDKSDSD

SEQ ID NO: 26108 - protein, 76 aa, Homo sapiens
MAGTRGLMLLGPGPVAGPRDVGTCRGRQMEIQKHKDNKKLPQGIIIVFRLQTHTTPQIYTQLKGKLRKFFKEPYSE

SEQ ID NO: 26109 - protein, 55 aa, Homo sapiens
MAGTRGLMLLGPGPVAGPRDVGTCRGRQMEIQKHKDNKKLPQGKLRKFFKEPYSE

SEQ ID NO: 26110 - protein, 341 aa, Homo sapiens
MADEKPSNGVLVHMVKLLIKTFLDGIFDDLMENNVLNTDEIHLIGKCLKFVVSNAENLVDDITETAQIAGKIFREHLWNSKKQLSSDISSDGEREANMPGLNIRNKEFNYLHNRNGSELDLLGMRDLLENLGYSVVIKENLTAQEMETALRQFAAHPEHQSSDSTFLVFMSHSILNGICGTKHWDQEPDVLHDDTIFEIFNNRNCQSLKDKPKVIIMQACRGNGAGIVWFTTDSGKASADTHGRLLQGNICNDAVTKAHVEKDFIAFKSSTPHNVSWRHETNGSVFISQIIYYFREYSWSHHLEEIFQKVQHSFETPNILTQLPTIERLSMTRYFYLFPGN

SEQ ID NO: 26111 - protein, 168 aa, Homo sapiens
MADEKPSNGVLVHMVKLLIKTFLDGIFDDLMENNVLNTDEIHLIGKCLKFVVSNAENLVDDITETAQIAGKIFREHLWNSKKQLSSAFLEIQGAQPSGKLKLCPHAHFHELKTKRADEIYPVMEKERRTCLASTSATKNSTIFIIEMVLNLTFWGCEIYLKTLDTQWL

SEQ ID NO: 26112 - protein, 257 aa, Homo sapiens
MADISSDGEREANMPGLNIRNKEFNYLHNRNGSELDLLGMRDLLENLGYSVVIKENLTAQEMETALRQFAAHPEHQSSDSTFLVFMSHSILNGICGTKHWDQEPDVLHDDTIFEIFNNRNCQSLKDKPKVIIMQACRGNGAGIVWFTTDSGKASADTHGRLLQGNICNDAVTKAHVEKDFIAFKSSTPHNVSWRHETNGSVFISQIIYYFREYSWSHHLEEIFQKVQHSFETPNILTQLPTIERLSMTRYFYLFPGN

SEQ ID NO: 26113 - protein, 242 aa, Homo sapiens
MSNPRSLEEEKYDMSGARLALILCVTKAREGSEEDLDALEHMFRQLRFESTMKRDPTAEQFQEELEKFQQAIDSREDPVSCAFVVLMAHGREGFLKGEDGEMVKLENLFEALNNKNCQALRAKPKVYIIQACRGEQRDPGETVGGDEIVMVIKDSPQTIPTYTDALHVYSTVEGYIAYRHDQKGSCFIQTLVDVFTKRKGHILELLTEVTRRMAEAELVQEGKARKTNPEIQSTLRKRLYLQ

SEQ ID NO: 26114 - protein, 882 aa, Homo sapiens
MGPWSRSLSALLLLLQVSSWLCQEPEPCHPGFDAESYTFTVPRRHLERGRVLGRVNFEDCTGRQRTAYFSLDTRFKVGTDGVITVKRPLRFHNPQIHFLVYAWDSTYRKFSTKVTLNTVGHHHRPPPHQASVSGIQAELLTFPNSSPGLRRQKRDWVIPPISCPENEKGPFPKNLVQIKSNKDKEGKVFYSITGQGADTPPVGVFIIERETGWLKVTEPLDRERIATYTLFSHAVSSNGNAVEDPMEILITVTDQNDNKPEFTQEVFKGSVMEGALPGTSVMEVTATDADDDVNTYNAAIAYTILSQDPELPDKNMFTINRNTGVISVVTTGLDRESFPTYTLVVQAADLQGEGLSTTATAVITVTDTNDNPPIFNPTTYKGQVPENEANVVITTLKVTDADAPNTPAWEAVYTILNDDGGQFVVTTNPVNNDGILKTAKGLDFEAKQQYILHVAVTNVVPFEVSLTTSTATVTVDVLDVNEAPIFVPPEKRVEVSEDFGVGQEITSYTAQEPDTFMEQKITYRIWRDTANWLEINPDTGAISTRAELDREDFEHVKNSTYTALIIATDNGSPVATGTGTLLLILSDVNDNAPIPEPRTIFFCERNPKPQVINIIDADLPPNTSPFTAELTHGASANWTIQYNDPTQESIILKPKMALEVGDYKINLKLMDNQNKDQVTTLEVSVCDCEGAAGVCRKAQPVEAGLQIPAILGILGGILALLILILLLLLFLRRRAVVKEPLLPPEDDTRDNVYYYDEEGGGEEDQDFDLSQLHRGLDARPEVTRNDVAPTLMSVPRYLPRPANPDEIGNFIDENLKAADTDPTAPPYDSLLVFDYEGSGSEAASLSSLNSSESDKDQDYDYLNEWGNRFKKLADMYGGGEDD

SEQ ID NO: 26115 - protein, 821 aa, Homo sapiens
MGPWSRSLSALLLLLQVSSWLCQEPEPCHPGFDAESYTFTVPRRHLERGRVLGRVNFEDCTGRQRTAYFSLDTRFKVGTDGVITVKRPLRFHNPQIHFLVYAWDSTYRKFSTKVTLNTVGHHHRPPPHQASVSGIQAELLTFPNSSPGLRRQKRDWVIPPISCPENEKGPFPKNLVQIKSNKDKEGKVFYSITGQGADTPPVGVFIIERETGWLKVTEPLDRERIATYTLFSHAVSSNGNAVEDPMEILITVTDQNDNKPEFTQEVFKGSVMEGALPGTSVMEVTATDADDDVNTYNAAIAYTILSQDPELPDKNMFTINRNTGVISVVTTGLDRESFPTYTLVVQAADLQGEGLSTTATAVITVTDTNDNPPIFNPTTGLDFEAKQQYILHVAVTNVVPFEVSLTTSTATVTVDVLDVNEAPIFVPPEKRVEVSEDFGVGQEITSYTAQEPDTFMEQKITYRIWRDTANWLEINPDTGAISTRAELDREDFEHVKNSTYTALIIATDNGSPVATGTGTLLLILSDVNDNAPIPEPRTIFFCERNPKPQVINIIDADLPPNTSPFTAELTHGASANWTIQYNDPTQESIILKPKMALEVGDYKINLKLMDNQNKDQVTTLEVSVCDCEGAAGVCRKAQPVEAGLQIPAILGILGGILALLILILLLLLFLRRRAVVKEPLLPPEDDTRDNVYYYDEEGGGEEDQDFDLSQLHRGLDARPEVTRNDVAPTLMSVPRYLPRPANPDEIGNFIDENLKAADTDPTAPPYDSLLVFDYEGSGSEAASLSSLNSSESDKDQDYDYLNEWGNRFKKLADMYGGGEDD

SEQ ID NO: 26116 - protein, 125 aa, Homo sapiens
MSSTLGKLSNQVEETLPLLKKVPANYFHICSAILMGFSLSKSATQVSAIHMDSKVDDHLIRGTEKSRLEPATQLFQNTKKIRLEDTNQENFTRIEGTGTGSLSGKALGSVVYVKESDGLEMTDVE

SEQ ID NO: 26117 - protein, 641 aa, Homo sapiens
MGPPLKLFKNQKYQELKQECIKDSRLFCDPTFLPENDSLFYNRLLPGKVVWKRPQDICDDPHLIVGNISNHQLTQGRLGHKPMVSAFSCLAVQESHWTKTIPNHKEQEWDPQKTEKYAGIFHFRFWHFGEWTEVVIDDLLPTINGDLVFSFSTSMNEFWNALLEKAYAKLLGCYEALDGLTITDIIVDFTGTLAETVDMQKGRYTELVEEKYKLFGELYKTFTKGGLICCSIESPNQEEQEVETDWGLLKGHTYTMTDIRKIRLGERLVEVFSAEKVYMVRLRNPLGRQEWSGPWSEISEEWQQLTASDRKNLGLVMSDDGEFWMSLEDFCRNFHKLNVCRNVNNPIFGRKELESVLGCWTVDDDPLMNRSGGCYNNRDTFLQNPQYIFTVPEDGHKVIMSLQQKDLRTYRRMGRPDNYIIGFELFKVEMNRKFRLHHLYIQERAGTSTYIDTRTVFLSKYLKKGNYVLVPTMFQHGRTSEFLLRIFSEVPVQLRELTLDMPKMSCWNLARGYPKVVTQITVHSAEDLEKKYANETVNPYLVIKCGKEEVRSPVQKNTVHAIFDTQAIFYRRTTDIPIIVQVWNSRKFCDQFLGQVTLDADPSDCRDLKSLYLRKKGGPTAKVKQGHISFKVISSDDLTEL

SEQ ID NO: 26118 - protein, 1296 aa, Homo sapiens
MLDPSSSEEESDEGLEEESRDVLVAAGSSQRAPPAPTREGRRDAPGRAGGGGAARSVSPSPSVLSEGRDEPQRQLDDEQERRIRLQLYVFVVRCIAYPFNAKQPTDMARRQQKLNKQQLQLLKERFQAFLNGETQIVADEAFCNAVRSYYEVFLKSDRVARMVQSGGCSANDFREVFKKNIEKRVRSLPEIDGLSKETVLSSWIAKYDAIYRGEEDLCKQPNRMALSAVSELILSKEQLYEMFQQILGIKKLEHQLLYNACQLDNADEQAAQIRRELDGRLQLADKMAKERKFPKFIAKDMENMYIEELRSSVNLLMANLESLPVSKGGPEFKLQKLKRSQNSAFLDIGDENEIQLSKSDVVLSFTLEIVIMEVQGLKSVAPNRIVYCTMEVEGEKLQTDQAEASRPQWGTQGDFTTTHPRPVVKVKLFTESTGVLALEDKELGRVILYPTSNSSKSAELHRMVVPKNSQDSDLKIKLAVRMDKPAHMKHSGYLYALGQKVWKRWKKRYFVLVQVSQYTFAMCSYREKKSEPQELMQLEGYTVDYTDPHPGLQGGCMFFNAVKEGDTVIFASDDEQDRILWVQAMYRATGQSYKPVPAIQTQKLNPKGGTLHADAQLSGKDADRFQKHGMDEFISANPCKLDHAFLFRILQRQTLDHRLNDSYSCLGWFSPGQVFVLDEYCARYGVRGCHRHLCYLAELMEHSENGAVIDPTLLHYSFAFCASHVHGNRPDGIGTVSVEEKERFEEIKERLSSLLENQISHFRYCFPFGRPEGALKATLSLLERVLMKDIATPIPAEEVKKVVRKCLEKAALINYTRLTEYAKIEETMNQASPARKLEEILHLAELCIEVLQQNEEHHAEGREAFAWWPDLLAEHAEKFWALFTVDMDTALEAQPQDSWDSFPLFQLLNNFLRNDTLLCNGKFHKHLQEIFVPLVVRYVDLMESSIAQSIHRGFEQETWQPVKNIANSLPNVALPKVPSLPLNLPQIPNISTASWMPSLYESTNGSATSEDLFWKLDALQMFVFDLHWPEQEFAHHLEQRLKLMASDMLEACVKRTRTAFELKLQKASKTTDLRIPASVCTMFNVLVDAKKQSTKLCALDGGQEQQYHSKIDDLIDNSVKEIISLLVSKFVSVLEGVLSKLSRYDEGTFFSSILSFTVKAAAKYVDVPKPGMDLADTYIMFVRQNQDILREKVNEEMYIEKLFDQWYSSSMKVICVWLTDRLDLQLHIYQLKTLIKIVKKTYRDFRLQGVLEGTLNSKTYDTVHRRLTVEEATASVSEGGGLQGITMKDSDEEEEG

SEQ ID NO: 26119 - protein, 1255 aa, Homo sapiens
MLDPSSSEEESDEGLEEESRDVLVAAGSSQRAPPAPTREGRRDAPGRAGGGGAARSVSPSPSVLSEGRDEPQRQLDDEQERRIRLQLYVFVVRCIAYPFNAKQPTDMARRQQKLNKQQLQLLKERFQAFLNGETQIVADEAFCNAVRSYYEVFLKSDRVARMVQSGGCSANDFREVFKKNIEKRVRSLPEIDGLSKETVLSSWIAKYDAIYRGEEDLCKQPNRMALSAVSELILSKEQLYEMFQQILGIKKLEHQLLYNACQLDNADEQAAQIRRELDGRLQLADKMAKERKFPKFIAKDMENMYIEELRSSVNLLMANLESLPVSKGGPEFKLQKLKRSQNSAFLDIGDENEIQLSKSDVVLSFTLEIVIMEVQGLKSVAPNRIVYCTMEVEGEKLQTDQAEASRPQWGTQGDFTTTHPRPVVKVKLFTESTGVLALEDKELGRVILYPTSNSSKSAELHRMVVPKNSQDSDLKIKLAVRMDKPAHMKHSGYLYALGQKVWKRWKKRYFVLVQVSQYTFAMCSYREKKSEPQELMQLEGYTVDYTDPHPGLQGGCMFFNAVKEGDTVIFASDDEQDRILWVQAMYRATGQSYKPVPAIQTQKLNPKGGTLHADAQLYADRFQKHGMDEFISANPCKLDHAFLFRILQRQTLDHRLNDSYSCLGWFSPGQVFVLDEYCARYGVRGCHRHLCYLAELMEHSENGAVIDPTLLHYSFAFCASHVHGNRPDGIGTVSVEEKERFEEIKERLSSLLENQISHFRYCFPFGRPEGALKATLSLLERVLMKDIATPIPAEEVKKVVRKCLEKAALINYTRLTEYAKIEETMNQASPARKLEEILHLAELCIEVLQQNEEHHAEAFAWWPDLLAEHAEKFWALFTVDMDTALEAQPQDSWDSFPLFQLLNNFLRNDTLLCNGKFHKHLQEIFVPLVVRYVDLMESSIAQSIHRGFEQETWQPVNNGSATSEDLFWKLDALQMFVFDLHWPEQEFAHHLEQRLKLMASDMLEACVKRTRTAFELKLQKASKTTDLRIPASVCTMFNVLVDAKKQSTKLCALDGGQEFGSQWQQYHSKIDDLIDNSVKEIISLLVSKFVSVLEGVLSKLSRYDEGTFFSSILSFTVKAAAKYVDVPKPGMDLADTYIMFVRQNQDILREKVNEEMYIEKLFDQWYSSSMKVICVWLTDRLDLQLHIYQLKTLIKIVKKTYRDFRLQGVLEGTLNSKTYDTVHRRLTVEEATASVSEGGGLQGITMKDSDEEEEG

SEQ ID NO: 26120 - protein, 1250 aa, Homo sapiens
MLDPSSSEEESDEGLEEESRDVLVAAGSSQRAPPAPTREGRRDAPGRAGGGGAARSVSPSPSVLSEGRDEPQRQLDDEQERRIRLQLYVFVVRCIAYPFNAKQPTDMARRQQKLNKQQLQLLKERFQAFLNGETQIVADEAFCNAVRSYYEVFLKSDRVARMVQSGGCSANDFREVFKKNIEKRVRSLPEIDGLSKETVLSSWIAKYDAIYRGEEDLCKQPNRMALSAVSELILSKEQLYEMFQQILGIKKLEHQLLYNACQLDNADEQAAQIRRELDGRLQLADKMAKERKFPKFIAKDMENMYIEELRSSVNLLMANLESLPVSKGGPEFKLQKLKRSQNSAFLDIGDENEIQLSKSDVVLSFTLEIVIMEVQGLKSVAPNRIVYCTMEVEGEKLQTDQAEASRPQWGTQGDFTTTHPRPVVKVKLFTESTGVLALEDKELGRVILYPTSNSSKSAELHRMVVPKNSQDSDLKIKLAVRMDKPAHMKHSGYLYALGQKVWKRWKKRYFVLVQVSQYTFAMCSYREKKSEPQELMQLEGYTVDYTDPHPGLQGGCMFFNAVKEGDTVIFASDDEQDRILWVQAMYRATGQSYKPVPAIQTQKLNPKGGTLHADAQLYADRFQKHGMDEFISANPCKLDHAFLFRILQRQTLDHRLNDSYSCLGWFSPGQVFVLDEYCARYGVRGCHRHLCYLAELMEHSENGAVIDPTLLHYSFAFCASHVHGNRPDGIGTVSVEEKERFEEIKERLSSLLENQISHFRYCFPFGRPEGALKATLSLLERVLMKDIATPIPAEEVKKVVRKCLEKAALINYTRLTEYAKIEETMNQASPARKLEEILHLAELCIEVLQQNEEHHAEAFAWWPDLLAEHAEKFWALFTVDMDTALEAQPQDSWDSFPLFQLLNNFLRNDTLLCNGKFHKHLQEIFVPLVVRYVDLMESSIAQSIHRGFEQETWQPVNNGSATSEDLFWKLDALQMFVFDLHWPEQEFAHHLEQRLKLMASDMLEACVKRTRTAFELKLQKASKTTDLRIPASVCTMFNVLVDAKKQSTKLCALDGGQEQQYHSKIDDLIDNSVKEIISLLVSKFVSVLEGVLSKLSRYDEGTFFSSILSFTVKAAAKYVDVPKPGMDLADTYIMFVRQNQDILREKVNEEMYIEKLFDQWYSSSMKVICVWLTDRLDLQLHIYQLKTLIKIVKKTYRDFRLQGVLEGTLNSKTYDTVHRRLTVEEATASVSEGGGLQGITMKDSDEEEEG

SEQ ID NO: 26121 - protein, 859 aa, Homo sapiens
MKLKDTKSRPKQSSCGKFQTKGIKVVGKWKEVKIDPNMFADGQMDDLVCFEELTDYQLVSPAKNPSSLFSKEAPKRKAQAVSEEEEEEEGKSSSPKKKIKLKKSKNVATEGTSTQKEFEVKDPELEAQGDDMVCDDPEAGEMTSENLVQTAPKKKKNKGKKGLEPSQSTAAKVPKKAKTWIPEVHDQKADVSAWKDLFVPRPVLRALSFLGFSAPTPIQALTLAPAIRDKLDILGAAETGSGKTLAFAIPMIHAVLQWQKRNAAPPPSNTEAPPGETRTEAGAETRSPGKAEAESDALPDDTVIESEALPSDIAAEARAKTGGTVSDQALLFGDDDAGEGPSSLIREKPVPKQNENEEENLDKEQTGNLKQELDDKSATCKAYPKRPLLGLVLTPTRELAVQVKQHIDAVARFTGIKTAILVGGMSTQKQQRMLNRRPEIVVATPGRLWELIKEKHYHLRNLRQLRCLVVDEADRMVEKGHFAELSQLLEMLNDSQYNPKRQTLVFSATLTLVHQAPARILHKKHTKKMDKTAKLDLLMQKIGMRGKPKVIDLTRNEATVETLTETKIHCETDEKDFYLYYFLMQYPGRSLVFANSISCIKRLSGLLKVLDIMPLTLHACMHQKQRLRNLEQFARLEDCVLLATDVAARGLDIPKVQHVIHYQVPRTSEIYVHRSGRTARATNEGLSLMLIGPEDVINFKKIYKTLKKDEDIPLFPVQTKYMDVVKERIRLARQIEKSEYRNFQACLHNSWIEQAAAALEIELEEDMYKGGKADQQEERRRQKQMKVLKKELRHLLSQPLFTESQKTKYPTQSGKPPLLVSAPSKSESALSCLSKQKKKKTKKPKEPQPEQPQPSTSAN

SEQ ID NO: 26122 - protein, 804 aa, Homo sapiens
MKLKDTKSRPKQSSCGKFQTKGIKVVGKWKEVKIDPNMFADGQMDDLVCFEELTDYQLVSPAKNPSSLFSKEAPKRKAQAVSEEEEEEEGKSSSPKKKIKLKKSKNVATEGTSTQKEFEVKDPELEAQGDDMVCDDPEAGEMTSENLVQTAPKKKKNKGKKGLEPSQSTAAIRDKLDILGAAETGSGKTLAFAIPMIHAVLQWQKRNAAPPPSNTEAPPGETRTEAGAETRSPGKAEAESDALPDDTVIESEALPSDIAAEARAKTGGTVSDQALLFGDDDAGEGPSSLIREKPVPKQNENEEENLDKEQTGNLKQELDDKSATCKAYPKRPLLGLVLTPTRELAVQVKQHIDAVARFTGIKTAILVGGMSTQKQQRMLNRRPEIVVATPGRLWELIKEKHYHLRNLRQLRCLVVDEADRMVEKGHFAELSQLLEMLNDSQYNPKRQTLVFSATLTLVHQAPARILHKKHTKKMDKTAKLDLLMQKIGMRGKPKVIDLTRNEATVETLTETKIHCETDEKDFYLYYFLMQYPGRSLVFANSISCIKRLSGLLKVLDIMPLTLHACMHQKQRLRNLEQFARLEDCVLLATDVAARGLDIPKVQHVIHYQVPRTSEIYVHRSGRTARATNEGLSLMLIGPEDVINFKKIYKTLKKDEDIPLFPVQTKYMDVVKERIRLARQIEKSEYRNFQACLHNSWIEQAAAALEIELEEDMYKGGKADQQEERRRQKQMKVLKKELRHLLSQPLFTESQKTKYPTQSGKPPLLVSAPSKSESALSCLSKQKKKKTKKPKEPQPEQPQPSTSAN

SEQ ID NO: 26123 - protein, 332 aa, Homo sapiens
MAPAQRCPLCRQTFFCGRGHVYSRKHQRQLKEALERLLPQVEAARKAIRAAQVERYVPEHERCCWCLCCGCEVREHLSHGNLTVLYGGLLEHLASPEHKKATNKFWWENKAEVQMKEKFLVTPQDYARFKKSMVKGLDSYEEKEDKVIKEMAAQIREVEQSRQEVVRSVLEPQAVPDPEEGSSAPRSWKGMNSQVASSLQQPSNLDLPPAPELDWMETGPSLTFIGHQDIPGVGNIHSGATPPWMIQDEEYIAGNQEIGPSYEEFLKEKEKQKLKKLPPDRVGANFDHSSRTSAGWLPSFGRVWNNGRRWQSRHQFKTEAAAMKKQSHTEKS

SEQ ID NO: 26124 - protein, 790 aa, Homo sapiens
MRTYRYFLLLFWVGQPYPTLSTPLSKRTSGFPAKKRALELSGNSKNELNRSKRSWMWNQFFLLEEYTGSDYQYVGKLHSDQDRGDGSLKYILSGDGAGDLFIINENTGDIQATKRLDREEKPVYILRAQAINRRTGRPVEPESEFIIKIHDINDNEPIFTKEVYTATVPEMSDVGTFVVQVTATDADDPTYGNSAKVVYSILQGQPYFSVESETGIIKTALLNMDRENREQYQVVIQAKDMGGQMGGLSGTTTVNITLTDVNDNPPRFPQSTYQFKTPESSPPGTPIGRIKASDADVGENAEIEYSITDGEGLDMFDVITDQETQEGIITVKKLLDFEKKKVYTLKVEASNPYVEPRFLYLGPFKDSATVRIVVEDVDEPPVFSKLAYILQIREDAQINTTIGSVTAQDPDAARNPVKYSVDRHTDMDRIFNIDSGNGSIFTSKLLDRETLLWHNITVIATEINNPKQSSRVPLYIKVLDVNDNAPEFAEFYETFVCEKAKADQLIQTLHAVDKDDPYSGHQFSFSLAPEAASGSNFTIQDNKDNTAGILTRKNGYNRHEMSTYLLPVVISDNDYPVQSSTGTVTVRVCACDHHGNMQSCHAEALIHPTGLSTGALVAILLCIVILLVTVVLFAALRRQRKKEPLIISKEDIRDNIVSYNDEGGGEEDTQAFDIGTLRNPEAIEDNKLRRDIVPEALFLPRRTPTARDNTDVRDFINQRLKENDTDPTAPPYDSLATYAYEGTGSVADSLSSLESVTTDADQDYDYLSDWGPRFKKLADMYGGVDSDKDS

SEQ ID NO: 26125 - protein, 663 aa, Homo sapiens
MRTYRYFLLLFWVGQPYPTLSTPLSKRTSGFPAKKRALELSGNSKNELNRSKRSWMWNQFFLLEEYTGSDYQYVGKLHSDQDRGDGSLKYILSGDGAGDLFIINENTGDIQATKRLDREEKPVYILRAQAINRRTGRPVEPESEFIIKIHDINDNEPIFTKEVYTATVPEMSDVGTFVVQVTATDADDPTYGNSAKVVYSILQGQPYFSVESETGIIKTALLNMDRENREQYQVVIQAKDMGGQMGGLSGTTTVNITLTDVNDNPPRFPQSTYQFKTPESSPPGTPIGRIKASDADVGENAEIEYSITDGEGLDMFDVITDQETQEGIITVKKLLDFEKKKVYTLKVEASNPYVEPRFLYLGPFKDSATVRIVVEDVDEPPVFSKLAYILQIREDAQINTTIGSVTAQDPDAARNPVKYSVDRHTDMDRIFNIDSGNGSIFTSKLLDRETLLWHNITVIATEINNPKQSSRVPLYIKVLDVNDNAPEFAEFYETFVCEKAKADQLIQTLHAVDKDDPYSGHQFSFSLAPEAASGSNFTIQDNKDNTAGILTRKNGYNRHEMSTYLLPVVISDNDYPVQSSTGTVTVRVCACDHHGNMQSCHAEALIHPTGLSTGALVAILLCIVILLGKLVLPASYLPMVRGSHCYCDTLDLSASPIKAYSLI

SEQ ID NO: 26126 - protein, 265 aa, Homo sapiens
MSRAMALFFVLCWIQDEIVLQVFSKVPYDPSFDETRTAVRSITKRDTQKSYSQQKSLNNAAFASGSNEREEHLAKIFDEILLQVFPKFPYDPSFNEATAVRSITKTDMRKGTSIAWNSPKPEYFLGSVDKIPDKDHLSEEKNFKESCLFDRDLREQLTTIDKETLQGAAKPDAHFRTMPCGQLLHFLQRNTIIAAVSGVAILMAIVLLLLGLASYIRKKQPSSPLANTTYNIFIMDGKTWWHNSEEKNFTKLAKKQKQLKSSSCV

SEQ ID NO: 26127 - protein, 406 aa, Homo sapiens
MTQTLDTREDPLNLGGGGGGGCGCGWAHSASLSSWSSCHRRRPGAPAYNRPHRYSPKTEYGPPRKQPKQQHGPGFWFQPPVCSNWGCWGGPWRPPPPGFWKFPCPVQVFRVYGLHPLCFCCCSCWSGSWNPGWVKPPGRKKRWGRRGRGLRHHPRHSYPRSPPADVSTLPRPVKLYEWREPGMRAPPNTTQFIMNQIYEDMRQQEKVERQQEALRAQKATVSGEASPARSSGNDAPPGGSKETWGLQETLYGFVQNPSLAFSPNPEENQSLAPLLVEEEEEKKNDDEEEYDQEVCDAKEASEEEEEVEDEEEEVEDEEEEEVEEAEYVEEGEEELEEEELEEEEEVLEENEQRGEEFHLPLEMPLSIFVEAEEKRENFISCTFLNPEQIIPKVPQESLFMAQDFNC

SEQ ID NO: 26128 - protein, 275 aa, Homo sapiens
MSACGRKALTLLSSVFAVCGLGLLGIAVSTDYWLYLEEGVIVPQNQSTEIKMSLHSGLWRVCFLAGEERGRCFTIEYVMPMNTQLTSESTVNVLKMIRSATPFPLVSLFFMFIGFILNNIGHIRPHRTILAFVSGIFFILSGLSLVVGLVLYISSINDEMLNRTKDAETYFNYKYGWSFAFAAISFLLTESAGVMSVYLFMKRYTAEDMYRPHPGFYRPRLSNCSDYSGQFLHPDAWVRGRSPSDISSEASLQMNSNYPALLKCPDYDQMSSSPC

SEQ ID NO: 26129 - protein, 1154 aa, Homo sapiens [sequence omitted]

SEQ ID NO: 26130 - protein, 323 aa, Homo sapiens
MGLFDRGVQMLLTTVGAFAAFSLMTIAVGTDYWLYSRGVCKTKSVSENETSKKNEEVMTHSGLWRTCCLEGNFKGLCKQIDHFPEDADYEADTAEYFLRAVRASSIFPILSVILLFMGGLCIAASEFYKTRHNIILSAGIFFVSAGLSNIIGIIVYISANAGDPSKSDSKKNSYSYGWSFYFGALSFIIAEMVGVLAVHMFIDRHKQLRATARATDYLQASAITRIPSYRYRYQRRSRSSSRSTEPSHSRDASPVGIKGFNTLPSTEISMYTLSRDPLKAATTPTATYNSDRDNSFLQVHNCIQKENKDSLHSNTANRRTTPV

SEQ ID NO: 26131 - protein, 260 aa, Homo sapiens
MMWSNFFLQEENRRRGAAGRRRAHGQGRSGLTPEREGKVKLALLLAAVGATLAVLSVGTEFWVELNTYKANGSAVCEAAHLGLWKACTKRLWQADVPVDRDTCGPAELPGEANCTYFKFFTTGENARIFQRTTKKEVNLAAAVIAVLGLAVMALGCLCIIMVLSKGAEFLLRVGAVCFGLSGLLLLVSLEVFRHSVRALLQRVSPEPPPAPRLTYEYSWSLGCGVGAGLILLLGAGCFLLLTLPSWPWGSLCPKRGHRAT

SEQ ID NO: 26132 - protein, 268 aa, Homo sapiens
MGLSPSAPAVAVQASNASASPPSGCPMHEGKMKGCPVNTEPSGPTCEKKTYSVPAHQERAYEYVECPIRGTAAENKENLDPSNLMPPPNQTPAPDQPFALSTVREESSIPRADSEKKWVYPSEQMFWNAMLKKGWKWKDEDISQKDMYNIIRIHNQNNEQAWKEILKWEALHAAECPCGPSLIRFGGKAKEYSPRARIRSWMGYELPFDRHDWIINRCGTEVRYVIDYYDGGEVNKDYQFTILDVRPALDSLSAVWDRMKVAWWRWTS

SEQ ID NO: 26133 - protein, 435 aa, Homo sapiens
MIWKRSAVLRFYSVCGLLLQGSQGQFPLTQNVTVVEGGTAILTCRVDQNDNTSLQWSNPAQQTLYFDDKKALRDNRIELVRASWHELSISVSDVSLSDEGQYTCSLFTMPVKTSKAYLTVLGVPEKPQISGFSSPVMEGDLMQLTCKTSGSKPAADIRWFKNDKEIKDVKYLKEEDANRKTFTVSSTLDFRVDRSDDGVAVICRVDHESLNATPQVAMQVLEIHYTPSVKIIPSTPFPQEGQPLILTCESKGKPLPEPVLWTKDGGELPDPDRMVVSGRELNILFLNKTDNGTYRCEATNTIGQSSAEYVLIVHDVPNTLLPTTIIPSLTTATVTTTVAITTSPTTSATTSSIRDPNALAGQNGPDHALIGGIVAVVVFVTLCSIFLLGRYLARHKGTYLTNEAKGAEDAPDADTAIINAEGSQVNAEEKKEYFI

SEQ ID NO: 26134 - protein, 404 aa, Homo sapiens
MIWKRSAVLRFYSVCGLLLQAAASKNKVKGSQGQFPLTQNVTVVEGGTAILTCRVDQNDNTSLQWSNPAQQTLYFDDKKALRDNRIELVRASWHELSISVSDVSLSDEGQYTCSLFTMPVKTSKAYLTVLGVPEKPQISGFSSPVMEGDLMQLTCKTSGSKPAADIRWFKNDKEIKDVKYLKEEDANRKTFTVSSTLDFRVDRSDDGVAVICRVDHESLNATPQVAMQVLEIHYTPSVKIIPSTPFPQEGQPLILTCESKGKPLPEPVLWTKDGGELPDPDRMVVSGRELNILFLNKTDNGTYRCEATNTIGQSSAEYVLIVHDPNALAGQNGPDHALIGGIVAVVVFVTLCSIFLLGRYLARHKGTYLTNEAKGAEDAPDADTAIINAEGSQVNAEEKKEYFI

SEQ ID NO: 26135 - protein, 437 aa, Homo sapiens
MFVLFLCNLSLVPAAASKNKVKGSQGQFPLTQNVTVVEGGTAILTCRVDQNDNTSLQWSNPAQQTLYFDDKKALRDNRIELVRASWHELSISVSDVSLSDEGQYTCSLFTMPVKTSKAYLTVLGVPEKPQISGFSSPVMEGDLMQLTCKTSGSKPAADIRWFKNDKEIKDVKYLKEEDANRKTFTVSSTLDFRVDRSDDGVAVICRVDHESLNATPQVAMQVLEIHYTPSVKIIPSTPFPQEGQPLILTCESKGKPLPEPVLWTKDGGELPDPDRMVVSGRELNILFLNKTDNGTYRCEATNTIGQSSAEYVLIVHDVPNTLLPTTIIPSLTTATVTTTVAITTSPTTSATTSSIRDPNALAGQNGPDHALIGGIVAVVVFVTLCSIFLLGRYLARHKGTYLTNEAKGAEDAPDADTAIINAEGSQVNAEEKKEYFI

SEQ ID NO: 26136 - protein, 287 aa, Homo sapiens
MPVKTSKAYLTVLGVPEKPQISGFSSPVMEGDLMQLTCKTSGSKPAADIRWFKNDKEIKDVKYLKEEDANRKTFTVSSTLDFRVDRSDDGVAVICRVDHESLNATPQVAMQVLEIHYTPSVKIIPSTPFPQEGQPLILTCESKGKPLPEPVLWTKDGGELPDPDRMVVSGRELNILFLNKTDNGTYRCEATNTIGQSSAEYVLIVHDPNALAGQNGPDHALIGGIVAVVVFVTLCSIFLLGRYLARHKGTYLTNEAKGAEDAPDADTAIINAEGSQVNAEEKKEYFI

SEQ ID NO: 26137 - protein, 327 aa, Homo sapiens
MPVKTSKAYLTVLGVPEKPQISGFSSPVMEGDLMQLTCKTSGSKPAADIRWFKNDKEIKDVKYLKEEDANRKTFTVSSTLDFRVDRSDDGVAVICRVDHESLNATPQVAMQVLEIHYTPSVKIIPSTPFPQEGQPLILTCESKGKPLPEPVLWTKDGGELPDPDRMVVSGRELNILFLNKTDNGTYRCEATNTIGQSSAEYVLIVHDVPNTLLPTTIIPSLTTATVTTTVAITTSPTTSATTSSIRDPNALAGQNGPDHALIGGIVAVVVFVTLCSIFLLGRYLARHKGTYLTNEAKGAEDAPDADTAIINAEGSQVNAEEKKEYFI

SEQ ID NO: 26138 - protein, 374 aa, Homo sapiens
MKPLLETLYLLGMLVPGGLGYDRSLAQHRQEIVDKSVSPWSLETYSYNIYHPMGEIYEWMREISEKYKEVVTQHFLGVTYETHPMYYLKISQPSGNPKKIIWMDCGIHAREWIAPAFCQWFVKEILQNHKDNSSIRKLLRNLDFYVLPVLNIDGYIYTWTTDRLWRKSRSPHNNGTCFGTDLNRNFNASWCSIGASRNCQDQTFCGTGPVSEPETKAVASFIESKKDDILCFLTMHSYGQLILTPYGYTKNKSSNHPEMIQVGQKAANALKAKYGTNYRVGSSADILYASSGSSRDWARDIGIPFSYTFELRDSGTYGFVLPEAQIQPTCEETMEAVLSVLDDVYAKHWHSDSAGRVTSATMLLGLLVSCMSLL

SEQ ID NO: 26139 - protein, 201 aa, Homo sapiens
MGSGRRALSAVPAVLLVLTLPGLPVWAQNDTEPIVLEGKCLVVCDSNPATDSKGSSSSPLGISVRAANSKVAFSAVRSTNHEPSEMSNKTRIIYFDQILVNVGNFFTLESVFVAPRKGIYSFSFHVIKVYQSQTIQVNLMLNGKPVISAFAGDKDVTREAATNGVLLYLDKEDKVYLKLEKGNLVGGWQYSTFSGFLVFPL

SEQ ID NO: 26140 - protein, 458 aa, Homo sapiens
MSDLLSVFLHLLLLFKLVAPVTFRHHRYDDLVRTLYKVQNECPGITRVYSIGRSVEGRHLYVLEFSDHPGIHEPLEPEVKYVGNMHGNEALGRELMLQLSEFLCEEFRNRNQRIVQLIQDTRIHILPSMNPDGYEVAAAQGPNKPGYLVGRNNANGVDLNRNFPDLNTYIYYNEKYGGPNHHLPLPDNWKSQVEPETRAVIRWMHSFNFVLSANLHGGAVVANYPYDKSFEHRVRGVRRTASTPTPDDKLFQKLAKVYSYAHGWMFQGWNCGDYFPDGITNGASWYSLSKGMQDFNYLHTNCFEITLELSCDKFPPEEELQREWLGNREALIQFLEQVHQGIKGMVLDENYNNLANAVISVSGINHDVTSGDHGDYFRLLLPGIYTVSATAPGYDPETVTVTVGPAEPTLVNFHLKRSIPQVSPVRRAPSRRHGVRAKVQPQARKKEMEMRQLQRGPA

SEQ ID NO: 26141 - protein, 537 aa, Homo sapiens
MEKKECPEKSSSSEEELPRRDSGSSRNIDASKLIRLQGSRKLLVDNSIRELQYTKTGIFFQAEACVTNDTVYRELPCVSETLCDISHFFQEDDETEAEPLLFRAVPECQLSGGDIPSVSEEQESSEGQDSGDICSEENQIVSSYASKVCFEIEEDYKNRQFLGPEGNVDVELIDKSTNRYSVWFPTAGWYLWSATGLGFLVRDEVTVTIAFGSWSQHLALDLQHHEQWLVGGPLFDVTAEPEEAVAEIHLPHFISLQAGEVDVSWFLVAHFKNEGMVLEHPARVEPFYAVLESPSFSLMGILLRIASGTRLSIPITSNTLIYYHPHPEDIKFHLYLVPSDALLTKAIDDEEDRFHGVRLQTSPPMEPLNFGSSYIVSNSANLKVMPKELKLSYRSPGEIQHFSKFYAGQMKEPIQLEITEKRHGTLVWDTEVKPVDLQLVAASAPPPFSGAAFVKENHRQLQARMGDLKGVLDDLQDNEVLTENEKELVEQEKTRQSKNEALLSMVEKKGDLALDVLFRSISERDPYLVSYLRQQNL

SEQ ID NO: 26142 - protein, 431 aa, Homo sapiens
MMRQRQSHYCSVLFLSVNYLGGTFPGDICSEENQIVSSYASKVCFEIEEDYKNRQFLGPEGNVDVELIDKSTNRYSVWFPTAGWYLWSATGLGFLVRDEVTVTIAFGSWSQHLALDLQHHEQWLVGGPLFDVTAEPEEAVAEIHLPHFISLQGEVDVSWFLVAHFKNEGMVLEHPARVEPFYAVLESPSFSLMGILLRIASGTRLSIPITSNTLIYYHPHPEDIKFHLYLVPSDALLTKAIDDEEDRFHGVRLQTSPPMEPLNFGSSYIVSNSANLKVMPKELKLSYRSPGEIQHFSKFYAGQMKEPIQLEITEKRHGTLVWDTEVKPVDLQLVAASAPPPFSGAAFVKENHRQLQARMGDLKGVLDDLQDNEVLTENEKELVEQEKTRQSKNEALLSMVEKKGDLALDVLFRSISERDPYLVSYLRQQNL

SEQ ID NO: 26143 - protein, 286 aa, Homo sapiens
MMRQRQSHYCSVLFLSVNYLGGTFPGDICSEENQIVSSYASKVCFEIEEDYKNRQFLGPEGNVDVELIDKSTNRYSVWFPTAGWYLWSATGLGFLVRDEVTVTIAFGSWSQHLALDLQHHEQWLVGGPLFDVTAEPEEAVAEIHLPHFISLQGEVDVSWFLVAHFKNEGMVLEHPARVEPFYAVLESPSFSLMGILLRIASGTRLSIPITSNTLIYYHPHPEDIKFHLYLVPSDALLTKAIDDEEDRFHGVRLQTSPPMEPLNFGSSYIVSNSANLKVMPKWISSL

SEQ ID NO: 26144 - protein, 392 aa, Homo sapiens
MEKKECPEKSSSSEEELPRRDSGSSRNIDASKLIRLQGSRKLLVDNSIRELQYTKTGIFFQAEACVTNDTVYRELPCVSETLCDISHFFQEDDETEAEPLLFRAVPECQLSGGDIPSVSEEQESSEGQDSGDICSEENQIVSSYASKVCFEIEEDYKNRQFLGPEGNVDVELIDKSTNRYSVWFPTAGWYLWSATGLGFLVRDEVTVTIAFGSWSQHLALDLQHHEQWLVGGPLFDVTAEPEEAVAEIHLPHFISLQAGEVDVSWFLVAHFKNEGMVLEHPARVEPFYAVLESPSFSLMGILLRIASGTRLSIPITSNTLIYYHPHPEDIKFHLYLVPSDALLTKAIDDEEDRFHGVRLQTSPPMEPLNFGSSYIVSNSANLKVMPKWISSL

SEQ ID NO: 26145 - protein, 487 aa, Homo sapiens
MEKKECPEKSSSSEEELPRRVYRELPCVSETLCDISHFFQEDDETEAEPLLFRAVPECQLSGGDIPSVSEEQESSEGQDSGDICSEENQIVSSYASKVCFEIEEDYKNRQFLGPEGNVDVELIDKSTNRYSVWFPTAGWYLWSATGLGFLVRDEVTVTIAFGSWSQHLALDLQHHEQWLVGGPLFDVTAEPEEAVAEIHLPHFISLQAGEVDVSWFLVAHFKNEGMVLEHPARVEPFYAVLESPSFSLMGILLRIASGTRLSIPITSNTLIYYHPHPEDIKFHLYLVPSDALLTKAIDDEEDRFHGVRLQTSPPMEPLNFGSSYIVSNSANLKVMPKELKLSYRSPGEIQHFSKFYAGQMKEPIQLEITEKRHGTLVWDTEVKPVDLQLVAASAPPPFSGAAFVKENHRQLQARMGDLKGVLDDLQDNEVLTENEKELVEQEKTRQSKNEALLSMVEKKGDLALDVLFRSISERDPYLVSYLRQQNL

SEQ ID NO: 26146 - protein, 70 aa, Homo sapiens
MEKKECPEKSSSSEEELPRRDSGSSRNIDASKLIRLQGSRKLLVDNSIRELQYTKTGIFFQAEACVTNDT

SEQ ID NO: 26147 - protein, 427 aa, Homo sapiens
MGIPTSSVSEEQESSEGQDSGDICSEENQIVSSYASKVCFEIEEDYKNRQFLGPEGNVDVELIDKSTNRYSVWFPTAGWYLWSATGLGFLVRDEVTVTIAFGSWSQHLALDLQHHEQWLVGGPLFDVTAEPEEAVAEIHLPHFISLQAGEVDVSWFLVAHFKNEGMVLEHPARVEPFYAVLESPSFSLMGILLRIASGTRLSIPITSNTLIYYHPHPEDIKFHLYLVPSDALLTKAIDDEEDRFHGVRLQTSPPMEPLNFGSSYIVSNSANLKVMPKELKLSYRSPGEIQHFSKFYAGQMKEPIQLEITEKRHGTLVWDTEVKPVDLQLVAASAPPPFSGAAFVKENHRQLQARMGDLKGVLDDLQDNEVLTENEKELVEQEKTRQSKNEALLSMVEKKGDLALDVLFRSISERDPYLVSYLRQQNL

SEQ ID NO: 26148 - protein, 92 aa, Homo sapiens
MKLCVTVLSLLMLVAAFCSPALSAPMGSDPPTACCFSYTARKLPRNFVVDYYETSSLCSQPAVVFQTKRSKQVCADPSESWVQEYVYDLELN

SEQ ID NO: 26149 - protein, 406 aa, Homo sapiens
MVPPPPSRGGAARGQLGRSLGPLLLLLALGHTWTYREEPEDGDREICSESKIATTKYPCLKSSGELTTCYRKKCCKGYKFVLGQCIPEDYDVCAEAPCEQQCTDNFGRVLCTCYPGYRYDRERHRKREKPYCLDIDECASSNGTLCAHICINTLGSYRCECREGYIREDDGKTCTRGDKYPNDTGHEKSENMVKAGTCCATCKEFYQMKQTVLQLKQKIALLPNNAADLGKYITGDKVLASNTYLPGPPGLPGGQGPPGSPGPKGSPGFPGMPGPPGQPGPRGSMGPMGPSPDLSHIKQGRRGPVGPPGAPGRDGSKGERGAPGPRGSPGPPGSFDFLLLMLADIRNDITELQEKVFGHRTHSSAEEFPLPQEFPSYPEAMDLGSGDDHPRRTETRDLRAPRDFYP

SEQ ID NO: 26150 - protein, 135 aa, Homo sapiens
MQLTWASISLVTRCWPQTPTFQDLLACLGARALPGPPGAPGRDGSKGERGAPGPRGSPGPPGSFDFLLLMLADIRNDITELQEKVFGHRTHSSAEEFPLPQEFPSYPEAMDLGSGDDHPRRTETRDLRAPRDFYP

SEQ ID NO: 26151 - protein, 215 aa, Homo sapiens
MVKAGTCCATCKEFYQMKQTVLQLKQKIALLPNNAADLGKYITGDKVLASNTYLPGPPGLPGGQGPPGSPGPKGSPGFPGMPGPPGQPGPRGSMGPMGPSPDLSHIKQGRRGPVGPPGAPGRDGSKGERGAPGPRGSPGPPGSFDFLLLMLADIRNDITELQEKVFGHRTHSSAEEFPLPQEFPSYPEAMDLGSGDDHPRRTETRDLRAPRDFYP

SEQ ID NO: 26152 - protein, 614 aa, Homo sapiens
MSGYSSDRDRGRDRGFGAPRFGGSRAGPLSGKKFGNPGEKLVKKKWNLDELPKFEKNFYQEHPDLARRTAQEVETYRRSKEITVRGHNCPKPVLNFYEANFPANVMDVIARQNFTEPTAIQAQGWPVALSGLDMVGVAQTGSGKTLSYLLPAIVHINHQPFLERGDGPICLVLAPTRELAQQVQQVAAEYCRACRLKSTCIYGGAPKGPQIRDLERGVEICIATPGRLIDFLECGKTNLRRTTYLVLDEADRMLDMGFEPQIRKIVDQIRPDRQTLMWSATWPKEVRQLAEDFLKDYIHINIGALELSANHNILQIVDVCHDVEKDEKLIRLMEEIMSEKENKTIVFVETKRRCDELTRKMRRDGWPAMGIHGDKSQQERDWVLNEFKHGKAPILIATDVASRGLDVEDVKFVINYDYPNSSEDYIHRIGRTARSTKTGTAYTFFTPNNIKQVSDLISVLREANQAINPKLLQLVEDRGSGRSRGRGGMKDDRRDRYSAGKRGGFNTFRDRENYDRGYSSLLKRDFGAKTQNGVYSAANYTNGSFGSNFVSAGIQTSFRTGNPTGTYQNGYDSTQQYGSNVPNMHNGMNQQAYAYPATAAAPMIGYPMPTGYSQ

SEQ ID NO: 26153 - protein, 535 aa, Homo sapiens
MSGYSSDRDRGRDRGFGAPRFGGSRAGPLSGKKFGNPGEKLVKKKWNLDELPKFEKNFYQEHPDLARRTAQEVETYRRSKEITVRGDGPICLVLAPTRELAQQVQQVAAEYCRACRLKSTCIYGGAPKGPQIRDLERGVEICIATPGRLIDFLECGKTNLRRTTYLVLDEADRMLDMGFEPQIRKIVDQIRPDRQTLMWSATWPKEVRQLAEDFLKDYIHINIGALELSANHNILQIVDVCHDVEKDEKLIRLMEEIMSEKENKTIVFVETKRRCDELTRKMRRDGWPAMGIHGDKSQQERDWVLNEFKHGKAPILIATDVASRGLDVEDVKFVINYDYPNSSEDYIHRIGRTARSTKTGTAYTFFTPNNIKQVSDLISVLREANQAINPKLLQLVEDRGSGRSRGRGGMKDDRRDRYSAGKRGGFNTFRDRENYDRGYSSLLKRDFGAKTQNGVYSAANYTNGSFGSNFVSAGIQTSFRTGNPTGTYQNGYDSTQQYGSNVPNMHNGMNQQAYAYPATAAAPMIGYPMPTGYSQ

SEQ ID NO: 26154 - protein, 478 aa, Homo sapiens
MAAAAAGGAPGPAPGPAGPPPPAAPTSAARAPPQALRRRGDSRRRQAALFFLNNISLDGRPPSLGPGGEKPPPPPAEAREPPAPPPPEPPTGLPARTPAPQGLLSPTQVPTGLGLDGQRQRKRVTSQRCSLEFLEDAVGCAPAQRTKHTSGSPRHKGLKKTHFIKNMRQYDTRNSRIVLICAKRSLCAAFSVLPYGEGLRISDLRVDSQKQRHPSGGVSVSSEMVFELEGVELGADGKVVSYAKFLYPTNALVTHKSDSHGLLPTPRPSVPRTLPGSRHKPAPTKSAPASTELGSDVGDTLEYNPNLLDDPQWPCGKHKRVLIFASYMTTVIEYVKPSDLKKDMNETFREKFPHVKLTLSKIRSLKREMRSLSEECSLEPVTVAMAYVYFEKLVLQGKLSKQNRKLCAGACVLLAAKISSDLRKSGVTQLIDKLEERFRFNRRDLIGFEFTVLVALELALYLPENQVLPHYRRLTQQF

SEQ ID NO: 26155 - protein, 173 aa, Homo sapiens
MQFPMGPACIFLRKGIAEKQRERPLGQDEIEELREAFLEFDKDRDGFISCKDLGNLMRTMGYMPTEMELIELGQQIRMNLGGRVDFDDFVELMTPKLLAETAGMIGVQEMRDAFKEFDTNGDGEITLVELQQAMQRLLGERLTPREISEVVREADVNGDGTVDFEEFVKMMSR

SEQ ID NO: 26156 - protein, 421 aa, Homo sapiens
MRWILFIGALIGSSICGQEKFFGDQVLRINVRNGDEISKLSQLVNSNNLKLNFWKSPSSFNRPVDVLVPSVSLQAFKSFLRSQGLEYAVTIEDLQALLDNEDDEMQHNEGQERSSNNFNYGAYHSLEAIYHEMDNIAADFPDLARRVKIGHSFENRPMYVLKFSTGKGVRRPAVWLNAGIHSREWISQATAIWTARKIVSDYQRDPAITSILEKMDIFLLPVANPDGYVYTQTQNRLWRKTRSRNPGSSCIGADPNRNWNASFAGKGASDNPCSEVYHGPHANSEVEVKSVVDFIQKHGNFKGFIDLHSYSQLLMYPYGYSVKKAPDAEELDKVARLAAKALASVSGTEYQVGPTCTTVYPASGSSIDWAYDNGIKFAFTFELRDTGTYGFLLPANQIIPTAEETWLGLKTIMEHVRDNLY

SEQ ID NO: 26157 - protein, 388 aa, Homo sapiens
MRWILFIGALIGSSICGQEKFFGDQVLRINVRNGDEISKLSQLVNSNNLKLNFWKSPSSFNRPVDVLVPSVSLQAFKSFLRSQGLEYAVTIEDLQIYHEMDNIAADFPDLARRVKIGHSFENRPMYVLKFSTGKGVRRPAVWLNAGIHSREWISQATAIWTARKIVSDYQRDPAITSILEKMDIFLLPVANPDGYVYTQTQNRLWRKTRSRNPGSSCIGADPNRNWNASFAGKGASDNPCSEVYHGPHANSEVEVKSVVDFIQKHGNFKGFIDLHSYSQLLMYPYGYSVKKAPDAEELDKVARLAAKALASVSGTEYQVGPTCTTVYPASGSSIDWAYDNGIKFAFTFELRDTGTYGFLLPANQIIPTAEETWLGLKTIMEHVRDNLY

SEQ ID NO: 26158 - protein, 237 aa, Homo sapiens
MDKVCAVFGGSRGIGRAVAQLMARKGYRLAVIARNLEGAKAAAGDLGGDHLAFSCDVAKEHDVQNTFEELEKHLGRVNFLVNAAGINRDGLLVRTKTEDMVSQLHTNLLGSMLTCKAAMRTMIQQQGGSIVNVGSIVGLKGNSGQSVYSASKGGLVGFSRALAKEVARKKIRVNVVAPGFVHTDMTKDLKEEHLKKNIPLGRFGETIEVAHAVVFLLESPYITGHVLVVDGGLQLIL

SEQ ID NO: 26159 - protein, 179 aa, Homo sapiens
MDKVCAVFGGSRGIGRAVAQLMARKGYRLAVIARNLEGAKAAAGDLGGDHLAFSCDVAKEHDVQNTFEELEKHLGRVNFLVNAAGINRDGLLVRTKTEDMVSQLHTNLLGSMLTCKAAMRTMIQQQGGSIVNVGSIVGLKGNSGQSVYSASKGGLVGFSRALAKEVARKKIRVNVVAPG

SEQ ID NO: 26160 - protein, 560 aa, Homo sapiens
MELPAVGEHVFAVESIEKKRIRKGRVEYLVKWRGWSPKYNTWEPEENILDPRLLIAFQNRERQEQLMGYRKRGPKPKPLVVQVPTFARRSNVLTGLQDSSTDNRAKLDLGAQGKGQGHQYELNSKKHHQYQPHSKERAGKPPPPGKSGKYYYQLNSKKHHPYQPDPKMYDLQYQGGHKEAPSPTCPDLGAKSHPPDKWAQGAGAKGYLGAVKPLAGAAGAPGKGSEKGPPNGMMPAPKEAVTGNGIGGKMKIVKNKNKNGRIVIVMSKYMENGMQAVKIKSGEVAEGEARSPSHKKRAADERHPPADRTFKKAAGAEEKKVEAPPKRREEEVSGVSDPQPQDAGSRKLSPTKEAFGEQPLQLTTKPDLLAWDPARNTHPPSHHPHPHPHHHHHHHHHHHHAVGLNLSHVRKRCLSETHGEREPCKKRLTARSISTPTCLGGSPAAERPADLPPAAALPQPEVILLDSDLDEPIDLRCVKTRSEAGEPPSSLQVKPETPASAAVAVAAAAAPTTTAEKPPAEAQDEPAESLSEFKPFFGNIIITDVTANCLTVTFKEYVTV

SEQ ID NO: 26161 - protein, 290 aa, Homo sapiens
MELPAVGEHVFAVESIEKKRIRKGRVEYLVKWRGWSPKYNTWEPEENILDPRLLIAFQNRERQEQLMGYRKRGPKPKPLVVQVPTFARRSNVLTGLQDSSTDNRAKLDLGAQGKGQGHQYELNSKKHHHHAVGLNLSHVRKRCLSETHGEREPCKKRLTARSISTPTCLGGSPAAERPADLPPAAALPQPEVILLDSDLDEPIDLRCVKTRSEAGEPPSSLQVKPETPASAAVAVAAAAAPTTTAEKPPAEAQDEPAESLSEFKPFFGNIIITDVTANCLTVTFKEYVTV

SEQ ID NO: 26162 - protein, 412 aa, Homo sapiens
MELSAVGERVFAAESIIKRRIRKGRIEYLVKWKGWAIKYSTWEPEENILDSRLIAAFEQKERERELYGPKKRGPKPKTFLLKARAQAEALRISDVHFSVKPSASASSPKLHSSAAVHRLKKDIRRCHRMSRRPLPRPDPQGGSPGLRPPISPFSETVRIINRKVKPREPKRNRIILNLKVIDKGAGGGGAGQGAGALARPKVPSRNRVIGKSKKFSESVLRTQIRHMKFGAFALYKPPPAPLVAPSPGKAEASAPGPGLLLAAPAAPYDARSSGSSGCPSPTPQSSDPDDTPPKLLPETVSPSAPSWREPEVLDLSLPPESAATSKRAPPEVTAAAGPAPPTAPEPAGASSEPEAGDWRPEMSPCSNVVVTDVTSNLLTVTIKEFCNPEDFEKVAAGVAGAAGGGGSIGASK

SEQ ID NO: 26163 - protein, 294 aa, Homo sapiens
MAGQPAATGSPSADKDGMEPNVVARISQWADDHLRLVRNISTGMAIAGIMLLLRSIRLTSKFTSSSDIPVEFIRRNVKLRGRLRRITENGLEIEHIPITLPIIASLRKEPRGALLVKLAGVELAETGKAWLQKELKPSQLLWFQLLGKENSALFCYLLVSKGGYFSVNLNEEILRRGLGKTVLVKGLKYDSKIYWTVHRNLLKAELTALKKGEGIWKEDSEKESYLEKFKDSWREIWKKDSFLKTTGSDFSLKKESYYEKLKRTYEIWKDNMNNCSLILKFRELISRINFRRKG

SEQ ID NO: 26164 - protein, 251 aa, Homo sapiens
MAIAGIMLLLRSIRLTSKFTSSSDIPVEFIRRNVKLRGRLRRITENGLEIEHIPITLPIIASLRKEPRGALLVKLAGVELAETGKAWLQKELKPSQLLWFQLLGKENSALFCYLLVSKGGYFSVNLNEEILRRGLGKTVLVKGLKYDSKIYWTVHRNLLKAELTALKKGEGIWKEDSEKESYLEKFKDSWREIWKKDSFLKTTGSDFSLKKESYYEKLKRTYEIWKDNMNNCSLILKFRELISRINFRRKG

SEQ ID NO: 26165 - protein, 260 aa, Homo sapiens
MAKEWGYASHNGPDHWHELFPNAKGENQSPVELHTKDIRHDPSLQPWSVSYDGGSAKTILNNGKTCRVVFDDTYDRSMLRGGPLPGPYRLRQFHLHWGSSDDHGSEHTVDGVKYAAELHLVHWNPKYNTFKEALKQRDGIAVIGIFLKIGHENGEFQIFLDALDKIKTKGKEAPFTKFDPSCLFPACRDYWTYQGSFTTPPCEECIVWLLLKEPMTVSSDQMAKLRSLLSSAENEPPVPLVSNWRPPQPINNRVVRASFK

SEQ ID NO: 26166 - protein, 656 aa, Homo sapiens
MFEAIFPSTPQARLKRDPREKPGLSSFRSTFRQQSSLGLCIPRLMLPKEASPSQRHSSMSSSMARALVLLQSMASRDARCPEWKPHQKPRTLSKSVQTISRYYRKTSEPKDAASLTGFMSKMELRRVFPTHPDCPQFSTRATSMSHCGSPTEADLSGEIDNSSETWRGTQDLFLARRGSDTNVDGYLLPFSKSICEFDYLRKRRKSQTLSPVTSSSVASQSCLRKRMPWYLSVIHEKDHCLSELEIQVQKKDEEILLLQEEREALKMQLKCLLKGKGQETSMSPGRREQLSDASLKLGRLSLLKAFSRHEEELQHWWQMQEESAAPERGKEPDLGGGEEDEGLEGEPDGVEDTGAWGGVSQMGSVHEEGSEEEEEEEGDRDEDSEERELPEEEEIPRRRASSLAESFEEELLAQLEEYEQVILDFQFNLEATRTRYSLATGVIASLQQQVDFQETQLRKINTENETLQKELRERRQQLQAMTDKFSNLREDKKHQEMMGLIEKDNQLLRQQVSELERKLTKRDCVISELDTKVSQLQEQVELDQNHLQRWKQLQEDLQSKKEMIQQAEQHTRVALESSQSRLERLRNKIIQATFSISGTKSLANEISDNDILEALQRIISERSDYYNQLKQKGVKVPPLQQSEAFLTSKSKKGTSK

SEQ ID NO: 26167 - protein, 315 aa, Homo sapiens
MVSASGTSFFKGMLLGSISWVLITMFGQIHIRHRGQTQDHEHHHLRPPNRNDFLNTSKVILLELSKSIRVFCIIFGESEDESYWAVLKETWTKHCDKAELYDTKNDNLFNIESNDRWVQMRTAYKYVFEKYGDNYNWFFLALPTTFAVIENLKYLLFTRDASQPFYLGHTVIFGDLEYVTVEGGIVLSRELMKRLNRLLDNSETCADQSVIWKLSEDKQLAICLKYAGVHAENAEDYEGRDVFNTKPIAQLIEEALSNNPQQVVEGCCSDMAITFNGLTPQKMEVMMYGLYRLRAFGHYFNDTLVFLPPVGSEND

SEQ ID NO: 26168 - protein, 126 aa, Homo sapiens
MPFFGNTFSPKKTPPRKSASLSNLHSLDRSTREVELGLEYGSPTMNLAGQSLKFENGQWIAETGVSGGVDRREVQRLRRRNQQLEEENNLLRLKVDILLDMLSESTAESHLMEKELDELRISRKRK

SEQ ID NO: 26169 - protein, 2377 aa, Homo sapiens
MDEEEDGAGAEESGQPRSFMRLNDLSGAGGRPGPGSAEKDPGSADSEAEGLPYPALAPVVFFYLSQDSRPRSWCLRTVCNPWFERISMLVILLNCVTLGMFRPCEDIACDSQRCRILQAFDDFIFAFFAVEMVVKMVALGIFGKKCYLGDTWNRLDFFIVIAGMLEYSLDLQNVSFSAVRTVRVLRPLRAINRVPSMRILVTLLLDTLPMLGNVLLLCFFVFFIFGIVGVQLWAGLLRNRCFLPENFSLPLSVDLERYYQTENEDESPFICSQPRENGMRSCRSVPTLRGDGGGGPPCGLDYEAYNSSSNTTCVNWNQYYTNCSAGEHNPFKGAINFDNIGYAWIAIFQVITLEGWVDIMYFVMDAHSFYNFIYFILLIIVGSFFMINLCLVVIATQFSETKQRESQLMREQRVRFLSNASTLASFSEPGSCYEELLKYLVYILRKAARRLAQVSRAAGVRVGLLSSPAPLGGQETQPSSSCSRSHRRLSVHHLVHHHHHHHHHYHLGNGTLRAPRASPEIQDRDANGSRRLMLPPPSTPALSGAPPGGAESVHSFYHADCHLEPVRCQAPPPRSPSEASGRTVGSGKVYPTVHTSPPPETLKEKALVEVAASSGPPTLTSLNIPPGPYSSMHKLLETQSTGACQSSCKISSPCLKADSGACGPDSCPYCARAGAGEVELADREMPDSDSEAVYEFTQDAQHSDLRDPHSRRQRSLGPDAEPSSVLAFWRLICDTFRKIVDSKYFGRGIMIAILVNTLSMGIEYHEQPEELTNALEISNIVFTSLFALEMLLKLLVYGPFGYIKNPYNIFDGVIVVISVWEIVGQQGGGLSVLRTFRLMRVLKLVRFLPALQRQLVVLMKTMDNVATFCMLLMLFIFIFSILGMHLFGCKFASERDGDTLPDRKNFDSLLWAIVTVFQILTQEDWNKVLYNGMASTSSWAALYFIALMTFGNYVLFNLLVAILVEGFQAEEISKREDASGQLSCIQLPVDSQGGDANKSESEPDFFSPSLDGDGDRKKCLALVSLGEHPELRKSLLPPLIIHTAATPMSLPKSTSTGLGEALGPASRRTSSSGSAEPGAAHEMKSPPSARSSPHSPWSAASSWTSRRSSRNSLGRAPSLKRRSPSGERRSLLSGEGQESQDEEESSEEERASPAGSDHRHRGSLEREAKSSFDLPDTLQVPGLHRTASGRGSASEHQDCNGKSASGRLARALRPDDPPLDGDDADDEGNLSKGERVRAWIRARLPACCLERDSWSAYIFPPQSRFRLLCHRIITHKMFDHVVLVIIFLNCITIAMERPKIDPHSAERIFLTLSNYIFTAVFLAEMTVKVVALGWCFGEQAYLRSSWNVLDGLLVLISVIDILVSMVSDSGTKILGMLRVLRLLRTLRPLRVISRAQGLKLVVETLMSSLKPIGNIVVICCAFFIIFGILGVQLFKGKFFVCQGEDTRNITNKSDCAEASYRWVRHKYNFDNLGQALMSLFVLASKDGWVDIMYDGLDAVGVDQQPIMNHNPWMLLYFISFLLIVAFFVLNMFVGVVVENFHKCRQHQEEEEARRREEKRLRRLEKKRRNLMLDDVIASGSSASAASEAQCKPYYSDYSRFRLLVHHLCTSHYLDLFITGVIGLNVVTMAMEHYQQPQILDEALKICNYIFTVIFVLESVFKLVAFGFRRFFQDRWNQLDLAIVLLSIMGITLEEIEVNASLPINPTIIRIMRVLRIARVLKLLKMAVGMRALLDTVMQALPQVGNLGLLFMLLFFIFAALGVELFGDLECDETHPCEGLGRHATFRNFGMAFLTLFRVSTGDNWNGIMKDTLRDCDQESTCYNTVISPIYFVSFVLTAQFVLVNVVIAVLMKHLEESNKEAKEEAELEAELELEMKTLSPQPHSPLGSPFLWPGVEGPDSPDSPKPGALHPAAHARSASHFSLEHPTDRQLFDTISLLIQGSLEWELKLMDELAGPGGQPSAFPSAPSLGGSDPQIPLAEMEALSLTSEIVSEPSCSLALTDDSLPDDMHTLLLSALESNMQPHPTELPGPDLLTVRKSGVSRTHSLPNDSYMCRHGSTAEGPLGHRGWGLPKAQSGSVLSVHSQPADTSYILQLPKDAPHLLQPHSAPTWGTIPKLPPPGRSPLAQRPLRRQAAIRTDSLDVQGLGSREDLLAEVSGPSPPLARAYSFWGQSSTQAQQHSRSHSKISKHMTPPAPCPGPEPNWGKGPPETRSSLELDTELSWISGDLLPPGGQEEPPSPRDLKKCYSVEAQSCQRRPTSWLDEQRRHSIAVSCLDSGSQPHLGTDPSNLGGQPLGGPGSRPKKKLSPPSITIDPPESQGPRTPPSPGICLRRRAPSSDSKDPLASGPPDSMAASPSPKKDVLSLSGLSSDPADLDP

SEQ ID NO: 26170 - protein, 2250 aa, Homo sapiens
MDEEEDGAGAEESGQPRSFMRLNDLSGAGGRPGPGSAEKDPGSADSEAEGLPYPALAPVVFFYLSQDSRPRSWCLRTVCNPWFERISMLVILLNCVTLGMFRPCEDIACDSQRCRILQAFDDFIFAFFAVEMVVKMVALGIFGKKCYLGDTWNRLDFFIVIAGMLEYSLDLQNVSFSAVRTVRVLRPLRAINRVPSMRILVTLLLDTLPMLGNVLLLCFFVFFIFGIVGVQLWAGLLRNRCFLPENFSLPLSVDLERYYQTENEDESPFICSQPRENGMRSCRSVPTLRGDGGGGPPCGLDYEAYNSSSNTTCVNWNQYYTNCSAGEHNPFKGAINFDNIGYAWIAIFQVITLEGWVDIMYFVMDAHSFYNFIYFILLIIVGSFFMINLCLVVIATQFSETKQRESQLMREQRVRFLSNASTLASFSEPGSCYEELLKYLVYILRKAARRLAQVSRAAGVRVGLLSSPAPLGGQETQPSSSCSRSHRRLSVHHLVHHHHHHHHHYHLGNGTLRAPRASPEIQDRDANGSRRLMLPPPSTPALSGAPPGGAESVHSFYHADCHLEPVRCQAPPPRSPSEASGRTVGSGKVYPTVHTSPPPETLKEKALVEVAASSGPPTLTSLNIPPGPYSSMHKLLETQSTGACQSSCKISSPCLKADSGACGPDSCPYCARAGAGEVELADREMPDSDSEAVYEFTQDAQHSDLRDPHSRRQRSLGPDAEPSSVLAFWRLICDTFRKIVDSKYFGRGIMIAILVNTLSMGIEYHEQPEELTNALEISNIVFTSLFALEMLLKLLVYGPFGYIKNPYNIFDGVIVVISVWEIVGQQGGGLSVLRTFRLMRVLKLVRFLPALQRQLVVLMKTMDNVATFCMLLMLFIFIFSILGMHLFGCKFASERDGDTLPDRKNFDSLLWAIVTVFQILTQEDWNKVLYNGMASTSSWAALYFIALMTFGNYVLFNLLVAILVEGFQAEGDANKSESEPDFFSPSLDGDGDRKKCLALVSLGEHPELRKSLLPPLIIHTAATPMSLPKSTSTGLGEALGPASRRTSSSGSAEPGAAHEMKSPPSARSSPHSPWSAASSWTSRRSSRNSLGRAPSLKRRSPSGERRSLLSGEGQESQDEEESSEEERASPAGSDHRHRGSLEREAKSSFDLPDTLQVPGLHRTASGRGSASEHQDCNGKSASGRLARALRPDDPPLDGDDADDEGNLSKGERVRAWIRARLPACCLERDSWSAYIFPPQSRFRLLCHRIITHKMFDHVVLVIIFLNCITIAMERPKIDPHSAERIFLTLSNYIFTAVFLAEMTVKVVALGWCFGEQAYLRSSWNVLDGLLVLISVIDILVSMVSDSGTKILGMLRVLRLLRTLRPLRVISRAQGLKLVVETLMSSLKPIGNIVVICCAFFIIFGILGVQLFKGKFFVCQGEDTRNITNKSDCAEASYRWVRHKYNFDNLGQALMSLFVLASKDGWVDIMYDGLDAVGVDQQPIMNHNPWMLLYFISFLLIVAFFVLNMFVGVVVENFHKCRQHQEEEEARRREEKRLRRLEKKRRSKEKQMAEAQCKPYYSDYSRFRLLVHHLCTSHYLDLFITGVIGLNVVTMAMEHYQQPQILDEALKICNYIFTVIFVLESVFKLVAFGFRRFFQDRWNQLDLAIVLLSIMGITLEEIEVNASLPINPTIIRIMRVLRIARVLKLLKMAVGMRALLDTVMQALPQVGNLGLLFMLLFFIFAALGVELFGDLECDETHPCEGLGRHATFRNFGMAFLTLFRVSTGDNWNGIMKDTLRDCDQESTCYNTVISPIYFVSFVLTAQFVLVNVVIAVLMKHLEESNKEAKEEAELEAELELEMKTLSPQPHSPLGSPFLWPGVEGPDSPDSPKPGALHPAAHARSASHFSLEHPTMQPHPTELPGPDLLTVRKSGVSRTHSLPNDSYMCRHGSTAEGPLGHRGWGLPKAQSGSVLSVHSQPADTSYILQLPKDAPHLLQPHSAPTWGTIPKLPPPGRSPLAQRPLRRQAAIRTDSLDVQGLGSREDLLAEVSGPSPPLARAYSFWGQSSTQAQQHSRSHSKISKHMTPPAPCPGPEPNWGKGPPETRSSLELDTELSWISGDLLPPGGQEEPPSPRDLKKCYSVEAQSCQRRPTSWLDEQRRHSIAVSCLDSGSQPHLGTDPSNLGGQPLGGPGSRPKKKLSPPSITIDPPESQGPRTPPSPGICLRRRAPSSDSKDPLASGPPDSMAASPSPKKDVLSLSGLSSDPADLDP

SEQ ID NO: 26171 - protein, 2243 aa, Homo sapiens
MDEEEDGAGAEESGQPRSFMRLNDLSGAGGRPGPGSAEKDPGSADSEAEGLPYPALAPVVFFYLSQDSRPRSWCLRTVCNPWFERISMLVILLNCVTLGMFRPCEDIACDSQRCRILQAFDDFIFAFFAVEMVVKMVALGIFGKKCYLGDTWNRLDFFIVIAGMLEYSLDLQNVSFSAVRTVRVLRPLRAINRVPSMRILVTLLLDTLPMLGNVLLLCFFVFFIFGIVGVQLWAGLLRNRCFLPENFSLPLSVDLERYYQTENEDESPFICSQPRENGMRSCRSVPTLRGDGGGGPPCGLDYEAYNSSSNTTCVNWNQYYTNCSAGEHNPFKGAINFDNIGYAWIAIFQVITLEGWVDIMYFVMDAHSFYNFIYFILLIIVGSFFMINLCLVVIATQFSETKQRESQLMREQRVRFLSNASTLASFSEPGSCYEELLKYLVYILRKAARRLAQVSRAAGVRVGLLSSPAPLGGQETQPSSSCSRSHRRLSVHHLVHHHHHHHHHYHLGNGTLRAPRASPEIQDRDANGSRRLMLPPPSTPALSGAPPGGAESVHSFYHADCHLEPVRCQAPPPRSPSEASGRTVGSGKVYPTVHTSPPPETLKEKALVEVAASSGPPTLTSLNIPPGPYSSMHKLLETQSTGACQSSCKISSPCLKADSGACGPDSCPYCARAGAGEVELADREMPDSDSEAVYEFTQDAQHSDLRDPHSRRQRSLGPDAEPSSVLAFWRLICDTFRKIVDSKYFGRGIMIAILVNTLSMGIEYHEQPEELTNALEISNIVFTSLFALEMLLKLLVYGPFGYIKNPYNIFDGVIVVISVWEIVGQQGGGLSVLRTFRLMRVLKLVRFLPALQRQLVVLMKTMDNVATFCMLLMLFIFIFSILGMHLFGCKFASERDGDTLPDRKNFDSLLWAIVTVFQILTQEDWNKVLYNGMASTSSWAALYFIALMTFGNYVLFNLLVAILVEGFQAEGDANKSESEPDFFSPSLDGDGDRKKCLALVSLGEHPELRKSLLPPLIIHTAATPMSLPKSTSTGLGEALGPASRRTSSSGSAEPGAAHEMKSPPSARSSPHSPWSAASSWTSRRSSRNSLGRAPSLKRRSPSGERRSLLSGEGQESQDEEESSEEERASPAGSDHRHRGSLEREAKSSFDLPDTLQVPGLHRTASGRGSASEHQDCNGKSASGRLARALRPDDPPLDGDDADDEGNLSKGERVRAWIRARLPACCLERDSWSAYIFPPQSRFRLLCHRIITHKMFDHVVLVIIFLNCITIAMERPKIDPHSAERIFLTLSNYIFTAVFLAEMTVKVVALGWCFGEQAYLRSSWNVLDGLLVLISVIDILVSMVSDSGTKILGMLRVLRLLRTLRPLRVISRAQGLKLVVETLMSSLKPIGNIVVICCAFFIIFGILGVQLFKGKFFVCQGEDTRNITNKSDCAEASYRWVRHKYNFDNLGQALMSLFVLASKDGWVDIMYDGLDAVGVDQQPIMNHNPWMLLYFISFLLIVAFFVLNMFVGVVVENFHKCRQHQEEEEARRREEKRLRRLEKKRRKAQCKPYYSDYSRFRLLVHHLCTSHYLDLFITGVIGLNVVTMAMEHYQQPQILDEALKICNYIFTVIFVLESVFKLVAFGFRRFFQDRWNQLDLAIVLLSIMGITLEEIEVNASLPINPTIIRIMRVLRIARVLKLLKMAVGMRALLDTVMQALPQVGNLGLLFMLLFFIFAALGVELFGDLECDETHPCEGLGRHATFRNFGMAFLTLFRVSTGDNWNGIMKDTLRDCDQESTCYNTVISPIYFVSFVLTAQFVLVNVVIAVLMKHLEESNKEAKEEAELEAELELEMKTLSPQPHSPLGSPFLWPGVEGPDSPDSPKPGALHPAAHARSASHFSLEHPTMQPHPTELPGPDLLTVRKSGVSRTHSLPNDSYMCRHGSTAEGPLGHRGWGLPKAQSGSVLSVHSQPADTSYILQLPKDAPHLLQPHSAPTWGTIPKLPPPGRSPLAQRPLRRQAAIRTDSLDVQGLGSREDLLAEVSGPSPPLARAYSFWGQSSTQAQQHSRSHSKISKHMTPPAPCPGPEPNWGKGPPETRSSLELDTELSWISGDLLPPGGQEEPPSPRDLKKCYSVEAQSCQRRPTSWLDEQRRHSIAVSCLDSGSQPHLGTDPSNLGGQPLGGPGSRPKKKLSPPSITIDPPESQGPRTPPSPGICLRRRAPSSDSKDPLASGPPDSMAASPSPKKDVLSLSGLSSDPADLDP

SEQ ID NO: 26172 - protein, 2354 aa, Homo sapiens
MDEEEDGAGAEESGQPRSFMRLNDLSGAGGRPGPGSAEKDPGSADSEAEGLPYPALAPVVFFYLSQDSRPRSWCLRTVCNPWFERISMLVILLNCVTLGMFRPCEDIACDSQRCRILQAFDDFIFAFFAVEMVVKMVALGIFGKKCYLGDTWNRLDFFIVIAGMLEYSLDLQNVSFSAVRTVRVLRPLRAINRVPSMRILVTLLLDTLPMLGNVLLLCFFVFFIFGIVGVQLWAGLLRNRCFLPENFSLPLSVDLERYYQTENEDESPFICSQPRENGMRSCRSVPTLRGDGGGGPPCGLDYEAYNSSSNTTCVNWNQYYTNCSAGEHNPFKGAINFDNIGYAWIAIFQVITLEGWVDIMYFVMDAHSFYNFIYFILLIIVGSFFMINLCLVVIATQFSETKQRESQLMREQRVRFLSNASTLASFSEPGSCYEELLKYLVYILRKAARRLAQVSRAAGVRVGLLSSPAPLGGQETQPSSSCSRSHRRLSVHHLVHHHHHHHHHYHLGNGTLRAPRASPEIQDRDANGSRRLMLPPPSTPALSGAPPGGAESVHSFYHADCHLEPVRCQAPPPRSPSEASGRTVGSGKVYPTVHTSPPPETLKEKALVEVAASSGPPTLTSLNIPPGPYSSMHKLLETQSTGACQSSCKISSPCLKADSGACGPDSCPYCARAGAGEVELADREMPDSDSEAVYEFTQDAQHSDLRDPHSRRQRSLGPDAEPSSVLAFWRLICDTFRKIVDSKYFGRGIMIAILVNTLSMGIEYHEQPEELTNALEISNIVFTSLFALEMLLKLLVYGPFGYIKNPYNIFDGVIVVISVWEIVGQQGGGLSVLRTFRLMRVLKLVRFLPALQRQLVVLMKTMDNVATFCMLLMLFIFIFSILGMHLFGCKFASERDGDTLPDRKNFDSLLWAIVTVFQILTQEDWNKVLYNGMASTSSWAALYFIALMTFGNYVLFNLLVAILVEGFQAEGDANKSESEPDFFSPSLDGDGDRKKCLALVSLGEHPELRKSLLPPLIIHTAATPMSLPKSTSTGLGEALGPASRRTSSSGSAEPGAAHEMKSPPSARSSPHSPWSAASSWTSRRSSRNSLGRAPSLKRRSPSGERRSLLSGEGQESQDEEESSEEERASPAGSDHRHRGSLEREAKSSFDLPDTLQVPGLHRTASGRGSASEHQDCNGKSASGRLARALRPDDPPLDGDDADDEGNLSKGERVRAWIRARLPACCLERDSWSAYIFPPQSRFRLLCHRIITHKMFDHVVLVIIFLNCITIAMERPKIDPHSAERIFLTLSNYIFTAVFLAEMTVKVVALGWCFGEQAYLRSSWNVLDGLLVLISVIDILVSMVSDSGTKILGMLRVLRLLRTLRPLRVISRAQGLKLVVETLMSSLKPIGNIVVICCAFFIIFGILGVQLFKGKFFVCQGEDTRNITNKSDCAEASYRWVRHKYNFDNLGQALMSLFVLASKDGWVDIMYDGLDAVGVDQQPIMNHNPWMLLYFISFLLIVAFFVLNMFVGVVVENFHKCRQHQEEEEARRREEKRLRRLEKKRRNLMLDDVIASGSSASAASEAQCKPYYSDYSRFRLLVHHLCTSHYLDLFITGVIGLNVVTMAMEHYQQPQILDEALKICNYIFTVIFVLESVFKLVAFGFRRFFQDRWNQLDLAIVLLSIMGITLEEIEVNASLPINPTIIRIMRVLRIARVLKLLKMAVGMRALLDTVMQALPQVGNLGLLFMLLFFIFAALGVELFGDLECDETHPCEGLGRHATFRNFGMAFLTLFRVSTGDNWNGIMKDTLRDCDQESTCYNTVISPIYFVSFVLTAQFVLVNVVIAVLMKHLEESNKEAKEEAELEAELELEMKTLSPQPHSPLGSPFLWPGVEGPDSPDSPKPGALHPAAHARSASHFSLEHPTDRQLFDTISLLIQGSLEWELKLMDELAGPGGQPSAFPSAPSLGGSDPQIPLAEMEALSLTSEIVSEPSCSLALTDDSLPDDMHTLLLSALESNMQPHPTELPGPDLLTVRKSGVSRTHSLPNDSYMCRHGSTAEGPLGHRGWGLPKAQSGSVLSVHSQPADTSYILQLPKDAPHLLQPHSAPTWGTIPKLPPPGRSPLAQRPLRRQAAIRTDSLDVQGLGSREDLLAEVSGPSPPLARAYSFWGQSSTQAQQHSRSHSKISKHMTPPAPCPGPEPNWGKGPPETRSSLELDTELSWISGDLLPPGGQEEPPSPRDLKKCYSVEAQSCQRRPTSWLDEQRRHSIAVSCLDSGSQPHLGTDPSNLGGQPLGGPGSRPKKKLSPPSITIDPPESQGPRTPPSPGICLRRRAPSSDSKDPLASGPPDSMAASPSPKKDVLSLSGLSSDPADLDP

SEQ ID NO: 26173 - protein, 2171 aa, Homo sapiens
MDEEEDGAGAEESGQPRSFMRLNDLSGAGGRPGPGSAEKDPGSADSEAEGLPYPALAPVVFFYLSQDSRPRSWCLRTVCNPWFERISMLVILLNCVTLGMFRPCEDIACDSQRCRILQAFDDFIFAFFAVEMVVKMVALGIFGKKCYLGDTWNRLDFFIVIAGMLEYSLDLQNVSFSAVRTVRVLRPLRAINRVPSMRILVTLLLDTLPMLGNVLLLCFFVFFIFGIVGVQLWAGLLRNRCFLPENFSLPLSVDLERYYQTENEDESPFICSQPRENGMRSCRSVPTLRGDGGGGPPCGLDYEAYNSSSNTTCVNWNQYYTNCSAGEHNPFKGAINFDNIGYAWIAIFQVITLEGWVDIMYFVMDAHSFYNFIYFILLIIVGSFFMINLCLVVIATQFSETKQRESQLMREQRVRFLSNASTLASFSEPGSCYEELLKYLVYILRKAARRLAQVSRAAGVRVGLLSSPAPLGGQETQPSSSCSRSHRRLSVHHLVHHHHHHHHHYHLGNGTLRAPRASPEIQDRDANGSRRLMLPPPSTPALSGAPPGGAESVHSFYHADCHLEPVRCQAPPPRSPSEASGRTVGSGKVYPTVHTSPPPETLKEKALVEVAASSGPPTLTSLNIPPGPYSSMHKLLETQSTGACQSSCKISSPCLKADSGACGPDSCPYCARAGAGEVELADREMPDSDSEAVYEFTQDAQHSDLRDPHSRRQRSLGPDAEPSSVLAFWRLICDTFRKIVDSKYFGRGIMIAILVNTLSMGIEYHEQPEELTNALEISNIVFTSLFALEMLLKLLVYGPFGYIKNPYNIFDGVIVVISVWEIVGQQGGGLSVLRTFRLMRVLKLVRFLPALQRQLVVLMKTMDNVATFCMLLMLFIFIFSILGMHLFGCKFASERDGDTLPDRKNFDSLLWAIVTVFQILTQEDWNKVLYNGMASTSSWAALYFIALMTFGNYVLFNLLVAILVEGFQAEGDANKSESEPDFFSPSLDGDGDRKKCLALVSLGEHPELRKSLLPPLIIHTAATPMSLPKSTSTGLGEALGPASRRTSSSGSAEPGAAHEMKSPPSARSSPHSPWSAASSWTSRRSSRNSLGRAPSLKRRSPSGERRSLLSGEGQESQDEEESSEEERASPAGSDHRHRGSLEREAKSSFDLPDTLQVPGLHRTASGRGSASEHQDCNGKSASGRLARALRPDDPPLDGDDADDEGNLSKGERVRAWIRARLPACCLERDSWSAYIFPPQSRFRLLCHRIITHKMFDHVVLVIIFLNCITIAMERPKIDPHSAERIFLTLSNYIFTAVFLAEMTVKVVALGWCFGEQAYLRSSWNVLDGLLVLISVIDILVSMVSDSGTKILGMLRVLRLLRTLRPLRVISRAQGLKLVVETLMSSLKPIGNIVVICCAFFIIFGILGVQLFKGKFFVCQGEDTRNITNKSDCAEASYRWVRHKYNFDNLGQALMSLFVLASKDGWVDIMYDGLDAVGVDQQPIMNHNPWMLLYFISFLLIVAFFVLNMFVGVVVENFHKCRQHQEEEEARRREEKRLRRLEKKRRSKEKQMAEAQCKPYYSDYSRFRLLVHHLCTSHYLDLFITGVIGLNVVTMAMEHYQQPQILDEALKICNYIFTVIFVLESVFKLVAFGFRRFFQDRWNQLDLAIVLLSIMGITLEEIEVNASLPINPTIIRIMRVLRIARVLKLLKMAVGMRALLDTVMQALPQVGNLGLLFMLLFFIFAALGVELFGDLECDETHPCEGLGRHATFRNFGMAFLTLFRVSTGDNWNGIMKDTLRDCDQESTCYNTVISPIYFVSFVLTAQFVLVNVVIAVLMKHLEESNKEAKEEAELEAELELEMKTLSPQPHSPLGSPFLWPGVEGPDSPDSPKPGALHPAAHARSASHFSLEHPTMQPHPTELPGPDLLTVRKSGVSRTHSLPNDSYMCRHGSTAEGPLGHRGWGLPKAQSGSVLSVHSQPADTSYILQLPKDAPHLLQPHSAPTWGTIPKLPPPGRSPLAQRPLRRQAAIRTDSLDVQGLGSREDLLAEEEPPSPRDLKKCYSVEAQSCQRRPTSWLDEQRRHSIAVSCLDSGSQPHLGTDPSNLGGQPLGGPGSRPKKKLSPPSITIDPPESQGPRTPPSPGICLRRRAPSSDSKDPLASGPPDSMAASPSPKKDVLSLSGLSSDPADLDP

SEQ ID NO: 26174 - protein, 2273 aa, Homo sapiens
MDEEEDGAGAEESGQPRSFMRLNDLSGAGGRPGPGSAEKDPGSADSEAEGLPYPALAPVVFFYLSQDSRPRSWCLRTVCNPWFERISMLVILLNCVTLGMFRPCEDIACDSQRCRILQAFDDFIFAFFAVEMVVKMVALGIFGKKCYLGDTWNRLDFFIVIAGMLEYSLDLQNVSFSAVRTVRVLRPLRAINRVPSMRILVTLLLDTLPMLGNVLLLCFFVFFIFGIVGVQLWAGLLRNRCFLPENFSLPLSVDLERYYQTENEDESPFICSQPRENGMRSCRSVPTLRGDGGGGPPCGLDYEAYNSSSNTTCVNWNQYYTNCSAGEHNPFKGAINFDNIGYAWIAIFQVITLEGWVDIMYFVMDAHSFYNFIYFILLIIVGSFFMINLCLVVIATQFSETKQRESQLMREQRVRFLSNASTLASFSEPGSCYEELLKYLVYILRKAARRLAQVSRAAGVRVGLLSSPAPLGGQETQPSSSCSRSHRRLSVHHLVHHHHHHHHHYHLGNGTLRAPRASPEIQDRDANGSRRLMLPPPSTPALSGAPPGGAESVHSFYHADCHLEPVRCQAPPPRSPSEASGRTVGSGKVYPTVHTSPPPETLKEKALVEVAASSGPPTLTSLNIPPGPYSSMHKLLETQSTGACQSSCKISSPCLKADSGACGPDSCPYCARAGAGEVELADREMPDSDSEAVYEFTQDAQHSDLRDPHSRRQRSLGPDAEPSSVLAFWRLICDTFRKIVDSKYFGRGIMIAILVNTLSMGIEYHEQPEELTNALEISNIVFTSLFALEMLLKLLVYGPFGYIKNPYNIFDGVIVVISVWEIVGQQGGGLSVLRTFRLMRVLKLVRFLPALQRQLVVLMKTMDNVATFCMLLMLFIFIFSILGMHLFGCKFASERDGDTLPDRKNFDSLLWAIVTVFQILTQEDWNKVLYNGMASTSSWAALYFIALMTFGNYVLFNLLVAILVEGFQAEEISKREDASGQLSCIQLPVDSQGGDANKSESEPDFFSPSLDGDGDRKKCLALVSLGEHPELRKSLLPPLIIHTAATPMSLPKSTSTGLGEALGPASRRTSSSGSAEPGAAHEMKSPPSARSSPHSPWSAASSWTSRRSSRNSLGRAPSLKRRSPSGERRSLLSGEGQESQDEEESSEEERASPAGSDHRHRGSLEREAKSSFDLPDTLQVPGLHRTASGRGSASEHQDCNGKSASGRLARALRPDDPPLDGDDADDEGNLSKGERVRAWIRARLPACCLERDSWSAYIFPPQSRFRLLCHRIITHKMFDHVVLVIIFLNCITIAMERPKIDPHSAERIFLTLSNYIFTAVFLAEMTVKVVALGWCFGEQAYLRSSWNVLDGLLVLISVIDILVSMVSDSGTKILGMLRVLRLLRTLRPLRVISRAQGLKLVVETLMSSLKPIGNIVVICCAFFIIFGILGVQLFKGKFFVCQGEDTRNITNKSDCAEASYRWVRHKYNFDNLGQALMSLFVLASKDGWVDIMYDGLDAVGVDQQPIMNHNPWMLLYFISFLLIVAFFVLNMFVGVVVENFHKCRQHQEEEEARRREEKRLRRLEKKRRSKEKQMAEAQCKPYYSDYSRFRLLVHHLCTSHYLDLFITGVIGLNVVTMAMEHYQQPQILDEALKICNYIFTVIFVLESVFKLVAFGFRRFFQDRWNQLDLAIVLLSIMGITLEEIEVNASLPINPTIIRIMRVLRIARVLKLLKMAVGMRALLDTVMQALPQVGNLGLLFMLLFFIFAALGVELFGDLECDETHPCEGLGRHATFRNFGMAFLTLFRVSTGDNWNGIMKDTLRDCDQESTCYNTVISPIYFVSFVLTAQFVLVNVVIAVLMKHLEESNKEAKEEAELEAELELEMKTLSPQPHSPLGSPFLWPGVEGPDSPDSPKPGALHPAAHARSASHFSLEHPTMQPHPTELPGPDLLTVRKSGVSRTHSLPNDSYMCRHGSTAEGPLGHRGWGLPKAQSGSVLSVHSQPADTSYILQLPKDAPHLLQPHSAPTWGTIPKLPPPGRSPLAQRPLRRQAAIRTDSLDVQGLGSREDLLAEVSGPSPPLARAYSFWGQSSTQAQQHSRSHSKISKHMTPPAPCPGPEPNWGKGPPETRSSLELDTELSWISGDLLPPGGQEEPPSPRDLKKCYSVEAQSCQRRPTSWLDEQRRHSIAVSCLDSGSQPHLGTDPSNLGGQPLGGPGSRPKKKLSPPSITIDPPESQGPRTPPSPGICLRRRAPSSDSKDPLASGPPDSMAASPSPKKDVLSLSGLSSDPADLDP

SEQ ID NO: 26175 - protein, 2321 aa, Homo sapiens
MDEEEDGAGAEESGQPRSFMRLNDLSGAGGRPGPGSAEKDPGSADSEAEGLPYPALAPVVFFYLSQDSRPRSWCLRTVCNPWFERISMLVILLNCVTLGMFRPCEDIACDSQRCRILQAFDDFIFAFFAVEMVVKMVALGIFGKKCYLGDTWNRLDFFIVIAGMLEYSLDLQNVSFSAVRTVRVLRPLRAINRVPSMRILVTLLLDTLPMLGNVLLLCFFVFFIFGIVGVQLWAGLLRNRCFLPENFSLPLSVDLERYYQTENEDESPFICSQPRENGMRSCRSVPTLRGDGGGGPPCGLDYEAYNSSSNTTCVNWNQYYTNCSAGEHNPFKGAINFDNIGYAWIAIFQVITLEGWVDIMYFVMDAHSFYNFIYFILLIIVGSFFMINLCLVVIATQFSETKQRESQLMREQRVRFLSNASTLASFSEPGSCYEELLKYLVYILRKAARRLAQVSRAAGVRVGLLSSPAPLGGQETQPSSSCSRSHRRLSVHHLVHHHHHHHHHYHLGNGTLRAPRASPEIQDRDANGSRRLMLPPPSTPALSGAPPGGAESVHSFYHADCHLEPVRCQAPPPRSPSEASGRTVGSGKVYPTVHTSPPPETLKEKALVEVAASSGPPTLTSLNIPPGPYSSMHKLLETQSTGACQSSCKISSPCLKADSGACGPDSCPYCARAGAGEVELADREMPDSDSEAVYEFTQDAQHSDLRDPHSRRQRSLGPDAEPSSVLAFWRLICDTFRKIVDSKYFGRGIMIAILVNTLSMGIEYHEQPEELTNALEISNIVFTSLFALEMLLKLLVYGPFGYIKNPYNIFDGVIVVISVWEIVGQQGGGLSVLRTFRLMRVLKLVRFLPALQRQLVVLMKTMDNVATFCMLLMLFIFIFSILGMHLFGCKFASERDGDTLPDRKNFDSLLWAIVTVFQILTQEDWNKVLYNGMASTSSWAALYFIALMTFGNYVLFNLLVAILVEGFQAEEISKREDASGQLSCIQLPVDSQGGDANKSESEPDFFSPSLDGDGDRKKCLALVSLGEHPELRKSLLPPLIIHTAATPMSLPKSTSTGLGEALGPASRRTSSSGSAEPGAAHEMKSPPSARSSPHSPWSAASSWTSRRSSRNSLGRAPSLKRRSPSGERRSLLSGEGQESQDEEESSEEERASPAGSDHRHRGSLEREAKSSFDLPDTLQVPGLHRTASGRGSASEHQDCNGKSASGRLARALRPDDPPLDGDDADDEGNLSKGERVRAWIRARLPACCLERDSWSAYIFPPQSRFRLLCHRIITHKMFDHVVLVIIFLNCITIAMERPKIDPHSAERIFLTLSNYIFTAVFLAEMTVKVVALGWCFGEQAYLRSSWNVLDGLLVLISVIDILVSMVSDSGTKILGMLRVLRLLRTLRPLRVISRAQGLKLVVETLMSSLKPIGNIVVICCAFFIIFGILGVQLFKGKFFVCQGEDTRNITNKSDCAEASYRWVRHKYNFDNLGQALMSLFVLASKDGWVDIMYDGLDAVGVDQQPIMNHNPWMLLYFISFLLIVAFFVLNMFVGVVVENFHKCRQHQEEEEARRREEKRLRRLEKKRRSKEKQMAEAQCKPYYSDYSRFRLLVHHLCTSHYLDLFITGVIGLNVVTMAMEHYQQPQILDEALKICNYIFTVIFVLESVFKLVAFGFRRFFQDRWNQLDLAIVLLSIMGITLEEIEVNASLPINPTIIRIMRVLRIARVLKLLKMAVGMRALLDTVMQALPQVGNLGLLFMLLFFIFAALGVELFGDLECDETHPCEGLGRHATFRNFGMAFLTLFRVSTGDNWNGIMKDTLRDCDQESTCYNTVISPIYFVSFVLTAQFVLVNVVIAVLMKHLEESNKEAKEEAELEAELELEMKTLSPQPHSPLGSPFLWPGVEGPDSPDSPKPGALHPAAHARSASHFSLEHPTDRQLFDTISLLIQGSLEWELKLMDELAGPGGQPSAFPSAPSLGGSDPQMQPHPTELPGPDLLTVRKSGVSRTHSLPNDSYMCRHGSTAEGPLGHRGWGLPKAQSGSVLSVHSQPADTSYILQLPKDAPHLLQPHSAPTWGTIPKLPPPGRSPLAQRPLRRQAAIRTDSLDVQGLGSREDLLAEVSGPSPPLARAYSFWGQSSTQAQQHSRSHSKISKHMTPPAPCPGPEPNWGKGPPETRSSLELDTELSWISGDLLPPGGQEEPPSPRDLKKCYSVEAQSCQRRPTSWLDEQRRHSIAVSCLDSGSQPHLGTDPSNLGGQPLGGPGSRPKKKLSPPSITIDPPESQGPRTPPSPGICLRRRAPSSDSKDPLASGPPDSMAASPSPKKDVLSLSGLSSDPADLDP

SEQ ID NO: 26176 - protein, 2298 aa, Homo sapiens
MDEEEDGAGAEESGQPRSFMRLNDLSGAGGRPGPGSAEKDPGSADSEAEGLPYPALAPVVFFYLSQDSRPRSWCLRTVCNPWFERISMLVILLNCVTLGMFRPCEDIACDSQRCRILQAFDDFIFAFFAVEMVVKMVALGIFGKKCYLGDTWNRLDFFIVIAGMLEYSLDLQNVSFSAVRTVRVLRPLRAINRVPSMRILVTLLLDTLPMLGNVLLLCFFVFFIFGIVGVQLWAGLLRNRCFLPENFSLPLSVDLERYYQTENEDESPFICSQPRENGMRSCRSVPTLRGDGGGGPPCGLDYEAYNSSSNTTCVNWNQYYTNCSAGEHNPFKGAINFDNIGYAWIAIFQVITLEGWVDIMYFVMDAHSFYNFIYFILLIIVGSFFMINLCLVVIATQFSETKQRESQLMREQRVRFLSNASTLASFSEPGSCYEELLKYLVYILRKAARRLAQVSRAAGVRVGLLSSPAPLGGQETQPSSSCSRSHRRLSVHHLVHHHHHHHHHYHLGNGTLRAPRASPEIQDRDANGSRRLMLPPPSTPALSGAPPGGAESVHSFYHADCHLEPVRCQAPPPRSPSEASGRTVGSGKVYPTVHTSPPPETLKEKALVEVAASSGPPTLTSLNIPPGPYSSMHKLLETQSTGACQSSCKISSPCLKADSGACGPDSCPYCARAGAGEVELADREMPDSDSEAVYEFTQDAQHSDLRDPHSRRQRSLGPDAEPSSVLAFWRLICDTFRKIVDSKYFGRGIMIAILVNTLSMGIEYHEQPEELTNALEISNIVFTSLFALEMLLKLLVYGPFGYIKNPYNIFDGVIVVISVWEIVGQQGGGLSVLRTFRLMRVLKLVRFLPALQRQLVVLMKTMDNVATFCMLLMLFIFIFSILGMHLFGCKFASERDGDTLPDRKNFDSLLWAIVTVFQILTQEDWNKVLYNGMASTSSWAALYFIALMTFGNYVLFNLLVAILVEGFQAEGDANKSESEPDFFSPSLDGDGDRKKCLALVSLGEHPELRKSLLPPLIIHTAATPMSLPKSTSTGLGEALGPASRRTSSSGSAEPGAAHEMKSPPSARSSPHSPWSAASSWTSRRSSRNSLGRAPSLKRRSPSGERRSLLSGEGQESQDEEESSEEERASPAGSDHRHRGSLEREAKSSFDLPDTLQVPGLHRTASGRGSASEHQDCNGKSASGRLARALRPDDPPLDGDDADDEGNLSKGERVRAWIRARLPACCLERDSWSAYIFPPQSRFRLLCHRIITHKMFDHVVLVIIFLNCITIAMERPKIDPHSAERIFLTLSNYIFTAVFLAEMTVKVVALGWCFGEQAYLRSSWNVLDGLLVLISVIDILVSMVSDSGTKILGMLRVLRLLRTLRPLRVISRAQGLKLVVETLMSSLKPIGNIVVICCAFFIIFGILGVQLFKGKFFVCQGEDTRNITNKSDCAEASYRWVRHKYNFDNLGQALMSLFVLASKDGWVDIMYDGLDAVGVDQQPIMNHNPWMLLYFISFLLIVAFFVLNMFVGVVVENFHKCRQHQEEEEARRREEKRLRRLEKKRRSKEKQMAEAQCKPYYSDYSRFRLLVHHLCTSHYLDLFITGVIGLNVVTMAMEHYQQPQILDEALKICNYIFTVIFVLESVFKLVAFGFRRFFQDRWNQLDLAIVLLSIMGITLEEIEVNASLPINPTIIRIMRVLRIARVLKLLKMAVGMRALLDTVMQALPQVGNLGLLFMLLFFIFAALGVELFGDLECDETHPCEGLGRHATFRNFGMAFLTLFRVSTGDNWNGIMKDTLRDCDQESTCYNTVISPIYFVSFVLTAQFVLVNVVIAVLMKHLEESNKEAKEEAELEAELELEMKTLSPQPHSPLGSPFLWPGVEGPDSPDSPKPGALHPAAHARSASHFSLEHPTDRQLFDTISLLIQGSLEWELKLMDELAGPGGQPSAFPSAPSLGGSDPQMQPHPTELPGPDLLTVRKSGVSRTHSLPNDSYMCRHGSTAEGPLGHRGWGLPKAQSGSVLSVHSQPADTSYILQLPKDAPHLLQPHSAPTWGTIPKLPPPGRSPLAQRPLRRQAAIRTDSLDVQGLGSREDLLAEVSGPSPPLARAYSFWGQSSTQAQQHSRSHSKISKHMTPPAPCPGPEPNWGKGPPETRSSLELDTELSWISGDLLPPGGQEEPPSPRDLKKCYSVEAQSCQRRPTSWLDEQRRHSIAVSCLDSGSQPHLGTDPSNLGGQPLGGPGSRPKKKLSPPSITIDPPESQGPRTPPSPGICLRRRAPSSDSKDPLASGPPDSMAASPSPKKDVLSLSGLSSDPADLDP

SEQ ID NO: 26177 - protein, 2261 aa, Homo sapiens
MDEEEDGAGAEESGQPRSFMRLNDLSGAGGRPGPGSAEKDPGSADSEAEGLPYPALAPVVFFYLSQDSRPRSWCLRTVCNPWFERISMLVILLNCVTLGMFRPCEDIACDSQRCRILQAFDDFIFAFFAVEMVVKMVALGIFGKKCYLGDTWNRLDFFIVIAGMLEYSLDLQNVSFSAVRTVRVLRPLRAINRVPSMRILVTLLLDTLPMLGNVLLLCFFVFFIFGIVGVQLWAGLLRNRCFLPENFSLPLSVDLERYYQTENEDESPFICSQPRENGMRSCRSVPTLRGDGGGGPPCGLDYEAYNSSSNTTCVNWNQYYTNCSAGEHNPFKGAINFDNIGYAWIAIFQVITLEGWVDIMYFVMDAHSFYNFIYFILLIIVGSFFMINLCLVVIATQFSETKQRESQLMREQRVRFLSNASTLASFSEPGSCYEELLKYLVYILRKAARRLAQVSRAAGVRVGLLSSPAPLGGQETQPSSSCSRSHRRLSVHHLVHHHHHHHHHYHLGNGTLRAPRASPEIQDRDANGSRRLMLPPPSTPALSGAPPGGAESVHSFYHADCHLEPVRCQAPPPRSPSEASGRTVGSGKVYPTVHTSPPPETLKEKALVEVAASSGPPTLTSLNIPPGPYSSMHKLLETQSTGACQSSCKISSPCLKADSGACGPDSCPYCARAGAGEVELADREMPDSDSEAVYEFTQDAQHSDLRDPHSRRQRSLGPDAEPSSVLAFWRLICDTFRKIVDSKYFGRGIMIAILVNTLSMGIEYHEQPEELTNALEISNIVFTSLFALEMLLKLLVYGPFGYIKNPYNIFDGVIVVISVWEIVGQQGGGLSVLRTFRLMRVLKLVRFLPALQRQLVVLMKTMDNVATFCMLLMLFIFIFSILGMHLFGCKFASERDGDTLPDRKNFDSLLWAIVTVFQILTQEDWNKVLYNGMASTSSWAALYFIALMTFGNYVLFNLLVAILVEGFQAEGDANKSESEPDFFSPSLDGDGDRKKCLALVSLGEHPELRKSLLPPLIIHTAATPMSLPKSTSTGLGEALGPASRRTSSSGSAEPGAAHEMKSPPSARSSPHSPWSAASSWTSRRSSRNSLGRAPSLKRRSPSGERRSLLSGEGQESQDEEESSEEERASPAGSDHRHRGSLEREAKSSFDLPDTLQVPGLHRTASGRGSASEHQDCNGKSASGRLARALRPDDPPLDGDDADDEGNLSKGERVRAWIRARLPACCLERDSWSAYIFPPQSRFRLLCHRIITHKMFDHVVLVIIFLNCITIAMERPKIDPHSAERIFLTLSNYIFTAVFLAEMTVKVVALGWCFGEQAYLRSSWNVLDGLLVLISVIDILVSMVSDSGTKILGMLRVLRLLRTLRPLRVISRAQGLKLVVETLMSSLKPIGNIVVICCAFFIIFGILGVQLFKGKFFVCQGEDTRNITNKSDCAEASYRWVRHKYNFDNLGQALMSLFVLASKDGWVDIMYDGLDAVGVDQQPIMNHNPWMLLYFISFLLIVAFFVLNMFVGVVVENFHKCRQHQEEEEARRREEKRLRRLEKKRRNLMLDDVIASGSSASAASEAQCKPYYSDYSRFRLLVHHLCTSHYLDLFITGVIGLNVVTMAMEHYQQPQILDEALKICNYIFTVIFVLESVFKLVAFGFRRFFQDRWNQLDLAIVLLSIMGITLEEIEVNASLPINPTIIRIMRVLRIARVLKLLKMAVGMRALLDTVMQALPQVGNLGLLFMLLFFIFAALGVELFGDLECDETHPCEGLGRHATFRNFGMAFLTLFRVSTGDNWNGIMKDTLRDCDQESTCYNTVISPIYFVSFVLTAQFVLVNVVIAVLMKHLEESNKEAKEEAELEAELELEMKTLSPQPHSPLGSPFLWPGVEGPDSPDSPKPGALHPAAHARSASHFSLEHPTMQPHPTELPGPDLLTVRKSGVSRTHSLPNDSYMCRHGSTAEGPLGHRGWGLPKAQSGSVLSVHSQPADTSYILQLPKDAPHLLQPHSAPTWGTIPKLPPPGRSPLAQRPLRRQAAIRTDSLDVQGLGSREDLLAEVSGPSPPLARAYSFWGQSSTQAQQHSRSHSKISKHMTPPAPCPGPEPNWGKGPPETRSSLELDTELSWISGDLLPPGGQEEPPSPRDLKKCYSVEAQSCQRRPTSWLDEQRRHSIAVSCLDSGSQPHLGTDPSNLGGQPLGGPGSRPKKKLSPPSITIDPPESQGPRTPPSPGICLRRRAPSSDSKDPLASGPPDSMAASPSPKKDVLSLSGLSSDPADLDP

SEQ ID NO: 26178 - protein, 2306 aa, Homo sapiens
MDEEEDGAGAEESGQPRSFMRLNDLSGAGGRPGPGSAEKDPGSADSEAEGLPYPALAPVVFFYLSQDSRPRSWCLRTVCNPWFERISMLVILLNCVTLGMFRPCEDIACDSQRCRILQAFDDFIFAFFAVEMVVKMVALGIFGKKCYLGDTWNRLDFFIVIAGMLEYSLDLQNVSFSAVRTVRVLRPLRAINRVPSMRILVTLLLDTLPMLGNVLLLCFFVFFIFGIVGVQLWAGLLRNRCFLPENFSLPLSVDLERYYQTENEDESPFICSQPRENGMRSCRSVPTLRGDGGGGPPCGLDYEAYNSSSNTTCVNWNQYYTNCSAGEHNPFKGAINFDNIGYAWIAIFQVITLEGWVDIMYFVMDAHSFYNFIYFILLIIVGSFFMINLCLVVIATQFSETKQRESQLMREQRVRFLSNASTLASFSEPGSCYEELLKYLVYILRKAARRLAQVSRAAGVRVGLLSSPAPLGGQETQPSSSCSRSHRRLSVHHLVHHHHHHHHHYHLGNGTLRAPRASPEIQDRDANGSRRLMLPPPSTPALSGAPPGGAESVHSFYHADCHLEPVRCQAPPPRSPSEASGRTVGSGKVYPTVHTSPPPETLKEKALVEVAASSGPPTLTSLNIPPGPYSSMHKLLETQSTGACQSSCKISSPCLKADSGACGPDSCPYCARAGAGEVELADREMPDSDSEAVYEFTQDAQHSDLRDPHSRRQRSLGPDAEPSSVLAFWRLICDTFRKIVDSKYFGRGIMIAILVNTLSMGIEYHEQPEELTNALEISNIVFTSLFALEMLLKLLVYGPFGYIKNPYNIFDGVIVVISVWEIVGQQGGGLSVLRTFRLMRVLKLVRFLPALQRQLVVLMKTMDNVATFCMLLMLFIFIFSILGMHLFGCKFASERDGDTLPDRKNFDSLLWAIVTVFQILTQEDWNKVLYNGMASTSSWAALYFIALMTFGNYVLFNLLVAILVEGFQAEGDANKSESEPDFFSPSLDGDGDRKKCLALVSLGEHPELRKSLLPPLIIHTAATPMSLPKSTSTGLGEALGPASRRTSSSGSAEPGAAHEMKSPPSARSSPHSPWSAASSWTSRRSSRNSLGRAPSLKRRSPSGERRSLLSGEGQESQDEEESSEEERASPAGSDHRHRGSLEREAKSSFDLPDTLQVPGLHRTASGRGSASEHQDCNGKSASGRLARALRPDDPPLDGDDADDEGNLSKGERVRAWIRARLPACCLERDSWSAYIFPPQSRFRLLCHRIITHKMFDHVVLVIIFLNCITIAMERPKIDPHSAERIFLTLSNYIFTAVFLAEMTVKVVALGWCFGEQAYLRSSWNVLDGLLVLISVIDILVSMVSDSGTKILGMLRVLRLLRTLRPLRVISRAQGLKLVVETLMSSLKPIGNIVVICCAFFIIFGILGVQLFKGKFFVCQGEDTRNITNKSDCAEASYRWVRHKYNFDNLGQALMSLFVLASKDGWVDIMYDGLDAVGVDQQPIMNHNPWMLLYFISFLLIVAFFVLNMFVGVVVENFHKCRQHQEEEEARRREEKRLRRLEKKRRNLMLDDVIASGSSASAASEAQCKPYYSDYSRFRLLVHHLCTSHYLDLFITGVIGLNVVTMAMEHYQQPQILDEALKICNYIFTVIFVLESVFKLVAFGFRRFFQDRWNQLDLAIVLLSIMGITLEEIEVNASLPINPTIIRIMRVLRIARVLKLLKMAVGMRALLDTVMQALPQVGNLGLLFMLLFFIFAALGVELFGDLECDETHPCEGLGRHATFRNFGMAFLTLFRVSTGDNWNGIMKDTLRDCDQESTCYNTVISPIYFVSFVLTAQFVLVNVVIAVLMKHLEESNKEAKEEAELEAELELEMKTLSPQPHSPLGSPFLWPGVEGPDSPDSPKPGALHPAAHARSASHFSLEHPTIPLAEMEALSLTSEIVSEPSCSLALTDDSLPDDMHTLLLSALESNMQPHPTELPGPDLLTVRKSGVSRTHSLPNDSYMCRHGSTAEGPLGHRGWGLPKAQSGSVLSVHSQPADTSYILQLPKDAPHLLQPHSAPTWGTIPKLPPPGRSPLAQRPLRRQAAIRTDSLDVQGLGSREDLLAEVSGPSPPLARAYSFWGQSSTQAQQHSRSHSKISKHMTPPAPCPGPEPNWGKGPPETRSSLELDTELSWISGDLLPPGGQEEPPSPRDLKKCYSVEAQSCQRRPTSWLDEQRRHSIAVSCLDSGSQPHLGTDPSNLGGQPLGGPGSRPKKKLSPPSITIDPPESQGPRTPPSPGICLRRRAPSSDSKDPLASGPPDSMAASPSPKKDVLSLSGLSSDPADLDP

SEQ ID NO: 26179 - protein, 2284 aa, Homo sapiens
MDEEEDGAGAEESGQPRSFMRLNDLSGAGGRPGPGSAEKDPGSADSEAEGLPYPALAPVVFFYLSQDSRPRSWCLRTVCNPWFERISMLVILLNCVTLGMFRPCEDIACDSQRCRILQAFDDFIFAFFAVEMVVKMVALGIFGKKCYLGDTWNRLDFFIVIAGMLEYSLDLQNVSFSAVRTVRVLRPLRAINRVPSMRILVTLLLDTLPMLGNVLLLCFFVFFIFGIVGVQLWAGLLRNRCFLPENFSLPLSVDLERYYQTENEDESPFICSQPRENGMRSCRSVPTLRGDGGGGPPCGLDYEAYNSSSNTTCVNWNQYYTNCSAGEHNPFKGAINFDNIGYAWIAIFQVITLEGWVDIMYFVMDAHSFYNFIYFILLIIVGSFFMINLCLVVIATQFSETKQRESQLMREQRVRFLSNASTLASFSEPGSCYEELLKYLVYILRKAARRLAQVSRAAGVRVGLLSSPAPLGGQETQPSSSCSRSHRRLSVHHLVHHHHHHHHHYHLGNGTLRAPRASPEIQDRDANGSRRLMLPPPSTPALSGAPPGGAESVHSFYHADCHLEPVRCQAPPPRSPSEASGRTVGSGKVYPTVHTSPPPETLKEKALVEVAASSGPPTLTSLNIPPGPYSSMHKLLETQSTGACQSSCKISSPCLKADSGACGPDSCPYCARAGAGEVELADREMPDSDSEAVYEFTQDAQHSDLRDPHSRRQRSLGPDAEPSSVLAFWRLICDTFRKIVDSKYFGRGIMIAILVNTLSMGIEYHEQPEELTNALEISNIVFTSLFALEMLLKLLVYGPFGYIKNPYNIFDGVIVVISVWEIVGQQGGGLSVLRTFRLMRVLKLVRFLPALQRQLVVLMKTMDNVATFCMLLMLFIFIFSILGMHLFGCKFASERDGDTLPDRKNFDSLLWAIVTVFQILTQEDWNKVLYNGMASTSSWAALYFIALMTFGNYVLFNLLVAILVEGFQAEEISKREDASGQLSCIQLPVDSQGGDANKSESEPDFFSPSLDGDGDRKKCLALVSLGEHPELRKSLLPPLIIHTAATPMSLPKSTSTGLGEALGPASRRTSSSGSAEPGAAHEMKSPPSARSSPHSPWSAASSWTSRRSSRNSLGRAPSLKRRSPSGERRSLLSGEGQESQDEEESSEEERASPAGSDHRHRGSLEREAKSSFDLPDTLQVPGLHRTASGRGSASEHQDCNGKSASGRLARALRPDDPPLDGDDADDEGNLSKGERVRAWIRARLPACCLERDSWSAYIFPPQSRFRLLCHRIITHKMFDHVVLVIIFLNCITIAMERPKIDPHSAERIFLTLSNYIFTAVFLAEMTVKVVALGWCFGEQAYLRSSWNVLDGLLVLISVIDILVSMVSDSGTKILGMLRVLRLLRTLRPLRVISRAQGLKLVVETLMSSLKPIGNIVVICCAFFIIFGILGVQLFKGKFFVCQGEDTRNITNKSDCAEASYRWVRHKYNFDNLGQALMSLFVLASKDGWVDIMYDGLDAVGVDQQPIMNHNPWMLLYFISFLLIVAFFVLNMFVGVVVENFHKCRQHQEEEEARRREEKRLRRLEKKRRNLMLDDVIASGSSASAASEAQCKPYYSDYSRFRLLVHHLCTSHYLDLFITGVIGLNVVTMAMEHYQQPQILDEALKICNYIFTVIFVLESVFKLVAFGFRRFFQDRWNQLDLAIVLLSIMGITLEEIEVNASLPINPTIIRIMRVLRIARVLKLLKMAVGMRALLDTVMQALPQVGNLGLLFMLLFFIFAALGVELFGDLECDETHPCEGLGRHATFRNFGMAFLTLFRVSTGDNWNGIMKDTLRDCDQESTCYNTVISPIYFVSFVLTAQFVLVNVVIAVLMKHLEESNKEAKEEAELEAELELEMKTLSPQPHSPLGSPFLWPGVEGPDSPDSPKPGALHPAAHARSASHFSLEHPTMQPHPTELPGPDLLTVRKSGVSRTHSLPNDSYMCRHGSTAEGPLGHRGWGLPKAQSGSVLSVHSQPADTSYILQLPKDAPHLLQPHSAPTWGTIPKLPPPGRSPLAQRPLRRQAAIRTDSLDVQGLGSREDLLAEVSGPSPPLARAYSFWGQSSTQAQQHSRSHSKISKHMTPPAPCPGPEPNWGKGPPETRSSLELDTELSWISGDLLPPGGQEEPPSPRDLKKCYSVEAQSCQRRPTSWLDEQRRHSIAVSCLDSGSQPHLGTDPSNLGGQPLGGPGSRPKKKLSPPSITIDPPESQGPRTPPSPGICLRRRAPSSDSKDPLASGPPDSMAASPSPKKDVLSLSGLSSDPADLDP

SEQ ID NO: 26180 - protein, 2332 aa, Homo sapiens
MDEEEDGAGAEESGQPRSFMRLNDLSGAGGRPGPGSAEKDPGSADSEAEGLPYPALAPVVFFYLSQDSRPRSWCLRTVCNPWFERISMLVILLNCVTLGMFRPCEDIACDSQRCRILQAFDDFIFAFFAVEMVVKMVALGIFGKKCYLGDTWNRLDFFIVIAGMLEYSLDLQNVSFSAVRTVRVLRPLRAINRVPSMRILVTLLLDTLPMLGNVLLLCFFVFFIFGIVGVQLWAGLLRNRCFLPENFSLPLSVDLERYYQTENEDESPFICSQPRENGMRSCRSVPTLRGDGGGGPPCGLDYEAYNSSSNTTCVNWNQYYTNCSAGEHNPFKGAINFDNIGYAWIAIFQVITLEGWVDIMYFVMDAHSFYNFIYFILLIIVGSFFMINLCLVVIATQFSETKQRESQLMREQRVRFLSNASTLASFSEPGSCYEELLKYLVYILRKAARRLAQVSRAAGVRVGLLSSPAPLGGQETQPSSSCSRSHRRLSVHHLVHHHHHHHHHYHLGNGTLRAPRASPEIQDRDANGSRRLMLPPPSTPALSGAPPGGAESVHSFYHADCHLEPVRCQAPPPRSPSEASGRTVGSGKVYPTVHTSPPPETLKEKALVEVAASSGPPTLTSLNIPPGPYSSMHKLLETQSTGACQSSCKISSPCLKADSGACGPDSCPYCARAGAGEVELADREMPDSDSEAVYEFTQDAQHSDLRDPHSRRQRSLGPDAEPSSVLAFWRLICDTFRKIVDSKYFGRGIMIAILVNTLSMGIEYHEQPEELTNALEISNIVFTSLFALEMLLKLLVYGPFGYIKNPYNIFDGVIVVISVWEIVGQQGGGLSVLRTFRLMRVLKLVRFLPALQRQLVVLMKTMDNVATFCMLLMLFIFIFSILGMHLFGCKFASERDGDTLPDRKNFDSLLWAIVTVFQILTQEDWNKVLYNGMASTSSWAALYFIALMTFGNYVLFNLLVAILVEGFQAEEISKREDASGQLSCIQLPVDSQGGDANKSESEPDFFSPSLDGDGDRKKCLALVSLGEHPELRKSLLPPLIIHTAATPMSLPKSTSTGLGEALGPASRRTSSSGSAEPGAAHEMKSPPSARSSPHSPWSAASSWTSRRSSRNSLGRAPSLKRRSPSGERRSLLSGEGQESQDEEESSEEERASPAGSDHRHRGSLEREAKSSFDLPDTLQVPGLHRTASGRGSASEHQDCNGKSASGRLARALRPDDPPLDGDDADDEGNLSKGERVRAWIRARLPACCLERDSWSAYIFPPQSRFRLLCHRIITHKMFDHVVLVIIFLNCITIAMERPKIDPHSAERIFLTLSNYIFTAVFLAEMTVKVVALGWCFGEQAYLRSSWNVLDGLLVLISVIDILVSMVSDSGTKILGMLRVLRLLRTLRPLRVISRAQGLKLVVETLMSSLKPIGNIVVICCAFFIIFGILGVQLFKGKFFVCQGEDTRNITNKSDCAEASYRWVRHKYNFDNLGQALMSLFVLASKDGWVDIMYDGLDAVGVDQQPIMNHNPWMLLYFISFLLIVAFFVLNMFVGVVVENFHKCRQHQEEEEARRREEKRLRRLEKKRRNLMLDDVIASGSSASAASEAQCKPYYSDYSRFRLLVHHLCTSHYLDLFITGVIGLNVVTMAMEHYQQPQILDEALKICNYIFTVIFVLESVFKLVAFGFRRFFQDRWNQLDLAIVLLSIMGITLEEIEVNASLPINPTIIRIMRVLRIARVLKLLKMAVGMRALLDTVMQALPQVGNLGLLFMLLFFIFAALGVELFGDLECDETHPCEGLGRHATFRNFGMAFLTLFRVSTGDNWNGIMKDTLRDCDQESTCYNTVISPIYFVSFVLTAQFVLVNVVIAVLMKHLEESNKEAKEEAELEAELELEMKTLSPQPHSPLGSPFLWPGVEGPDSPDSPKPGALHPAAHARSASHFSLEHPTDRQLFDTISLLIQGSLEWELKLMDELAGPGGQPSAFPSAPSLGGSDPQMQPHPTELPGPDLLTVRKSGVSRTHSLPNDSYMCRHGSTAEGPLGHRGWGLPKAQSGSVLSVHSQPADTSYILQLPKDAPHLLQPHSAPTWGTIPKLPPPGRSPLAQRPLRRQAAIRTDSLDVQGLGSREDLLAEVSGPSPPLARAYSFWGQSSTQAQQHSRSHSKISKHMTPPAPCPGPEPNWGKGPPETRSSLELDTELSWISGDLLPPGGQEEPPSPRDLKKCYSVEAQSCQRRPTSWLDEQRRHSIAVSCLDSGSQPHLGTDPSNLGGQPLGGPGSRPKKKLSPPSITIDPPESQGPRTPPSPGICLRRRAPSSDSKDPLASGPPDSMAASPSPKKDVLSLSGLSSDPADLDP

SEQ ID NO: 26181 - protein, 2266 aa, Homo sapiens
MDEEEDGAGAEESGQPRSFMRLNDLSGAGGRPGPGSAEKDPGSADSEAEGLPYPALAPVVFFYLSQDSRPRSWCLRTVCNPWFERISMLVILLNCVTLGMFRPCEDIACDSQRCRILQAFDDFIFAFFAVEMVVKMVALGIFGKKCYLGDTWNRLDFFIVIAGMLEYSLDLQNVSFSAVRTVRVLRPLRAINRVPSMRILVTLLLDTLPMLGNVLLLCFFVFFIFGIVGVQLWAGLLRNRCFLPENFSLPLSVDLERYYQTENEDESPFICSQPRENGMRSCRSVPTLRGDGGGGPPCGLDYEAYNSSSNTTCVNWNQYYTNCSAGEHNPFKGAINFDNIGYAWIAIFQVITLEGWVDIMYFVMDAHSFYNFIYFILLIIVGSFFMINLCLVVIATQFSETKQRESQLMREQRVRFLSNASTLASFSEPGSCYEELLKYLVYILRKAARRLAQVSRAAGVRVGLLSSPAPLGGQETQPSSSCSRSHRRLSVHHLVHHHHHHHHHYHLGNGTLRAPRASPEIQDRDANGSRRLMLPPPSTPALSGAPPGGAESVHSFYHADCHLEPVRCQAPPPRSPSEASGRTVGSGKVYPTVHTSPPPETLKEKALVEVAASSGPPTLTSLNIPPGPYSSMHKLLETQSTGACQSSCKISSPCLKADSGACGPDSCPYCARAGAGEVELADREMPDSDSEAVYEFTQDAQHSDLRDPHSRRQRSLGPDAEPSSVLAFWRLICDTFRKIVDSKYFGRGIMIAILVNTLSMGIEYHEQPEELTNALEISNIVFTSLFALEMLLKLLVYGPFGYIKNPYNIFDGVIVVISVWEIVGQQGGGLSVLRTFRLMRVLKLVRFLPALQRQLVVLMKTMDNVATFCMLLMLFIFIFSILGMHLFGCKFASERDGDTLPDRKNFDSLLWAIVTVFQILTQEDWNKVLYNGMASTSSWAALYFIALMTFGNYVLFNLLVAILVEGFQAEEISKREDASGQLSCIQLPVDSQGGDANKSESEPDFFSPSLDGDGDRKKCLALVSLGEHPELRKSLLPPLIIHTAATPMSLPKSTSTGLGEALGPASRRTSSSGSAEPGAAHEMKSPPSARSSPHSPWSAASSWTSRRSSRNSLGRAPSLKRRSPSGERRSLLSGEGQESQDEEESSEEERASPAGSDHRHRGSLEREAKSSFDLPDTLQVPGLHRTASGRGSASEHQDCNGKSASGRLARALRPDDPPLDGDDADDEGNLSKGERVRAWIRARLPACCLERDSWSAYIFPPQSRFRLLCHRIITHKMFDHVVLVIIFLNCITIAMERPKIDPHSAERIFLTLSNYIFTAVFLAEMTVKVVALGWCFGEQAYLRSSWNVLDGLLVLISVIDILVSMVSDSGTKILGMLRVLRLLRTLRPLRVISRAQGLKLVVETLMSSLKPIGNIVVICCAFFIIFGILGVQLFKGKFFVCQGEDTRNITNKSDCAEASYRWVRHKYNFDNLGQALMSLFVLASKDGWVDIMYDGLDAVGVDQQPIMNHNPWMLLYFISFLLIVAFFVLNMFVGVVVENFHKCRQHQEEEEARRREEKRLRRLEKKRRKAQCKPYYSDYSRFRLLVHHLCTSHYLDLFITGVIGLNVVTMAMEHYQQPQILDEALKICNYIFTVIFVLESVFKLVAFGFRRFFQDRWNQLDLAIVLLSIMGITLEEIEVNASLPINPTIIRIMRVLRIARVLKLLKMAVGMRALLDTVMQALPQVGNLGLLFMLLFFIFAALGVELFGDLECDETHPCEGLGRHATFRNFGMAFLTLFRVSTGDNWNGIMKDTLRDCDQESTCYNTVISPIYFVSFVLTAQFVLVNVVIAVLMKHLEESNKEAKEEAELEAELELEMKTLSPQPHSPLGSPFLWPGVEGPDSPDSPKPGALHPAAHARSASHFSLEHPTMQPHPTELPGPDLLTVRKSGVSRTHSLPNDSYMCRHGSTAEGPLGHRGWGLPKAQSGSVLSVHSQPADTSYILQLPKDAPHLLQPHSAPTWGTIPKLPPPGRSPLAQRPLRRQAAIRTDSLDVQGLGSREDLLAEVSGPSPPLARAYSFWGQSSTQAQQHSRSHSKISKHMTPPAPCPGPEPNWGKGPPETRSSLELDTELSWISGDLLPPGGQEEPPSPRDLKKCYSVEAQSCQRRPTSWLDEQRRHSIAVSCLDSGSQPHLGTDPSNLGGQPLGGPGSRPKKKLSPPSITIDPPESQGPRTPPSPGICLRRRAPSSDSKDPLASGPPDSMAASPSPKKDVLSLSGLSSDPADLDP

SEQ ID NO: 26182 - protein, 2259 aa, Homo sapiens
MDEEEDGAGAEESGQPRSFMRLNDLSGAGGRPGPGSAEKDPGSADSEAEGLPYPALAPVVFFYLSQDSRPRSWCLRTVCNPWFERISMLVILLNCVTLGMFRPCEDIACDSQRCRILQAFDDFIFAFFAVEMVVKMVALGIFGKKCYLGDTWNRLDFFIVIAGMLEYSLDLQNVSFSAVRTVRVLRPLRAINRVPSMRILVTLLLDTLPMLGNVLLLCFFVFFIFGIVGVQLWAGLLRNRCFLPENFSLPLSVDLERYYQTENEDESPFICSQPRENGMRSCRSVPTLRGDGGGGPPCGLDYEAYNSSSNTTCVNWNQYYTNCSAGEHNPFKGAINFDNIGYAWIAIFQVITLEGWVDIMYFVMDAHSFYNFIYFILLIIVGSFFMINLCLVVIATQFSETKQRESQLMREQRVRFLSNASTLASFSEPGSCYEELLKYLVYILRKAARRLAQVSRAAGVRVGLLSSPAPLGGQETQPSSSCSRSHRRLSVHHLVHHHHHHHHHYHLGNGTLRAPRASPEIQDRDANGSRRLMLPPPSTPALSGAPPGGAESVHSFYHADCHLEPVRCQAPPPRSPSEASGRTVGSGKVYPTVHTSPPPETLKEKALVEVAASSGPPTLTSLNIPPGPYSSMHKLLETQSTGACQSSCKISSPCLKADSGACGPDSCPYCARAGAGEVELADREMPDSDSEAVYEFTQDAQHSDLRDPHSRRQRSLGPDAEPSSVLAFWRLICDTFRKIVDSKYFGRGIMIAILVNTLSMGIEYHEQPEELTNALEISNIVFTSLFALEMLLKLLVYGPFGYIKNPYNIFDGVIVVISVWEIVGQQGGGLSVLRTFRLMRVLKLVRFLPALQRQLVVLMKTMDNVATFCMLLMLFIFIFSILGMHLFGCKFASERDGDTLPDRKNFDSLLWAIVTVFQILTQEDWNKVLYNGMASTSSWAALYFIALMTFGNYVLFNLLVAILVEGFQAEEISKREDASGQLSCIQLPVDSQGGDANKSESEPDFFSPSLDGDGDRKKCLALVSLGEHPELRKSLLPPLIIHTAATPMSLPKSTSTGLGEALGPASRRTSSSGSAEPGAAHEMKSPPSARSSPHSPWSAASSWTSRRSSRNSLGRAPSLKRRSPSGERRSLLSGEGQESQDEEESSEEERASPAGSDHRHRGSLEREAKSSFDLPDTLQVPGLHRTASGRGSASEHQDCNGKSASGRLARALRPDDPPLDGDDADDEGNLSKGERVRAWIRARLPACCLERDSWSAYIFPPQSRFRLLCHRIITHKMFDHVVLVIIFLNCITIAMERPKIDPHSAERIFLTLSNYIFTAVFLAEMTVKVVALGWCFGEQAYLRSSWNVLDGLLVLISVIDILVSMVSDSGTKILGMLRVLRLLRTLRPLRVISRAQGLKLVVETLMSSLKPIGNIVVICCAFFIIFGILGVQLFKGKFFVCQGEDTRNITNKSDCAEASYRWVRHKYNFDNLGQALMSLFVLASKDGWVDIMYDGLDAVGVDQQPIMNHNPWMLLYFISFLLIVAFFVLNMFVGVVVENFHKCRQHQEEEEARRREEKRLRRLEKKRRKAQCKPYYSDYSRFRLLVHHLCTSHYLDLFITGVIGLNVVTMAMEHYQQPQILDEALKICNYIFTVIFVLESVFKLVAFGFRRFFQDRWNQLDLAIVLLSIMGITLEEIEVNASLPINPTIIRIMRVLRIARVLKLLKMAVGMRALLDTVGNLGLLFMLLFFIFAALGVELFGDLECDETHPCEGLGRHATFRNFGMAFLTLFRVSTGDNWNGIMKDTLRDCDQESTCYNTVISPIYFVSFVLTAQFVLVNVVIAVLMKHLEESNKEAKEEAELEAELELEMKTLSPQPHSPLGSPFLWPGVEGPDSPDSPKPGALHPAAHARSASHFSLEHPTMQPHPTELPGPDLLTVRKSGVSRTHSLPNDSYMCRHGSTAEGPLGHRGWGLPKAQSGSVLSVHSQPADTSYILQLPKDAPHLLQPHSAPTWGTIPKLPPPGRSPLAQRPLRRQAAIRTDSLDVQGLGSREDLLAEVSGPSPPLARAYSFWGQSSTQAQQHSRSHSKISKHMTPPAPCPGPEPNWGKGPPETRSSLELDTELSWISGDLLPPGGQEEPPSPRDLKKCYSVEAQSCQRRPTSWLDEQRRHSIAVSCLDSGSQPHLGTDPSNLGGQPLGGPGSRPKKKLSPPSITIDPPESQGPRTPPSPGICLRRRAPSSDSKDPLASGPPDSMAASPSPKKDVLSLSGLSSDPADLDP

SEQ ID NO: 26183 - protein, 2314 aa, Homo sapiens
MDEEEDGAGAEESGQPRSFMRLNDLSGAGGRPGPGSAEKDPGSADSEAEGLPYPALAPVVFFYLSQDSRPRSWCLRTVCNPWFERISMLVILLNCVTLGMFRPCEDIACDSQRCRILQAFDDFIFAFFAVEMVVKMVALGIFGKKCYLGDTWNRLDFFIVIAGMLEYSLDLQNVSFSAVRTVRVLRPLRAINRVPSMRILVTLLLDTLPMLGNVLLLCFFVFFIFGIVGVQLWAGLLRNRCFLPENFSLPLSVDLERYYQTENEDESPFICSQPRENGMRSCRSVPTLRGDGGGGPPCGLDYEAYNSSSNTTCVNWNQYYTNCSAGEHNPFKGAINFDNIGYAWIAIFQVITLEGWVDIMYFVMDAHSFYNFIYFILLIIVGSFFMINLCLVVIATQFSETKQRESQLMREQRVRFLSNASTLASFSEPGSCYEELLKYLVYILRKAARRLAQVSRAAGVRVGLLSSPAPLGGQETQPSSSCSRSHRRLSVHHLVHHHHHHHHHYHLGNGTLRAPRASPEIQDRDANGSRRLMLPPPSTPALSGAPPGGAESVHSFYHADCHLEPVRCQAPPPRSPSEASGRTVGSGKVYPTVHTSPPPETLKEKALVEVAASSGPPTLTSLNIPPGPYSSMHKLLETQSTGACQSSCKISSPCLKADSGACGPDSCPYCARAGAGEVELADREMPDSDSEAVYEFTQDAQHSDLRDPHSRRQRSLGPDAEPSSVLAFWRLICDTFRKIVDSKYFGRGIMIAILVNTLSMGIEYHEQPEELTNALEISNIVFTSLFALEMLLKLLVYGPFGYIKNPYNIFDGVIVVISVWEIVGQQGGGLSVLRTFRLMRVLKLVRFLPALQRQLVVLMKTMDNVATFCMLLMLFIFIFSILGMHLFGCKFASERDGDTLPDRKNFDSLLWAIVTVFQILTQEDWNKVLYNGMASTSSWAALYFIALMTFGNYVLFNLLVAILVEGFQAEEISKREDASGQLSCIQLPVDSQGGDANKSESEPDFFSPSLDGDGDRKKCLALVSLGEHPELRKSLLPPLIIHTAATPMSLPKSTSTGLGEALGPASRRTSSSGSAEPGAAHEMKSPPSARSSPHSPWSAASSWTSRRSSRNSLGRAPSLKRRSPSGERRSLLSGEGQESQDEEESSEEERASPAGSDHRHRGSLEREAKSSFDLPDTLQVPGLHRTASGRGSASEHQDCNGKSASGRLARALRPDDPPLDGDDADDEGNLSKGERVRAWIRARLPACCLERDSWSAYIFPPQSRFRLLCHRIITHKMFDHVVLVIIFLNCITIAMERPKIDPHSAERIFLTLSNYIFTAVFLAEMTVKVVALGWCFGEQAYLRSSWNVLDGLLVLISVIDILVSMVSDSGTKILGMLRVLRLLRTLRPLRVISRAQGLKLVVETLMSSLKPIGNIVVICCAFFIIFGILGVQLFKGKFFVCQGEDTRNITNKSDCAEASYRWVRHKYNFDNLGQALMSLFVLASKDGWVDIMYDGLDAVGVDQQPIMNHNPWMLLYFISFLLIVAFFVLNMFVGVVVENFHKCRQHQEEEEARRREEKRLRRLEKKRRKAQCKPYYSDYSRFRLLVHHLCTSHYLDLFITGVIGLNVVTMAMEHYQQPQILDEALKICNYIFTVIFVLESVFKLVAFGFRRFFQDRWNQLDLAIVLLSIMGITLEEIEVNASLPINPTIIRIMRVLRIARVLKLLKMAVGMRALLDTVMQALPQVGNLGLLFMLLFFIFAALGVELFGDLECDETHPCEGLGRHATFRNFGMAFLTLFRVSTGDNWNGIMKDTLRDCDQESTCYNTVISPIYFVSFVLTAQFVLVNVVIAVLMKHLEESNKEAKEEAELEAELELEMKTLSPQPHSPLGSPFLWPGVEGPDSPDSPKPGALHPAAHARSASHFSLEHPTDRQLFDTISLLIQGSLEWELKLMDELAGPGGQPSAFPSAPSLGGSDPQMQPHPTELPGPDLLTVRKSGVSRTHSLPNDSYMCRHGSTAEGPLGHRGWGLPKAQSGSVLSVHSQPADTSYILQLPKDAPHLLQPHSAPTWGTIPKLPPPGRSPLAQRPLRRQAAIRTDSLDVQGLGSREDLLAEVSGPSPPLARAYSFWGQSSTQAQQHSRSHSKISKHMTPPAPCPGPEPNWGKGPPETRSSLELDTELSWISGDLLPPGGQEEPPSPRDLKKCYSVEAQSCQRRPTSWLDEQRRHSIAVSCLDSGSQPHLGTDPSNLGGQPLGGPGSRPKKKLSPPSITIDPPESQGPRTPPSPGICLRRRAPSSDSKDPLASGPPDSMAASPSPKKDVLSLSGLSSDPADLDP

SEQ ID NO: 26184 - protein, 2277 aa, Homo sapiens
MDEEEDGAGAEESGQPRSFMRLNDLSGAGGRPGPGSAEKDPGSADSEAEGLPYPALAPVVFFYLSQDSRPRSWCLRTVCNPWFERISMLVILLNCVTLGMFRPCEDIACDSQRCRILQAFDDFIFAFFAVEMVVKMVALGIFGKKCYLGDTWNRLDFFIVIAGMLEYSLDLQNVSFSAVRTVRVLRPLRAINRVPSMRILVTLLLDTLPMLGNVLLLCFFVFFIFGIVGVQLWAGLLRNRCFLPENFSLPLSVDLERYYQTENEDESPFICSQPRENGMRSCRSVPTLRGDGGGGPPCGLDYEAYNSSSNTTCVNWNQYYTNCSAGEHNPFKGAINFDNIGYAWIAIFQVITLEGWVDIMYFVMDAHSFYNFIYFILLIIVGSFFMINLCLVVIATQFSETKQRESQLMREQRVRFLSNASTLASFSEPGSCYEELLKYLVYILRKAARRLAQVSRAAGVRVGLLSSPAPLGGQETQPSSSCSRSHRRLSVHHLVHHHHHHHHHYHLGNGTLRAPRASPEIQDRDANGSRRLMLPPPSTPALSGAPPGGAESVHSFYHADCHLEPVRCQAPPPRSPSEASGRTVGSGKVYPTVHTSPPPETLKEKALVEVAASSGPPTLTSLNIPPGPYSSMHKLLETQSTGACQSSCKISSPCLKADSGACGPDSCPYCARAGAGEVELADREMPDSDSEAVYEFTQDAQHSDLRDPHSRRQRSLGPDAEPSSVLAFWRLICDTFRKIVDSKYFGRGIMIAILVNTLSMGIEYHEQPEELTNALEISNIVFTSLFALEMLLKLLVYGPFGYIKNPYNIFDGVIVVISVWEIVGQQGGGLSVLRTFRLMRVLKLVRFLPALQRQLVVLMKTMDNVATFCMLLMLFIFIFSILGMHLFGCKFASERDGDTLPDRKNFDSLLWAIVTVFQILTQEDWNKVLYNGMASTSSWAALYFIALMTFGNYVLFNLLVAILVEGFQAEEISKREDASGQLSCIQLPVDSQGGDANKSESEPDFFSPSLDGDGDRKKCLALVSLGEHPELRKSLLPPLIIHTAATPMSLPKSTSTGLGEALGPASRRTSSSGSAEPGAAHEMKSPPSARSSPHSPWSAASSWTSRRSSRNSLGRAPSLKRRSPSGERRSLLSGEGQESQDEEESSEEERASPAGSDHRHRGSLEREAKSSFDLPDTLQVPGLHRTASGRGSASEHQDCNGKSASGRLARALRPDDPPLDGDDADDEGNLSKGERVRAWIRARLPACCLERDSWSAYIFPPQSRFRLLCHRIITHKMFDHVVLVIIFLNCITIAMERPKIDPHSAERIFLTLSNYIFTAVFLAEMTVKVVALGWCFGEQAYLRSSWNVLDGLLVLISVIDILVSMVSDSGTKILGMLRVLRLLRTLRPLRVISRAQGLKLVVETLMSSLKPIGNIVVICCAFFIIFGILGVQLFKGKFFVCQGEDTRNITNKSDCAEASYRWVRHKYNFDNLGQALMSLFVLASKDGWVDIMYDGLDAVGVDQQPIMNHNPWMLLYFISFLLIVAFFVLNMFVGVVVENFHKCRQHQEEEEARRREEKRLRRLEKKRRNLMLDDVIASGSSASAASEAQCKPYYSDYSRFRLLVHHLCTSHYLDLFITGVIGLNVVTMAMEHYQQPQILDEALKICNYIFTVIFVLESVFKLVAFGFRRFFQDRWNQLDLAIVLLSIMGITLEEIEVNASLPINPTIIRIMRVLRIARVLKLLKMAVGMRALLDTVGNLGLLFMLLFFIFAALGVELFGDLECDETHPCEGLGRHATFRNFGMAFLTLFRVSTGDNWNGIMKDTLRDCDQESTCYNTVISPIYFVSFVLTAQFVLVNVVIAVLMKHLEESNKEAKEEAELEAELELEMKTLSPQPHSPLGSPFLWPGVEGPDSPDSPKPGALHPAAHARSASHFSLEHPTMQPHPTELPGPDLLTVRKSGVSRTHSLPNDSYMCRHGSTAEGPLGHRGWGLPKAQSGSVLSVHSQPADTSYILQLPKDAPHLLQPHSAPTWGTIPKLPPPGRSPLAQRPLRRQAAIRTDSLDVQGLGSREDLLAEVSGPSPPLARAYSFWGQSSTQAQQHSRSHSKISKHMTPPAPCPGPEPNWGKGPPETRSSLELDTELSWISGDLLPPGGQEEPPSPRDLKKCYSVEAQSCQRRPTSWLDEQRRHSIAVSCLDSGSQPHLGTDPSNLGGQPLGGPGSRPKKKLSPPSITIDPPESQGPRTPPSPGICLRRRAPSSDSKDPLASGPPDSMAASPSPKKDVLSLSGLSSDPADLDP

SEQ ID NO: 26185 - protein, 2205 aa, Homo sapiens
MDEEEDGAGAEESGQPRSFMRLNDLSGAGGRPGPGSAEKDPGSADSEAEGLPYPALAPVVFFYLSQDSRPRSWCLRTVCNPWFERISMLVILLNCVTLGMFRPCEDIACDSQRCRILQAFDDFIFAFFAVEMVVKMVALGIFGKKCYLGDTWNRLDFFIVIAGMLEYSLDLQNVSFSAVRTVRVLRPLRAINRVPSMRILVTLLLDTLPMLGNVLLLCFFVFFIFGIVGVQLWAGLLRNRCFLPENFSLPLSVDLERYYQTENEDESPFICSQPRENGMRSCRSVPTLRGDGGGGPPCGLDYEAYNSSSNTTCVNWNQYYTNCSAGEHNPFKGAINFDNIGYAWIAIFQVITLEGWVDIMYFVMDAHSFYNFIYFILLIIVGSFFMINLCLVVIATQFSETKQRESQLMREQRVRFLSNASTLASFSEPGSCYEELLKYLVYILRKAARRLAQVSRAAGVRVGLLSSPAPLGGQETQPSSSCSRSHRRLSVHHLVHHHHHHHHHYHLGNGTLRAPRASPEIQDRDANGSRRLMLPPPSTPALSGAPPGGAESVHSFYHADCHLEPVRCQAPPPRSPSEASGRTVGSGKVYPTVHTSPPPETLKEKALVEVAASSGPPTLTSLNIPPGPYSSMHKLLETQSTGACQSSCKISSPCLKADSGACGPDSCPYCARAGAGEVELADREMPDSDSEAVYEFTQDAQHSDLRDPHSRRQRSLGPDAEPSSVLAFWRLICDTFRKIVDSKYFGRGIMIAILVNTLSMGIEYHEQPEELTNALEISNIVFTSLFALEMLLKLLVYGPFGYIKNPYNIFDGVIVVISVWEIVGQQGGGLSVLRTFRLMRVLKLVRFLPALQRQLVVLMKTMDNVATFCMLLMLFIFIFSILGMHLFGCKFASERDGDTLPDRKNFDSLLWAIVTVFQILTQEDWNKVLYNGMASTSSWAALYFIALMTFGNYVLFNLLVAILVEGFQAEEISKREDASGQLSCIQLPVDSQGGDANKSESEPDFFSPSLDGDGDRKKCLALVSLGEHPELRKSLLPPLIIHTAATPMSLPKSTSTGLGEALGPASRRTSSSGSAEPGAAHEMKSPPSARSSPHSPWSAASSWTSRRSSRNSLGRAPSLKRRSPSGERRSLLSGEGQESQDEEESSEEERASPAGSDHRHRGSLEREAKSSFDLPDTLQVPGLHRTASGRGSASEHQDCNGKSASGRLARALRPDDPPLDGDDADDEGNLSKGERVRAWIRARLPACCLERDSWSAYIFPPQSRFRLLCHRIITHKMFDHVVLVIIFLNCITIAMERPKIDPHSAERIFLTLSNYIFTAVFLAEMTVKVVALGWCFGEQAYLRSSWNVLDGLLVLISVIDILVSMVSDSGTKILGMLRVLRLLRTLRPLRVISRAQGLKLVVETLMSSLKPIGNIVVICCAFFIIFGILGVQLFKGKFFVCQGEDTRNITNKSDCAEASYRWVRHKYNFDNLGQALMSLFVLASKDGWVDIMYDGLDAVGVDQQPIMNHNPWMLLYFISFLLIVAFFVLNMFVGVVVENFHKCRQHQEEEEARRREEKRLRRLEKKRRNLMLDDVIASGSSASAASEAQCKPYYSDYSRFRLLVHHLCTSHYLDLFITGVIGLNVVTMAMEHYQQPQILDEALKICNYIFTVIFVLESVFKLVAFGFRRFFQDRWNQLDLAIVLLSIMGITLEEIEVNASLPINPTIIRIMRVLRIARVLKLLKMAVGMRALLDTVMQALPQVGNLGLLFMLLFFIFAALGVELFGDLECDETHPCEGLGRHATFRNFGMAFLTLFRVSTGDNWNGIMKDTLRDCDQESTCYNTVISPIYFVSFVLTAQFVLVNVVIAVLMKHLEESNKEAKEEAELEAELELEMKTLSPQPHSPLGSPFLWPGVEGPDSPDSPKPGALHPAAHARSASHFSLEHPTMQPHPTELPGPDLLTVRKSGVSRTHSLPNDSYMCRHGSTAEGPLGHRGWGLPKAQSGSVLSVHSQPADTSYILQLPKDAPHLLQPHSAPTWGTIPKLPPPGRSPLAQRPLRRQAAIRTDSLDVQGLGSREDLLAEEEPPSPRDLKKCYSVEAQSCQRRPTSWLDEQRRHSIAVSCLDSGSQPHLGTDPSNLGGQPLGGPGSRPKKKLSPPSITIDPPESQGPRTPPSPGICLRRRAPSSDSKDPLASGPPDSMAASPSPKKDVLSLSGLSSDPADLDP

SEQ ID NO: 26186 - protein, 2194 aa, Homo sapiens
MDEEEDGAGAEESGQPRSFMRLNDLSGAGGRPGPGSAEKDPGSADSEAEGLPYPALAPVVFFYLSQDSRPRSWCLRTVCNPWFERISMLVILLNCVTLGMFRPCEDIACDSQRCRILQAFDDFIFAFFAVEMVVKMVALGIFGKKCYLGDTWNRLDFFIVIAGMLEYSLDLQNVSFSAVRTVRVLRPLRAINRVPSMRILVTLLLDTLPMLGNVLLLCFFVFFIFGIVGVQLWAGLLRNRCFLPENFSLPLSVDLERYYQTENEDESPFICSQPRENGMRSCRSVPTLRGDGGGGPPCGLDYEAYNSSSNTTCVNWNQYYTNCSAGEHNPFKGAINFDNIGYAWIAIFQVITLEGWVDIMYFVMDAHSFYNFIYFILLIIVGSFFMINLCLVVIATQFSETKQRESQLMREQRVRFLSNASTLASFSEPGSCYEELLKYLVYILRKAARRLAQVSRAAGVRVGLLSSPAPLGGQETQPSSSCSRSHRRLSVHHLVHHHHHHHHHYHLGNGTLRAPRASPEIQDRDANGSRRLMLPPPSTPALSGAPPGGAESVHSFYHADCHLEPVRCQAPPPRSPSEASGRTVGSGKVYPTVHTSPPPETLKEKALVEVAASSGPPTLTSLNIPPGPYSSMHKLLETQSTGACQSSCKISSPCLKADSGACGPDSCPYCARAGAGEVELADREMPDSDSEAVYEFTQDAQHSDLRDPHSRRQRSLGPDAEPSSVLAFWRLICDTFRKIVDSKYFGRGIMIAILVNTLSMGIEYHEQPEELTNALEISNIVFTSLFALEMLLKLLVYGPFGYIKNPYNIFDGVIVVISVWEIVGQQGGGLSVLRTFRLMRVLKLVRFLPALQRQLVVLMKTMDNVATFCMLLMLFIFIFSILGMHLFGCKFASERDGDTLPDRKNFDSLLWAIVTVFQILTQEDWNKVLYNGMASTSSWAALYFIALMTFGNYVLFNLLVAILVEGFQAEEISKREDASGQLSCIQLPVDSQGGDANKSESEPDFFSPSLDGDGDRKKCLALVSLGEHPELRKSLLPPLIIHTAATPMSLPKSTSTGLGEALGPASRRTSSSGSAEPGAAHEMKSPPSARSSPHSPWSAASSWTSRRSSRNSLGRAPSLKRRSPSGERRSLLSGEGQESQDEEESSEEERASPAGSDHRHRGSLEREAKSSFDLPDTLQVPGLHRTASGRGSASEHQDCNGKSASGRLARALRPDDPPLDGDDADDEGNLSKGERVRAWIRARLPACCLERDSWSAYIFPPQSRFRLLCHRIITHKMFDHVVLVIIFLNCITIAMERPKIDPHSAERIFLTLSNYIFTAVFLAEMTVKVVALGWCFGEQAYLRSSWNVLDGLLVLISVIDILVSMVSDSGTKILGMLRVLRLLRTLRPLRVISRAQGLKLVVETLMSSLKPIGNIVVICCAFFIIFGILGVQLFKGKFFVCQGEDTRNITNKSDCAEASYRWVRHKYNFDNLGQALMSLFVLASKDGWVDIMYDGLDAVGVDQQPIMNHNPWMLLYFISFLLIVAFFVLNMFVGVVVENFHKCRQHQEEEEARRREEKRLRRLEKKRRSKEKQMAEAQCKPYYSDYSRFRLLVHHLCTSHYLDLFITGVIGLNVVTMAMEHYQQPQILDEALKICNYIFTVIFVLESVFKLVAFGFRRFFQDRWNQLDLAIVLLSIMGITLEEIEVNASLPINPTIIRIMRVLRIARVLKLLKMAVGMRALLDTVMQALPQVGNLGLLFMLLFFIFAALGVELFGDLECDETHPCEGLGRHATFRNFGMAFLTLFRVSTGDNWNGIMKDTLRDCDQESTCYNTVISPIYFVSFVLTAQFVLVNVVIAVLMKHLEESNKEAKEEAELEAELELEMKTLSPQPHSPLGSPFLWPGVEGPDSPDSPKPGALHPAAHARSASHFSLEHPTMQPHPTELPGPDLLTVRKSGVSRTHSLPNDSYMCRHGSTAEGPLGHRGWGLPKAQSGSVLSVHSQPADTSYILQLPKDAPHLLQPHSAPTWGTIPKLPPPGRSPLAQRPLRRQAAIRTDSLDVQGLGSREDLLAEEEPPSPRDLKKCYSVEAQSCQRRPTSWLDEQRRHSIAVSCLDSGSQPHLGTDPSNLGGQPLGGPGSRPKKKLSPPSITIDPPESQGPRTPPSPGICLRRRAPSSDSKDPLASGPPDSMAASPSPKKDVLSLSGLSSDPADLDP

SEQ ID NO: 26187 - protein, 2366 aa, Homo sapiens
MDEEEDGAGAEESGQPRSFMRLNDLSGAGGRPGPGSAEKDPGSADSEAEGLPYPALAPVVFFYLSQDSRPRSWCLRTVCNPWFERISMLVILLNCVTLGMFRPCEDIACDSQRCRILQAFDDFIFAFFAVEMVVKMVALGIFGKKCYLGDTWNRLDFFIVIAGMLEYSLDLQNVSFSAVRTVRVLRPLRAINRVPSMRILVTLLLDTLPMLGNVLLLCFFVFFIFGIVGVQLWAGLLRNRCFLPENFSLPLSVDLERYYQTENEDESPFICSQPRENGMRSCRSVPTLRGDGGGGPPCGLDYEAYNSSSNTTCVNWNQYYTNCSAGEHNPFKGAINFDNIGYAWIAIFQVITLEGWVDIMYFVMDAHSFYNFIYFILLIIVGSFFMINLCLVVIATQFSETKQRESQLMREQRVRFLSNASTLASFSEPGSCYEELLKYLVYILRKAARRLAQVSRAAGVRVGLLSSPAPLGGQETQPSSSCSRSHRRLSVHHLVHHHHHHHHHYHLGNGTLRAPRASPEIQDRDANGSRRLMLPPPSTPALSGAPPGGAESVHSFYHADCHLEPVRCQAPPPRSPSEASGRTVGSGKVYPTVHTSPPPETLKEKALVEVAASSGPPTLTSLNIPPGPYSSMHKLLETQSTGACQSSCKISSPCLKADSGACGPDSCPYCARAGAGEVELADREMPDSDSEAVYEFTQDAQHSDLRDPHSRRQRSLGPDAEPSSVLAFWRLICDTFRKIVDSKYFGRGIMIAILVNTLSMGIEYHEQPEELTNALEISNIVFTSLFALEMLLKLLVYGPFGYIKNPYNIFDGVIVVISVWEIVGQQGGGLSVLRTFRLMRVLKLVRFLPALQRQLVVLMKTMDNVATFCMLLMLFIFIFSILGMHLFGCKFASERDGDTLPDRKNFDSLLWAIVTVFQILTQEDWNKVLYNGMASTSSWAALYFIALMTFGNYVLFNLLVAILVEGFQAEEISKREDASGQLSCIQLPVDSQGGDANKSESEPDFFSPSLDGDGDRKKCLALVSLGEHPELRKSLLPPLIIHTAATPMSLPKSTSTGLGEALGPASRRTSSSGSAEPGAAHEMKSPPSARSSPHSPWSAASSWTSRRSSRNSLGRAPSLKRRSPSGERRSLLSGEGQESQDEEESSEEERASPAGSDHRHRGSLEREAKSSFDLPDTLQVPGLHRTASGRGSASEHQDCNGKSASGRLARALRPDDPPLDGDDADDEGNLSKGERVRAWIRARLPACCLERDSWSAYIFPPQSRFRLLCHRIITHKMFDHVVLVIIFLNCITIAMERPKIDPHSAERIFLTLSNYIFTAVFLAEMTVKVVALGWCFGEQAYLRSSWNVLDGLLVLISVIDILVSMVSDSGTKILGMLRVLRLLRTLRPLRVISRAQGLKLVVETLMSSLKPIGNIVVICCAFFIIFGILGVQLFKGKFFVCQGEDTRNITNKSDCAEASYRWVRHKYNFDNLGQALMSLFVLASKDGWVDIMYDGLDAVGVDQQPIMNHNPWMLLYFISFLLIVAFFVLNMFVGVVVENFHKCRQHQEEEEARRREEKRLRRLEKKRRSKEKQMAEAQCKPYYSDYSRFRLLVHHLCTSHYLDLFITGVIGLNVVTMAMEHYQQPQILDEALKICNYIFTVIFVLESVFKLVAFGFRRFFQDRWNQLDLAIVLLSIMGITLEEIEVNASLPINPTIIRIMRVLRIARVLKLLKMAVGMRALLDTVMQALPQVGNLGLLFMLLFFIFAALGVELFGDLECDETHPCEGLGRHATFRNFGMAFLTLFRVSTGDNWNGIMKDTLRDCDQESTCYNTVISPIYFVSFVLTAQFVLVNVVIAVLMKHLEESNKEAKEEAELEAELELEMKTLSPQPHSPLGSPFLWPGVEGPDSPDSPKPGALHPAAHARSASHFSLEHPTDRQLFDTISLLIQGSLEWELKLMDELAGPGGQPSAFPSAPSLGGSDPQIPLAEMEALSLTSEIVSEPSCSLALTDDSLPDDMHTLLLSALESNMQPHPTELPGPDLLTVRKSGVSRTHSLPNDSYMCRHGSTAEGPLGHRGWGLPKAQSGSVLSVHSQPADTSYILQLPKDAPHLLQPHSAPTWGTIPKLPPPGRSPLAQRPLRRQAAIRTDSLDVQGLGSREDLLAEVSGPSPPLARAYSFWGQSSTQAQQHSRSHSKISKHMTPPAPCPGPEPNWGKGPPETRSSLELDTELSWISGDLLPPGGQEEPPSPRDLKKCYSVEAQSCQRRPTSWLDEQRRHSIAVSCLDSGSQPHLGTDPSNLGGQPLGGPGSRPKKKLSPPSITIDPPESQGPRTPPSPGICLRRRAPSSDSKDPLASGPPDSMAASPSPKKDVLSLSGLSSDPADLDP

SEQ ID NO: 26188 - protein, 2291 aa, Homo sapiens
MDEEEDGAGAEESGQPRSFMRLNDLSGAGGRPGPGSAEKDPGSADSEAEGLPYPALAPVVFFYLSQDSRPRSWCLRTVCNPWFERISMLVILLNCVTLGMFRPCEDIACDSQRCRILQAFDDFIFAFFAVEMVVKMVALGIFGKKCYLGDTWNRLDFFIVIAGMLEYSLDLQNVSFSAVRTVRVLRPLRAINRVPSMRILVTLLLDTLPMLGNVLLLCFFVFFIFGIVGVQLWAGLLRNRCFLPENFSLPLSVDLERYYQTENEDESPFICSQPRENGMRSCRSVPTLRGDGGGGPPCGLDYEAYNSSSNTTCVNWNQYYTNCSAGEHNPFKGAINFDNIGYAWIAIFQVITLEGWVDIMYFVMDAHSFYNFIYFILLIIVGSFFMINLCLVVIATQFSETKQRESQLMREQRVRFLSNASTLASFSEPGSCYEELLKYLVYILRKAARRLAQVSRAAGVRVGLLSSPAPLGGQETQPSSSCSRSHRRLSVHHLVHHHHHHHHHYHLGNGTLRAPRASPEIQDRDANGSRRLMLPPPSTPALSGAPPGGAESVHSFYHADCHLEPVRCQAPPPRSPSEASGRTVGSGKVYPTVHTSPPPETLKEKALVEVAASSGPPTLTSLNIPPGPYSSMHKLLETQSTGACQSSCKISSPCLKADSGACGPDSCPYCARAGAGEVELADREMPDSDSEAVYEFTQDAQHSDLRDPHSRRQRSLGPDAEPSSVLAFWRLICDTFRKIVDSKYFGRGIMIAILVNTLSMGIEYHEQPEELTNALEISNIVFTSLFALEMLLKLLVYGPFGYIKNPYNIFDGVIVVISVWEIVGQQGGGLSVLRTFRLMRVLKLVRFLPALQRQLVVLMKTMDNVATFCMLLMLFIFIFSILGMHLFGCKFASERDGDTLPDRKNFDSLLWAIVTVFQILTQEDWNKVLYNGMASTSSWAALYFIALMTFGNYVLFNLLVAILVEGFQAEEISKREDASGQLSCIQLPVDSQGGDANKSESEPDFFSPSLDGDGDRKKCLALVSLGEHPELRKSLLPPLIIHTAATPMSLPKSTSTGLGEALGPASRRTSSSGSAEPGAAHEMKSPPSARSSPHSPWSAASSWTSRRSSRNSLGRAPSLKRRSPSGERRSLLSGEGQESQDEEESSEEERASPAGSDHRHRGSLEREAKSSFDLPDTLQVPGLHRTASGRGSASEHQDCNGKSASGRLARALRPDDPPLDGDDADDEGNLSKGERVRAWIRARLPACCLERDSWSAYIFPPQSRFRLLCHRIITHKMFDHVVLVIIFLNCITIAMERPKIDPHSAERIFLTLSNYIFTAVFLAEMTVKVVALGWCFGEQAYLRSSWNVLDGLLVLISVIDILVSMVSDSGTKILGMLRVLRLLRTLRPLRVISRAQGLKLVVETLMSSLKPIGNIVVICCAFFIIFGILGVQLFKGKFFVCQGEDTRNITNKSDCAEASYRWVRHKYNFDNLGQALMSLFVLASKDGWVDIMYDGLDAVGVDQQPIMNHNPWMLLYFISFLLIVAFFVLNMFVGVVVENFHKCRQHQEEEEARRREEKRLRRLEKKRRSKEKQMADLMLDDVIASGSSASAASEAQCKPYYSDYSRFRLLVHHLCTSHYLDLFITGVIGLNVVTMAMEHYQQPQILDEALKICNYIFTVIFVLESVFKLVAFGFRRFFQDRWNQLDLAIVLLSIMGITLEEIEVNASLPINPTIIRIMRVLRIARVLKLLKMAVGMRALLDTVMQALPQVGNLGLLFMLLFFIFAALGVELFGDLECDETHPCEGLGRHATFRNFGMAFLTLFRVSTGDNWNGIMKDTLRDCDQESTCYNTVISPIYFVSFVLTAQFVLVNVVIAVLMKHLEESNKEAKEEAELEAELELEMKTLSPQPHSPLGSPFLWPGVEGPDSPDSPKPGALHPAAHARSASHFSLEHPTMQPHPTELPGPDLLTVRKSGVSRTHSLPNDSYMCRHGSTAEGPLGHRGWGLPKAQSGSVLSVHSQPADTSYILQLPKDAPHLLQPHSAPTWGTIPKLPPPGRSPLAQRPLRRQAAIRTDSLDVQGLGSREDLLAEVSGPSPPLARAYSFWGQSSTQAQQHSRSHSKISKHMTPPAPCPGPEPNWGKGPPETRSSLELDTELSWISGDLLPPGGQEEPPSPRDLKKCYSVEAQSCQRRPTSWLDEQRRHSIAVSCLDSGSQPHLGTDPSNLGGQPLGGPGSRPKKKLSPPSITIDPPESQGPRTPPSPGICLRRRAPSSDSKDPLASGPPDSMAASPSPKKDVLSLSGLSSDPADLDP

SEQ ID NO: 26189 - protein, 2227 aa, Homo sapiens
MDEEEDGAGAEESGQPRSFMRLNDLSGAGGRPGPGSAEKDPGSADSEAEGLPYPALAPVVFFYLSQDSRPRSWCLRTVCNPWFERISMLVILLNCVTLGMFRPCEDIACDSQRCRILQAFDDFIFAFFAVEMVVKMVALGIFGKKCYLGDTWNRLDFFIVIAGMLEYSLDLQNVSFSAVRTVRVLRPLRAINRVPSMRILVTLLLDTLPMLGNVLLLCFFVFFIFGIVGVQLWAGLLRNRCFLPENFSLPLSVDLERYYQTENEDESPFICSQPRENGMRSCRSVPTLRGDGGGGPPCGLDYEAYNSSSNTTCVNWNQYYTNCSAGEHNPFKGAINFDNIGYAWIAIFQVITLEGWVDIMYFVMDAHSFYNFIYFILLIIVGSFFMINLCLVVIATQFSETKQRESQLMREQRVRFLSNASTLASFSEPGSCYEELLKYLVYILRKAARRLAQVSRAAGVRVGLLSSPAPLGGQETQPSSSCSRSHRRLSVHHLVHHHHHHHHHYHLGNGTLRAPRASPEIQDRDANGSRRLMLPPPSTPALSGAPPGGAESVHSFYHADCHLEPVRCQAPPPRSPSEASGRTVGSGKVYPTVHTSPPPETLKEKALVEVAASSGPPTLTSLNIPPGPYSSMHKLLETQSTGACQSSCKISSPCLKADSGACGPDSCPYCARAGAGEVELADREMPDSDSEAVYEFTQDAQHSDLRDPHSRRQRSLGPDAEPSSVLAFWRLICDTFRKIVDSKYFGRGIMIAILVNTLSMGIEYHEQPEELTNALEISNIVFTSLFALEMLLKLLVYGPFGYIKNPYNIFDGVIVVISVWEIVGQQGGGLSVLRTFRLMRVLKLVRFLPALQRQLVVLMKTMDNVATFCMLLMLFIFIFSILGMHLFGCKFASERDGDTLPDRKNFDSLLWAIVTVFQILTQEDWNKVLYNGMASTSSWAALYFIALMTFGNYVLFNLLVAILVEGFQAEGDANKSESEPDFFSPSLDGDGDRKKCLALVSLGEHPELRKSLLPPLIIHTAATPMSLPKSTSTGLGEALGPASRRTSSSGSAEPGAAHEMKSPPSARSSPHSPWSAASSWTSRRSSRNSLGRAPSLKRRSPSGERRSLLSGEGQESQDEEESSEEERASPAGSDHRHRGSLEREAKSSFDLPDTLQVPGLHRTASGRGSASEHQDCNGKSASGRLARALRPDDPPLDGDDADDEGNLSKGERVRAWIRARLPACCLERDSWSAYIFPPQSRFRLLCHRIITHKMFDHVVLVIIFLNCITIAMERPKIDPHSAERIFLTLSNYIFTAVFLAEMTVKVVALGWCFGEQAYLRSSWNVLDGLLVLISVIDILVSMVSDSGTKILGMLRVLRLLRTLRPLRVISRAQGLKLVVETLMSSLKPIGNIVVICCAFFIIFGILGVQLFKGKFFVCQGEDTRNITNKSDCAEASYRWVRHKYNFDNLGQALMSLFVLASKDGWVDIMYDGLDAVGVDQQNFHKCRQHQEEEEARRREEKRLRRLEKKRRNLMLDDVIASGSSASAASEAQCKPYYSDYSRFRLLVHHLCTSHYLDLFITGVIGLNVVTMAMEHYQQPQILDEALKICNYIFTVIFVLESVFKLVAFGFRRFFQDRWNQLDLAIVLLSIMGITLEEIEVNASLPINPTIIRIMRVLRIARVLKLLKMAVGMRALLDTVMQALPQVGNLGLLFMLLFFIFAALGVELFGDLECDETHPCEGLGRHATFRNFGMAFLTLFRVSTGDNWNGIMKDTLRDCDQESTCYNTVISPIYFVSFVLTAQFVLVNVVIAVLMKHLEESNKEAKEEAELEAELELEMKTLSPQPHSPLGSPFLWPGVEGPDSPDSPKPGALHPAAHARSASHFSLEHPTMQPHPTELPGPDLLTVRKSGVSRTHSLPNDSYMCRHGSTAEGPLGHRGWGLPKAQSGSVLSVHSQPADTSYILQLPKDAPHLLQPHSAPTWGTIPKLPPPGRSPLAQRPLRRQAAIRTDSLDVQGLGSREDLLAEVSGPSPPLARAYSFWGQSSTQAQQHSRSHSKISKHMTPPAPCPGPEPNWGKGPPETRSSLELDTELSWISGDLLPPGGQEEPPSPRDLKKCYSVEAQSCQRRPTSWLDEQRRHSIAVSCLDSGSQPHLGTDPSNLGGQPLGGPGSRPKKKLSPPSITIDPPESQGPRTPPSPGICLRRRAPSSDSKDPLASGPPDSMAASPSPKKDVLSLSGLSSDPADLDP

SEQ ID NO: 26190 - protein, 2232 aa, Homo sapiens
MDEEEDGAGAEESGQPRSFMRLNDLSGAGGRPGPGSAEKDPGSADSEAEGLPYPALAPVVFFYLSQDSRPRSWCLRTVCNPWFERISMLVILLNCVTLGMFRPCEDIACDSQRCRILQAFDDFIFAFFAVEMVVKMVALGIFGKKCYLGDTWNRLDFFIVIAGMLEYSLDLQNVSFSAVRTVRVLRPLRAINRVPSMRILVTLLLDTLPMLGNVLLLCFFVFFIFGIVGVQLWAGLLRNRCFLPENFSLPLSVDLERYYQTENEDESPFICSQPRENGMRSCRSVPTLRGDGGGGPPCGLDYEAYNSSSNTTCVNWNQYYTNCSAGEHNPFKGAINFDNIGYAWIAIFQVITLEGWVDIMYFVMDAHSFYNFIYFILLIIVGSFFMINLCLVVIATQFSETKQRESQLMREQRVRFLSNASTLASFSEPGSCYEELLKYLVYILRKAARRLAQVSRAAGVRVGLLSSPAPLGGQETQPSSSCSRSHRRLSVHHLVHHHHHHHHHYHLGNGTLRAPRASPEIQDRDANGSRRLMLPPPSTPALSGAPPGGAESVHSFYHADCHLEPVRCQAPPPRSPSEASGRTVGSGKVYPTVHTSPPPETLKEKALVEVAASSGPPTLTSLNIPPGPYSSMHKLLETQSTGACQSSCKISSPCLKADSGACGPDSCPYCARAGAGEVELADREMPDSDSEAVYEFTQDAQHSDLRDPHSRRQRSLGPDAEPSSVLAFWRLICDTFRKIVDSKYFGRGIMIAILVNTLSMGIEYHEQPEELTNALEISNIVFTSLFALEMLLKLLVYGPFGYIKNPYNIFDGVIVVISVWEIVGQQGGGLSVLRTFRLMRVLKLVRFLPALQRQLVVLMKTMDNVATFCMLLMLFIFIFSILGMHLFGCKFASERDGDTLPDRKNFDSLLWAIVTVFQILTQEDWNKVLYNGMASTSSWAALYFIALMTFGNYVLFNLLVAILVEGFQAEEISKREDASGQLSCIQLPVDSQGGDANKSESEPDFFSPSLDGDGDRKKCLALVSLGEHPELRKSLLPPLIIHTAATPMSLPKSTSTGLGEALGPASRRTSSSGSAEPGAAHEMKSPPSARSSPHSPWSAASSWTSRRSSRNSLGRAPSLKRRSPSGERRSLLSGEGQESQDEEESSEEERASPAGSDHRHRGSLEREAKSSFDLPDTLQVPGLHRTASGRGSASEHQDCNGKSASGRLARALRPDDPPLDGDDADDEGNLSKGERVRAWIRARLPACCLERDSWSAYIFPPQSRFRLLCHRIITHKMFDHVVLVIIFLNCITIAMERPKIDPHSAERIFLTLSNYIFTAVFLAEMTVKVVALGWCFGEQAYLRSSWNVLDGLLVLISVIDILVSMVSDSGTKILGMLRVLRLLRTLRPLRVISRAQGLKLVVETLMSSLKPIGNIVVICCAFFIIFGILGVQLFKGKFFVCQGEDTRNITNKSDCAEASYRWVRHKYNFDNLGQALMSLFVLASKDGWVDIMYDGLDAVGVDQQNFHKCRQHQEEEEARRREEKRLRRLEKKRRKAQCKPYYSDYSRFRLLVHHLCTSHYLDLFITGVIGLNVVTMAMEHYQQPQILDEALKICNYIFTVIFVLESVFKLVAFGFRRFFQDRWNQLDLAIVLLSIMGITLEEIEVNASLPINPTIIRIMRVLRIARVLKLLKMAVGMRALLDTVMQALPQVGNLGLLFMLLFFIFAALGVELFGDLECDETHPCEGLGRHATFRNFGMAFLTLFRVSTGDNWNGIMKDTLRDCDQESTCYNTVISPIYFVSFVLTAQFVLVNVVIAVLMKHLEESNKEAKEEAELEAELELEMKTLSPQPHSPLGSPFLWPGVEGPDSPDSPKPGALHPAAHARSASHFSLEHPTMQPHPTELPGPDLLTVRKSGVSRTHSLPNDSYMCRHGSTAEGPLGHRGWGLPKAQSGSVLSVHSQPADTSYILQLPKDAPHLLQPHSAPTWGTIPKLPPPGRSPLAQRPLRRQAAIRTDSLDVQGLGSREDLLAEVSGPSPPLARAYSFWGQSSTQAQQHSRSHSKISKHMTPPAPCPGPEPNWGKGPPETRSSLELDTELSWISGDLLPPGGQEEPPSPRDLKKCYSVEAQSCQRRPTSWLDEQRRHSIAVSCLDSGSQPHLGTDPSNLGGQPLGGPGSRPKKKLSPPSITIDPPESQGPRTPPSPGICLRRRAPSSDSKDPLASGPPDSMAASPSPKKDVLSLSGLSSDPADLDP

SEQ ID NO: 26191 - protein, 2250 aa, Homo sapiens
MDEEEDGAGAEESGQPRSFMRLNDLSGAGGRPGPGSAEKDPGSADSEAEGLPYPALAPVVFFYLSQDSRPRSWCLRTVCNPWFERISMLVILLNCVTLGMFRPCEDIACDSQRCRILQAFDDFIFAFFAVEMVVKMVALGIFGKKCYLGDTWNRLDFFIVIAGMLEYSLDLQNVSFSAVRTVRVLRPLRAINRVPSMRILVTLLLDTLPMLGNVLLLCFFVFFIFGIVGVQLWAGLLRNRCFLPENFSLPLSVDLERYYQTENEDESPFICSQPRENGMRSCRSVPTLRGDGGGGPPCGLDYEAYNSSSNTTCVNWNQYYTNCSAGEHNPFKGAINFDNIGYAWIAIFQVITLEGWVDIMYFVMDAHSFYNFIYFILLIIVGSFFMINLCLVVIATQFSETKQRESQLMREQRVRFLSNASTLASFSEPGSCYEELLKYLVYILRKAARRLAQVSRAAGVRVGLLSSPAPLGGQETQPSSSCSRSHRRLSVHHLVHHHHHHHHHYHLGNGTLRAPRASPEIQDRDANGSRRLMLPPPSTPALSGAPPGGAESVHSFYHADCHLEPVRCQAPPPRSPSEASGRTVGSGKVYPTVHTSPPPETLKEKALVEVAASSGPPTLTSLNIPPGPYSSMHKLLETQSTGACQSSCKISSPCLKADSGACGPDSCPYCARAGAGEVELADREMPDSDSEAVYEFTQDAQHSDLRDPHSRRQRSLGPDAEPSSVLAFWRLICDTFRKIVDSKYFGRGIMIAILVNTLSMGIEYHEQPEELTNALEISNIVFTSLFALEMLLKLLVYGPFGYIKNPYNIFDGVIVVISVWEIVGQQGGGLSVLRTFRLMRVLKLVRFLPALQRQLVVLMKTMDNVATFCMLLMLFIFIFSILGMHLFGCKFASERDGDTLPDRKNFDSLLWAIVTVFQILTQEDWNKVLYNGMASTSSWAALYFIALMTFGNYVLFNLLVAILVEGFQAEEISKREDASGQLSCIQLPVDSQGGDANKSESEPDFFSPSLDGDGDRKKCLALVSLGEHPELRKSLLPPLIIHTAATPMSLPKSTSTGLGEALGPASRRTSSSGSAEPGAAHEMKSPPSARSSPHSPWSAASSWTSRRSSRNSLGRAPSLKRRSPSGERRSLLSGEGQESQDEEESSEEERASPAGSDHRHRGSLEREAKSSFDLPDTLQVPGLHRTASGRGSASEHQDCNGKSASGRLARALRPDDPPLDGDDADDEGNLSKGERVRAWIRARLPACCLERDSWSAYIFPPQSRFRLLCHRIITHKMFDHVVLVIIFLNCITIAMERPKIDPHSAERIFLTLSNYIFTAVFLAEMTVKVVALGWCFGEQAYLRSSWNVLDGLLVLISVIDILVSMVSDSGTKILGMLRVLRLLRTLRPLRVISRAQGLKLVVETLMSSLKPIGNIVVICCAFFIIFGILGVQLFKGKFFVCQGEDTRNITNKSDCAEASYRWVRHKYNFDNLGQALMSLFVLASKDGWVDIMYDGLDAVGVDQQNFHKCRQHQEEEEARRREEKRLRRLEKKRRNLMLDDVIASGSSASAASEAQCKPYYSDYSRFRLLVHHLCTSHYLDLFITGVIGLNVVTMAMEHYQQPQILDEALKICNYIFTVIFVLESVFKLVAFGFRRFFQDRWNQLDLAIVLLSIMGITLEEIEVNASLPINPTIIRIMRVLRIARVLKLLKMAVGMRALLDTVMQALPQVGNLGLLFMLLFFIFAALGVELFGDLECDETHPCEGLGRHATFRNFGMAFLTLFRVSTGDNWNGIMKDTLRDCDQESTCYNTVISPIYFVSFVLTAQFVLVNVVIAVLMKHLEESNKEAKEEAELEAELELEMKTLSPQPHSPLGSPFLWPGVEGPDSPDSPKPGALHPAAHARSASHFSLEHPTMQPHPTELPGPDLLTVRKSGVSRTHSLPNDSYMCRHGSTAEGPLGHRGWGLPKAQSGSVLSVHSQPADTSYILQLPKDAPHLLQPHSAPTWGTIPKLPPPGRSPLAQRPLRRQAAIRTDSLDVQGLGSREDLLAEVSGPSPPLARAYSFWGQSSTQAQQHSRSHSKISKHMTPPAPCPGPEPNWGKGPPETRSSLELDTELSWISGDLLPPGGQEEPPSPRDLKKCYSVEAQSCQRRPTSWLDEQRRHSIAVSCLDSGSQPHLGTDPSNLGGQPLGGPGSRPKKKLSPPSITIDPPESQGPRTPPSPGICLRRRAPSSDSKDPLASGPPDSMAASPSPKKDVLSLSGLSSDPADLDP

SEQ ID NO: 26192 - protein, 2287 aa, Homo sapiens
MDEEEDGAGAEESGQPRSFMRLNDLSGAGGRPGPGSAEKDPGSADSEAEGLPYPALAPVVFFYLSQDSRPRSWCLRTVCNPWFERISMLVILLNCVTLGMFRPCEDIACDSQRCRILQAFDDFIFAFFAVEMVVKMVALGIFGKKCYLGDTWNRLDFFIVIAGMLEYSLDLQNVSFSAVRTVRVLRPLRAINRVPSMRILVTLLLDTLPMLGNVLLLCFFVFFIFGIVGVQLWAGLLRNRCFLPENFSLPLSVDLERYYQTENEDESPFICSQPRENGMRSCRSVPTLRGDGGGGPPCGLDYEAYNSSSNTTCVNWNQYYTNCSAGEHNPFKGAINFDNIGYAWIAIFQVITLEGWVDIMYFVMDAHSFYNFIYFILLIIVGSFFMINLCLVVIATQFSETKQRESQLMREQRVRFLSNASTLASFSEPGSCYEELLKYLVYILRKAARRLAQVSRAAGVRVGLLSSPAPLGGQETQPSSSCSRSHRRLSVHHLVHHHHHHHHHYHLGNGTLRAPRASPEIQDRDANGSRRLMLPPPSTPALSGAPPGGAESVHSFYHADCHLEPVRCQAPPPRSPSEASGRTVGSGKVYPTVHTSPPPETLKEKALVEVAASSGPPTLTSLNIPPGPYSSMHKLLETQSTGACQSSCKISSPCLKADSGACGPDSCPYCARAGAGEVELADREMPDSDSEAVYEFTQDAQHSDLRDPHSRRQRSLGPDAEPSSVLAFWRLICDTFRKIVDSKYFGRGIMIAILVNTLSMGIEYHEQPEELTNALEISNIVFTSLFALEMLLKLLVYGPFGYIKNPYNIFDGVIVVISVWEIVGQQGGGLSVLRTFRLMRVLKLVRFLPALQRQLVVLMKTMDNVATFCMLLMLFIFIFSILGMHLFGCKFASERDGDTLPDRKNFDSLLWAIVTVFQILTQEDWNKVLYNGMASTSSWAALYFIALMTFGNYVLFNLLVAILVEGFQAEEISKREDASGQLSCIQLPVDSQGGDANKSESEPDFFSPSLDGDGDRKKCLALVSLGEHPELRKSLLPPLIIHTAATPMSLPKSTSTGLGEALGPASRRTSSSGSAEPGAAHEMKSPPSARSSPHSPWSAASSWTSRRSSRNSLGRAPSLKRRSPSGERRSLLSGEGQESQDEEESSEEERASPAGSDHRHRGSLEREAKSSFDLPDTLQVPGLHRTASGRGSASEHQDCNGKSASGRLARALRPDDPPLDGDDADDEGNLSKGERVRAWIRARLPACCLERDSWSAYIFPPQSRFRLLCHRIITHKMFDHVVLVIIFLNCITIAMERPKIDPHSAERIFLTLSNYIFTAVFLAEMTVKVVALGWCFGEQAYLRSSWNVLDGLLVLISVIDILVSMVSDSGTKILGMLRVLRLLRTLRPLRVISRAQGLKLVVETLMSSLKPIGNIVVICCAFFIIFGILGVQLFKGKFFVCQGEDTRNITNKSDCAEASYRWVRHKYNFDNLGQALMSLFVLASKDGWVDIMYDGLDAVGVDQQNFHKCRQHQEEEEARRREEKRLRRLEKKRRSKEKQMAEAQCKPYYSDYSRFRLLVHHLCTSHYLDLFITGVIGLNVVTMAMEHYQQPQILDEALKICNYIFTVIFVLESVFKLVAFGFRRFFQDRWNQLDLAIVLLSIMGITLEEIEVNASLPINPTIIRIMRVLRIARVLKLLKMAVGMRALLDTVMQALPQVGNLGLLFMLLFFIFAALGVELFGDLECDETHPCEGLGRHATFRNFGMAFLTLFRVSTGDNWNGIMKDTLRDCDQESTCYNTVISPIYFVSFVLTAQFVLVNVVIAVLMKHLEESNKEAKEEAELEAELELEMKTLSPQPHSPLGSPFLWPGVEGPDSPDSPKPGALHPAAHARSASHFSLEHPTDRQLFDTISLLIQGSLEWELKLMDELAGPGGQPSAFPSAPSLGGSDPQMQPHPTELPGPDLLTVRKSGVSRTHSLPNDSYMCRHGSTAEGPLGHRGWGLPKAQSGSVLSVHSQPADTSYILQLPKDAPHLLQPHSAPTWGTIPKLPPPGRSPLAQRPLRRQAAIRTDSLDVQGLGSREDLLAEVSGPSPPLARAYSFWGQSSTQAQQHSRSHSKISKHMTPPAPCPGPEPNWGKGPPETRSSLELDTELSWISGDLLPPGGQEEPPSPRDLKKCYSVEAQSCQRRPTSWLDEQRRHSIAVSCLDSGSQPHLGTDPSNLGGQPLGGPGSRPKKKLSPPSITIDPPESQGPRTPPSPGICLRRRAPSSDSKDPLASGPPDSMAASPSPKKDVLSLSGLSSDPADLDP

SEQ ID NO: 26193 - protein, 2239 aa, Homo sapiens
MDEEEDGAGAEESGQPRSFMRLNDLSGAGGRPGPGSAEKDPGSADSEAEGLPYPALAPVVFFYLSQDSRPRSWCLRTVCNPWFERISMLVILLNCVTLGMFRPCEDIACDSQRCRILQAFDDFIFAFFAVEMVVKMVALGIFGKKCYLGDTWNRLDFFIVIAGMLEYSLDLQNVSFSAVRTVRVLRPLRAINRVPSMRILVTLLLDTLPMLGNVLLLCFFVFFIFGIVGVQLWAGLLRNRCFLPENFSLPLSVDLERYYQTENEDESPFICSQPRENGMRSCRSVPTLRGDGGGGPPCGLDYEAYNSSSNTTCVNWNQYYTNCSAGEHNPFKGAINFDNIGYAWIAIFQVITLEGWVDIMYFVMDAHSFYNFIYFILLIIVGSFFMINLCLVVIATQFSETKQRESQLMREQRVRFLSNASTLASFSEPGSCYEELLKYLVYILRKAARRLAQVSRAAGVRVGLLSSPAPLGGQETQPSSSCSRSHRRLSVHHLVHHHHHHHHHYHLGNGTLRAPRASPEIQDRDANGSRRLMLPPPSTPALSGAPPGGAESVHSFYHADCHLEPVRCQAPPPRSPSEASGRTVGSGKVYPTVHTSPPPETLKEKALVEVAASSGPPTLTSLNIPPGPYSSMHKLLETQSTGACQSSCKISSPCLKADSGACGPDSCPYCARAGAGEVELADREMPDSDSEAVYEFTQDAQHSDLRDPHSRRQRSLGPDAEPSSVLAFWRLICDTFRKIVDSKYFGRGIMIAILVNTLSMGIEYHEQPEELTNALEISNIVFTSLFALEMLLKLLVYGPFGYIKNPYNIFDGVIVVISVWEIVGQQGGGLSVLRTFRLMRVLKLVRFLPALQRQLVVLMKTMDNVATFCMLLMLFIFIFSILGMHLFGCKFASERDGDTLPDRKNFDSLLWAIVTVFQILTQEDWNKVLYNGMASTSSWAALYFIALMTFGNYVLFNLLVAILVEGFQAEEISKREDASGQLSCIQLPVDSQGGDANKSESEPDFFSPSLDGDGDRKKCLALVSLGEHPELRKSLLPPLIIHTAATPMSLPKSTSTGLGEALGPASRRTSSSGSAEPGAAHEMKSPPSARSSPHSPWSAASSWTSRRSSRNSLGRAPSLKRRSPSGERRSLLSGEGQESQDEEESSEEERASPAGSDHRHRGSLEREAKSSFDLPDTLQVPGLHRTASGRGSASEHQDCNGKSASGRLARALRPDDPPLDGDDADDEGNLSKGERVRAWIRARLPACCLERDSWSAYIFPPQSRFRLLCHRIITHKMFDHVVLVIIFLNCITIAMERPKIDPHSAERIFLTLSNYIFTAVFLAEMTVKVVALGWCFGEQAYLRSSWNVLDGLLVLISVIDILVSMVSDSGTKILGMLRVLRLLRTLRPLRVISRAQGLKLVVETLMSSLKPIGNIVVICCAFFIIFGILGVQLFKGKFFVCQGEDTRNITNKSDCAEASYRWVRHKYNFDNLGQALMSLFVLASKDGWVDIMYDGLDAVGVDQQNFHKCRQHQEEEEARRREEKRLRRLEKKRRSKEKQMAEAQCKPYYSDYSRFRLLVHHLCTSHYLDLFITGVIGLNVVTMAMEHYQQPQILDEALKICNYIFTVIFVLESVFKLVAFGFRRFFQDRWNQLDLAIVLLSIMGITLEEIEVNASLPINPTIIRIMRVLRIARVLKLLKMAVGMRALLDTVMQALPQVGNLGLLFMLLFFIFAALGVELFGDLECDETHPCEGLGRHATFRNFGMAFLTLFRVSTGDNWNGIMKDTLRDCDQESTCYNTVISPIYFVSFVLTAQFVLVNVVIAVLMKHLEESNKEAKEEAELEAELELEMKTLSPQPHSPLGSPFLWPGVEGPDSPDSPKPGALHPAAHARSASHFSLEHPTMQPHPTELPGPDLLTVRKSGVSRTHSLPNDSYMCRHGSTAEGPLGHRGWGLPKAQSGSVLSVHSQPADTSYILQLPKDAPHLLQPHSAPTWGTIPKLPPPGRSPLAQRPLRRQAAIRTDSLDVQGLGSREDLLAEVSGPSPPLARAYSFWGQSSTQAQQHSRSHSKISKHMTPPAPCPGPEPNWGKGPPETRSSLELDTELSWISGDLLPPGGQEEPPSPRDLKKCYSVEAQSCQRRPTSWLDEQRRHSIAVSCLDSGSQPHLGTDPSNLGGQPLGGPGSRPKKKLSPPSITIDPPESQGPRTPPSPGICLRRRAPSSDSKDPLASGPPDSMAASPSPKKDVLSLSGLSSDPADLDP

SEQ ID NO: 26194 - protein, 1735 aa, Homo sapiens
MDEEEDGAGAEESGQPRSFMRLNDLSGAGGRPGPGSAEKDPGSADSEAEGLPYPALAPVVFFYLSQDSRPRSWCLRTVCNPWFERISMLVILLNCVTLGMFRPCEDIACDSQRCRILQAFDDFIFAFFAVEMVVKMVALGIFGKKCYLGDTWNRLDFFIVIAGMLEYSLDLQNVSFSAVRTVRVLRPLRAINRVPSMRILVTLLLDTLPMLGNVLLLCFFVFFIFGIVGVQLWAGLLRNRCFLPENFSLPLSVDLERYYQTENEDESPFICSQPRENGMRSCRSVPTLRGDGGGGPPCGLDYEAYNSSSNTTCVNWNQYYTNCSAGEHNPFKGAINFDNIGYAWIAIFQVITLEGWVDIMYFVMDAHSFYNFIYFILLIIVGSFFMINLCLVVIATQFSETKQRESQLMREQRVRFLSNASTLASFSEPGSCYEELLKYLVYILRKAARRLAQVSRAAGVRVGLLSSPAPLGGQETQPSSSCSRSHRRLSVHHLVHHHHHHHHHYHLGNGTLRAPRASPEIQDRDANGSRRLMLPPPSTPALSGAPPGGAESVHSFYHADCHLEPVRCQAPPPRSPSEASGRTVGSGKVYPTVHTSPPPETLKEKALVEVAASSGPPTLTSLNIPPGPYSSMHKLLETQSTGACQSSCKISSPCLKADSGACGPDSCPYCARAGAGEVELADREMPDSDSEAVYEFTQDAQHSDLRDPHSRRQRSLGPDAEPSSVLAFWRLICDTFRKIVDSKYFGRGIMIAILVNTLSMGIEYHEQPEELTNALEISNIVFTSLFALEMLLKLLVYGPFGYIKNPYNIFDGVIVVISVWEIVGQQGGGLSVLRTFRLMRVLKLVRFLPALQRQLVVLMKTMDNVATFCMLLMLFIFIFSILGMHLFGCKFASERDGDTLPDRKNFDSLLWAIVTVFQILTQEDWNKVLYNGMASTSSWAALYFIALMTFGNYVLFNLLVAILVEGFQAEGDANKSESEPDFFSPSLDGDGDRKKCLALVSLGEHPELRKSLLPPLIIHTAATPMSLPKSTSTGLGEALGPASRRTSSSGSAEPGAAHEMKSPPSARSSPHSPWSAASSWTSRRSSRNSLGRAPSLKRRSPSGERRSLLSGEGQESQDEEESSEEERASPAGSDHRHRGSLEREAKSSFDLPDTLQVPGLHRTASGRGSASEHQDCNGKSASGRLARALRPDDPPLDGDDADDEGNLSKGERVRAWIRARLPACCLERDSWSAYIFPPQSRFRLLCHRIITHKMFDHVVLVIIFLNCITIAMERPKIDPHSAERIFLTLSNYIFTAVFLAEMTVKVVALGWCFGEQAYLRSSWNVLDGLLVLISVIDILVSMVSDSGTKILGMLRVLRLLRTLRPLRVISRAQGLKLVVETLMSSLKPIGNIVVICCAFFIIFGILGVQLFKGKFFVCQGEDTRNITNKSDCAEASYRWVRHKYNFDNLGQALMSLFVLASKDGWVDIMYDGLDAVGVDQQPIMNHNPWMLLYFISFLLIVAFFVLNMFVGVVVENFHKCRQHQEEEEARRREEKRLRRLEKKRRKAQCKPYYSDYSRFRLLVHHLCTSHYLDLFITGVIGLNVVTMAMEHYQQPQILDEALKICNYIFTVIFVLESVFKLVAFGFRRFFQDRWNQLDLAIVLLSIMGITLEEIEVNASLPINPTIIRIMRVLRIARVLKLLKMAVGMRALLDTVMQALPQLWAWSSLETWSVTRHTPVRAWAVMPPFGTLAWPS

SEQ ID NO: 26195 - protein, 1746 aa, Homo sapiens
MDEEEDGAGAEESGQPRSFMRLNDLSGAGGRPGPGSAEKDPGSADSEAEGLPYPALAPVVFFYLSQDSRPRSWCLRTVCNPWFERISMLVILLNCVTLGMFRPCEDIACDSQRCRILQAFDDFIFAFFAVEMVVKMVALGIFGKKCYLGDTWNRLDFFIVIAGMLEYSLDLQNVSFSAVRTVRVLRPLRAINRVPSMRILVTLLLDTLPMLGNVLLLCFFVFFIFGIVGVQLWAGLLRNRCFLPENFSLPLSVDLERYYQTENEDESPFICSQPRENGMRSCRSVPTLRGDGGGGPPCGLDYEAYNSSSNTTCVNWNQYYTNCSAGEHNPFKGAINFDNIGYAWIAIFQVITLEGWVDIMYFVMDAHSFYNFIYFILLIIVGSFFMINLCLVVIATQFSETKQRESQLMREQRVRFLSNASTLASFSEPGSCYEELLKYLVYILRKAARRLAQVSRAAGVRVGLLSSPAPLGGQETQPSSSCSRSHRRLSVHHLVHHHHHHHHHYHLGNGTLRAPRASPEIQDRDANGSRRLMLPPPSTPALSGAPPGGAESVHSFYHADCHLEPVRCQAPPPRSPSEASGRTVGSGKVYPTVHTSPPPETLKEKALVEVAASSGPPTLTSLNIPPGPYSSMHKLLETQSTGACQSSCKISSPCLKADSGACGPDSCPYCARAGAGEVELADREMPDSDSEAVYEFTQDAQHSDLRDPHSRRQRSLGPDAEPSSVLAFWRLICDTFRKIVDSKYFGRGIMIAILVNTLSMGIEYHEQPEELTNALEISNIVFTSLFALEMLLKLLVYGPFGYIKNPYNIFDGVIVVISVWEIVGQQGGGLSVLRTFRLMRVLKLVRFLPALQRQLVVLMKTMDNVATFCMLLMLFIFIFSILGMHLFGCKFASERDGDTLPDRKNFDSLLWAIVTVFQILTQEDWNKVLYNGMASTSSWAALYFIALMTFGNYVLFNLLVAILVEGFQAEGDANKSESEPDFFSPSLDGDGDRKKCLALVSLGEHPELRKSLLPPLIIHTAATPMSLPKSTSTGLGEALGPASRRTSSSGSAEPGAAHEMKSPPSARSSPHSPWSAASSWTSRRSSRNSLGRAPSLKRRSPSGERRSLLSGEGQESQDEEESSEEERASPAGSDHRHRGSLEREAKSSFDLPDTLQVPGLHRTASGRGSASEHQDCNGKSASGRLARALRPDDPPLDGDDADDEGNLSKGERVRAWIRARLPACCLERDSWSAYIFPPQSRFRLLCHRIITHKMFDHVVLVIIFLNCITIAMERPKIDPHSAERIFLTLSNYIFTAVFLAEMTVKVVALGWCFGEQAYLRSSWNVLDGLLVLISVIDILVSMVSDSGTKILGMLRVLRLLRTLRPLRVISRAQGLKLVVETLMSSLKPIGNIVVICCAFFIIFGILGVQLFKGKFFVCQGEDTRNITNKSDCAEASYRWVRHKYNFDNLGQALMSLFVLASKDGWVDIMYDGLDAVGVDQQPIMNHNPWMLLYFISFLLIVAFFVLNMFVGVVVENFHKCRQHQEEEEARRREEKRLRRLEKKRRNLMLDDVIASGSSASAASEAQCKPYYSDYSRFRLLVHHLCTSHYLDLFITGVIGLNVVTMAMEHYQQPQILDEALKICNYIFTVIFVLESVFKLVAFGFRRFFQDRWNQLDLAIVLLSIMGITLEEIEVNASLPINPTIIRIMRVLRIARVLKLLKMAVGMRALLDTLWAWSSLETWSVTRHTPVRAWAVMPPFGTLAWPS

SEQ ID NO: 26196 - protein, 1753 aa, Homo sapiens
MDEEEDGAGAEESGQPRSFMRLNDLSGAGGRPGPGSAEKDPGSADSEAEGLPYPALAPVVFFYLSQDSRPRSWCLRTVCNPWFERISMLVILLNCVTLGMFRPCEDIACDSQRCRILQAFDDFIFAFFAVEMVVKMVALGIFGKKCYLGDTWNRLDFFIVIAGMLEYSLDLQNVSFSAVRTVRVLRPLRAINRVPSMRILVTLLLDTLPMLGNVLLLCFFVFFIFGIVGVQLWAGLLRNRCFLPENFSLPLSVDLERYYQTENEDESPFICSQPRENGMRSCRSVPTLRGDGGGGPPCGLDYEAYNSSSNTTCVNWNQYYTNCSAGEHNPFKGAINFDNIGYAWIAIFQVITLEGWVDIMYFVMDAHSFYNFIYFILLIIVGSFFMINLCLVVIATQFSETKQRESQLMREQRVRFLSNASTLASFSEPGSCYEELLKYLVYILRKAARRLAQVSRAAGVRVGLLSSPAPLGGQETQPSSSCSRSHRRLSVHHLVHHHHHHHHHYHLGNGTLRAPRASPEIQDRDANGSRRLMLPPPSTPALSGAPPGGAESVHSFYHADCHLEPVRCQAPPPRSPSEASGRTVGSGKVYPTVHTSPPPETLKEKALVEVAASSGPPTLTSLNIPPGPYSSMHKLLETQSTGACQSSCKISSPCLKADSGACGPDSCPYCARAGAGEVELADREMPDSDSEAVYEFTQDAQHSDLRDPHSRRQRSLGPDAEPSSVLAFWRLICDTFRKIVDSKYFGRGIMIAILVNTLSMGIEYHEQPEELTNALEISNIVFTSLFALEMLLKLLVYGPFGYIKNPYNIFDGVIVVISVWEIVGQQGGGLSVLRTFRLMRVLKLVRFLPALQRQLVVLMKTMDNVATFCMLLMLFIFIFSILGMHLFGCKFASERDGDTLPDRKNFDSLLWAIVTVFQILTQEDWNKVLYNGMASTSSWAALYFIALMTFGNYVLFNLLVAILVEGFQAEGDANKSESEPDFFSPSLDGDGDRKKCLALVSLGEHPELRKSLLPPLIIHTAATPMSLPKSTSTGLGEALGPASRRTSSSGSAEPGAAHEMKSPPSARSSPHSPWSAASSWTSRRSSRNSLGRAPSLKRRSPSGERRSLLSGEGQESQDEEESSEEERASPAGSDHRHRGSLEREAKSSFDLPDTLQVPGLHRTASGRGSASEHQDCNGKSASGRLARALRPDDPPLDGDDADDEGNLSKGERVRAWIRARLPACCLERDSWSAYIFPPQSRFRLLCHRIITHKMFDHVVLVIIFLNCITIAMERPKIDPHSAERIFLTLSNYIFTAVFLAEMTVKVVALGWCFGEQAYLRSSWNVLDGLLVLISVIDILVSMVSDSGTKILGMLRVLRLLRTLRPLRVISRAQGLKLVVETLMSSLKPIGNIVVICCAFFIIFGILGVQLFKGKFFVCQGEDTRNITNKSDCAEASYRWVRHKYNFDNLGQALMSLFVLASKDGWVDIMYDGLDAVGVDQQPIMNHNPWMLLYFISFLLIVAFFVLNMFVGVVVENFHKCRQHQEEEEARRREEKRLRRLEKKRRNLMLDDVIASGSSASAASEAQCKPYYSDYSRFRLLVHHLCTSHYLDLFITGVIGLNVVTMAMEHYQQPQILDEALKICNYIFTVIFVLESVFKLVAFGFRRFFQDRWNQLDLAIVLLSIMGITLEEIEVNASLPINPTIIRIMRVLRIARVLKLLKMAVGMRALLDTVMQALPQLWAWSSLETWSVTRHTPVRAWAVMPPFGTLAWPS

SEQ ID NO: 26197 - protein, 1758 aa, Homo sapiens
MDEEEDGAGAEESGQPRSFMRLNDLSGAGGRPGPGSAEKDPGSADSEAEGLPYPALAPVVFFYLSQDSRPRSWCLRTVCNPWFERISMLVILLNCVTLGMFRPCEDIACDSQRCRILQAFDDFIFAFFAVEMVVKMVALGIFGKKCYLGDTWNRLDFFIVIAGMLEYSLDLQNVSFSAVRTVRVLRPLRAINRVPSMRILVTLLLDTLPMLGNVLLLCFFVFFIFGIVGVQLWAGLLRNRCFLPENFSLPLSVDLERYYQTENEDESPFICSQPRENGMRSCRSVPTLRGDGGGGPPCGLDYEAYNSSSNTTCVNWNQYYTNCSAGEHNPFKGAINFDNIGYAWIAIFQVITLEGWVDIMYFVMDAHSFYNFIYFILLIIVGSFFMINLCLVVIATQFSETKQRESQLMREQRVRFLSNASTLASFSEPGSCYEELLKYLVYILRKAARRLAQVSRAAGVRVGLLSSPAPLGGQETQPSSSCSRSHRRLSVHHLVHHHHHHHHHYHLGNGTLRAPRASPEIQDRDANGSRRLMLPPPSTPALSGAPPGGAESVHSFYHADCHLEPVRCQAPPPRSPSEASGRTVGSGKVYPTVHTSPPPETLKEKALVEVAASSGPPTLTSLNIPPGPYSSMHKLLETQSTGACQSSCKISSPCLKADSGACGPDSCPYCARAGAGEVELADREMPDSDSEAVYEFTQDAQHSDLRDPHSRRQRSLGPDAEPSSVLAFWRLICDTFRKIVDSKYFGRGIMIAILVNTLSMGIEYHEQPEELTNALEISNIVFTSLFALEMLLKLLVYGPFGYIKNPYNIFDGVIVVISVWEIVGQQGGGLSVLRTFRLMRVLKLVRFLPALQRQLVVLMKTMDNVATFCMLLMLFIFIFSILGMHLFGCKFASERDGDTLPDRKNFDSLLWAIVTVFQILTQEDWNKVLYNGMASTSSWAALYFIALMTFGNYVLFNLLVAILVEGFQAEEISKREDASGQLSCIQLPVDSQGGDANKSESEPDFFSPSLDGDGDRKKCLALVSLGEHPELRKSLLPPLIIHTAATPMSLPKSTSTGLGEALGPASRRTSSSGSAEPGAAHEMKSPPSARSSPHSPWSAASSWTSRRSSRNSLGRAPSLKRRSPSGERRSLLSGEGQESQDEEESSEEERASPAGSDHRHRGSLEREAKSSFDLPDTLQVPGLHRTASGRGSASEHQDCNGKSASGRLARALRPDDPPLDGDDADDEGNLSKGERVRAWIRARLPACCLERDSWSAYIFPPQSRFRLLCHRIITHKMFDHVVLVIIFLNCITIAMERPKIDPHSAERIFLTLSNYIFTAVFLAEMTVKVVALGWCFGEQAYLRSSWNVLDGLLVLISVIDILVSMVSDSGTKILGMLRVLRLLRTLRPLRVISRAQGLKLVVETLMSSLKPIGNIVVICCAFFIIFGILGVQLFKGKFFVCQGEDTRNITNKSDCAEASYRWVRHKYNFDNLGQALMSLFVLASKDGWVDIMYDGLDAVGVDQQPIMNHNPWMLLYFISFLLIVAFFVLNMFVGVVVENFHKCRQHQEEEEARRREEKRLRRLEKKRRKAQCKPYYSDYSRFRLLVHHLCTSHYLDLFITGVIGLNVVTMAMEHYQQPQILDEALKICNYIFTVIFVLESVFKLVAFGFRRFFQDRWNQLDLAIVLLSIMGITLEEIEVNASLPINPTIIRIMRVLRIARVLKLLKMAVGMRALLDTVMQALPQLWAWSSLETWSVTRHTPVRAWAVMPPFGTLAWPS

SEQ ID NO: 26198 - protein, 1776 aa, Homo sapiens
MDEEEDGAGAEESGQPRSFMRLNDLSGAGGRPGPGSAEKDPGSADSEAEGLPYPALAPVVFFYLSQDSRPRSWCLRTVCNPWFERISMLVILLNCVTLGMFRPCEDIACDSQRCRILQAFDDFIFAFFAVEMVVKMVALGIFGKKCYLGDTWNRLDFFIVIAGMLEYSLDLQNVSFSAVRTVRVLRPLRAINRVPSMRILVTLLLDTLPMLGNVLLLCFFVFFIFGIVGVQLWAGLLRNRCFLPENFSLPLSVDLERYYQTENEDESPFICSQPRENGMRSCRSVPTLRGDGGGGPPCGLDYEAYNSSSNTTCVNWNQYYTNCSAGEHNPFKGAINFDNIGYAWIAIFQVITLEGWVDIMYFVMDAHSFYNFIYFILLIIVGSFFMINLCLVVIATQFSETKQRESQLMREQRVRFLSNASTLASFSEPGSCYEELLKYLVYILRKAARRLAQVSRAAGVRVGLLSSPAPLGGQETQPSSSCSRSHRRLSVHHLVHHHHHHHHHYHLGNGTLRAPRASPEIQDRDANGSRRLMLPPPSTPALSGAPPGGAESVHSFYHADCHLEPVRCQAPPPRSPSEASGRTVGSGKVYPTVHTSPPPETLKEKALVEVAASSGPPTLTSLNIPPGPYSSMHKLLETQSTGACQSSCKISSPCLKADSGACGPDSCPYCARAGAGEVELADREMPDSDSEAVYEFTQDAQHSDLRDPHSRRQRSLGPDAEPSSVLAFWRLICDTFRKIVDSKYFGRGIMIAILVNTLSMGIEYHEQPEELTNALEISNIVFTSLFALEMLLKLLVYGPFGYIKNPYNIFDGVIVVISVWEIVGQQGGGLSVLRTFRLMRVLKLVRFLPALQRQLVVLMKTMDNVATFCMLLMLFIFIFSILGMHLFGCKFASERDGDTLPDRKNFDSLLWAIVTVFQILTQEDWNKVLYNGMASTSSWAALYFIALMTFGNYVLFNLLVAILVEGFQAEEISKREDASGQLSCIQLPVDSQGGDANKSESEPDFFSPSLDGDGDRKKCLALVSLGEHPELRKSLLPPLIIHTAATPMSLPKSTSTGLGEALGPASRRTSSSGSAEPGAAHEMKSPPSARSSPHSPWSAASSWTSRRSSRNSLGRAPSLKRRSPSGERRSLLSGEGQESQDEEESSEEERASPAGSDHRHRGSLEREAKSSFDLPDTLQVPGLHRTASGRGSASEHQDCNGKSASGRLARALRPDDPPLDGDDADDEGNLSKGERVRAWIRARLPACCLERDSWSAYIFPPQSRFRLLCHRIITHKMFDHVVLVIIFLNCITIAMERPKIDPHSAERIFLTLSNYIFTAVFLAEMTVKVVALGWCFGEQAYLRSSWNVLDGLLVLISVIDILVSMVSDSGTKILGMLRVLRLLRTLRPLRVISRAQGLKLVVETLMSSLKPIGNIVVICCAFFIIFGILGVQLFKGKFFVCQGEDTRNITNKSDCAEASYRWVRHKYNFDNLGQALMSLFVLASKDGWVDIMYDGLDAVGVDQQPIMNHNPWMLLYFISFLLIVAFFVLNMFVGVVVENFHKCRQHQEEEEARRREEKRLRRLEKKRRNLMLDDVIASGSSASAASEAQCKPYYSDYSRFRLLVHHLCTSHYLDLFITGVIGLNVVTMAMEHYQQPQILDEALKICNYIFTVIFVLESVFKLVAFGFRRFFQDRWNQLDLAIVLLSIMGITLEEIEVNASLPINPTIIRIMRVLRIARVLKLLKMAVGMRALLDTVMQALPQLWAWSSLETWSVTRHTPVRAWAVMPPFGTLAWPS

SEQ ID NO: 26199 - protein, 1765 aa, Homo sapiens
MDEEEDGAGAEESGQPRSFMRLNDLSGAGGRPGPGSAEKDPGSADSEAEGLPYPALAPVVFFYLSQDSRPRSWCLRTVCNPWFERISMLVILLNCVTLGMFRPCEDIACDSQRCRILQAFDDFIFAFFAVEMVVKMVALGIFGKKCYLGDTWNRLDFFIVIAGMLEYSLDLQNVSFSAVRTVRVLRPLRAINRVPSMRILVTLLLDTLPMLGNVLLLCFFVFFIFGIVGVQLWAGLLRNRCFLPENFSLPLSVDLERYYQTENEDESPFICSQPRENGMRSCRSVPTLRGDGGGGPPCGLDYEAYNSSSNTTCVNWNQYYTNCSAGEHNPFKGAINFDNIGYAWIAIFQVITLEGWVDIMYFVMDAHSFYNFIYFILLIIVGSFFMINLCLVVIATQFSETKQRESQLMREQRVRFLSNASTLASFSEPGSCYEELLKYLVYILRKAARRLAQVSRAAGVRVGLLSSPAPLGGQETQPSSSCSRSHRRLSVHHLVHHHHHHHHHYHLGNGTLRAPRASPEIQDRDANGSRRLMLPPPSTPALSGAPPGGAESVHSFYHADCHLEPVRCQAPPPRSPSEASGRTVGSGKVYPTVHTSPPPETLKEKALVEVAASSGPPTLTSLNIPPGPYSSMHKLLETQSTGACQSSCKISSPCLKADSGACGPDSCPYCARAGAGEVELADREMPDSDSEAVYEFTQDAQHSDLRDPHSRRQRSLGPDAEPSSVLAFWRLICDTFRKIVDSKYFGRGIMIAILVNTLSMGIEYHEQPEELTNALEISNIVFTSLFALEMLLKLLVYGPFGYIKNPYNIFDGVIVVISVWEIVGQQGGGLSVLRTFRLMRVLKLVRFLPALQRQLVVLMKTMDNVATFCMLLMLFIFIFSILGMHLFGCKFASERDGDTLPDRKNFDSLLWAIVTVFQILTQEDWNKVLYNGMASTSSWAALYFIALMTFGNYVLFNLLVAILVEGFQAEEISKREDASGQLSCIQLPVDSQGGDANKSESEPDFFSPSLDGDGDRKKCLALVSLGEHPELRKSLLPPLIIHTAATPMSLPKSTSTGLGEALGPASRRTSSSGSAEPGAAHEMKSPPSARSSPHSPWSAASSWTSRRSSRNSLGRAPSLKRRSPSGERRSLLSGEGQESQDEEESSEEERASPAGSDHRHRGSLEREAKSSFDLPDTLQVPGLHRTASGRGSASEHQDCNGKSASGRLARALRPDDPPLDGDDADDEGNLSKGERVRAWIRARLPACCLERDSWSAYIFPPQSRFRLLCHRIITHKMFDHVVLVIIFLNCITIAMERPKIDPHSAERIFLTLSNYIFTAVFLAEMTVKVVALGWCFGEQAYLRSSWNVLDGLLVLISVIDILVSMVSDSGTKILGMLRVLRLLRTLRPLRVISRAQGLKLVVETLMSSLKPIGNIVVICCAFFIIFGILGVQLFKGKFFVCQGEDTRNITNKSDCAEASYRWVRHKYNFDNLGQALMSLFVLASKDGWVDIMYDGLDAVGVDQQPIMNHNPWMLLYFISFLLIVAFFVLNMFVGVVVENFHKCRQHQEEEEARRREEKRLRRLEKKRRSKEKQMAEAQCKPYYSDYSRFRLLVHHLCTSHYLDLFITGVIGLNVVTMAMEHYQQPQILDEALKICNYIFTVIFVLESVFKLVAFGFRRFFQDRWNQLDLAIVLLSIMGITLEEIEVNASLPINPTIIRIMRVLRIARVLKLLKMAVGMRALLDTVMQALPQLWAWSSLETWSVTRHTPVRAWAVMPPFGTLAWPS

SEQ ID NO: 26200 - protein, 2343 aa, Homo sapiens
MDEEEDGAGAEESGQPRSFMRLNDLSGAGGRPGPGSAEKDPGSADSEAEGLPYPALAPVVFFYLSQDSRPRSWCLRTVCNPWFERISMLVILLNCVTLGMFRPCEDIACDSQRCRILQAFDDFIFAFFAVEMVVKMVALGIFGKKCYLGDTWNRLDFFIVIAGMLEYSLDLQNVSFSAVRTVRVLRPLRAINRVPSMRILVTLLLDTLPMLGNVLLLCFFVFFIFGIVGVQLWAGLLRNRCFLPENFSLPLSVDLERYYQTENEDESPFICSQPRENGMRSCRSVPTLRGDGGGGPPCGLDYEAYNSSSNTTCVNWNQYYTNCSAGEHNPFKGAINFDNIGYAWIAIFQVITLEGWVDIMYFVMDAHSFYNFIYFILLIIVGSFFMINLCLVVIATQFSETKQRESQLMREQRVRFLSNASTLASFSEPGSCYEELLKYLVYILRKAARRLAQVSRAAGVRVGLLSSPAPLGGQETQPSSSCSRSHRRLSVHHLVHHHHHHHHHYHLGNGTLRAPRASPEIQDRDANGSRRLMLPPPSTPALSGAPPGGAESVHSFYHADCHLEPVRCQAPPPRSPSEASGRTVGSGKVYPTVHTSPPPETLKEKALVEVAASSGPPTLTSLNIPPGPYSSMHKLLETQSTGACQSSCKISSPCLKADSGACGPDSCPYCARAGAGEVELADREMPDSDSEAVYEFTQDAQHSDLRDPHSRRQRSLGPDAEPSSVLAFWRLICDTFRKIVDSKYFGRGIMIAILVNTLSMGIEYHEQPEELTNALEISNIVFTSLFALEMLLKLLVYGPFGYIKNPYNIFDGVIVVISVWEIVGQQGGGLSVLRTFRLMRVLKLVRFLPALQRQLVVLMKTMDNVATFCMLLMLFIFIFSILGMHLFGCKFASERDGDTLPDRKNFDSLLWAIVTVFQILTQEDWNKVLYNGMASTSSWAALYFIALMTFGNYVLFNLLVAILVEGFQAEGDANKSESEPDFFSPSLDGDGDRKKCLALVSLGEHPELRKSLLPPLIIHTAATPMSLPKSTSTGLGEALGPASRRTSSSGSAEPGAAHEMKSPPSARSSPHSPWSAASSWTSRRSSRNSLGRAPSLKRRSPSGERRSLLSGEGQESQDEEESSEEERASPAGSDHRHRGSLEREAKSSFDLPDTLQVPGLHRTASGRGSASEHQDCNGKSASGRLARALRPDDPPLDGDDADDEGNLSKGERVRAWIRARLPACCLERDSWSAYIFPPQSRFRLLCHRIITHKMFDHVVLVIIFLNCITIAMERPKIDPHSAERIFLTLSNYIFTAVFLAEMTVKVVALGWCFGEQAYLRSSWNVLDGLLVLISVIDILVSMVSDSGTKILGMLRVLRLLRTLRPLRVISRAQGLKLVVETLMSSLKPIGNIVVICCAFFIIFGILGVQLFKGKFFVCQGEDTRNITNKSDCAEASYRWVRHKYNFDNLGQALMSLFVLASKDGWVDIMYDGLDAVGVDQQPIMNHNPWMLLYFISFLLIVAFFVLNMFVGVVVENFHKCRQHQEEEEARRREEKRLRRLEKKRRSKEKQMAEAQCKPYYSDYSRFRLLVHHLCTSHYLDLFITGVIGLNVVTMAMEHYQQPQILDEALKICNYIFTVIFVLESVFKLVAFGFRRFFQDRWNQLDLAIVLLSIMGITLEEIEVNASLPINPTIIRIMRVLRIARVLKLLKMAVGMRALLDTVMQALPQVGNLGLLFMLLFFIFAALGVELFGDLECDETHPCEGLGRHATFRNFGMAFLTLFRVSTGDNWNGIMKDTLRDCDQESTCYNTVISPIYFVSFVLTAQFVLVNVVIAVLMKHLEESNKEAKEEAELEAELELEMKTLSPQPHSPLGSPFLWPGVEGPDSPDSPKPGALHPAAHARSASHFSLEHPTDRQLFDTISLLIQGSLEWELKLMDELAGPGGQPSAFPSAPSLGGSDPQIPLAEMEALSLTSEIVSEPSCSLALTDDSLPDDMHTLLLSALESNMQPHPTELPGPDLLTVRKSGVSRTHSLPNDSYMCRHGSTAEGPLGHRGWGLPKAQSGSVLSVHSQPADTSYILQLPKDAPHLLQPHSAPTWGTIPKLPPPGRSPLAQRPLRRQAAIRTDSLDVQGLGSREDLLAEVSGPSPPLARAYSFWGQSSTQAQQHSRSHSKISKHMTPPAPCPGPEPNWGKGPPETRSSLELDTELSWISGDLLPPGGQEEPPSPRDLKKCYSVEAQSCQRRPTSWLDEQRRHSIAVSCLDSGSQPHLGTDPSNLGGQPLGGPGSRPKKKLSPPSITIDPPESQGPRTPPSPGICLRRRAPSSDSKDPLASGPPDSMAASPSPKKDVLSLSGLSSDPADLDP

SEQ ID NO: 26201 - protein, 2257 aa, Homo sapiens
MDEEEDGAGAEESGQPRSFMRLNDLSGAGGRPGPGSAEKDPGSADSEAEGLPYPALAPVVFFYLSQDSRPRSWCLRTVCNPWFERISMLVILLNCVTLGMFRPCEDIACDSQRCRILQAFDDFIFAFFAVEMVVKMVALGIFGKKCYLGDTWNRLDFFIVIAGMLEYSLDLQNVSFSAVRTVRVLRPLRAINRVPSMRILVTLLLDTLPMLGNVLLLCFFVFFIFGIVGVQLWAGLLRNRCFLPENFSLPLSVDLERYYQTENEDESPFICSQPRENGMRSCRSVPTLRGDGGGGPPCGLDYEAYNSSSNTTCVNWNQYYTNCSAGEHNPFKGAINFDNIGYAWIAIFQVITLEGWVDIMYFVMDAHSFYNFIYFILLIIVGSFFMINLCLVVIATQFSETKQRESQLMREQRVRFLSNASTLASFSEPGSCYEELLKYLVYILRKAARRLAQVSRAAGVRVGLLSSPAPLGGQETQPSSSCSRSHRRLSVHHLVHHHHHHHHHYHLGNGTLRAPRASPEIQDRDANGSRRLMLPPPSTPALSGAPPGGAESVHSFYHADCHLEPVRCQAPPPRSPSEASGRTVGSGKVYPTVHTSPPPETLKEKALVEVAASSGPPTLTSLNIPPGPYSSMHKLLETQSTGACQSSCKISSPCLKADSGACGPDSCPYCARAGAGEVELADREMPDSDSEAVYEFTQDAQHSDLRDPHSRRQRSLGPDAEPSSVLAFWRLICDTFRKIVDSKYFGRGIMIAILVNTLSMGIEYHEQPEELTNALEISNIVFTSLFALEMLLKLLVYGPFGYIKNPYNIFDGVIVVISVWEIVGQQGGGLSVLRTFRLMRVLKLVRFLPALQRQLVVLMKTMDNVATFCMLLMLFIFIFSILGMHLFGCKFASERDGDTLPDRKNFDSLLWAIVTVFQILTQEDWNKVLYNGMASTSSWAALYFIALMTFGNYVLFNLLVAILVEGFQAEEISKREDASGQLSCIQLPVDSQGGDANKSESEPDFFSPSLDGDGDRKKCLALVSLGEHPELRKSLLPPLIIHTAATPMSLPKSTSTGLGEALGPASRRTSSSGSAEPGAAHEMKSPPSARSSPHSPWSAASSWTSRRSSRNSLGRAPSLKRRSPSGERRSLLSGEGQESQDEEESSEEERASPAGSDHRHRGSLEREAKSSFDLPDTLQVPGLHRTASGRGSASEHQDCNGKSASGRLARALRPDDPPLDGDDADDEGNLSKGERVRAWIRARLPACCLERDSWSAYIFPPQSRFRLLCHRIITHKMFDHVVLVIIFLNCITIAMERPKIDPHSAERIFLTLSNYIFTAVFLAEMTVKVVALGWCFGEQAYLRSSWNVLDGLLVLISVIDILVSMVSDSGTKILGMLRVLRLLRTLRPLRVISRAQGLKLVVETLMSSLKPIGNIVVICCAFFIIFGILGVQLFKGKFFVCQGEDTRNITNKSDCAEASYRWVRHKYNFDNLGQALMSLFVLASKDGWVDIMYDGLDAVGVDQQFVGVVVENFHKCRQHQEEEEARRREEKRLRRLEKKRRNLMLDDVIASGSSASAASEAQCKPYYSDYSRFRLLVHHLCTSHYLDLFITGVIGLNVVTMAMEHYQQPQILDEALKICNYIFTVIFVLESVFKLVAFGFRRFFQDRWNQLDLAIVLLSIMGITLEEIEVNASLPINPTIIRIMRVLRIARVLKLLKMAVGMRALLDTVMQALPQVGNLGLLFMLLFFIFAALGVELFGDLECDETHPCEGLGRHATFRNFGMAFLTLFRVSTGDNWNGIMKDTLRDCDQESTCYNTVISPIYFVSFVLTAQFVLVNVVIAVLMKHLEESNKEAKEEAELEAELELEMKTLSPQPHSPLGSPFLWPGVEGPDSPDSPKPGALHPAAHARSASHFSLEHPTMQPHPTELPGPDLLTVRKSGVSRTHSLPNDSYMCRHGSTAEGPLGHRGWGLPKAQSGSVLSVHSQPADTSYILQLPKDAPHLLQPHSAPTWGTIPKLPPPGRSPLAQRPLRRQAAIRTDSLDVQGLGSREDLLAEVSGPSPPLARAYSFWGQSSTQAQQHSRSHSKISKHMTPPAPCPGPEPNWGKGPPETRSSLELDTELSWISGDLLPPGGQEEPPSPRDLKKCYSVEAQSCQRRPTSWLDEQRRHSIAVSCLDSGSQPHLGTDPSNLGGQPLGGPGSRPKKKLSPPSITIDPPESQGPRTPPSPGICLRRRAPSSDSKDPLASGPPDSMAASPSPKKDVLSLSGLSSDPADLDP

SEQ ID NO: 26202 - protein, 2248 aa, Homo sapiens
MDEEEDGAGAEESGQPRSFMRLNDLSGAGGRPGPGSAEKDPGSADSEAEGLPYPALAPVVFFYLSQDSRPRSWCLRTVCNPWFERISMLVILLNCVTLGMFRPCEDIACDSQRCRILQAFDDFIFAFFAVEMVVKMVALGIFGKKCYLGDTWNRLDFFIVIAGMLEYSLDLQNVSFSAVRTVRVLRPLRAINRVPSMRILVTLLLDTLPMLGNVLLLCFFVFFIFGIVGVQLWAGLLRNRCFLPENFSLPLSVDLERYYQTENEDESPFICSQPRENGMRSCRSVPTLRGDGGGGPPCGLDYEAYNSSSNTTCVNWNQYYTNCSAGEHNPFKGAINFDNIGYAWIAIFQVITLEGWVDIMYFVMDAHSFYNFIYFILLIIVGSFFMINLCLVVIATQFSETKQRESQLMREQRVRFLSNASTLASFSEPGSCYEELLKYLVYILRKAARRLAQVSRAAGVRVGLLSSPAPLGGQETQPSSSCSRSHRRLSVHHLVHHHHHHHHHYHLGNGTLRAPRASPEIQDRDANGSRRLMLPPPSTPALSGAPPGGAESVHSFYHADCHLEPVRCQAPPPRSPSEASGRTVGSGKVYPTVHTSPPPETLKEKALVEVAASSGPPTLTSLNIPPGPYSSMHKLLETQSTGACQSSCKISSPCLKADSGACGPDSCPYCARAGAGEVELADREMPDSDSEAVYEFTQDAQHSDLRDPHSRRQRSLGPDAEPSSVLAFWRLICDTFRKIVDSKYFGRGIMIAILVNTLSMGIEYHEQPEELTNALEISNIVFTSLFALEMLLKLLVYGPFGYIKNPYNIFDGVIVVISVWEIVGQQGGGLSVLRTFRLMRVLKLVRFLPALQRQLVVLMKTMDNVATFCMLLMLFIFIFSILGMHLFGCKFASERDGDTLPDRKNFDSLLWAIVTVFQILTQEDWNKVLYNGMASTSSWAALYFIALMTFGNYVLFNLLVAILVEGFQAEEISKREDASGQLSCIQLPVDSQGGDANKSESEPDFFSPSLDGDGDRKKCLALVSLGEHPELRKSLLPPLIIHTAATPMSLPKSTSTGLGEALGPASRRTSSSGSAEPGAAHEMKSPPSARSSPHSPWSAASSWTSRRSSRNSLGRAPSLKRRSPSGERRSLLSGEGQESQDEEESSEEERASPAGSDHRHRGSLEREAKSSFDLPDTLQVPGLHRTASGRGSASEHQDCNGKSASGRLARALRPDDPPLDGDDADDEGNLSKGERVRAWIRARLPACCLERDSWSAYIFPPQSRFRLLCHRIITHKMFDHVVLVIIFLNCITIAMERPKIDPHSAERIFLTLSNYIFTAVFLAEMTVKVVALGWCFGEQAYLRSSWNVLDGLLVLISVIDILVSMVSDSGTKILGMLRVLRLLRTLRPLRVISRAQGLKLVVETLMSSLKPIGNIVVICCAFFIIFGILGVQLFKGKFFVCQGEDTRNITNKSDCAEASYRWVRHKYNFDNLGQALMSLFVLASKDGWVDIMYDGLDAVGVDQQNMFVGVVVENFHKCRQHQEEEEARRREEKRLRRLEKKRRSKEKQMAEAQCKPYYSDYSRFRLLVHHLCTSHYLDLFITGVIGLNVVTMAMEHYQQPQILDEALKICNYIFTVIFVLESVFKLVAFGFRRFFQDRWNQLDLAIVLLSIMGITLEEIEVNASLPINPTIIRIMRVLRIARVLKLLKMAVGMRALLDTVMQALPQVGNLGLLFMLLFFIFAALGVELFGDLECDETHPCEGLGRHATFRNFGMAFLTLFRVSTGDNWNGIMKDTLRDCDQESTCYNTVISPIYFVSFVLTAQFVLVNVVIAVLMKHLEESNKEAKEEAELEAELELEMKTLSPQPHSPLGSPFLWPGVEGPDSPDSPKPGALHPAAHARSASHFSLEHPTMQPHPTELPGPDLLTVRKSGVSRTHSLPNDSYMCRHGSTAEGPLGHRGWGLPKAQSGSVLSVHSQPADTSYILQLPKDAPHLLQPHSAPTWGTIPKLPPPGRSPLAQRPLRRQAAIRTDSLDVQGLGSREDLLAEVSGPSPPLARAYSFWGQSSTQAQQHSRSHSKISKHMTPPAPCPGPEPNWGKGPPETRSSLELDTELSWISGDLLPPGGQEEPPSPRDLKKCYSVEAQSCQRRPTSWLDEQRRHSIAVSCLDSGSQPHLGTDPSNLGGQPLGGPGSRPKKKLSPPSITIDPPESQGPRTPPSPGICLRRRAPSSDSKDPLASGPPDSMAASPSPKKDVLSLSGLSSDPADLDP

SEQ ID NO: 26203 - protein, 2246 aa, Homo sapiens
MDEEEDGAGAEESGQPRSFMRLNDLSGAGGRPGPGSAEKDPGSADSEAEGLPYPALAPVVFFYLSQDSRPRSWCLRTVCNPWFERISMLVILLNCVTLGMFRPCEDIACDSQRCRILQAFDDFIFAFFAVEMVVKMVALGIFGKKCYLGDTWNRLDFFIVIAGMLEYSLDLQNVSFSAVRTVRVLRPLRAINRVPSMRILVTLLLDTLPMLGNVLLLCFFVFFIFGIVGVQLWAGLLRNRCFLPENFSLPLSVDLERYYQTENEDESPFICSQPRENGMRSCRSVPTLRGDGGGGPPCGLDYEAYNSSSNTTCVNWNQYYTNCSAGEHNPFKGAINFDNIGYAWIAIFQVITLEGWVDIMYFVMDAHSFYNFIYFILLIIVGSFFMINLCLVVIATQFSETKQRESQLMREQRVRFLSNASTLASFSEPGSCYEELLKYLVYILRKAARRLAQVSRAAGVRVGLLSSPAPLGGQETQPSSSCSRSHRRLSVHHLVHHHHHHHHHYHLGNGTLRAPRASPEIQDRDANGSRRLMLPPPSTPALSGAPPGGAESVHSFYHADCHLEPVRCQAPPPRSPSEASGRTVGSGKVYPTVHTSPPPETLKEKALVEVAASSGPPTLTSLNIPPGPYSSMHKLLETQSTGACQSSCKISSPCLKADSGACGPDSCPYCARAGAGEVELADREMPDSDSEAVYEFTQDAQHSDLRDPHSRRQRSLGPDAEPSSVLAFWRLICDTFRKIVDSKYFGRGIMIAILVNTLSMGIEYHEQPEELTNALEISNIVFTSLFALEMLLKLLVYGPFGYIKNPYNIFDGVIVVISVWEIVGQQGGGLSVLRTFRLMRVLKLVRFLPALQRQLVVLMKTMDNVATFCMLLMLFIFIFSILGMHLFGCKFASERDGDTLPDRKNFDSLLWAIVTVFQILTQEDWNKVLYNGMASTSSWAALYFIALMTFGNYVLFNLLVAILVEGFQAEEISKREDASGQLSCIQLPVDSQGGDANKSESEPDFFSPSLDGDGDRKKCLALVSLGEHPELRKSLLPPLIIHTAATPMSLPKSTSTGLGEALGPASRRTSSSGSAEPGAAHEMKSPPSARSSPHSPWSAASSWTSRRSSRNSLGRAPSLKRRSPSGERRSLLSGEGQESQDEEESSEEERASPAGSDHRHRGSLEREAKSSFDLPDTLQVPGLHRTASGRGSASEHQDCNGKSASGRLARALRPDDPPLDGDDADDEGNLSKGERVRAWIRARLPACCLERDSWSAYIFPPQSRFRLLCHRIITHKMFDHVVLVIIFLNCITIAMERPKIDPHSAERIFLTLSNYIFTAVFLAEMTVKVVALGWCFGEQAYLRSSWNVLDGLLVLISVIDILVSMVSDSGTKILGMLRVLRLLRTLRPLRVISRAQGLKLVVETLMSSLKPIGNIVVICCAFFIIFGILGVQLFKGKFFVCQGEDTRNITNKSDCAEASYRWVRHKYNFDNLGQALMSLFVLASKDGWVDIMYDGLDAVGVDQQFVGVVVENFHKCRQHQEEEEARRREEKRLRRLEKKRRSKEKQMAEAQCKPYYSDYSRFRLLVHHLCTSHYLDLFITGVIGLNVVTMAMEHYQQPQILDEALKICNYIFTVIFVLESVFKLVAFGFRRFFQDRWNQLDLAIVLLSIMGITLEEIEVNASLPINPTIIRIMRVLRIARVLKLLKMAVGMRALLDTVMQALPQVGNLGLLFMLLFFIFAALGVELFGDLECDETHPCEGLGRHATFRNFGMAFLTLFRVSTGDNWNGIMKDTLRDCDQESTCYNTVISPIYFVSFVLTAQFVLVNVVIAVLMKHLEESNKEAKEEAELEAELELEMKTLSPQPHSPLGSPFLWPGVEGPDSPDSPKPGALHPAAHARSASHFSLEHPTMQPHPTELPGPDLLTVRKSGVSRTHSLPNDSYMCRHGSTAEGPLGHRGWGLPKAQSGSVLSVHSQPADTSYILQLPKDAPHLLQPHSAPTWGTIPKLPPPGRSPLAQRPLRRQAAIRTDSLDVQGLGSREDLLAEVSGPSPPLARAYSFWGQSSTQAQQHSRSHSKISKHMTPPAPCPGPEPNWGKGPPETRSSLELDTELSWISGDLLPPGGQEEPPSPRDLKKCYSVEAQSCQRRPTSWLDEQRRHSIAVSCLDSGSQPHLGTDPSNLGGQPLGGPGSRPKKKLSPPSITIDPPESQGPRTPPSPGICLRRRAPSSDSKDPLASGPPDSMAASPSPKKDVLSLSGLSSDPADLDP

SEQ ID NO: 26204 - protein, 314 aa, Homo sapiens
MCPTLNNIVSSLQRNGIFINSLIAALTIGGQQLFSSSTFSCPCQVGKNFYYGSAFLVIPALILLVAGFALRSQMWTITGEYCCSCAPPYRRISPLECKLACLRFFSITGRAVIAPLTWLAVTLLTGTYYECAASEFASVDHYPMFDNVSASKREEILAGFPCCRSAPSDVILVRDEIALLHRYQSQMLGWILITLATIAALVSCCVAKCCSPLTSLQHCYWTSHLQNERELFEQAAEQHSRLLMMHRIKKLFGFIPGSEDVKHIRIPSCQDWKDISVPTLLCMGDDLQGHYSFLGNRVDEDNEEDRSRGIELKP

SEQ ID NO: 26205 - protein, 128 aa, Homo sapiens
MLGWILITLATIAALVSCCVAKCCSPLTSLQHCYWTSHLQNERELFEQAAEQHSRLLMMHRIKKLFGFIPGSEDVKHIRIPSCQDWKDISVPTLLCMGDDLQGHYSFLGNRVDEDNEEDRSRGIELKP

SEQ ID NO: 26206 - protein, 171 aa, Homo sapiens
MFDNVSASKREEILAGFPCCRSAPSDVILVRDEIALLHRYQSQMLGWILITLATIAALVSCCVAKCCSPLTSLQHCYWTSHLQNERELFEQAAEQHSRLLMMHRIKKLFGFIPGSEDVKHIRIPSCQDWKDISVPTLLCMGDDLQGHYSFLGNRVDEDNEEDRSRGIELKP

SEQ ID NO: 26207 - protein, 170 aa, Homo sapiens
MAPRSAKETFRINPNVAANLSAPSDVILVRDEIALLHRYQSQMLGWILITLATIAALVSCCVAKCCSPLTSLQHCYWTSHLQNERELFEQAAEQHSRLLMMHRIKKLFGFIPGSEDVKHIRIPSCQDWKDISVPTLLCMGDDLQGHYSFLGNRVDEDNEEDRSRGIELKP

SEQ ID NO: 26208 - protein, 253 aa, Homo sapiens
MGEFNEKKTTCGTVCLKYLLFTYNCCFWLAGLAVMAVGIWTLALKSDYISLLASGTYLATAYILVVAGTVVMVTGVLGCCATFKERRNLLRLYFILLLIIFLLEIIAGILAYAYYQQLNTELKENLKDTMTKRYHQPGHEAVTSAVDQLQQEFHCCGSNNSQDWRDSEWIRSQEAGGRVVPDSCCKTVVALCGQRDHASNIYKVEGGCITKLETFIQEHLRVIGAVGIGIACVQVFGMIFTCCLYRSLKLEHY

SEQ ID NO: 26209 - protein, 275 aa, Homo sapiens
MRRSRSSAAAKLRGQKRSGASGASAAPAASAAAALAPSATRTRRSASQAGSKSQAVEKPPSEKPRLRRSSPRAQEEGPGEPPPPELALLPPPPPPPPTPATPTSSASNLDLGEQRERWETFQKRQKLTSEGAAKLLLDTFEYQGLVKHTGGCHCGAVRFEVWASADLHIFDCNCSICKKKQNRHFIVPASRFKLLKGAEHITTYTFNTHKAQHTFCKRCGVQSFYTPRSNPGGFGIAPHCLDEGTVRSMVTEEFNGSDWEKAMKEHKTIKNMSKE

SEQ ID NO: 26210 - protein, 118 aa, Homo sapiens
MQVAAHNLEFALSFCSCSICKKKQNRHFIVPASRFKLLKGAEHITTYTFNTHKAQHTFCKRCGVQSFYTPRSNPGGFGIAPHCLDEGTVRSMVTEEFNGSDWEKAMKEHKTIKNMSKE

SEQ ID NO: 26211 - protein, 272 aa, Homo sapiens
MRRSRSSAAAKLRGQKRSGASAAPAASAAAALAPSATRTRRSASQAGSKSQAVEKPPSEKPRLRRSSPRAQEEGPGEPPPPELALLPPPPPPPPTPATPTSSASNLDLGEQRERWETFQKRQKLTSEGAAKLLLDTFEYQGLVKHTGGCHCGAVRFEVWASADLHIFDCNCSICKKKQNRHFIVPASRFKLLKGAEHITTYTFNTHKAQHTFCKRCGVQSFYTPRSNPGGFGIAPHCLDEGTVRSMVTEEFNGSDWEKAMKEHKTIKNMSKE

SEQ ID NO: 26212 - protein, 292 aa, Homo sapiens
MQKYEKLEKIGEGTYGTVFKAKNRETHEIVALKRVRLDDDDEGVPSSALREICLLKELKHKNIVRLHDVLHSDKKLTLVFEFCDQDLKKYFDSCNGDLDPEIVKSFLFQLLKGLGFCHSRNVLHRDLKPQNLLINRNGELKLADFGLARAFGIPVRCYSAEVVTLWYRPPDVLFGAKLYSTSIDMWSAGCIFAELANAGRPLFPGNDVDDQLKRIFRLLGTPTEEQWPSMTKLPDYKPYPMYPATTSLVNVVPKLNATGRDLLQNLLKCNPVQRISAEEALQHPYFSDFCPP

SEQ ID NO: 26213 - protein, 260 aa, Homo sapiens
MQKYEKLEKIGEGTYGTVFKAKNRETHEIVALKRVRLDDDDEGVPSSALREICLLKELKHKNIVRLHDVLHSDKKLTLVFEFCDQDLKKYFDSCNGDLDPEIVKNGELKLADFGLARAFGIPVRCYSAEVVTLWYRPPDVLFGAKLYSTSIDMWSAGCIFAELANAGRPLFPGNDVDDQLKRIFRLLGTPTEEQWPSMTKLPDYKPYPMYPATTSLVNVVPKLNATGRDLLQNLLKCNPVQRISAEEALQHPYFSDFCPP

SEQ ID NO: 26214 - protein, 276 aa, Homo sapiens
MLRDSEAEVTEEDPRLRAQQLHHRVLTLQCQLRDQGAAHQASLDEATRLQEELQAKLEELQKKQHEAKLAVTPLKAKIASLVRKCRERNRLITHLLQELHRHGLGNLLLSELAQNMLNDVALAEYTATFLAPGVPETSHHLDVKSEMTAALRAQTYLLNPEMDSVLQSSLSSESWPIPEPEWPAQTAQLDSLKLPLSLVSTLDPGTCLAAVTVEPGLPAQRLQEKGGMPCPALQVDNVPAPSELLSPARILAFHQELRQSICSNSQVHKSPLELEM

SEQ ID NO: 26215 - protein, 370 aa, Homo sapiens
MLGQVVTLILLLLLKVYQGKGCQGSADHVVSISGVPLQLQPNSIQTKVDSIAWKKLLPSQNGFHHILKWENGSLPSNTSNDRFSFIVKNLSLLIKAAQQQDSGLYCLEVTSISGKVQTATFQVFVFESLLPDKVEKPRLQGQGKILDRGRCQVALSCLVSRDGNVSYAWYRGSKLIQTAGNLTYLDEEVDINGTHTYTCNVSNPVSWESHTLNLTQDCQNAHQEFRFWPFLVIIVILSALFLGTLACFCVWRRKRKEKQSETSPKEFLTIYEDVKDLKTRRNHEQEQTFPGGGSTIYSMIQSQSSAPTSQEPAYTLYSLIQPSRKSGSRKRNHSPSFNSTIYEVIGKSQPKAQNPARLSRKELENFDVYS

SEQ ID NO: 26216 - protein, 365 aa, Homo sapiens
MLGQVVTLILLLLLKVYQGKGCQGSADHVVSISGVPLQLQPNSIQTKVDSIAWKKLLPSQNGFHHILKWENGSLPSNTSNDRFSFIVKNLSLLIKAAQQQDSGLYCLEVTSISGKVQTATFQVFVFDKVEKPRLQGQGKILDRGRCQVALSCLVSRDGNVSYAWYRGSKLIQTAGNLTYLDEEVDINGTHTYTCNVSNPVSWESHTLNLTQDCQNAHQEFRFWPFLVIIVILSALFLGTLACFCVWRRKRKEKQSETSPKEFLTIYEDVKDLKTRRNHEQEQTFPGGGSTIYSMIQSQSSAPTSQEPAYTLYSLIQPSRKSGSRKRNHSPSFNSTIYEVIGKSQPKAQNPARLSRKELENFDVYS

SEQ ID NO: 26217 - protein, 329 aa, Homo sapiens
MLGQVVTLILLLLLKVYQGKGCQGSADHVVSISGVPLQLQPNSIQTKVDSIAWKKLLPSQNGFHHILKWENGSLPSNTSNDRFSFIVKNLSLLIKAAQQQDSGLYCLEVTSISGKVQTATFQVFVFDKVEKPRLQGQGKILDRGRCQVALSCLVSRDGNVSYAWYRGSKLIQTAGNLTYLDEEVDINGTHTYTCNVSNPVSWESHTLNLTQDCQNAHQEFRFWPFLVIIVILSALFLGTLACFCVWRRKRKEKQSETSPKEFLTIYEDVKDLKTRRNHEQEQTFPGGGSTIYSMIQSQSSAPTSQEPAYTLYSLIQPSRKGDRFYSFSG

SEQ ID NO: 26218 - protein, 273 aa, Homo sapiens
MLGQVVTLILLLLLKVYQGKGCQGSADHVVSISGVPLQLQPNSIQTKVDSIAWKKLLPSQNGFHHILKWENGSLPSNTSNDRFSFIVKNLSLLIKAAQQQDSGLYCLEVTSISGKVQTATFQVFVFEFRFWPFLVIIVILSALFLGTLACFCVWRRKRKEKQSETSPKEFLTIYEDVKDLKTRRNHEQEQTFPGGGSTIYSMIQSQSSAPTSQEPAYTLYSLIQPSRKSGSRKRNHSPSFNSTIYEVIGKSQPKAQNPARLSRKELENFDVYS

SEQ ID NO: 26219 - protein, 689 aa, Homo sapiens
MIDSVKLRRDSAADFFSHYEYLCALQNSVPLPAVRACLREGVLDFNADRLRGVDWAPLLSTLKINKDLPLVSIKSFFQPWLGDTGSDMNKFCRSRVPAIRYKDVTFQLCKALKGCLSISSVLKNLELNGLILRERDLTILAKGLNKSASLVHLSLANCPIGDGGLEIICQGIKSSITLKTVNFTGCNLTWQGADHMAKILKYQTMRRHEETWAESLRYRRPDLDCMAGLRRITLNCNTLIGDLGACAFADSLSEDLWLRALDLQQCGLTNEGAKALLEALETNTTLVVLDIRKNPLIDHSMMKAVIKKVLQNGRSAKSEYQWITSPSVKEPSKTAKQKRRTIILGSGHKGKATIRIGLATKKPVSSGRKHSLGKEYYAPAPLPPGVSGFLPWRTAERAKRHRGFPLIKTRDICNQLQQPGFPVTVTVESPSSSEVEEVDDSSESVHEVPEKTSIEQEALQEKLEECLKQLKEERVIRLKVDKRVSELEHENAQLRNINFSLSEALHAQSLTNMILDDEGVLGSIENSFQKFHAFLDLLKDAGLGQLATMAGIDQSDFQLLGHPQMTSTVSNPPKEEKKALEDEKPEPKQNALGQMQNIQFQKITGDARIPLPLDSFPVPVSTPEGLGTSSNNLGVPATEQRQESFEGFIARMCSPSPDATSGTGSQRKEEELSRNSRSSSEKKTKTESH

SEQ ID NO: 26220 - protein, 722 aa, Homo sapiens
MIDSVKLRRDSAADFFSHYEYLCALQNSVPLPAVRACLREGVLDFNADRLRGVDWAPLLSTLKINKDLPLVSIKSFFQPWLGDTGSDMNKFCRSRVPAIRYKDVTFQLCKALKGCLSISSVLKNLELNGLILRERDLTILAKGLNKSASLVHLSLANCPIGDGGLEIICQGIKSSITLKTVNFTGCNLTWQGADHMAKILKYQTMRRHEETWAESLRYRRPDLDCMAGLRRITLNCNTLIGDLGACAFADSLSEDLWLRALDLQQCGLTNEGAKALLEALETNTTLVVLDIRKNPLIDHSMMKAVIKKVLQNGRSAKSEYQWITSPSVKEPSKTAKQKRRTIILGSGHKGKATIRIVGLATKKPVSSGRKHSLGKEYYAPAPLPPGVSGFLPWRTAERAKRHRGFPLIKTRDICNQLQQPGFPVTVTVESPSSSEVEEVDDSSESVHEVPEKTSIEQEALQEKLEECLKQLKEERVIRLKVDKRVSELEHENAQLRNINFSLSEALHAQSLTNMILDDEGVLGSIENSFQKFHAFLDLLKDAGLGQLATMAGIDQSDFQLLGHPQMTSTVSNPPKEEKKALEDEKPEPKQNALGQMQNIQVSICMQSAYNEGTLMKFQKITGDARIPLPLDSFPVPVSTPEGLGTSSNNLGVPATEQRQESFEGFIARMCSPSPDATSGTGSQRKEEELSRNSRSSSEKKTKTGEYTKKHSDKQHPGKDLHS

SEQ ID NO: 26221 - protein, 705 aa, Homo sapiens
MIDSVKLRRDSAADFFSHYEYLCALQNSVPLPAVRACLREGVLDFNADRLRGVDWAPLLSTLKINKDLPLVSIKSFFQPWLGDTGSDMNKFCRSRVPAIRYKDVTFQLCKALKGCLSISSVLKNLELNGLILRERDLTILAKGLNKSASLVHLSLANCPIGDGGLEIICQGIKSSITLKTVNFTGCNLTWQGADHMAKILKYQTMRRHEETWAESLRYRRPDLDCMAGLRRITLNCNTLIGDLGACAFADSLSEDLWLRALDLQQCGLTNEGAKALLEALETNTTLVVLDIRKNPLIDHSMMKAVIKKVLQNGRSAKSEYQWITSPSVKEPSKTAKQKRRTIILGSGHKGKATIRIGLATKKPVSSGRKHSLGKEYYAPAPLPPGVSGFLPWRTAERAKRHRGFPLIKTRDICNQLQQPGFPVTVTVESPSSSEVEEVDDSSESVHEVPEKTSIEQEALQEKLEECLKQLKEERVIRLKVDKRVSELEHENAQLRNINFSLSEALHAQSLTNMILDDEGVLGSIENSFQKFHAFLDLLKDAGLGQLATMAGIDQSDFQLLGHPQMTSTVSNPPKEEKKALEDEKPEPKQNALGQMQNIQVSICMQSAYNEGTLMKFQKITGDARIPLPLDSFPVPVSTPEGLGTSSNNLGVPATEQRQESFEGFIARMCSPSPDATSGTGSQRKEEELSRNSRSSSEKKTKTESH

SEQ ID NO: 26222 - protein, 706 aa, Homo sapiens
MIDSVKLRRDSAADFFSHYEYLCALQNSVPLPAVRACLREGVLDFNADRLRGVDWAPLLSTLKINKDLPLVSIKSFFQPWLGDTGSDMNKFCRSRVPAIRYKDVTFQLCKALKGCLSISSVLKNLELNGLILRERDLTILAKGLNKSASLVHLSLANCPIGDGGLEIICQGIKSSITLKTVNFTGCNLTWQGADHMAKILKYQTMRRHEETWAESLRYRRPDLDCMAGLRRITLNCNTLIGDLGACAFADSLSEDLWLRALDLQQCGLTNEGAKALLEALETNTTLVVLDIRKNPLIDHSMMKAVIKKVLQNGRSAKSEYQWITSPSVKEPSKTAKQKRRTIILGSGHKGKATIRIVGLATKKPVSSGRKHSLGKEYYAPAPLPPGVSGFLPWRTAERAKRHRGFPLIKTRDICNQLQQPGFPVTVTVESPSSSEVEEVDDSSESVHEVPEKTSIEQEALQEKLEECLKQLKEERVIRLKVDKRVSELEHENAQLRNINFSLSEALHAQSLTNMILDDEGVLGSIENSFQKFHAFLDLLKDAGLGQLATMAGIDQSDFQLLGHPQMTSTVSNPPKEEKKALEDEKPEPKQNALGQMQNIQFQKITGDARIPLPLDSFPVPVSTPEGLGTSSNNLGVPATEQRQESFEGFIARMCSPSPDATSGTGSQRKEEELSRNSRSSSEKKTKTGEYTKKHSDKQHPGKDLHS

SEQ ID NO: 26223 - protein, 703 aa, Homo sapiens
MEALLEGIQNRGHGGGFLTSCEAELQELMKQIDIMVAHKKSEWEGRTHALETCLKIREQELKSLRSQLDVTHKEVGMLHQQVEEHEKIKQEMTMEYKQELKKLHEELCILKRSYEKLQKKQMREFRGNTKNHREDRSEIERLTAKIEEFRQKSLDWEKQRLIYQQQVSSLEAQRKALAEQSEIIQAQLVNRKQKLESVELSSQSEIQHLSSKLERANDTICANELEIERLTMRVNDLVGTSMTVLQEQQQKEEKLRESEKLLEALQEEKRELKAALQSQENLIHEARIQKEKLQEKVKATNTQHAVEAIRPREESLAEKKYTSQGQGDLDSVLSQLNFTHTSEDLLQAEVTCLEGSLESVSATCKQLSQELMEKYEELKRMEAHNNEYKAEIKKLKEQILQGEQSYSSALEGMKMEISHLTQELHQRDITIASTKGSSSDMEKRLRAEMQKAEDKAVEHKEILDQLESLKLENRHLSEMVMKLELGLHEAKEISLADLQENYIEALNKLVSENQQLQKDLMNTKSQLEISTQMCKKQNDRIFKPTHSRTTEFKNTEFKPTHGQHRHDGIKTEHYKTDLHSPRGQASDSINPMSRVLSPLSPQISPCSSTRSLTSYSLCKTHSLPSALDTNEANFSDTMSESMNDQEEFISSCSLPVSPLGSIATRFLEEEELRSHHILERLDAHIEELKRESEKTVRQFTALK

SEQ ID NO: 26224 - protein, 541 aa, Homo sapiens
MEALLEGIQNRGHGGGFLTSCEAELQELMKQIDIMVAHKKSEWEGRTHALETCLKIREQELKSLRSQLDVTHKEVGMLHQQVEEHEKIKQEMTMEYKQELKKLHEELCILKRSYEKLQKKQMREFRGNTKNHREDRSEIERLTAKIEEFRQKSLDWEKQRLIYQQQVSSLEAQRKALAEQSEIIQAQLVNRKQKLESVELSSQSEIQHLSSKLERANDTICANELEIERLTMRVNDLVGTSMTVLQEQQQKEEKLRESEKLLEALQEEKRELKAALQSQENLIHEARIQKEKLQEKVKATNTQHAVEAIRPREESLAEKKYTSQGQGDLDSVLSQLNFTHTSEDLLQAEVTCLEGSLESVSATCKQLSQELMEKYEELKRMEAHNNEYKAEIKKLKEQILQGEQSYSSALEGMKMEISHLTQELHQRDITIASTKGSSSDMEKRLRAEMQKAEDKAVEHKEILDQLESLKLENRHLSEMVMKLELGLHECSLPVSPLGSIATRFLEEEELRSHHILERLDAHIEELKRESEKTVRQFTALK

SEQ ID NO: 26225 - protein, 495 aa, Homo sapiens
MEALLEGIQNRGHGGGFLTSCEAELQELMKQIDIMVAHKKSEWEGRTHALETCLKIREQELKSLRSQLDVTHKEVGMLHQQVEEHEKIKQEMTMEYKQELKKLHEELCILKRSYEKLQKKQMREFRGNTKNHREDRSEIERLTAKIEEFRQKSLDWEKQRLIYQQQVSSLEAQRKALAEQSEIIQAQLVNRKQKLESVELSSQSEIQHLSSKLERANDTICANELEIERLTMRVNDLVGTSMTVLQEQQQKEEKLRESEKLLEALQEEKRELKAALQSQENLIHEARIQKEKLQEKVKATNTQHAVEAISLESVSATCKQLSQELMEKYEELKRMEAHNNEYKAEIKKLKEQILQGEQSYSSALEGMKMEISHLTQELHQRDITIASTKGSSSDMEKRLRAEMQKAEDKAVEHKEILDQLESLKLENRHLSEMVMKLELGLHECSLPVSPLGSIATRFLEEEELRSHHILERLDAHIEELKRESEKTVRQFTALK

SEQ ID NO: 26226 - protein, 475 aa, Homo sapiens
MEALLEGIQNRGHGGGFLTSCEAELQELMKQIDIMVAHKKSEWEGRTHALETCLKIREQELKSLRSQLDVTHKEVGMLHQQVEEHEKIKQEMTMEYKQELKKLHEELCILKRSYEKLQKKQMREFRGNTKNHREDRSEIERLTAKIEEFRQKSLDWEKQRLIYQQQVSSLEAQRKALAEQSEIIQAQLVNRKQKLESVELSSQSEIQHLSSKLERANDTICANELEIERLTMRVNDLVGTSMTVLQEQQQKEEKLRESEKLLEALQEEKRELKAALQSQENLIHEARIQKEKLQEKVKATNTQHAVEAISLESVSATCKQLSQELMEKYEELKRMEAHNNEYKAEIKKLKEQILQGEQSYSSALEGMKMEISHLTQELHQRDITIASTKGSSSDMEKRLRAEMQKAEDKAVEHKEILDQLESLKLENRHLSEMVMKLELGLHERWGFTMLSSLVLNFGIQAIRQPQRPKVLELQV

SEQ ID NO: 26227 - protein, 579 aa, Homo sapiens
MPSASCDTLLDDIEDIVSQEDSKPQDRHFVRKDVVPKVRRRNTQKYLQEEENSPPSDSTIPGIQKIWIRTWGCSHNNSDGEYMAGQLAAYGYKITENASDADLWLLNSCTVKNPAEDHFRNSIKKAQEENKKIVLAGCVPQAQPRQDYLKGLSIIGVQQIDRVVEVVEETIKGHSVRLLGQKKDNGRRLGGARLDLPKIRKNPLIEIISINTGCLNACTYCKTKHARGNLASYPIDELVDRAKQSFQEGVCEIWLTSEDTGAYGRDIGTNLPTLLWKLVEVIPEGAMLRLGMTNPPYILEHLEEMAKILNHPRVYAFLHIPVQSASDSVLMEMKREYCVADFKRVVDFLKEKVPGITIATDIICGFPGETDQDFQETVKLVEEYKFPSLFINQFYPRPGTPAAKMEQVPAQVKKQRTKDLSRVFHSYSPYDHKIGERQQVLVTEESFDSKFYVAHNQFYEQVLVPKNPAFMGKMVEVDIYESGKHFMKGQPVSDAKVYTPSISKPLAKGEVSGLTKDFRNGLGNQLSSGSHTSAASQCDSASSRMVLPMPRLHQDCALRMSVGLALLGLLFAFFVKVYN

SEQ ID NO: 26228 - protein, 488 aa, Homo sapiens
MLSRRYEGEIPKNICKRKKTVHQVTENASDADLWLLNSCTVKNPAEDHFRNSIKKAQEENKKIVLAGCVPQAQPRQDYLKGLSIIGVQQIDRVVEVVEETIKGHSVRLLGQKKDNGRRLGGARLDLPKIRKNPLIEIISINTGCLNACTYCKTKHARGNLASYPIDELVDRAKQSFQEGVCEIWLTSEDTGAYGRDIGTNLPTLLWKLVEVIPEGAMLRLGMTNPPYILEHLEEMAKILNHPRVYAFLHIPVQSASDSVLMEMKREYCVADFKRVVDFLKEKVPGITIATDIICGFPGETDQDFQETVKLVEEYKFPSLFINQFYPRPGTPAAKMEQVPAQVIGERQQVLVTEESFDSKFYVAHNQFYEQVLVPKNPAFMGKMVEVDIYESGKHFMKGQPVSDAKVYTPSISKPLAKGEVSGLTKDFRNGLGNQLSSGSHTSAASQCDSASSRMVLPMPRLHQDCALRMSVGLALLGLLFAFFVKVYN

SEQ ID NO: 26229 - protein, 97 aa, Homo sapiens
MPSASCDTLLDDIEDIVSQEDSKPQDRHFVRKDVVPKVRRRNTQKYLQEEENSPPSDSTIPGIQKIWIRTWGCSHNNSDGEYMAGQLAAYGYKITGE

SEQ ID NO: 26230 - protein, 394 aa, Homo sapiens
MLSSFNEWFWQDRFWLPPNVTWTELEDRDGRVYPHPQDLLAALPLALVLLAMRLAFERFIGLPLSRWLGVRDQTRRQVKPNATLEKHFLTEGHRPKEPQLSLLAAQCGLTLQQTQRWFRRRRNQDRPQLTKKFCEASWRFLFYLSSFVGGLSVLYHESWLWAPVMCWDRYPNQTLKPSLYWWYLLELGFYLSLLIRLPFDVKRKDFKEQVIHHFVAVILMTFSYSANLLRIGSLVLLLHDSSDYLLEACKMVNYMQYQQVCDALFLIFSFVFFYTRLVLFPTQILYTTYYESISNRGPFFGYYFFNGLLMLLQLLHVFWSCLILRMLYSFMKKGQMEKDIRSDVEESDSSEEAAAAQEPLQLKNGAAGGPRPAPTDGPRSRVAGRLTNRHTTAT

SEQ ID NO: 26231 - protein, 166 aa, Homo sapiens
MLLEEVRAGDRLSGAAARGDVQEVRRLLHRELVHPDALNRFGKTALQVMMFGSTAIALELLKQGASPNVQDTSGTSPVHDAARTGFLDTLKVLVEHGADVNVPDGTGALPIHLAVQEGHTAVVSFLAAESDLHRRDARGLTPLELALQRGAQDLVDILQGHMVAPL

SEQ ID NO: 26232 - protein, 925 aa, Homo sapiens
MPHKIGFVVVSSSGHEDGFSARELMIHAPTVSGWRSPRFCQFPQEIVLQMVERCRIRKLQLLAHQYMISSKIEFYISESLPEYFAPYQAERFRRLGYVSLCDNEKTGCKARELKSVYVDAVGQFLKLIFHQNHVNKYNIYNQVALVAINIIGDPADFSDESNTASREKLIDHYLGHNSEDPALEGTYARKSDYISPLDDLAFDMYQDPEVAQIIRKLDERKREAVQKERYDYAKKLKQAIADLQKVGERLGRYEVEKRCAVEKEDYDLAKEKKQQMEQYRAEVYEQLELHSLLDAELMRRPFDLPLQPLARSGSPCHQKPMPSLPQLEERGTENQFAEPFLQEKPSSYSLTISPQHSAVDPLLPATDPHPKINAESLPYDERPLPAIRKHYGEAVVEPEMSNADISDARRGGMLGEPEPLTEKALREASSAIDVLGETLVAEAYCKTWSYREDALLALSKKLMEMPVGTPKEDLKNTLRASVFLVRRAIKDIVTSVFQASLKLLKMIITQYIPKHKLSKLETAHCVERTIPVLLTRTGDSSARLRVTAANFIQEMALFKEVKSLQIIPSYLVQPLKANSSVHLAMSQMGLLARLLKDLGTGSSGFTIDNVMKFSVSALEHRVYEVRETAVRIILDMYRQHQASILEYLPPDDSNTRRNILYKTIFEGFAKIDGRATDAEMRARRKAATEEAEKQKKEEIKALQGQLAALKEIQAEVQEKESDAVKPKNQDIQGGKAAPAEALGIPDEHYLDNLCIFCGERSESFTEEGLDLHYWKHCLMLTRCDHCKQVVEISSLTEHLLTECDKKDGFGKCYRCSEAVFKEELPRHIKHKDCNPAKPEKLANRCPLCHENFSPGEEAWKAHLMGPAGCTMNLRKTHILQKAPALQPGKSSAVAASGPLGSKAGSKIPTPKGGLSKSSSRTYAKR

SEQ ID NO: 26233 - protein, 244 aa, Homo sapiens
MPHKIGFVVVSSSGHEDGFSARELMIHAPTVSGWRSPRFCQFPQEIVLQMVERCRIRKLQLLAHQYMISSKIEFYISESLPEYFAPYQAERFRRLGYVSLCDNEKTGCKARELKSVYVDAVGQFLKLIFHQNHVNKYNIYNQVALVAINIIGDPADFSDESNTASREKLIDHYLGHNSEDPALEGTYASSVRTGGESTFGELKGPAVPSSVTLSVLGTSLGQWFPCHLPAVDDNEGTPFQRCLV

SEQ ID NO: 26234 - protein, 554 aa, Homo sapiens
MPHKIGFVVVSSSGHEDGFSARELMIHAPTVSGWRSPRFCQFPQEIVLQMVERCRIRKLQLLAHQYMISSKIEFYISESLPEYFAPYQAERFRRLGYVSLCDNEKTGCKARELKSVYVDAVGQFLKLIFHQNHVNKYNIYNQVALVAINIIGDPADFSDESNTASREKLIDHYLGHNSEDPALEGTYARKSDYISPLDDLAFDMYQDPEVAQIIRKLDERKREAVQKERYDYAKKLKQAIADLQKVGERLGRYEVEKRCAVEKEDYDLAKEKKQQMEQYRAEVYEQLELHSLLDAELMRRPFDLPLQPLARSGSPCHQKPMPSLPQLEERGTENQFAEPFLQEKPSSYSLTISPQHSAVDPLLPATDPHPKINAESLPYDERPLPAIRKHYGEAVVEPEMSNADISDARRGGMLGEPEPLTEKALREASSAIDVLGETLVAEAYCKTWSYREDALLALSKKLMEMPVGTPKEDLKNTLRASVFLVRRAIKDIVTSVFQASLKLLKMIITQYIPKHKLSKLETAHCVERTIPVLLTRTGDSSARLRVTAANFIQV

SEQ ID NO: 26235 - protein, 202 aa, Homo sapiens
MNAAVPPEQAHSCGWGTEGCPCLRSTAIRQTFFPGGDQFQRDGGLAMLPILVSKFLASSDPPVSVPEMLGLQNRWRGMKNEEHCPGSFFLCKIRECVLNYRFQLQHPGFQHYLQSSGRRDRGRSEDKKPLEAGVWCWDRGGWDGSSRAVHLLFRGVAHPSLYLFPREDPPRLLFPRLSLLVCEQFWCYSATLLLAPLPASTC

SEQ ID NO: 26236 - protein, 125 aa, Homo sapiens
MKNEEHCPGSFFLCKIRECVLNYRFQLQHPGFQHYLQSSGRRDRGRSEDKKPLEAGVWCWDRGGWDGSSRAVHLLFRGVAHPSLYLFPREDPPRLLFPRLSLLVCEQFWCYSATLLLAPLPASTC

SEQ ID NO: 26237 - protein, 90 aa, Homo sapiens
MGAERVCTKAPEITQDEAEIYSLTNMEGNIGIKGCEFKSWLFKFYQARSQVLLCGEVKNPYLLTSNKTTVKEQNACLTHPDRSAMAGLLL

SEQ ID NO: 26238 - protein, 301 aa, Homo sapiens
MAQNVYGPGVRIGNWNEDVYLEEELMKDFLEKRDKGKLLIQRSRRLKQNLLRPMQLSVTEDGYIHYGDKVMLVNPDDPDTEADVFLRGDLSLCMTPDEIQSHLKDELEVPCGLSAVQAKTPIGRNTFIILSVHRDATGQVLRYGQDFCLGITGGFDNKMLYLSSDHRTLLKSSKRSWLQEVYLTDEVSHVNCWQAAFPDPQLRLEYEGFPVPANAKILINHCHTNRGLAAHRHLFLSTYFGKEAEVVAHTYLDSHRVEKPRNHWMLVTGNPRDASSSMLDLPKPPTEDTRAMEQAMGLDTQ

SEQ ID NO: 26239 - protein, 199 aa, Homo sapiens
MKDFLEKRDKGKLLIQRSRRLKQNLLRPMQLSVTEDGYIHYGDKVMLVNPDDPDTEADVFLRGDLSLCMTPDEIQSHLKDELEVPCGLSAVQAKTPIGRNTFIILSVHRDATGQVLRYGQDFCLGITGGFDNKMLYLSSDHRTLLKSSKRSWLQEVYLTDEVSHVNCWNMKASPSRQMLKFSSITVTQIGDWQPTGIFS

SEQ ID NO: 26240 - protein, 638 aa, Homo sapiens
MAAELRMILYEDDSVQVQYVDGSTLQLSPCGTEFLFEKSPPVSAHPLEQPERIRQRTHFVISTYREQLQRALDFRNSSATCPFLSETIIPSERKKHIFIDITEVRWPSLDTDGTMIYMESGIVKITSLDGHAYLCLPRSQHEFTVHFLCKVSQKSDSSAVLSETNNKAPKDKLVEKTGKICIRGNLPGQRLKNKENEFHCQIMKSKETLKKMSCVNGTEGREELPSPGTKHTCVYTWVKQCWSVAACPEEWKYPLSLALHFHNKISNMSKIDAHITQSRFLTSDISEERGKVVSVLPRALSLSCPVPHLHRWNFCDSLLQRQSDEYSYPELVKMVWYKGVTYRLTHQNMNSIEIYSGDGSVFKSEGAYFGNYFTYYSIQEGSGKREEKTYSVNNLPPDRPGSPFTVGSLIKQATRILQHCVKMRLSLSHNYRICCWKMVPGINDSNILPLVLKESLIPSVGRFLAYSDDKVHAIFLDGITLTLNWNFSSPIEKRQVNQGLNLGWCKLTFPDGQEQLIQIEHPEPYERYVTTVTSWCRRLTQTSPREMPTHSSSSVLQENWSVASELEKIQKFNLLLENSGILNQISNKKNEQQSFDHYKPGSSETLLGEVNENRVSIALKKTSEILHDIDCLLSNSKK

SEQ ID NO: 26241 - protein, 128 aa, Homo sapiens
MSLCSACTSPASHQLLLNCQGQTVAKSHSSADAGVSLVSGRWCAWWPEHCSESMFPSQHPVLSSNLADSSGQGRSPAGAHPALCPFHKSPWFPHFPQILPREWSWCGPERPAGCSLGLKAEAALVGKK

SEQ ID NO: 26242 - protein, 2601 aa, Homo sapiens
MKRKVVNTHKLRLSPNEEAFILKEDYERRRKLRLLQVREQERDIALQIREDIKQRRNQQFTRLAEELRAEWEESQTQKIQNLEKLYLASLRSMGEGHRQAKENEPDLDALAQRAAERKRKADLRHKEALKVQKNQKEILLKQKTWHIKARKEALLVEKERSAKITSLPPPPPTLFENIEVKRISAVKTNSSTYHHLHTFVNRETDTKRPDARLAAEEEAKRLEELQKQAAQERMERFEKAHVRGFQAMKKIHLAQNQEKLMKELKQLQQEDLARRRQTVAQMPPQLVELPYKRSEMKEDWQRELEFAFEDMYNADRKVKGNLILHLEPEPLPTVTNQIQDEELDLSMEQENLGAAEDLPVTEAEICSSETDVPLVMKTQQIPSKVLFKKLLNKIRSQKSLWTIKSMSEDESEMITTVSEIESKAPTVESGTIASKERTLSSGQEQVVESDTLTIESGPLASEDKPLSCGTNSGKEQEINETLPITTVAQSSVLLHPQEAAARIRMSARQKQIMEIEEQKQKQLELLEQIEQQKLRLETDCFRAQLEEEKRKKTQPTGVGIAPASCPVISDEDSHRQMIRNYQHQLLQQNRLHRQSVETARKQLLEYQTMLKGRCPSVSAPSLITDSVISVPSWKSERPTAISEHWDQGQRLKLSPNKYQPIQPIQTSKLEQDHFQVARQNHFPQRQVETTETLRASDILTNQALESQEHLRQFSQTETQQRDYKLVPKDSETLSRALSHDRQLISQDARKISETFGATTFQSLESQQLFSENSENISYHLTEPSSFVPLVPQHSFSSLPVKVESGKIQEPFSAMSKSTVSTSHSIISQMHDRPLLPSENITAQQGNMKALQEQLDLQKKVLQATQEAQEQLLLCKQKEVEQQTGLSVFLPLVTPDSSALLPSAKADLGRIQESSPTKNNIAVSSDHHVISQLQDKRLSLSQPILSQQNNFKFLQEQLNIQKDSLQARREAQEVLYVHKQSELDRRVCSEQAEPSFPFQVAQHTFTSLPSADTKSGKIQEQHSSKSEKGLVSCQSDIPISQDGSLSFLQQFLPLHDSLKLLQEQLTKQRDTLQARHEAQVELLLHRQRDLGDSKSGLVSSSSSPVVVQHSVASQASAKAEPRRIQELYLSEKENVGPSCHLIIPTFQDKSLSFPQHSLAQQENLTILQEQSQIQRVILGAKEGTQEFVHTESELEKRISSEQTGTSSSLSQVDESERFQECISIKSDSTIPLSHPKIPRCQERLLRVSQHMLPLQDNLEEHQAWLDTEKEAFHFSQKTQENTSSEQTGSSSFIPQLVQLSFTSLASAESGTILEPLFTESESKIFSSHLQIPQLQDRLLRISQLIQPQQDNLKALQEQLATQREAIILARQEAREELLLHQSEWEGRISPEQVDTSSLPLVPQHSFASLPLNESERNQEPCSINSDNIVSSGHSEIPTLPDGLLGLSHLVLPQQDNLIALEEHLHAQTDFLPSIEKTQKELVLSKPCKFEEKVSSEHFIQSHHGDLQALQQQLDTQKKAIRSIQEVQEELLLQRLSELEKRVSSEQVCSSSFVSQVPVADSERTQKSFPTKSNDTLPSSHREIPRLQDRLLSLSKPILPQQDNMTAQLDAQREVMYSYEKPQEELSLNKQRKLNKSESAEHTIPSLFLPKETEHSFIPLPFAEAKPKSTCELYSSQNEHAAPPSNPVIPGFQDRLLSFSQSVLTQQDNLGLQKQLDLQREVLHYSQKAQEKLLVQRQTALQQQIQKHEETLKDFFKDSQISKPTVENDLKTQKMGQLRDWFPNTQDLAGNDQENIRHADRNNSDDNHLASEDTSAKQSGEHLEKDLGRRSSKPPVAKVKCGLDLNQHELSAIQEVESPAIGRTSILGKPGIYEDRDPLRVSISREQSFFGSPLAHDPFSCLQLVGQENVCGDDYDEAVKLKESVVENHAVLSYAVEEEHAYLGPTVKPDDKAKTLSYEPLSSATVSTGSLLSYENTDLSLTDPESFSEHMDDSKQESTTSKEEETNIISSIVPSTQDIYQRQNSSDVHKSLLPAVDETTCGHTHFQQMIDKYINEANLIPEKTDLQELEHIFPNLHHQLFKPLEPHPDFDLSSSSSGISPDNRDFYQRSDSSSESHCATGLSKSTVYFTALRRTSMHSSLNTSPNQQPDTNLAHVGAHSFATENIIGGSEQCFEQLQPEYSSQEESQHADLPSIFSIEARDSSQGMKNQNYPSEEHTEILQNKKKIVHFQLSIGNLSSVYSSSDEANVFDQLNVQHSTPCGSNSSECSTKHQLESRKESMGFEELSKRGVVTMLQSQGLIEDNKNETCRVLDINPQVEETDSRLCVRTVEMGTSIQAPYSLTTQNEKYFENSAETDIPKITKKLSQLGESELFASSGSFSLQSSIPVWETETGHGIMEEPELTLISTTDTSIAEMDFANLTLEEKSENEAKCFFQVSEFLPLVSATEASDYPAVSELSIEKPRTASTETPRRLTPVPGSLQEAFIKRKKSFMERSHQRQKEIRNKIHVSENSQIKTVKEKPSISSSVSRLKGVNKVRASFPEDRKTTQALRHQRGLRLYNQLAEVKQQKEEKTKQEAYAQNRARAKEFHKKTLEKLRAKNTC

SEQ ID NO: 26243 - protein, 781 aa, Homo sapiens
MGQLRDWFPNTQDLAGNDQENIRHADRNNSDDNHLASEDTSAKQSGKPGIYEDRDPLRVSISREQSFFGSPLAHDPFSCLQLVGQENVCGDDYDEAVKLKESVVENHAVLSYAVEEEHAYLGPTVKPDDKAKTLSYEPLSSATVSTGSLLSYENTDLSLTDPESFSEHMDDSKQESTTSKEEETNIISSIVPSTQDIYQRQNSSDVHKSLLPAVDETTCGHTHFQQMIDKYINEANLIPEKTDLQELEHIFPNLHHQLFKPLEPHPDFDLSSSSSGISPDNRDFYQRSDSSSESHCATGLSKSTVYFTALRRTSMHSSLNTSPNQQPDTNLAHVGAHSFATENIIGGSEQCFEQLQPEYSSQEESQHADLPSIFSIEARDSSQGMKNQNYPSEEHTEILQNKKKIVHFQLSIGNLSSVYSSSDEANVFDQLNVQHSTPCGSNSSECSTKHQLESRKESMGFEELSKRGVVTMLQSQGLIEDNKNETCRVLDINPQVEETDSRLCVRTVEMGTSIQAPYSLTTQNEKYFENSAETDIPKITKKLSQLGESELFASSGSFSLQSSIPVWETETGHGIMEEPELTLISTTDTSIAEMDFANLTLEEKSENEAKCFFQVSEFLPLVSATEASDYPAVSELSIEKPRTASTETPRRLTPVPGSLQEAFIKRKKSFMERSHQRQKEIRNKIHVSENSQIKTVKEKPSISSSVSRLKGVNKVRASFPEDRKTTQALRHQRGLRLYNQLAEVKQQKEEKTKQEAYAQNRARAKEFHKKTLEKLRAKNTC

SEQ ID NO: 26244 - protein, 2602 aa, Homo sapiens
MKRKVVNTHKLRLSPNEEAFILKEDYERRRKLRLLQVREQERDIALQIREDIKQRRNQQFTRLAEELRAEWEESQTQKIQNLEKLYLASLRSMGEGHRQAKENEPDLDALAQRAAERKRKADLRHKEALKVQKNQKEILLKQKTWHIKARKEALLVEKERSAKITSLPPPPPTLFENIEVKRISAVKTNSSTYHHLHTFVNRETDTKRPDARLAAEEEAKRLEELQKQAAQERMERFEKAHVRGFQAMKKIHLAQNQEKLMKELKQLQQEDLARRRQTVAQMPPQLVELPYKRSEMKEDWQRELEFAFEDMYNADRKVKGNLILHLEPEPLPTVTNQIQDEELDLSMEQENLGAAEDLPVTEAEICSSETDVPLVMKTQQIPSKVLFKKLLNKIRSQKSLWTIKSMSEDESEMITTVSEIESKAPTVESGTIASKERTLSSGQEQVVESDTLTIESGPLASEDKPLSCGTNSGKEQEINETLPITTVAQSSVLLHPQEAAARIRMSARQKQIMEIEEQKQKQLELLEQIEQQKLRLETDCFRAQLEEEKRKKTQPTGVGIAPASCPVISDEDSHRQMIRNYQHQLLQQNRLHRQSVETARKQLLEYQTMLKGRCPSVSAPSLITDSVISVPSWKSERPTAISEHWDQGQRLKLSPNKYQPIQPIQTSKLEQDHFQVARQNHFPQRQVETTETLRASDILTNQALESQEHLRQFSQTETQQRDYKLVPKDSETLSRALSHDRQLISQDARKISETFGATTFQSLESQQLFSENSENISYHLTEPSSFVPLVPQHSFSSLPVKVESGKIQEPFSAMSKSTVSTSHSIISQMHDRPLLPSENITAQQGNMKALQEQLDLQKKVLQATQEAQEQLLLCKQKEVEQQTGLSVFLPLVTPDSSALLPSAKADLGRIQESSPTKNNIAVSSDHHVISQLQDKRLSLSQPILSQQNNFKFLQEQLNIQKDSLQARREAQEVLYVHKQSELDRRVCSEQAEPSFPFQVAQHTFTSLPSADTKSGKIQEQHSSKSEKGLVSCQSDIPISQDGSLSFLQQFLPLHDSLKLLQEQLTKQRDTLQARHEAQVELLLHRQRDLGDSKSGLVSSSSSPVVVQHSVASQASAKAEPRRIQELYLSEKENVGPSCHLIIPTFQDKSLSFPQHSLAQQENLTILQEQSQIQRVILGAKEGTQEFVHTESELEKRISSEQTGTSSSLSQVDESERFQECISIKSDSTIPLSHPKIPRCQERLLRVSQHMLPLQDNLEEHQAWLDTEKEAFHFSQKTQENTSSEQTGSSSFIPQLVQLSFTSLASAESGTILEPLFTESESKIFSSHLQIPQLQDRLLRISQLIQPQQDNLKALQEQLATQREAIILARQEAREELLLHQSEWEGRISPEQVDTSSLPLVPQHSFASLPLNESERNQEPCSINSDNIVSSGHSEIPTLPDGLLGLSHLVLPQQDNLIALEEHLHAQTDFLPSIEKTQKELVLSKPCKFEEKVSSEHFIQSHHGDLQALQQQLDTQKKAIRSIQEVQEELLLQRLSELEKRVSSEQVCSSSFVSQVPVADSERTQKSFPTKSNDTLPSSHREIPRLQDRLLSLSKPILPQQDNMTAQLDAQREVMYSYEKPQEELSLNKQRKLNKSESAEHTIPSLFLPKETEHSFIPLPFAEAKPKSTCELYSSQNEHAAPPSNPVIPGFQDRLLSFSQSVLTQQDNLGLQKQLDLQREVLHYSQKAQEKLLVQRQTALQQQIQKHEETLKDFFKDSQISKPTVENDLKTQKMGQLRDWFPNTQDLAGNDQENIRHADRNNSDDNHLASEDTSAKQSGEHLEKDLGRRSSKPPVAKVKCGLDLNQHELSAIQEVESPAIGRTSILGKPGIYEDRDPLRVSISREQSFFGSPLAHDPFSCLQLVGQENVCGDDYDEAVKLKESVVENHAVLSYAVEEEHAYLGPTVKPDDKAKTLSYEPLSSATVSTGSLLSYENTDLSLTDPESFSEHMDDSKQESTTSKEEETNIISSIVPSTQDIYQRQNSSDVHKSLLPAVDETTCGHTHFQQMIDKYINEANLIPEKTDLQELEHIFPNLHHQLFKPLEPHPDFDLSSSSSGISPDNRDFYQRSDSSSESHCATGLSKSTVYFTALRRTSMHSSLNTSPNQQPDTNLAHVGAHSFATENIIGGSEQCFEQLQPEYSSQEESQHADLPSIFSIEARDSSQGMKNQNYPSEEHTEILQNKKKIVHFQLSIGNLSSVYSSSDEANVFDQLNVQHSTPCGSNSSECSTKHQLESRKESMGFEELSKRGVVTMLQSQGLIEDNKNETCRVLDINPQVEETDSRLCVRTVEMGTSIQAPYSLTTQNEKYFENSAETDIPKITKKLSQLGESELFASSGSFSLQSSIPVWETETGHGIMEEPELTLISTTDTSIAEMDFANLTLEEKSENEAKCFFQVSEFLPLVSATEASDYPAVSELSIEKPRTASTAETPRRLTPVPGSLQEAFIKRKKSFMERSHQRQKEIRNKIHVSENSQIKTVKEKPSISSSVSRLKGVNKVRASFPEDRKTTQALRHQRGLRLYNQLAEVKQQKEEKTKQEAYAQNRARAKEFHKKTLEKLRAKNTC

SEQ ID NO: 26245 - protein, 614 aa, Homo sapiens
MDDSKQESTTSKEEETNIISSIVPSTQDIYQRQNSSDVHKSLLPAVDETTCGHTHFQQMIDKYINEANLIPEKTDLQELEHIFPNLHHQLFKPLEPHPDFDLSSSSSGISPDNRDFYQRSDSSSESHCATGLSKSTVYFTALRRTSMHSSLNTSPNQQPDTNLAHVGAHSFATENIIGGSEQCFEQLQPEYSSQEESQHADLPSIFSIEARDSSQGMKNQNYPSEEHTEILQNKKKIVHFQLSIGNLSSVYSSSDEANVFDQLNVQHSTPCGSNSSECSTKHQLESRKESMGFEELSKRGVVTMLQSQGLIEDNKNETCRVLDINPQVEETDSRLCVRTVEMGTSIQAPYSLTTQNEKYFENSAETDIPKITKKLSQLGESELFASSGSFSLQSSIPVWETETGHGIMEEPELTLISTTDTSIAEMDFANLTLEEKSENEAKCFFQVSEFLPLVSATEASDYPAVSELSIEKPRTASTAETPRRLTPVPGSLQEAFIKRKKSFMERSHQRQKEIRNKIHVSENSQIKTVKEKPSISSSVSRLKGVNKVRASFPEDRKTTQALRHQRGLRLYNQLAEVKQQKEEKTKQEAYAQNRARAKEFHKKTLEKLRAKNTC

SEQ ID NO: 26246 - protein, 159 aa, Homo sapiens
MRKNESYLNQPAPPIPIPTLSLMGGCREHFENHWKGRARWLMPVIPALWEAKAGRSPEVRSSKPAWPTWRNPIFTKNTKISQVLELFLNYQSLICALEKQKRQKGSLAIFCWSFQGGCVSKRPDVPSLKSQKPKRKRITGRKRLSKGFWSLLFSNLGRF

SEQ ID NO: 26247 - protein, 110 aa, Homo sapiens
MQAALEVTARYCGRELEQYGQCVAAKPESWQRDCHYLKMSIAQCTSSHPIIRQIRQACAQPFEAFEECLRQNEAAVGNCAEHMRRFLQCAEQVQPPRSPATVEAQPLPAS

SEQ ID NO: 26248 - protein, 158 aa, Homo sapiens
MQAALEVTARYCGRELEQYGQCVAAKPESWQRDCHYLKMSIAQCTSSHPIIRQIRQACAQPFEAFEECLRQNEAAVGNCAEHMRRFLQCAEQVQPPRSPATVEVRGAHLSSSLFSITSPSSFWLFRVKTLESSSAPPHHHTGLCHASRIQNIITSCPI

SEQ ID NO: 26249 - protein, 118 aa, Homo sapiens
MATPSLRGRLARFGNPRKPVLKPNKPLILANRVGERRREKGEATCITEMSVMMACWKQNEFRDDACRKEIQGFLDCAARAQEARKMRSIQETLGESGSLLPNKLNKLLQRFPNKPYLS

SEQ ID NO: 26250 - protein, 2000 aa, Homo sapiens
MKAADTVILWARSKNDQLRISFPPGLCWGDRMPDKDDIRLLPSALGVKKRKRGPKKQKENKPGKPRKRKKRDSEEEFGSERDEYREKSESGGSEYGTGPGRKRRRKHREKKEKKTKRRKKGEGDGGQKQVEQKSSATLLLTWGLEDVEHVFSEEDYHTLTNYKAFSQFMRPLIAKKNPKIPMSKMMTILGAKWREFSANNPFKGSAAAVAAAAAAAAAAVAEQVSAAVSSATPIAPSGPPALPPPPAADIQPPPIRRAKTKEGKGPGHKRRSKSPRVPDGRKKLRGKKMAPLKIKLGLLGGKRKKGGSYVFQSDEGPEPEAEESDLDSGSVHSASGRPDGPVRTKKLKRGRPGRKKKKVLGCPAVAGEEEVDGYETDHQDYCEVCQQGGEIILCDTCPRAYHLVCLDPELDRAPEGKWSCPHCEKEGVQWEAKEEEEEYEEEGEEEGEKEEEDDHMEYCRVCKDGGELLCCDACISSYHIHCLNPPLPDIPNGEWLCPRCTCPVLKGRVQKILHWRWGEPPVAVPAPQQADGNPDVPPPRPLQGRSEREFFVKWVGLSYWHCSWAKELQLEIFHLVMYRNYQRKNDMDEPPPLDYGSGEDDGKSDKRKVKDPHYAEMEEKYYRFGIKPEWMTVHRIINHSVDKKGNYHYLVKWRDLPYDQSTWEEDEMNIPEYEEHKQSYWRHRELIMGEDPAQPRKYKKKKKELQGDGPPSSPTNDPTVKYETQPRFITATGGTLHMYQLEGLNWLRFSWAQGTDTILADEMGLGKTIQTIVFLYSLYKEGHTKGPFLVSAPLSTIINWEREFQMWAPKFYVVTYTGDKDSRAIIRENEFSFEDNAIKGGKKAFKMKREAQVKFHVLLTSYELITIDQAALGSIRWACLVVDEAHRLKNNQSKFFRVLNGYKIDHKLLLTGTPLQNNLEELFHLLNFLTPERFNNLEGFLEEFADISKEDQIKKLHDLLGPHMLRRLKADVFKNMPAKTELIVRVELSPMQKKYYKYILTRNFEALNSRGGGNQVSLLNIMMDLKKCCNHPYLFPVAAMESPKLPSGAYEGGALIKSSGKLMLLQKMLRKLKEQGHRVLIFSQMTKMLDLLEDFLDYEGYKYERIDGGITGALRQEAIDRFNAPGAQQFCFLLSTRAGGLGINLATADTVIIFDSDWNPHNDIQAFSRAHRIGQANKVMIYRFVTRASVEERITQVAKRKMMLTHLVVRPGLGSKAGSMSKQELDDILKFGTEELFKDENEGENKEEDSSVIHYDNEAIARLLDRNQDATEDTDVQNMNEYLSSFKVAQYVVREEDKIEEIEREIIKQEENVDPDYWEKLLRHHYEQQQEDLARNLGKGKRVRKQVNYNDAAQEDQDNQSEYSVGSEEEDEDFDERPEGRRQSKRQLRNEKDKPLPPLLARVGGNIEVLGFNTRQRKAFLNAVMRWGMPPQDAFTTQWLVRDLRGKTEKEFKAYVSLFMRHLCEPGADGSETFADGVPREGLSRQQVLTRIGVMSLVKKKVQEFEHINGRWSMPELMPDPSADSKRSSRASSPTKTSPTTPEASATNSPCTSKPATPAPSEKGEGIRTPLEKEEAENQEEKPEKNSRIGEKMETEADAPSPAPSLGERLEPRKIPLEDEVPGVPGEMEPEPGYRGDREKSATESTPGERGEEKPLDGQEHRERPEGETGDLGKREDVKGDRELRPGPRDEPRSNGRREEKTEKPRFMFNIADGGFTELHTLWQNEERAAISSGKLNEIWHRRHDYWLLAGIVLHGYARWQDIQNDAQFAIINEPFKTEANKGNFLEMKNKFLARRFKLLEQALVIEEQLRRAAYLNLSQEPAHPAMALHARFAEAECLAESHQHLSKESLAGNKPANAVLHKVLNQLEELLSDMKADVTRLPATLSRIPPIAARLQMSERSILSRLASKGTEPHPTPAYPPGPYATPPGYGAAFSAAPVGALAAAGANYSQMPAGSFITAATNGPPVLVKKEKEMVGALVSDGLDRKEPRAGEVICIDD

SEQ ID NO: 26251 - protein, 1966 aa, Homo sapiens
MKAADTVILWARSKNDQLRISFPPGLCWGDRMPDKDDIRLLPSALGVKKRKRGPKKQKENKPGKPRKRKKRDSEEEFGSERDEYREKSESGGSEYGTGPGRKRRRKHREKKEKKTKRRKKGEGDGGQKQVEQKSSATLLLTWGLEDVEHVFSEEDYHTLTNYKAFSQFMRPLIAKKNPKIPMSKMMTILGAKWREFSANNPFKGSAAAVAAAAAAAAAAVAEQVSAAVSSATPIAPSGPPALPPPPAADIQPPPIRRAKTKEGKGPGHKRRSKSPRVPDGRKKLRGKKMAPLKIKLGLLGGKRKKGGSYVFQSDEGPEPEAEESDLDSGSVHSASGRPDGPVRTKKLKRGRPGRKKKKVLGCPAVAGEEEVDGYETDHQDYCEVCQQGGEIILCDTCPRAYHLVCLDPELDRAPEGKWSCPHCEKEGVQWEAKEEEEEYEEEGEEEGEKEEEDDHMEYCRVCKDGGELLCCDACISSYHIHCLNPPLPDIPNGEWLCPRCTCPVLKGRVQKILHWRWGEPPVAVPAPQQADGNPDVPPPRPLQGRSEREFFVKWVGLSYWHCSWAKELQLEIFHLVMYRNYQRKNDMDEPPPLDYGSGEDDGKSDKRKVKDPHYAEMEEKYYRFGIKPEWMTVHRIINHSVDKKGNYHYLVKWRDLPYDQSTWEEDEMNIPEYEEHKQSYWRHRELIMGEDPAQPRKYKKKKKELQGDGPPSSPTNDPTVKYETQPRFITATGGTLHMYQLEGLNWLRFSWAQGTDTILADEMGLGKTIQTIVFLYSLYKEGHTKGPFLVSAPLSTIINWEREFQMWAPKFYVVTYTGDKDSRAIIRENEFSFEDNAIKGGKKAFKMKREAQVKFHVLLTSYELITIDQAALGSIRWACLVVDEAHRLKNNQSKFFRVLNGYKIDHKLLLTGTPLQNNLEELFHLLNFLTPERFNNLEGFLEEFADISKEDQIKKLHDLLGPHMLRRLKADVFKNMPAKTELIVRVELSPMQKKYYKYILTRNFEALNSRGGGNQVSLLNIMMDLKKCCNHPYLFPVAAMESPKLPSGAYEGGALIKSSGKLMLLQKMLRKLKEQGHRVLIFSQMTKMLDLLEDFLDYEGYKYERIDGGITGALRQEAIDRFNAPGAQQFCFLLSTRAGGLGINLATADTVIIFDSDWNPHNDIQAFSRAHRIGQANKVMIYRFVTRASVEERITQVAKRKMMLTHLVVRPGLGSKAGSMSKQELDDILKFGTEELFKDENEGENKEEDSSVIHYDNEAIARLLDRNQDATEDTDVQNMNEYLSSFKVAQYVVREEDKIEEIEREIIKQEENVDPDYWEKLLRHHYEQQQEDLARNLGKGKRVRKQVNYNDAAQEDQDNQSEYSVGSEEEDEDFDERPEGRRQSKRQLRNEKDKPLPPLLARVGGNIEVLGFNTRQRKAFLNAVMRWGMPPQDAFTTQWLVRDLRGKTEKEFKAYVSLFMRHLCEPGADGSETFADGVPREGLSRQQVLTRIGVMSLVKKKVQEFEHINGRWSMPELMPDPSADSKRSSRASSPTKTSPTTPEASATNSPCTSKPATPAPSEKGEGIRTPLEKEEAENQEEKPEKNSRIGEKMETEADAPSPAPSLGERLEPRKIPLEDEVPGVPGEMEPEPGYRGDREKSEDVKGDRELRPGPRDEPRSNGRREEKTEKPRFMFNIADGGFTELHTLWQNEERAAISSGKLNEIWHRRHDYWLLAGIVLHGYARWQDIQNDAQFAIINEPFKTEANKGNFLEMKNKFLARRFKLLEQALVIEEQLRRAAYLNLSQEPAHPAMALHARFAEAECLAESHQHLSKESLAGNKPANAVLHKVLNQLEELLSDMKADVTRLPATLSRIPPIAARLQMSERSILSRLASKGTEPHPTPAYPPGPYATPPGYGAAFSAAPVGALAAAGANYSQMPAGSFITAATNGPPVLVKKEKEMVGALVSDGLDRKEPRAGEVICIDD

SEQ ID NO: 26252 - protein, 2059 aa, Homo sapiens
MASPLRDEEEEEEEMVVSEEEEEEEEEGDEEEEEEVEAADEDDEEDDDEGVLGRGPGHDRGRDRHSPPGCHLFPPPPPPPPPLPPPPPPPPPDKDDIRLLPSALGVKKRKRGPKKQKENKPGKPRKRKKRDSEEEFGSERDEYREKSESGGSEYGTGPGRKRRRKHREKKEKKTKRRKKGEGDGGQKQVEQKSSATLLLTWGLEDVEHVFSEEDYHTLTNYKAFSQFMRPLIAKKNPKIPMSKMMTILGAKWREFSANNPFKGSAAAVAAAAAAAAAAVAEQVSAAVSSATPIAPSGPPALPPPPAADIQPPPIRRAKTKEGKGPGHKRRSKSPRVPDGRKKLRGKKMAPLKIKLGLLGGKRKKGGSYVFQSDEGPEPEAEESDLDSGSVHSASGRPDGPVRTKKLKRGRPGRKKKKVLGCPAVAGEEEVDGYETDHQDYCEVCQQGGEIILCDTCPRAYHLVCLDPELDRAPEGKWSCPHCEKEGVQWEAKEEEEEYEEEGEEEGEKEEEDDHMEYCRVCKDGGELLCCDACISSYHIHCLNPPLPDIPNGEWLCPRCTCPVLKGRVQKILHWRWGEPPVAVPAPQQADGNPDVPPPRPLQGRSEREFFVKWVGLSYWHCSWAKELQLEIFHLVMYRNYQRKNDMDEPPPLDYGSGEDDGKSDKRKVKDPHYAEMEEKYYRFGIKPEWMTVHRIINHSVDKKGNYHYLVKWRDLPYDQSTWEEDEMNIPEYEEHKQSYWRHRELIMGEDPAQPRKYKKKKKELQGDGPPSSPTNDPTVKYETQPRFITATGGTLHMYQLEGLNWLRFSWAQGTDTILADEMGLGKTIQTIVFLYSLYKEGHTKGPFLVSAPLSTIINWEREFQMWAPKFYVVTYTGDKDSRAIIRENEFSFEDNAIKGGKKAFKMKREAQVKFHVLLTSYELITIDQAALGSIRWACLVVDEAHRLKNNQSKFFRVLNGYKIDHKLLLTGTPLQNNLEELFHLLNFLTPERFNNLEGFLEEFADISKEDQIKKLHDLLGPHMLRRLKADVFKNMPAKTELIVRVELSPMQKKYYKYILTRNFEALNSRGGGNQVSLLNIMMDLKKCCNHPYLFPVAAMESPKLPSGAYEGGALIKSSGKLMLLQKMLRKLKEQGHRVLIFSQMTKMLDLLEDFLDYEGYKYERIDGGITGALRQEAIDRFNAPGAQQFCFLLSTRAGGLGINLATADTVIIFDSDWNPHNDIQAFSRAHRIGQANKVMIYRFVTRASVEERITQVAKRKMMLTHLVVRPGLGSKAGSMSKQELDDILKFGTEELFKDENEGENKEEDSSVIHYDNEAIARLLDRNQDATEDTDVQNMNEYLSSFKVAQYVVREEDKIEEIEREIIKQEENVDPDYWEKLLRHHYEQQQEDLARNLGKGKRVRKQVNYNDAAQEDQDNQSEYSVGSEEEDEDFDERPEGRRQSKRQLRNEKDKPLPPLLARVGGNIEVLGFNTRQRKAFLNAVMRWGMPPQDAFTTQWLVRDLRGKTEKEFKAYVSLFMRHLCEPGADGSETFADGVPREGLSRQQVLTRIGVMSLVKKKVQEFEHINGRWSMPELMPDPSADSKRSSRASSPTKTSPTTPEASATNSPCTSKPATPAPSEKGEGIRTPLEKEEAENQEEKPEKNSRIGEKMETEADAPSPAPSLGERLEPRKIPLEDEVPGVPGEMEPEPGYRGDREKSATESTPGERGEEKPLDGQEHRERPEGETGDLGKREDVKGDRELRPGPRDEPRSNGRREEKTEKPRFMFNIADGGFTELHTLWQNEERAAISSGKLNEIWHRRHDYWLLAGIVLHGYARWQDIQNDAQFAIINEPFKTEANKGNFLEMKNKFLARRFKLLEQALVIEEQLRRAAYLNLSQEPAHPAMALHARFAEAECLAESHQHLSKESLAGNKPANAVLHKVLNQLEELLSDMKADVTRLPATLSRIPPIAARLQMSERSILSRLASKGTEPHPTPAYPPGPYATPPGYGAAFSAAPVGALAAAGANYSQMPAGSFITAATNGPPVLVKKEKEMVGALVSDGLDRKEPRAGEVICIDD

SEQ ID NO: 26253 - protein, 405 aa, Homo sapiens
MQEKDASSQGFLPHFQHFATQAIHVGQDPEQWTSRAVVPPISLSTTFKQGAPGQHSGFEYSRSGNPTRNCLEKAVAALDGAKYCLAFASGLAATVTITHLLKAGDQIICMDDVYGGTNRYFRQVASEFGLKISFVDCSKIKLLEAAITPETKLVWIETPTNPTQKVIDIEGCAHIVHKHGDIILVVDNTFMSPYFQRPLALGADISMYSATKYMNGHSDVVMGLVSVNCESLHNRLRFLQNSLGAVPSPIDCYLCNRGLKTLHVRMEKHFKNGMAVAQFLESNPWVEKVIYPGLPSHPQHELVKRQCTGCTGMVTFYIKGTLQHAEIFLKNLKLFTLAESLGGFESLAELPAIMTHASVLKNDRDVLGISDTLIRLSVGLEDEEDLLEDLDQALKAAHPPSGSHS

SEQ ID NO: 26254 - protein, 361 aa, Homo sapiens
MQEKDASSQGFLPHFQHFATQAIHVGQDPEQWTSRAVVPPISLSTTFKQGAPGQHSGFEYSRSGNPTRNCLEKAVAALDGAKYCLAFASGLAATVTITHLLKAGDQIICMDDVYGGTNRYFRQVASEFGLKISFVDCSKIKLLEAAITPETKRPLALGADISMYSATKYMNGHSDVVMGLVSVNCESLHNRLRFLQNSLGAVPSPIDCYLCNRGLKTLHVRMEKHFKNGMAVAQFLESNPWVEKVIYPGLPSHPQHELVKRQCTGCTGMVTFYIKGTLQHAEIFLKNLKLFTLAESLGGFESLAELPAIMTHASVLKNDRDVLGISDTLIRLSVGLEDEEDLLEDLDQALKAAHPPSGSHS

SEQ ID NO: 26255 - protein, 373 aa, Homo sapiens
MQEKDASSQGFLPHFQHFATQAIHVGQDPEQWTSRAVVPPISLSTTFKQGAPGQHSGFEYSRSGNPTRNCLEKAVAALDGAKYCTNRYFRQVASEFGLKISFVDCSKIKLLEAAITPETKLVWIETPTNPTQKVIDIEGCAHIVHKHGDIILVVDNTFMSPYFQRPLALGADISMYSATKYMNGHSDVVMGLVSVNCESLHNRLRFLQNSLGAVPSPIDCYLCNRGLKTLHVRMEKHFKNGMAVAQFLESNPWVEKVIYPGLPSHPQHELVKRQCTGCTGMVTFYIKGTLQHAEIFLKNLKLFTLAESLGGFESLAELPAIMTHASVLKNDRDVLGISDTLIRLSVGLEDEEDLLEDLDQALKAAHPPSGSHS

SEQ ID NO: 26256 - protein, 1854 aa, Homo sapiens
MKEPDDQDTDGEKSVTSKSDGKKSLRSSKSESRSPVQEDNTFLEDDTDETFTKGEGSYLEEDSDEERLEGSLSSFQYGDLQSTTVPQQTPAPAVEEAEEEVKKKISESFFYDYMELASMPFVTLDSNIPLDLLTLVHSFGYDCRKRANLQLLDDSIAIYIAGNQLIFLNLKTKEQIYLRSSSGEGIGVIGVHPHKTYFTVAEKGSFPDIIIYEYPSLRPYRVLRDGTEKGYAYVDFNYSGNLLASVGSNPDYTLTIWNWKEEQPILRTKAFSQEVFKVTFNPDKEEQLTTSGSGHIKFWEMAFTFTGLKLQGSLGRFGKTITTDIEGYMELPDGKVLSGSEWGNMLLWEGGLIKVELCRGTSKSCHNGPINQIMLYEGEVITVGSDGYVRIWDFETIDTADVIDETGLLEIEPINELQVDKNVNLFSMIKMNETGNNFWLAQDANGAIWKLDLSFSNITQDPECLFSFHSGAIEAVAVSPLTYLMATTALDCSVRIYDFASKTPLAQMKFKQGGTALVWVPRMVNFTGAQIIVGFEDGVVRILELYDPKGLTIFAGRKKILDADIQLKQVFKPHTACVTALAYERDGEILATGSKDQTVFFFEVERDYKPIGYINTPGPVCQLMWSPMSHPESTLLIICENGYILEAPLPTIKQEEDDHDVVSYEIKDMCIKCFHFSSVKSKILRLIEIEKRERQRELKEKIREERRNKLAAEMGEDGEKEFQEEEEEKEEEEEEEEPLPEIFIPSTPSPILCGFYSEPGKFWVSLGGYDSGFLYHCEFPPCDESSDFKEQKDEPIDVRYLADTEDNPIQTITFNINKVMMFCGMKNGAIRVYVLNQNDPSLTSLVDYWHFNMHDNNYGCIKSIANSFDDRFLVTAGADGNIFVFNIFSEFMLRKDMKAKVPSPRFGIETEPIPEDIEDPKAYSIENARRKREHDKLMKEVGEIKARKREQIKALRSEFCNLLEMNEKLPKHMQFKRTDFDVDSQIRAEMHRKTAFKIQQVEKELAWEKEKHELGLMKLKNRFRDPLESDTIVVHAILSDHKISSYRLVQPSKYSKFKRASQSERKPSKLDRFEKEGPGRKDSQRDAGGSVTIQEESIIEKGKKFRPKTLSEIIVENQIEKTRKLILKAERAQLKIQQRKKEWEELYKSKPGDDYEDPKDLQAIKEAQVYMGDFNLKTAPDYKIPEHMRINAAKKEEELGHLDSLVHGNKRHMNKCILSLRDLKVAVVEEIQCLVQELKNIQSTLHISKHIPIPKIPQIHPEEVPEKRFQYDEETLLNFKQQQMKSKDEKSPGVEQTGSGGPVGGFLKLSSRKDGDLTTRDSISRSSKASTFSLDIPKCLEFEKAEPTDVELEIMKRDEIKHVYMQQYLVNRIKELVVTFDAELRLLRHQKLKLDTQMKLSDLHHVTLFQEILLLKNFEKQENILQERVNSLDKEEQYMQWKINETLKEMEEKKNEITKLQEQEKALYAGFQAAIGENNKFANFLMKVLKKKIKRVKKKEVEGDADEDEESEESSEEESSLESDEDESESEDEVFDDSICPTNCDVALFELALHLREKRLDIEEALVEEKKIVDNLKKEYDTLSKKVKIVATNLNAAEEALEAYQREKQQRLNELLVVIPLKLHQIEYVVFGEIPSDLSGTLVFSNHALRRLQERIHELQEENSKQQKLNKEWRERRKQLIREKREMTKTIHKMEETVRQLMISKFGRVVNLEALQTLSVNTTLEELKIRKLRKELANAKEMKMWEEKIAQMRWELMMKTKEHTRKLYQMNDLCIEKKKLDSRLNTLQNQQGNAFQGPREADVVAREEVTELIQLQAERISALKEEIALLRRKGSLILPPIQSPREKEIQPADL

SEQ ID NO: 26257 - protein, 982 aa, Homo sapiens
MKEPDDQDTDGEKSVTSKSDGKKSLRSSKSESRSPVQEDNTFLEDDTDETFTKGEGSYLEEDSDEERLEGSLSSFQYGDLQSTTVPQQTPAPAVEEAEEEVKKKISESFFYDYMELASMPFVTLDSNIPLDLLTLVHSFGYDCRKRANLQLLDDSIAIYIAGNQLIFLNLKTKEQIYLRSSSGEGIGVIGVHPHKTYFTVAEKGSFPDIIIYEYPSLRPYRVLRDGTEKGYAYVDFNYSGNLLASVGSNPDYTLTIWNWKEEQPILRTKAFSQEVFKVTFNPDKEEQLTTSGSGHIKFWEMAFTFTGLKLQGSLGRFGKTITTDIEGYMELPDGKVLSGSEWGNMLLWEGGLIKVELCRGTSKSCHNGPINQIMLYEGEVITVGSDGYVRIWDFETIDTADVIDETGLLEIEPINELQVDKNVNLFSMIKMNETGNNFWLAQDANGAIWKLDLSFSNITQDPECLFSFHSGAIEAVAVSPLTYLMATTALDCSVRIYDFASKTPLAQMKFKQGGTALVWVPRMVNFTGAQIIVGFEDGVVRILELYDPKGLTIFAGRKKILDADIQLKQVFKPHTACVTALAYERDGEILATGSKDQTVFFFEVERDYKPIGYINTPGPVCQLMWSPMSHPESTLLIICENGYILEAPLPTIKQEEDDHDVVSYEIKDMCIKCFHFSSVKSKILRLIEIEKRERQRELKEKIREERRNKLAAEMGEDGEKEFQEEEEEKEEEEEEEEPLPEIFIPSTPSPILCGFYSEPGKFWVSLGGYDSGFLYHCEFPPCDESSDFKEQKDEPIDVRYLADTEDNPIQTITFNINKVMMFCGMKNGAIRVYVLNQNDPSLTSLVDYWHFNMHDNNYGCIKSIANSFDDRFLVTAGADGNIFVFNIFSEFMLRKDMKAKVPSPRFGIETEPIPEDIEDPKAYSIENARRKREHDKLMKEVGEIKARKREQIKALRSEFCNLLEMNEKLPKHMQFKRTVSLI

SEQ ID NO: 26258 - protein, 1665 aa, Homo sapiens
MAQGRERDEGPHSAGGASLSVRWVQGFPKQNVHFVNDNTICYPCGNYVIFINIETKKKTVLQCSNGIVGVMATNIPCEVVAFSDRKLKPLIYVYSFPGLTRRTKLKGNILLDYTLLSFSYCGTYLASYSSLPEFELALWNWESSIILCKKSQPGMDVNQMSFNPMNWRQLCLSSPSTVSVWTIERSNQEHCFRARSVKLPLEDGSFFNETDVVFPQSLPKDLIYGPVLPLSAIAGLVGKEAETFRPKDDLYPLLHPTMHCWTPTSDLYIGCEEGHLLMINGDTLQVTVLNKIEEESPLDRRNFISPVTLVYQKEGVLASGIDGFVYSFIIKDRSYMIEDFLEIERPVEHMTFSPNYTVLLIQTDKGSVYIYTFGKEPTLNKVLDACDGKFQAIDFITPGTQYFMTLTYSGEICVWWLEDCACVSKIYLNTLATVLACCPSSLSAAVGTEDGSVYFISVYDKESPQVVHKAFLSESSVQHVVYDQQGIFLLVGTAEGKVFIINANSSSSFQIIGFTEVAKDILQISTVSLLETDIVEVMVLSSLPEAGRSRLEMFTLPTLLPQVSTTFADERGRLKDEIIHKYLYELEHALSSAVLGFQSNQIYGFCSQVPYICSYLLPEEEHTGIYILKPYKKVQSRQYGPGLLYLSSHGLWLITIAKCGILCIRDVYTLETFAWCRSHSHQGHGIQSMRISMDGQNILVNGRDDGTLVYLKWKRFGGHLASEILDYYQKLLISLSSAMDKENHYLSTTPKVSVDLGSDSEHTKQKASTDLSQDELVLTDVKKEIPWIQQKSQEAIKKEVNLFSKKRKEIKQGIKSLSKTILNMMEENDKLENIAKLDQQEFGLDLEELERLHDESQEEVAKMIKDVEMHNLAKSYLAELIKEECWNSMAVKGRALKCFHIPCVVENFPMKARTVEELKELERVLQQKKIEAECLKLRKEIVEAQSGVKLIKQRHEEDDEEEEEEDKTVKYSNLPNYLLGSLSTDFGVDTSLLSSQLELHSREEKINQIILLKDIIYKVKTVFNNEFDAAYKQKEFEIARVKERNVRIREIILDLELEEAVWQPEFEDCEKPERTLVVQDEEITAHKHIKPWHKAKELIVNHEKEHWLLIQDASTRLRALMDMMGGVLEVKKEDILRMVIPQPAFMAKPDAVWTEEERKQFKDYEKKVKELNEERDKYRKSLEAELKKLQNSIQESTQAFDEHLKRLFERRVKAEMVTNQEELKISNLAFSLLLDEELSSREKFLNNYLTRKQHEKSQTSEAVRKSREDLDVCKEHYDNLLAEDKVMDRSFKKEFSEIPGHQVDILYKLFKRRPRISKQKTHSETTSVVPFGELPGSGKLNKDAFAQLMKAMDELDNISNMPEGLDPLVWNHFCMTRRAKVENEQKVKQKAADLLEMATFLQKRVEEEEKVQQEIERVFHELILLQEEKVRFQLNLTIQILLKQGQVELENFQLVLEYSDAILINKNIIEDLNSVIRTQGQKKVASMMESKDVHKRILQIEWEHKKMEMEREDLNQKAWDIQMLFFSRDRQKYLNEPNYEALISIQIGIMEQTIAVLDKMHKKNVENCKKLLKKLGKFSNQKDIANYALSCNLREELVAVSERKDICNAMGSKLTCEKIVKERYENMMQQQKLTNISKQQAEQISILQTEVERLRMKTFPALVQM

SEQ ID NO: 26259 - protein, 1636 aa, Homo sapiens
MAQGRERDEGPHSAGGASLSVRWVQGFPKQNVHFVNDNTICYPCGNYVIFINIETKKKTVLQCSNGIVGVMATNIPCEVVAFSDRKLKPLIYVYSFPGLTRRTKLKGNILLDYTLLSFSYCGTYLASYSSLPEFELALWNWESSIILCKKSQPGMDVNQMSFNPMNWRQLCLSSPSTVSVWTIERSNQEHCFRARSVKLPLEDGSFFNETDVVFPQSLPKDLIYGPVLPLSAIAGLVGKEAETFRPKDDLYPLLHPTMHCWTPTSDLYIGCEEGHLLMINGDTLQVTVLNKIEEESPLDRRNFISPVTLVYQKEGVLASGIDGFVYSFIIKDRSYMIEDFLEIERPVEHMTFSPNYTVLLIQTDKGSVYIYTFGKEPTLNKVLDACDGKFQAIDFITPGTQYFMTLTYSGEICVWWLEDCACVSKIYLNTLATVLACCPSSLSAAVGTEDGSVYFISVYDKESPQVVHKAFLSESSVQHVVYDQQGIFLLVGTAEGKVFIINANSSSSFQIIGFTEVAKDILQISTVSLLETDIVEVMVLSSLPEAGRSRLEMFTLPTLLPQVSTTFADERGRLKDEIIHKYLYELEHALSSAVLGFQSNQIYGFCSQVPYICSYLLPEEEHTGIYILKPYKKVQSRQYGPGLLYLSSHGLWLITIAKCGILCIRDVYTLETFAWCRSHSHQGHGIQSMRISMDGQNILVNGRDDGTLVYLKWKRFGGHLASEILDYYQKLLISLSSAMDKENHYLSTTPKVSVDLGSDSEHTKQKASTDLSQDELVLTDVKKEIPWIQQKSQEAIKKEVNLFSKKRKEIKQGIKSLSKTILNMMEENDKLENIAKLDQQEFGLDLEELERLHDESQEEVAKMIKDVEMHNLAKSYLAELIKEECWNSMAVKGRALKCFHIPCVVENFPMKARTVEELKELERVLQQKKIEAECLKLRKEIVEAQSGVKLIKQRHEEDDEEEEEEDKTVKYSNLPNYLLGSLSTDFGVDTSLLSSQLELHSREEKINQIILLKDIIYKVKTVFNNEFDAAYKQKEFEIARVKERNVRIREIILDLELEEAVWQPEFEDCEKPERTLVVQDEEITAHKHIKPWHKAKELIVNHEKEHWLLIQDASTRLRALMDMMGGVLEVKKEDILRMVIPQPAFMAKPDAVWTEEERKQFKDYEKKVKELNEERDKYRKSLEAELKKLQNSIQESTQAFDEHLKRLFERRVKAEMVTNQEELKISNLAFSLLLDEELSSREKFLNNYLTRKQHEKVMDRSFKKEFSEIPGHQVDILYKLFKRRPRISKQKTHSETTSVVPFGELPGSGKLNKDAFAQLMKAMDELDNISNMPEGLDPLVWNHFCMTRRAKVENEQKVKQKAADLLEMATFLQKRVEEEEKVQQEIERVFHELILLQEEKVRFQLNLTIQILLKQGQVELENFQLVLEYSDAILINKNIIEDLNSVIRTQGQKKVASMMESKDVHKRILQIEWEHKKMEMEREDLNQKAWDIQMLFFSRDRQKYLNEPNYEALISIQIGIMEQTIAVLDKMHKKNVENCKKLLKKLGKFSNQKDIANYALSCNLREELVAVSERKDICNAMGSKLTCEKIVKERYENMMQQQKLTNISKQQAEQISILQTEVERLRMKTFPALVQM

SEQ ID NO: 26260 - protein, 939 aa, Homo sapiens
MAQGRERDEGPHSAGGASLSVRWVQGFPKQNVHFVNDNTICYPCGNYVIFINIETKKKTVLQCSNGIVGVMATNIPCEVVAFSDRKLKPLIYVYSFPGLTRRTKLKGNILLDYTLLSFSYCGTYLASYSSLPEFELALWNWESSIILCKKSQPGMDVNQMSFNPMNWRQLCLSSPSTVSVWTIERSNQEHCFRARSVKLPLEDGSFFNETDVVFPQSLPKDLIYGPVLPLSAIAGLVGKEAETFRPKDDLYPLLHPTMHCWTPTSDLYIGCEEGHLLMINGDTLQVTVLNKIEEESPLDRRNFISPVTLVYQKEGVLASGIDGFVYSFIIKDRSYMIEDFLEIERPVEHMTFSPNYTVLLIQTDKGSVYIYTFGKEPTLNKVLDACDGKFQAIDFITPGTQYFMTLTYSGEICVWWLEDCACVSKIYLNTLATVLACCPSSLSAAVGTEDGSVYFISVYDKESPQVVHKAFLSESSVQHVVYDQQGIFLLVGTAEGKVFIINANSSSSFQIIGFTEVAKDILQISTVSLLETDIVEVMVLSSLPEAGRSRLEMFTLPTLLPQVSTTFADERGRLKDEIIHKYLYELEHALSSAVLGFQSNQIYGFCSQVPYICSYLLPEEEHTGIYILKPYKKVQSRQYGPGLLYLSSHGLWLITIAKCGILCIRDVYTLETFAWCRSHSHQGHGIQSMRISMDGQNILVNGRDDGTLVYLKWKRFGGHLASEILDYYQKLLISLSSAMDKENHYLSTTPKVSVDLGSDSEHTKQKASTDLSQDELVLTDVKKEIPWIQQKSQEAIKKEVNLFSKKRKEIKQGIKSLSKTILNMMEENDKLENIAKLDQQEFGLDLEELERLHDESQEEVAKMIKDVEMHNLAKSYLAELIKEECWNSMAVKGRALKCFHIPCVVENFPMKARTVEELKELERVLQQKKIEAECLKVLF

SEQ ID NO: 26261 - protein, 481 aa, Homo sapiens
MAQGRERDEGPHSAGGASLSVRWVQGFPKQNVHFVNDNTICYPCGNYVIFINIETKKKTVLQCSNGIVGVMATNIPCEVVAFSDRKLKPLIYVYSFPGLTRRTKLKGNILLDYTLLSFSYCGTYLASYSSLPEFELALWNWESSIILCKKSQPGMDVNQMSFNPMNWRQLCLSSPSTVSVWTIERSNQEHCFRARSVKLPLEDGSFFNETDVVFPQSLPKDLIYGPVLPLSAIAGLVGKEAETFRPKDDLYPLLHPTMHCWTPTSDLYIGCEEGHLLMINGDTLQVTVLNKIEEESPLDRRNFISPVTLVYQKEGVLASGIDGFVYSFIIKDRSYMIEDFLEIERPVEHMTFSPNYTVLLIQTDKGSVYIYTFGKEPTLNKVLDACDGKFQAIDFITPGTQYFMTLTYSGEICVWWLEDCACVSKIYLNTLATVLACCPSSLSAAVGTEDGSVYFISVYDKESPQVVHKAFLSESSVQHVV

SEQ ID NO: 26262 - protein, 372 aa, Homo sapiens
MAQGRERDEGPHSAGGASLSVRWVQGFPKQNVHFVNDNTICYPCGNYVIFINIETKKKTVLQCSNGIVGVMATNIPCEVVAFSDRKLKPLIYVYSFPGLTRRTKLKGNILLDYTLLSFSYCGTYLASYSSLPEFELALWNWESSIILCKKSQPGMDVNQMSFNPMNWRQLCLSSPSTVSVWTIERSNQEHCFRARSVKLPLEDGSFFNETDVVFPQSLPKDLIYGPVLPLSAIAGLVGKEAETFRPKDDLYPLLHPTMHCWTPTSDLYIGCEEGHLLMINGDTLQVTVLNKIEEESPLDRRNFISPVTLVYQKEGVLASGIDGFVYSFIIKDRSYMIEDFLEIERPVEHMTFSPNYTVLLIQTDKVCWMVIS

SEQ ID NO: 26263 - protein, 131 aa, Homo sapiens
MADVVVGKDKGGEQRLISLPLSRIRVIMKSSPEVSSINQEALVLTAKATELFVQCLATYSYRHGSGKEKKVLTYSDLANTAQQSETFQFLADILPKKILASKYLKMLKEEKREEDEENDNDNESDHDEADS

SEQ ID NO: 26264 - protein, 93 aa, Homo sapiens
MDTQKQIHKTHNSKNQFFTIFFFLSVEFGKEGTRKNFYLLLSIGHYGRKSRRADLGTADTADKTEPECFAASWTFDPNPSVTVSGAHSTAVHQ

SEQ ID NO: 26265 - protein, 344 aa, Homo sapiens
MGPPSAPPCRLHVPWKEVLLTASLLTFWNPPTTAKLTIESTPFNVAEGKEVLLLAHNLPQNRIGYSWYKGERVDGNSLIVGYVIGTQQATPGPAYSGRETIYPNASLLIQNVTQNDTGFYTLQVIKSDLVNEEATGQFHVYPELPKPSISSNNSNPVEDKDAVAFTCEPEVQNTTYLWWVNGQSLPVSPRLQLSNGNMTLTLLSVKRNDAGSYECEIQNPASANRSDPVTLNVLYGPDGPTISPSKANYRPGENLNLSCHAASNPPAQYSWFINGTFQQSTQELFIPNITVNNSGSYMCQAHNSATGLNRTTVTMITVSGSAPVLSAVATVGITIGVLARVALI

SEQ ID NO: 26266 - protein, 233 aa, Homo sapiens
MSKLGKFFKGGGSSKSRAAPSPQEALVRLRETEEMLGKKQEYLENRIQREIALAKKHGTQNKRAALQALKRKKRFEKQLTQIDGTLSTIEFQREALENSHTNTEVLRNMGFAAKAMKSVHENMDLNKIDDLMQEITEQQDIAQEISEAFSQRVGFGDDFDEDELMAELEELEQEELNKKMTNIRLPNVPSSSLPAQPNRKPGMSSTARRSRAASSQRAEEEDDDIKQLAAWAT

SEQ ID NO: 26267 - protein, 199 aa, Homo sapiens
MSNMEKHLFNLKFAAKELSRSAKKCDKEEKAEKAKIKKAIQKGNMEVARIHAENAIRQKNQAVNFLRMSARVDAVAARVQTAVTMGKVTKSMAGVVKSMDATLKTMNLEKISALMDKFEHQFETLDVQTQQMEDTMSSTTTLTTPQNQVDMLLQEMADEAGLDLNMELPQGQTGSVGTSVASAEQDELSQRLARLRDQV

SEQ ID NO: 26268 - protein, 216 aa, Homo sapiens
MWPPCGTLRTLALARSRGARACSGDGGVSYTQGQSPEPRTREYFYYVDHQGQLFLDDSKMKNFITCFKDPQFLVTFFSRLRPNRSGRYEAAFPFLSPCGRERNFLRCEDRPVVFTHLLTADHGPPRLSYCGGGEALAVPFEPARLLPLAANGRLYHPAPERAGGVGLVRSALAFELSACFEYGPGAPALPSHVRWQGRRLALTMDLAPLLLAARSP

SEQ ID NO: 26269 - protein, 208 aa, Homo sapiens
MGSPTLPTGPAHQGVGVLRSGAPLSEARRTSYRRRLPSVWSWARRPWEPSALSTRTLHPPDPQFLVTFFSRLRPNRSGRYEAAFPFLSPCGRERNFLRCEDRPVVFTHLLTADHGPPRLSYCGGGEALAVPFEPARLLPLAANGRLYHPAPERAGGVGLVRSALAFELSACFEYGPGAPALPSHVRWQGRRLALTMDLAPLLLAARSP

SEQ ID NO: 26270 - protein, 352 aa, Homo sapiens [sequence omitted]

SEQ ID NO: 26271 - protein, 269 aa, Homo sapiens
MNQEDLDPDSTTDVGDVTNTEEELIRECEEMWKDMEECQNKLSLIGTETLTDSNAQLSLLIMQVKCLTAELSQWQKKTPETIPLTEDVLITLGKEEFQKLRQDLEMVLSTKESKNEKLKEDLEREQRWLDEQQQIMESLNVLHSELKNKVETFSESRIFNELKTKMLNIKEYKEKLLSTLGEFLEDHFPLPDRSVKKKKKNIQESSVNLITLHEMLEILINRLFDVPHDPYVKISDSFWPPYVELLLRNGIALRHPEDPTRIRLEAFHQ

SEQ ID NO: 26272 - protein, 142 aa, Homo sapiens
MDGGSLRASPAAMDGGALEPAQQLSSLEGWTGQDRLLIPRWREARSLSWMQSPDLESSKCLTQGCCYPQAWILACSAALLQALASSDLQGSLDRVNYSRGLGPRVRLFVFPDTVGSTRKSGSTGNICSVMLNVATGCVRIEK

SEQ ID NO: 26273 - protein, 2027 aa, Homo sapiens
MLKFKYGARNPLDAGAAEPIASRASRLNLFFQGKPPFMTQQQMSPLSREGILDALFVLFEECSQPALMKIKHVSNFVRKYSDTIAELQELQPSAKDFEVRSLVGCGHFAEVQVVREKATGDIYAMKVMKKKALLAQEQVSFFEEERNILSRSTSPWIPQLQYAFQDKNHLYLVMEYQPGGDLLSLLNRYEDQLDENLIQFYLAELILAVHSVHLMGYVHRDIKPENILVDRTGHIKLVDFGSAAKMNSNKMVNAKLPIGTPDYMAPEVLTVMNGDGKGTYGLDCDWWSVGVIAYEMIYGRSPFAEGTSARTFNNIMNFQRFLKFPDDPKVSSDFLDLIQSLLCGQKERLKFEGLCCHPFFSKIDWNNIRNSPPPFVPTLKSDDDTSNFDEPEKNSWVSSSPCQLSPSGFSGEELPFVGFSYSKALGILGRSESVVSGLDSPAKTSSMEKKLLIKSKELQDSQDKCHKMEQEMTRLHRRVSEVEAVLSQKEVELKASETQRSLLEQDLATYITECSSLKRSLEQARMEVSQEDDKALQLLHDIREQSRKLQEIKEQEYQAQVEEMRLMMNQLEEDLVSARRRSDLYESELRESRLAAEEFKRKATECQHKLLKAKDQGKPEVGEYAKLEKINAEQQLKIQELQEKLEKAVKASTEATELLQNIRQAKERAERELEKLQNREDSSEGIRKKLVEAEELEEKHREAQVSAQHLEVHLKQKEQHYEEKIKVLDNQIKKDLADKETLENMMQRHEEEAHEKGKILSEQKAMINAMDSKIRSLEQRIVELSEANKLAANSSLFTQRNMKAQEEMISELRQQKFYLETQAGKLEAQNRKLEEQLEKISHQDHSDKNRLLELETRLREVSLEHEEQKLELKRQLTELQLSLQERESQLTALQAARAALESQLRQAKTELEETTAEAEEEIQALTAHRDEIQRKFDALRNSCTVITDLEEQLNQLTEDNAELNNQNFYLSKQLDEASGANDEIVQLRSEVDHLRREITEREMQLTSQKQTMEALKTTCTMLEEQVMDLEALNDELLEKERQWEAWRSVLGDEKSQFECRVRELQRMLDTEKQSRARADQRITESRQVVELAVKEHKAEILALQQALKEQKLKAESLSDKLNDLEKKHAMLEMNARSLQQKLETERELKQRLLEEQAKLQQQMDLQKNHIFRLTQGLQEALDRADLLKTERSDLEYQLENIQVLYSHEKVKMEGTISQQTKLIDFLQAKMDQPAKKKKGLFSRRKEDPALPTQVPLQYNELKLALEKEKARCAELEEALQKTRIELRSAREEAAHRKATDHPHPSTPATARQQIAMSAIVRSPEHQPSAMSLLAPPSSRRKESSTPEEFSRRLKERMHHNIPHRFNVGLNMRATKCAVCLDTVHFGRQASKCLECQVMCHPKCSTCLPATCGLPAEYATHFTEAFCRDKMNSPGLQTKEPSSSLHLEGWMKVPRNNKRGQQGWDRKYIVLEGSKVLIYDNEAREAGQRPVEEFELCLPDGDVSIHGAVGASELANTAKADVPYILKMESHPHTTCWPGRTLYLLAPSFPDKQRWVTALESVVAGGRVSREKAEADAKLLGNSLLKLEGDDRLDMNCTLPFSDQVVLVGTEEGLYALNVLKNSLTHVPGIGAVFQIYIIKDLEKLLMIAGEERALCLVDVKKVKQSLAQSHLPAQPDISPNIFEAVKGCHLFGAGKIENGLCICAAMPSKVVILRYNENLSKYCIRKEIETSEPCSCIHFTNYSILIGTNKFYEIDMKQYTLEEFLDKNDHSLAPAVFAASSNSFPVSIVQVNSAGQREEYLLCFHEFGVFVDSYGRRSRTDDLKWSRLPLAFAYREPYLFVTHFNSLEVIEIQARSSAGTPARAYLDIPNPRYLGPAISSGAIYLASSYQDKLRVICCKGNLVKESGTEHHRGPSTSRSSPNKRGPPTYNEHITKRVASSPAPPEGPSHPREPSTPHRYREGRTELRRDKSPGRPLEREKSPGRMLSTRRERSPGRLFEDSSRGRLPAGAVRTPLSQVNKVWDQSSV

SEQ ID NO: 26274 - protein, 482 aa, Homo sapiens
MLKFKYGARNPLDAGAAEPIASRASRLNLFFQGKPPFMTQQQMSPLSREGILDALFVLFEECSQPALMKIKHVSNFVRKYSDTIAELQELQPSAKDFEVRSLVGCGHFAEVQVVREKATGDIYAMKVMKKKALLAQEQVSFFEEERNILSRSTSPWIPQLQYAFQDKNHLYLVMEYQPGGDLLSLLNRYEDQLDENLIQFYLAELILAVHSVHLMGYVHRDIKPENILVDRTGHIKLVDFGSAAKMNSNKMVNAKLPIGTPDYMAPEVLTVMNGDGKGTYGLDCDWWSVGVIAYEMIYGRSPFAEGTSARTFNNIMNFQRFLKFPDDPKVSSDFLDLIQSLLCGQKERLKFEGLCCHPFFSKIDWNNIRNSPPPFVPTLKSDDDTSNFDEPEKNSWVSSSPCQLSPSGFSGEELPFVGFSYSKALGILGRSESVVSGLDSPAKTSSMEKKLLIKSKELQDSQDKCHKMEQEMTRLHRRVSGG

SEQ ID NO: 26275 - protein, 1544 aa, Homo sapiens
MEQEMTRLHRRVSEVEAVLSQKEVELKASETQRSLLEQDLATYITECSSLKRSLEQARMEVSQEDDKALQLLHDIREQSRKLQEIKEQEYQAQVEEMRLMMNQLEEDLVSARRRSDLYESELRESRLAAEEFKRKATECQHKLLKAKDQGKPEVGEYAKLEKINAEQQLKIQELQEKLEKAVKASTEATELLQNIRQAKERAERELEKLQNREDSSEGIRKKLVEAEELEEKHREAQVSAQHLEVHLKQKEQHYEEKIKVLDNQIKKDLADKETLENMMQRHEEEAHEKGKILSEQKAMINAMDSKIRSLEQRIVELSEANKLAANSSLFTQRNMKAQEEMISELRQQKFYLETQAGKLEAQNRKLEEQLEKISHQDHSDKNRLLELETRLREVSLEHEEQKLELKRQLTELQLSLQERESQLTALQAARAALESQLRQAKTELEETTAEAEEEIQALTAHRDEIQRKFDALRNSCTVITDLEEQLNQLTEDNAELNNQNFYLSKQLDEASGANDEIVQLRSEVDHLRREITEREMQLTSQKQTMEALKTTCTMLEEQVMDLEALNDELLEKERQWEAWRSVLGDEKSQFECRVRELQRMLDTEKQSRARADQRITESRQVVELAVKEHKAEILALQQALKEQKLKAESLSDKLNDLEKKHAMLEMNARSLQQKLETERELKQRLLEEQAKLQQQMDLQKNHIFRLTQGLQEALDRADLLKTERSDLEYQLENIQVLYSHEKVKMEGTISQQTKLIDFLQAKMDQPAKKKKVPLQYNELKLALEKEKARCAELEEALQKTRIELRSAREEAAHRKATDHPHPSTPATARQQIAMSAIVRSPEHQPSAMSLLAPPSSRRKESSTPEEFSRRLKERMHHNIPHRFNVGLNMRATKCAVCLDTVHFGRQASKCLECQVMCHPKCSTCLPATCGLPAEYATHFTEAFCRDKMNSPGLQTKEPSSSLHLEGWMKVPRNNKRGQQGWDRKYIVLEGSKVLIYDNEAREAGQRPVEEFELCLPDGDVSIHGAVGASELANTAKADVPYILKMESHPHTTCWPGRTLYLLAPSFPDKQRWVTALESVVAGGRVSREKAEADAKLLGNSLLKLEGDDRLDMNCTLPFSDQVVLVGTEEGLYALNVLKNSLTHVPGIGAVFQIYIIKDLEKLLMIAGEERALCLVDVKKVKQSLAQSHLPAQPDISPNIFEAVKGCHLFGAGKIENGLCICAAMPSKVVILRYNENLSKYCIRKEIETSEPCSCIHFTNYSILIGTNKFYEIDMKQYTLEEFLDKNDHSLAPAVFAASSNSFPVSIVQVNSAGQREEYLLCFHEFGVFVDSYGRRSRTDDLKWSRLPLAFAYREPYLFVTHFNSLEVIEIQARSSAGTPARAYLDIPNPRYLGPAISSGAIYLASSYQDKLRVICCKGNLVKESGTEHHRGPSTSRSPNKRGPPTYNEHITKRVASSPAPPEGPSHPREPSTPHRYREGRTELRRDKSPGRPLEREKSPGRMLSTRRERSPGRLFEDSSRGRLPAGAVRTPLSQVNKVWDQSSV

SEQ ID NO: 26276 - protein, 2069 aa, Homo sapiens
MLKFKYGARNPLDAGAAEPIASRASRLNLFFQGKPPFMTQQQMSPLSREGILDALFVLFEECSQPALMKIKHVSNFVRKYSDTIAELQELQPSAKDFEVRSLVGCGHFAEVQVVREKATGDIYAMKVMKKKALLAQEQVSFFEEERNILSRSTSPWIPQLQYAFQDKNHLYLVMEYQPGGDLLSLLNRYEDQLDENLIQFYLAELILAVHSVHLMGYVHRDIKPENILVDRTGHIKLVDFGSAAKMNSNKMVNAKLPIGTPDYMAPEVLTVMNGDGKGTYGLDCDWWSVGVIAYEMIYGRSPFAEGTSARTFNNIMNFQRFLKFPDDPKVSSDFLDLIQSLLCGQKERLKFEGLCCHPFFSKIDWNNIRNSPPPFVPTLKSDDDTSNFDEPEKNSWVSSSPCQLSPSGFSGEELPFVGFSYSKALGILGRSESVVSGLDSPAKTSSMEKKLLIKSKELQDSQDKCHKMEQEMTRLHRRVSEVEAVLSQKEVELKASETQRSLLEQDLATYITECSSLKRSLEQARMEVSQEDDKALQLLHDIREQSRKLQEIKEQEYQAQVEEMRLMMNQLEEDLVSARRRSDLYESELRESRLAAEEFKRKATECQHKLLKAKDQGKPEVGEYAKLEKINAEQQLKIQELQEKLEKAVKASTEATELLQNIRQAKERAERELEKLQNREDSSEGIRKKLVEAEERRHSLENKVKRLETMERRENRLKDDIQTKSQQIQQMADKILELEEKHREAQVSAQHLEVHLKQKEQHYEEKIKVLDNQIKKDLADKETLENMMQRHEEEAHEKGKILSEQKAMINAMDSKIRSLEQRIVELSEANKLAANSSLFTQRNMKAQEEMISELRQQKFYLETQAGKLEAQNRKLEEQLEKISHQDHSDKNRLLELETRLREVSLEHEEQKLELKRQLTELQLSLQERESQLTALQAARAALESQLRQAKTELEETTAEAEEEIQALTAHRDEIQRKFDALRNSCTVITDLEEQLNQLTEDNAELNNQNFYLSKQLDEASGANDEIVQLRSEVDHLRREITEREMQLTSQKQTMEALKTTCTMLEEQVMDLEALNDELLEKERQWEAWRSVLGDEKSQFECRVRELQRMLDTEKQSRARADQRITESRQVVELAVKEHKAEILALQQALKEQKLKAESLSDKLNDLEKKHAMLEMNARSLQQKLETERELKQRLLEEQAKLQQQMDLQKNHIFRLTQGLQEALDRADLLKTERSDLEYQLENIQVLYSHEKVKMEGTISQQTKLIDFLQAKMDQPAKKKKGLFSRRKEDPALPTQVPLQYNELKLALEKEKARCAELEEALQKTRIELRSAREEAAHRKATDHPHPSTPATARQQIAMSAIVRSPEHQPSAMSLLAPPSSRRKESSTPEEFSRRLKERMHHNIPHRFNVGLNMRATKCAVCLDTVHFGRQASKCLECQVMCHPKCSTCLPATCGLPAEYATHFTEAFCRDKMNSPGLQTKEPSSSLHLEGWMKVPRNNKRGQQGWDRKYIVLEGSKVLIYDNEAREAGQRPVEEFELCLPDGDVSIHGAVGASELANTAKADVPYILKMESHPHTTCWPGRTLYLLAPSFPDKQRWVTALESVVAGGRVSREKAEADAKLLGNSLLKLEGDDRLDMNCTLPFSDQVVLVGTEEGLYALNVLKNSLTHVPGIGAVFQIYIIKDLEKLLMIAGEERALCLVDVKKVKQSLAQSHLPAQPDISPNIFEAVKGCHLFGAGKIENGLCICAAMPSKVVILRYNENLSKYCIRKEIETSEPCSCIHFTNYSILIGTNKFYEIDMKQYTLEEFLDKNDHSLAPAVFAASSNSFPVSIVQVNSAGQREEYLLCFHEFGVFVDSYGRRSRTDDLKWSRLPLAFAYREPYLFVTHFNSLEVIEIQARSSAGTPARAYLDIPNPRYLGPAISSGAIYLASSYQDKLRVICCKGNLVKESGTEHHRGPSTSRSSPNKRGPPTYNEHITKRVASSPAPPEGPSHPREPSTPHRYREGRTELRRDKSPGRPLEREKSPGRMLSTRRERSPGRLFEDSSRGRLPAGAVRTPLSQVNKVWDQSSV

SEQ ID NO: 26277 - protein, 268 aa, Homo sapiens [sequence omitted]

SEQ ID NO: 26278 - protein, 1159 aa, Homo sapiens
MCGPAMFPAGPPWPRVRVVQVLWALLAVLLASWRLWAIKDFQECTWQVVLNEFKRVGESGVSDSFFEQEPVDTVSSLFHMLVDSPIDPSEKYLGFPYYLKINYSCEEKPSEDLVRMGHLTGLKPLVLVTFQSPVNFYRWKIEQLQIQMEAAPFRSKEPCMAEEVCSMSWYTPMPIKKGSVVMRVDISSNGLGTFIPDKRFQMNINGFLKRDRDNNIQFTVGEELFNLMPQYFVGVSSRPLWHTVDQSPVLILGGIPNEKYVLMTDTSFKDFSLVELSIDSCWVGSFYCPHSGFTATIYDTIATESTLFIRQNQLVYYFTGTYTTLYERNRGSGSWIRVLASECIKKLCPVYFHSNGSEYIMALTTGKHEGYVHFGTIRDGQVSFEMLPRQWSVCEQIGVTTCSIIWSEYIAGEYTLLLLVESGYGNASKRFQVVSYNTASDDLELLYHIPEFIPEARGLEFLMILGTESYTSTAMAPKGIFCNPYNNLIFIWGNFLLQSSNKENFIYLADFPKELSIKYMARSFRGAVAIVTETEEIWYLLEGSYRVYQLFPSKGWQVHISLKLMQQSSLYASNETMLTLFYEDSKLYQLVYLMNNQKGQLVKRLVPVEQLLMYQQHTSHYDLERKGGYLMLSFIDFCPFSVMRLRSLPSPQRYTRQERYRARPPRVLERSGFHNENSLAIYQGLVYYLLWLHSVYDKPYADPVHDPTWRWWANNKQDQDYYFFLASNWRSAGGVSIEMDSYEKIYNLESAYELPERIFLDKGTEYSFAIFLSAQGHSFRTQSELGTAFQLHSQVDVGVVLADPGCIEASVKQEVLINRNSVLFSITLKDKKLCYDQGISGHHLMETSMTVNVVGSSGLCFQETHLGPHMQGNLMVPVFIGCPPGKRLAFDITYTLEYSRLKNKHYFDCVNVNPEMPCFLFRDIFYPFFLIQDLVTGDSGSFQGSYVLLVVGGGPTLDSLKDYSEDEIYRFNSPLDKTNSLIWTTRTTRTTKDSAFHIMSHESPGIEWLCLENAPCYDNVPQGIFAPEFFFKVLVSNRGVDTSTYCNYQLTFLLHIHGLPLSPKRALFIIMVSASVFVGLVIFYIAFCLLWPLVVKGCTMIRWKINNLIASESYYTYASISGISSMPSLRHSRMGSMFSSRMTEDRAEPKEAVERQLMT

SEQ ID NO: 26279 - protein, 1663 aa, Homo sapiens
MATDGASCEPDLSRAPEDAAGAAAEAAKKEFDVDTLSKSELRMLLSVMEGELEARDLVIEALRARRKEVFIQERYGRFNLNDPFLALQRDYEAGAGDKEKKPVCTNPLSILEAVMAHCKKMQERMSAQLAAAESRQKKLEMEKLQLQALEQEHKKLAARLEEERGKNKQVVLMLVKECKQLSGKVIEEAQKLEDVMAKLEEEKKKTNELEEELSAEKRRSTEMEAQMEKQLSEFDTEREQLRAKLNREEAHTTDLKEEIDKMRKMIEQLKRGSDSKPSLSLPRKTKDRRLVSISVGTEGTVTRSVACQTDLVTENADHMKKLPLTMPVKPSTGSPLVSANAKGSVCTSATMARPGIDRQASYGDLIGASVPAFPPPSANKIEENGPSTGSTPDPTSSTPPLPSNAAPPTAQTPGIAPQNSQAPPMHSLHSPCANTSLHPGLNPRIQAARFRFQGNANDPDQNGNTTQSPPSRDVSPTSRDNLVAKQLARNTVTQALSRFTSPQAGAPSRPGVPPTGDVGTHPPVGRTSLKTHGVARVDRGNPPPIPPKKPGLSQTPSPPHPQLKVIIDSSRASNTGAKVDNKTVASTPSSLPQGNRVINEENLPKSSSPQLPPKPSIDLTVAPAGCAVSALATSQVGAWPAATPGLNQPACSDSSLVIPTTIAFCSSINPVSASSCRPGASDSLLVTASGWSPSLTPLLMSGGPAPLAGRPTLLQQAAAQGNVTLLSMLLNEEGLDINYSCEDGHSALYSAAKNGHTDCVRLLLSAEAQVNAADKNGFTPLCAAAAQGHFECVELLISYDANINHAADGGQTPLYLACKNGNKECIKLLLEAGTNRSVKTTDGWTPVHAAVDTGNVDSLKLLMYHRIPAHGNSFNEEESESSVFDLDGGEESPEGISKPVVPADLINHANREGWTAAHIAASKGFKNCLEILCRHGGLEPERRDKCNRTVHDVATDDCKHLLENLNALKIPLRISVGEIEPSNYGSDDLECENTICALNIRKQTSWDDFSKAVSQALTNHFQAISSDGWWSLEDVTCNNTTDSNIGLSARSIRSITLGNVPWSVGQSFAQSPWDFMRKNKAEHITVLLSGPQEGCLSSVTYASMIPLQMMQNYLRLVEQYHNVIFHGPEGSLQDYIVHQLALCLKHRQMAAGFSCEIVRAEVDAGFSKEQLLDLFISSACLIPVKQSPSKKKIIIILENLEKSSLSELLRDFLAPLENRSTESPCTFQKGNGLSECYYFHENCFLMGTIAKACLQGSDLLVQQHFRWVQLRWDGEPMQGLLQRFLRRKVVNKFKGQAPSPCDPVCKIVDWALSVWRQLNSCLARLGTPEALLGPKYFLSCPVVPGHAQVTVKWMSKLWNGVIAPRVQEAILSRASVKRQPGFGQTTAKRHPSQGQQAVVKAALSILLNKAVLHGCPLPRAELDQHTADFKGGSFPLSIVSSYNTCNKKKGESGAWRKVNTSPRRKSGRFSLPTWNKPDLSTEGMKNKTISQLNCNRNASLSKQKSLENDLSLTLNLDQRLSLGSDDEADLVKELQSMCSSKSESDISKIADSRDDLRMFDSSGNNPVLSATINNLRMPVSQKEVSPLSSHQTTECSNSKSKTELGVSRVKSFLPVPRSKVTQCSQNTKRSSSSSNTRQIEINNNSKEVNWNLHKNEHLEKPNK

SEQ ID NO: 26280 - protein, 189 aa, Homo sapiens
MTDKTEKVAVDPETVFKRPRECDSPSYQKRQRMALLARKQGAGDSLIAGSAMSKEKKLMTGHAIPPSQLDSQIDDFTGFSKDRMMQKPGSNAPVGGNVTSSFSGDDLECRETASSPKSQREINADIKRKLVKELRCVGQKYEKIFEMLEGVQGPTAVRKRFFESIIKEAARCMRRDFVKHLKKKLKRMI

SEQ ID NO: 26281 - protein, 126 aa, Homo sapiens
MVALFQHSPYWQADGYGHSHRLKCQHFKQHRQYNDKLEISSNLGPQFNALLNILLNIVHPTLSHDTRRSKGLKIEGLLQSRELGNSWTVTMCIWVLKALQSSAPNKPLDWLDPMPCFQNLLARGTP

SEQ ID NO: 26282 - protein, 74 aa, Homo sapiens
MVALFQHSPYWQADGYGHSHRLKQVFTKQGLWARSVLGSAGGPASPDLHGVSSHGRGCTAVIEKTKKHTGTFRC

SEQ ID NO: 26283 - protein, 244 aa, Homo sapiens
MNPVYSPVQPGAPYGNPKNMAYTGYPTAYPAAAPAYNPSLYPTNSPSYAPEFQFLHSAYATLLMKQAWPQNSSSCGTEGTFHLPVDTGTENRTYQASSAAFRYTAGTPYKVPPTQSNTAPPPYSPSPNPYQTAMYPIRSAYPQQNLYAQGAYYTQPVYAAQPHVIHHTTVVQPNSIPSAIYPAPVAAPRTNGVAMGMVAGTTMAMSAGTLLTTPQHTAIGAHPVSMPTYRAQGTPAYSYVPPHW

SEQ ID NO: 26284 - protein, 235 aa, Homo sapiens
MNPVYSPVQPGAPYGNPKNMAYTGYPTAYPAAAPAYNPSLYPTNSPSYAPATLLMKQAWPQNSSSCGTEGTFHLPVDTGTENRTYQASSAAFRYTAGTPYKVPPTQSNTAPPPYSPSPNPYQTAMYPIRSAYPQQNLYAQGAYYTQPVYAAQPHVIHHTTVVQPNSIPSAIYPAPVAAPRTNGVAMGMVAGTTMAMSAGTLLTTPQHTAIGAHPVSMPTYRAQGTPAYSYVPPHW

SEQ ID NO: 26285 - protein, 129 aa, Homo sapiens
MNPVYSPVQPGAPYGNPKNMAYTGYPTAYPAAAPAYNPSLYPTNSPSYAPATLLMKQAWPQNSSSCGTEGTFHLPVDTGTENRTYQASSAAFSTLLTTPQHTAIGAHPVSMPTYRAQGTPAYSYVPPHW

SEQ ID NO: 26286 - protein, 97 aa, Homo sapiens
MRIIALLAAILLVALQVRAGPLQARGDEAPGQEQRGPEDQDISISFAWDKSSALQVSGSTRGMVCSCRLVFCRRTELRVGNCLIGGVSFTYCCTRVD

SEQ ID NO: 26287 - protein, 178 aa, Homo sapiens
MSEVSCKKRDDYLEWPEYFMAVAFLSAQRSKDPNSQVGACIVNSENKIVGIGYNGMPNGCSDDVLPWRRTAENKLDTKYPYVCHAELNAIMNKNSTDVKGCSMYVALFPCNECAKLIIQAGIKEVIFMSDKYHDSDEATAARLLFNMAGVTFRKFIPKCSKIVIDFDSINSRPSQKLQ

SEQ ID NO: 26288 - protein, 189 aa, Homo sapiens
MVGGGQPCGPNMSEVSCKKRDDYLEWPEYFMAVAFLSAQRSKDPNSQVGACIVNSENKIVGIGYNGMPNGCSDDVLPWRRTAENKLDTKYPYVCHAELNAIMNKNSTDVKGCSMYVALFPCNECAKLIIQAGIKEVIFMSDKYHDSDEATAARLLFNMAGVTFRKFIPKCSKIVIDFDSINSRPSQKLQ

SEQ ID NO: 26289 - protein, 1430 aa, Homo sapiens
MTVFRQENVDDYYDTGEELGSGQFAVVKKCREKSTGLQYAAKFIKKRRTKSSRRGVSREDIEREVSILKEIQHPNVITLHEVYENKTDVILILELVAGGELFDFLAEKESLTEEEATEFLKQILNGVYYLHSLQIAHFDLKPENIMLLDRNVPKPRIKIIDFGLAHKIDFGNEFKNIFGTPEFVAPEIVNYEPLGLEADMWSIGVITYILLSGASPFLGDTKQETLANVSAVNYEFEDEYFSNTSALAKDFIRRLLVKDPKKRMTIQDSLQHPWIKPKDTQQALSRKASAVNMEKFKKFAARKKWKQSVRLISLCQRLSRSFLSRSNMSVARSDDTLDEEDSFVMKAIIHAINDDNVPGLQHLLGSLSNYDVNQPNKHGTPPLLIAAGCGNIQILQLLIKRGSRIDVQDKGGSNAVYWAARHGHVDTLKFLSENKCPLDVKDKSGEMALHVAARYGHADVAQLLCSFGSNPNIQDKEEETPLHCAAWHGYYSVAKALCEAGCNVNIKNREGETPLLTASARGYHDIVECLAEHGADLNACDKDGHIALHLAVRRCQMEVIKTLLSQGCFVDYQDRHGNTPLHVACKDGNMPIVVALCEANCNLDISNKYGRTPLHLAANNGILDVVRYLCLMGASVEALTTDGKTAEDLARSEQHEHVAGLLARLRKDTHRGLFIQQLRPTQNLQPRIKLKLFGHSGSGKTTLVESLKCGLLRSFFRRRRPRLSSTNSSRFPPSPLASKPTVSVSINNLYPGCENVSVRSRSMMFEPGLTKGMLEVFVAPTHHPHCSADDQSTKAIDIQNAYLNGVGDFSVWEFSGNPVYFCCYDYFAANDPTSIHVVVFSLEEPYEIQLNQVIFWLSFLKSLVPVEEPIAFGGKLKNPLQVVLVATHADIMNVPRPAGGEFGYDKDTSLLKEIRNRFGNDLHISNKLFVLDAGASGSKDMKVLRNHLQEIRSQIVSVCPPMTHLCEKIISTLPSWRKLNGPNQLMSLQQFVYDVQDQLNPLASEEDLRRIAQQLHSTGEINIMQSETVQDVLLLDPRWLCTNVLGKLLSVETPRALHHYRGRYTVEDIQRLVPDSDVEELLQILDAMDICARDLSSGTMVDVPALIKTDNLHRSWADEEDEVMVYGGVRIVPVEHLTPFPCGIFHKVQVNLCRWIHQQSTEGDADIRLWVNGCKLANRGAELLVLLVNHGQGIEVQVRGLETEKIKCCLLLDSVCSTIENVMATTLPGLLTVKHYLSPQQLREHHEPVMIYQPRDFFRAQTLKETSLTNTMGGYKESFSSIMCFGCHDVYSQASLGMDIHASDLNLLTRRKLSRLLDPPDPLGKDWCLLAMNLGLPDLVAKYNTSNGAPKDFLPSPLHALLREWTTYPESTVGTLMSKLRELGRRDAADFLLKASSVFKINLDGNGQEAYASSCNSGTSYNSISSVVSR

SEQ ID NO: 26290 - protein, 337 aa, Homo sapiens
MALHVAARYGHADVAQLLCSFGSNPNIQDKEEETPLHCAAWHGYYSVAKALCEAGCNVNIKNREGETPLLTASARGYHDIVECLAEHGADLNACDKDGHIALHLAVRRCQMEVIKTLLSQGCFVDYQDRHGNTPLHVACKDGNMPIVVALCEANCNLDISNKYGRTPLHLAANNGILDVVRYLCLMGASVEALTTDGKTAEDLARSEQHEHVAGLLARLRKDTHRGLFIQQLRPTQNLQPRIKLKLFGHSGSGKTTLVESLKCGLLRSFFRRRRPRLSSTNSSRFPPSPLASKPTGRNLHAGPVSPAGVGFRTLSFQGLGGKGVVFGSLGLYWTLWP

SEQ ID NO: 26291 - protein, 1440 aa, Homo sapiens
MTVFRQENVDDYYDTGEELGSGQFAVVKKCREKSTGLQYAAKFIKKRRTKSSRRGVSREDIEREVSILKEIQHPNVITLHEVYENKTDVILILELVAGGELFDFLAEKESLTEEEATEFLKQILNGVYYLHSLQIAHFDLKPENIMLLDRNVPKPRIKIIDFGLAHKIDFGNEFKNIFGTPEFVAPEIVNYEPLGLEADMWSIGVITYILLSGASPFLGDTKQETLANVSAVNYEFEDEYFSNTSALAKDFIRRLLVKDPKKRMTIQDSLQHPWIKPKDTQQALSRKASAVNMEKFKKFAARKKWKQSVRLISLCQRLSRSFLSRSNMSVARSDDTLDEEDSFVMKAIIHAINDDNVPGLQHLLGSLSNYDVNQPNKHGTPPLLIAAGCGNIQILQLLIKRGSRIDVQDKGGSNAVYWAARHGHVDTLKFLSENKCPLDVKDKSGEMALHVAARYGHADVAQLLCSFGSNPNIQDKEEETPLHCAAWHGYYSVAKALCEAGCNVNIKNREGETPLLTASARGYHDIVECLAEHGADLNACDKDGHIALHLAVRRCQMEVIKTLLSQGCFVDYQDRHGNTPLHVACKDGNMPIVVALCEANCNLDISNKYGRTPLHLAANNGILDVVRYLCLMGASVEALTTDGKTAEDLARSEQHEHVAGLLARLRKDTHRGLFIQQLRPTQNLQPRIKLKLFGHSGSGKTTLVESLKCGLLRSFFRRRRPRLSSTNSSRFPPSPLASKPTVSVSINNLYPGCENVSVRSRSMMFEPGLTKGMLEVFVAPTHHPHCSADDQSTKAIDIQNAYLNGVGDFSVWEFSGNPVYFCCYDYFAANDPTSIHVVVFSLEEPYEIQLNQVIFWLSFLKSLVPVEEPIAFGGKLKNPLQVVLVATHADIMNVPRPAGGEFGYDKDTSLLKEIRNRFGNDLHISNKLFVLDAGASGSKDMKVLRNHLQEIRSQIVSVCPPMTHLCEKIISTLPSWRKLNGPNQLMSLQQFVYDVQDQLNPLASEEDLRRIAQQLHSTGEINIMQSETVQDVLLLDPRWLCTNVLGKLLSVETPRALHHYRGRYTVEDIQRLVPDSDVEELLQILDAMDICARDLSSGTMVDVPALIKTDNLHRSWADEEDEVMVYGGVRIVPVEHLTPFPCGIFHKVQVNLCRWIHQQSTEGDADIRLWVNGCKLANRGAELLVLLVNHGQGIEVQVRGLETEKIKCCLLLDSVCSTIENVMATTLPGLLTVKHYLSPQQLREHHEPVMIYQPRDFFRAQTLKETSLTNTMGGYKESFSSIMCFGCHDVYSQASLGMDIHASDLNLLTRRKLSRLLDPPDPLGKDWCLLAMNLGLPDLVAKYNTSNGAPKDFLPSPLHALLREWTTYPESTVGTLMSKLRELGRRDAADFLLKASSVFKINLDGNGQEAYASSCNSGTSYNSISSVVSRRNSHVWNPTV

SEQ ID NO: 26292 - protein, 1364 aa, Homo sapiens
MTVFRQENVDDYYDTGEELGSGQFAVVKKCREKSTGLQYAAKFIKKRRTKSSRRGVSREDIEREVSILKEIQHPNVITLHEVYENKTDVILILELVAGGELFDFLAEKESLTEEEATEFLKQILNGVYYLHSLQIAHFDLKPENIMLLDRNVPKPRIKIIDFGLAHKIDFGNEFKNIFGTPEFVAPEIVNYEPLGLEADMWSIGVITYILLSGASPFLGDTKQETLANVSAVNYEFEDEYFSNTSALAKDFIRRLLVKDPKKRMTIQDSLQHPWIKPKDTQQALSRKASAVNMEKFKKFAARKKWKQSVRLISLCQRLSRSFLSRSNMSVARSDDTLDEEDSFVMKAIIHAINDDNVPGLQHLLGSLSNYDVNQPNKHGTPPLLIAAGCGNIQILQLLIKRGSRIDVQDKGGSNAVYWAARHGHVDTLKFLSENKCPLDVKDKSGEMALHVAARYGHADVAQLLCSFGSNPNIQDKEEETPLHCAAWHGYYSVAKALCEAGCNVNIKNREGETPLLTASARGYHDIVECLAEHGADLNACDKDGHIALHLAVRRCQMEVIKTLLSQGCFVDYQDRHGNTPLHVACKDGNMPIVVALCEANCNLDISNKYGRTPLHLAANNGILDVVRYLCLMGASVEALTTDGKTAEDLARSEQHEHVAGLLARLRKDTHRGLFIQQLRPTQNLQPRIKLKLFGHSGSGKTTLVESLKCGLLRSFFRRRRPRLSSTNSSRFPPSPLASKPTVSVSINNLYPGCENVSVRSRSMMFEPGLTKGMLEVFVAPTHHPHCSADDQSTKAIDIQNAYLNAFGGKLKNPLQVVLVATHADIMNVPRPAGGEFGYDKDTSLLKEIRNRFGNDLHISNKLFVLDAGASGSKDMKVLRNHLQEIRSQIVSVCPPMTHLCEKIISTLPSWRKLNGPNQLMSLQQFVYDVQDQLNPLASEEDLRRIAQQLHSTGEINIMQSETVQDVLLLDPRWLCTNVLGKLLSVETPRALHHYRGRYTVEDIQRLVPDSDVEELLQILDAMDICARDLSSGTMVDVPALIKTDNLHRSWADEEDEVMVYGGVRIVPVEHLTPFPCGIFHKVQVNLCRWIHQQSTEGDADIRLWVNGCKLANRGAELLVLLVNHGQGIEVQVRGLETEKIKCCLLLDSVCSTIENVMATTLPGLLTVKHYLSPQQLREHHEPVMIYQPRDFFRAQTLKETSLTNTMGGYKESFSSIMCFGCHDVYSQASLGMDIHASDLNLLTRRKLSRLLDPPDPLGKDWCLLAMNLGLPDLVAKYNTSNGAPKDFLPSPLHALLREWTTYPESTVGTLMSKLRELGRRDAADFLLKASSVFKINLDGNGQEAYASSCNSGTSYNSISSVVSR

SEQ ID NO: 26293 - protein, 600 aa, Homo sapiens
MAPSSKSERNSGAGSGGGGPGGAGGKRAAGRRREHVLKQLERVKISGQLSPRLFRKLPPRVCVSLKNIVDEDFLYAGHIFLGFSKCGRYVLSYTSSSGDDDFSFYIYHLYWWEFNVHSKLKLVRQVRLFQDEEIYSDLYLTVCEWPSDASKVIVFGFNTRSANGMLMNMMMMSDENHRDIYVSTVAVPPPGRCAACQDASRAHPGDPNAQCLRHGFMLHTKYQVVYPFPTFQPAFQLKKDQVVLLNTSYSLVACAVSVHSAGDRSFCQILYDHSTCPLAPASPPEPQSPELPPALPSFCPEAAPARSSGSPEPSPAIAKAKEFVADIFRRAKEAKGGVPEEARPALCPGPSGSRCRAHSEPLALCGETAPRDSPPASEAPASEPGYVNYTKLYYVLESGEGTEPEDELEDDKISLPFVVTDLRGRNLRPMRERTAVQGQYLTVEQLTLDFEYVINEVIRHDATWGHQFCSFSDYDIVILEVCPETNQVLINIGLLLLAFPSPTEEGQLRPKTYHTSLKVAWDLNTGIFETVSVGDLTEVKGQTSGSVWSSYRKSCVDMVMKWLVPESSGRYVNRMTNEALHKGCSLKVLADSERYTWIVL

SEQ ID NO: 26294 - protein, 145 aa, Homo sapiens
MVDYYEVLDVPRQASSEAIKKAYRKLALKWHPDKNPENKEEAERRFKQVAEAYEVLSDAKKRDIYDRYGEAGAEGGCTGGRPFEDPFEYVFSFRDPADVFREFFGGQDPFSFDLLGNPLENILGGSEELLGKQKQSVCTPFLCLQ

SEQ ID NO: 26295 - protein, 480 aa, Homo sapiens
MAARCSTRWLLVVVGTPRLPAISGRGARPPREGVVGAWLSRKLSVPAFASSLTSCGPRALLTLRPGVSLTGTKHNPFICTASFHTSAPLAKEDYYQILGVPRNASQKEIKKAYYQLAKKYHPDTNKDDPKAKEKFSQLAEAYEVLSDEVKRKQYDAYGSAGFDPGASGSQHSYWKGGPTVDPEELFRKIFGEFSSSSFGDFQTVFDQPQEYFMELTFNQAAKGVNKEFTVNIMDTCERCNGKGNEPGTKVQHCHYCGGSGMETINTGPFVMRSTCRRCGGRGSIIISPCVVCRGAGQAKQKKRVMIPVPAGVEDGQTVRMPVGKREIFITFRVQKSPVFRRDGADIHSDLFISIAQALLGGTARAQGLYETINVTIPPGTQTDQKIRMGGKGIPRINSYGYGDHYIHIKIRVPKRLTSRQQSLILSYAEDETDVEGTVNGVTLTSSGGSTMDSSAGSKARREAGEDEEGFLSKLKKMFTS

SEQ ID NO: 26296 - protein, 453 aa, Homo sapiens
MAARCSTRWLLVVVGTPRLPAISGRGARPPREGVVGAWLSRKLSVPAFASSLTSCGPRALLTLRPGVSLTGTKHNPFICTASFHTSAPLAKEDYYQILGVPRNASQKEIKKAYYQLAKKYHPDTNKDDPKAKEKFSQLAEAYEVLSDEVKRKQYDAYGSAGFDPGASGSQHSYWKGGPTVDPEELFRKIFGEFSSSSFGDFQTVFDQPQEYFMELTFNQAAKGVNKEFTVNIMDTCERCNGKGNEPGTKVQHCHYCGGSGMETINTGPFVMRSTCRRCGGRGSIIISPCVVCRGAGQAKQKKRVMIPVPAGVEDGQTVRMPVGKREIFITFRVQKSPVFRRDGADIHSDLFISIAQALLGGTARAQGLYETINVTIPPGTQTDQKIRMGGKGIPRINSYGYGDHYIHIKIRVPKRLTSRQQSLILSYAEDETDVEGTVNGVTLTSSGKRSTGN

SEQ ID NO: 26297 - protein, 300 aa, Homo sapiens
MAEPQAERPRLCVFPDLLRPPSAADIETWCQPYRKIFGEFSSSSFGDFQTVFDQPQEYFMELTFNQAAKGVNKEFTVNIMDTCERCNGKGNEPGTKVQHCHYCGGSGMETINTGPFVMRSTCRRCGGRGSIIISPCVVCRGAGQAKQKKRVMIPVPAGVEDGQTVRMPVGKREIFITFRVQKSPVFRRDGADIHSDLFISIAQALLGGTARAQGLYETINVTIPPGTQTDQKIRMGGKGIPRINSYGYGDHYIHIKIRVPKRLTSRQQSLILSYAEDETDVEGTVNGVTLTSSGKRSTGN

SEQ ID NO: 26298 - protein, 116 aa, Homo sapiens
MSWRGRSTYRPRPRRYVEPPEMIGPMRPEQFSDEVEPATPEEGEPATQRQDPAAAQEGEDEGASAGQGPKPEAHSQEQGHPQTGCECEDGPDGQEMDPPNPEEVKTPEEGEKQSQC

SEQ ID NO: 26299 - protein, 472 aa, Homo sapiens
MNGYGSPYLYMGGPVSQPPRAPLQRTPKCARCRNHGVLSWLKGHKRYCRFKDCTCEKCILIIERQRVMAAQVALRRQQANESLESLIPDSLRALPGPPPPGDAVAAPQPPPASQPSQPQPPRPAAELAAAAALRWTAEPQPGALQAQLAKPDLTEERLGDGKSADNTEVFSDKDTDQRSSPDVAKSKGCFTPESPEIVSVEEGGYAVQKNGGNPESRPDSPKCHAEQNHLLIEGPSGTVSLPFSLKANRPPLEVLKKIFPNQKPTVLELILKGCGGDLVSAVEVLLSSRSSVTGAERTSAEPESLALPSNGHIFEHTLSSYPISSSKWSVGSAFRVPDTLRFSADSSNVVPSPLAGPLQPPFPQPPRYPLMLRNTLARSQSSPFLPNDVTLWNTMTLQQQYQLRSQYVSPFPSNSTSVFRSSPVLPARATEDPRISIPDDGCPFVSKQSIYTEDDYDERSDSSDSRTLNTSS

SEQ ID NO: 26300 - protein, 241 aa, Homo sapiens
MAVFLQLLPLLLSRAQGNPGASLDGRPGDRVNLSCGGVSHPIRWVWAPSFPACKGLSKGRRPILWASSSGTPTVPPLQPFVGRLRSLDSGIRRLELLLSAGDSGTFFCKGRHEDESRTVLHVLGDRTYCKAPGPTHGSVYPQLLIPLLGAGLVLGLGALGLVWWLHRRLPPQPIRPLPRFAPLVKTEPQRPVKEEEPKIPGDLDQEPSLLYADLDHLALSRPRRLSTADPADASTIYAVVV

SEQ ID NO: 26301 - protein, 237 aa, Homo sapiens
MAVFLQLLPLLLSRAQGNPGASLDGRPGDRVNLSCGGVSHPIRWVWAPSFPACKGLSKGRRPILWASSSGTPTVPPLQPFVGRLRSLDSGIRRLELLLSAGDSGTFFCKGRHEDESRTVLHVLGDRTYCKAPGPTHGSVYPQLLIPLLGAGLVLGLGALGLVWWLHRRLPPQPIRPLPRFALSPPHSSTCENRAPEASKGGRAQDSRGPGPGTEPALCGSGPSSPQQAPPAVHSGPC

SEQ ID NO: 26302 - protein, 217 aa, Homo sapiens
MAVFLQLLPLLLSRAQGNPGASLDGRPGDRVNLSCGGVSHPIRWVWAPSFPACKGLSKGRRPILWASSSGTPTVPPLQPFVGRLRSLDSGIRRLELLLSAGDSGTFFCKGRHEDESRTVLHVLGDRTYCKAPGPTHGACPRNRFDHSLDLLCPPHIAPLVKTEPQRPVKEEEPKIPGDLDQEPSLLYADLDHLALSRPRRLSTADPADASTIYAVVV

SEQ ID NO: 26303 - protein, 193 aa, Homo sapiens
MAVFLQLLPLLLSRAQGNPGASLDGRPGDRVNLSCGGVSHPIRWVWAPSFPACKGLSKGRRPILWASSSGTPTVPPLQPFVGRLRSLDSGIRRLELLLSAGDSGTFFCKGRHEDESRTVLHVLGDRTYCKAPGPTHALSPPHSSTCENRAPEASKGGRAQDSRGPGPGTEPALCGSGPSSPQQAPPAVHSGPC

SEQ ID NO: 26304 - protein, 197 aa, Homo sapiens
MAVFLQLLPLLLSRAQGNPGASLDGRPGDRVNLSCGGVSHPIRWVWAPSFPACKGLSKGRRPILWASSSGTPTVPPLQPFVGRLRSLDSGIRRLELLLSAGDSGTFFCKGRHEDESRTVLHVLGDRTYCKAPGPTHAPLVKTEPQRPVKEEEPKIPGDLDQEPSLLYADLDHLALSRPRRLSTADPADASTIYAVVV

SEQ ID NO: 26305 - protein, 225 aa, Homo sapiens
MAVFLQLLPLLLSRAQGNPGASLDGRPGDRVNLSCGGVSHPIRWVWAPSFPACKGLSKGRRPILWASSSGTPTVPPLQPFVGRLRSLDSGIRRLELLLSAGDSGTFFCKGRHEDESRTVLHVLGDRTYCKAPGPTHGSVYPQLLIPLLGAGLVLGLGALGLVWWLHRRLPPQPIRPLPRFGETNSTPFSFSYMPTPHPSIPESEPLLGADTLVTFSPSFSSVPPT

SEQ ID NO: 26306 - protein, 222 aa, Homo sapiens
MAVFLQLLPLLLSRAQGNPGASLDGRPGDRVNLSCGGVSHPIRWVWAPSFPACKGLSKGRRPILWASSSGTPTVPPLQPFVGRLRSLDSGIRRLELLLSAGDSGTFFCKGRHEDESRTVLHVLGDRTYCKAPGPTHGSVYPQLLIPLLGAGLVLGLGALGLVWWLHRRLPPQPIRPLPRFALSPPHSSTCENRAPEASKGGRAQDSRGPGPGTGKGMGMGRG

SEQ ID NO: 26307 - protein, 542 aa, Homo sapiens
MELRSELPSVPGAATAAAATATGPPVASVASVAAAAAAAASLPVSVAGGLLRGPPLLLRAAEKYPRTPKCARCRNHGVVSALKGHKRYCRWKDCLCAKCTLIAERQRVMAAQVALRRQQAQEENEARELQLLYGTAEGLALAAANGIIPPRPAYEVFGSVCAADGGGPGAGAPAGTGGGAAGAGGSEAKLQKFDLFPKTLLQAGRPGSPLPPPVKPLSPDGADSGPGTSSPEVRPGSGSENGDGESFSGSPLARASKEAGGSCPGSAGPGGGGEEDSPGSASPLGSESGSEADKEEGEAAPAPGLGGGSGPRQRTPLDILTRVFPGHRRGVLELVLQGCGGDVVQAIEQVLNHHRGGLAAGLGPAAPPDKAAVGAAAAADDAWPSRVDAAAAAAAAAGGPGLPAPLQAGPAAPPHHRPLLAGAMAPGALGSLSSRSAFSPLQPNASHFGADAGAYPLGAPLGLSPLRLAYSAAAAHSRGLAFMAPYSTAGLVPTLGFRPPMDYAFSDLMRDRSAAAAAAVHKEPTYGGGLYGPMVNGAPEKQ

SEQ ID NO: 26308 - protein, 3027 aa, Homo sapiens
MNLHQVLTGAVNPGDHCFSVGSIGDQRFTAYASGCDIVILGSDFERLQIIPGAKHGNIQVGCVDCSMQQGKIAASYGNVISIFEPVNLPKQKKNLELYSQWQKSGQFFLESIAHNITWDPTGSRLLTGSSYLQLWSNTNLEKPTEDENLNKTDLNFGDWKCIWHCKTASQVHLMKFSPDGEFFATAGKDDCLLKVWYNVENWRTAVTSPDGSSEKQSQGEIDFSFVYLAHPRAVNGFSWRKTSKYMPRASVCNVLLTCCKDNVCRLWVETFLPNDCLLYGGDCSHWTESINLTNNFKRNASSKERVQNALEVNLRHFRRGRRRSLALVAHTGYLPHQQDPHHVHRNTPLHANALCHFHIAASINPATDIPLLPSITSLSLNENEEKTGPFVVHWLNNKELHFTLSMEVFLQQLRKSFEQPSSEASVEDSNQADVKSDEETDDGVDDLKINPEKKELGCDKMVPNSSFTSLSSAAIDHQIEVLLSEWSKNADMLFSIHPMDGSLLVWHVDWLDEYQPGMFRQVQVSFVSRIPVAFPTGDANSLCKSIMMYACTKNVDLAIQQGKQKPSGLTRSTSMLISSGHNKSSNSLKLSIFTPNVMMISKHADGSLNQWLVSFAEESAFSTVLSISHKSRYCGHRFHLNDLACHSVLPLLLTTSHHNALRTPDVDNPEQPFDALNIEECSLTQQNKSTVDVAFQDPSAVYSELILWRVDPVGPLSFSGGVSELARINSLHVSAFSNVAWLPTLIPSYCLGAYCNSPSACFVASDGQYLRLYEAVIDAKKLLSELSNPEISKYVGEVFNIVSQQSTARPGCIIALDPITKLHGRKTQLLHVFEEDFILNNLEKKSLGKDSILSNAGSSPNGFSEKFYLIVIECTQDNRSLLHMWNLHLKSIPVSLDEKVDTKLSEAVWQPEEHYSSSPEKILSPFSQKYQACRANLQSTSRLTLFSEMVYSQELHLPEGVEIISIKPSAGHLSSSSIYPACSAPYLLATSCSDEKVRFWRCRVTDGESATSKNGKIDLAYIWEEWPLLIEDGLQSNSSITVPGRPVEVSCAHTNRLAVAYKQPASNSRSSQDFVMHVSIFECESTGGSCWVLEQTIHLDELSTVLDSGISVDSNLVAYNKQDMYLSSKENITSNTKHLVHLDWMSREDGSHILTVGIGSKLFMYGPLAGKVQDQTGKETLAFPLWESTKVVPLSKFVLLRSVDLVSSVDGSPPFPVSLSWVRDGILVVGMDCEMHVYCQWQPSSKQEPVITDSYSGSTPSITSLIKQSNSSSGLHPPKKTLTRSMTSLAQKICGKKTAFDPSVDMEDSGLFEAAHVLSPTLPQYHPLQLLELMDLGKVRRAKAILSHLVKCIAGEVVALNEAESNHERRLRSLTISASGSTTRDPQAFNKAENTDYTEIDSVPPLPLYALLAADDDSCYSSLEKSSNESTLSKSNQLSKESYDELFQTQLLMTDTHMLETDEENTKPRVIDLSQYSPTYFGPEHAQVLSGHLLHSSLPGLSRMEQMSLMALADTIATTSTDIGESRDRSQGGETLDECGLKFLLAVRLHTFLTTSLPAYRAQLLHQGLSTSHFAWAFHSVAEEELLNMLPAMQKDDPTWSELRAMGVGWWVRNTRILRKCIEKVAKAAFYRKNDPLDAAIFYLAMKKKAVIWGLYRAEKNTRMTQFFGHNFEDERWRKAALKNAFSLLGKQRFEHSAAFFLLAGCLRDAIEVCLEKLNDIQLALVIARLYESEFDTSAAYKSILRKKVLGIDSPVSELCSLNINMHHDPFLRSMAYWILEDYSGALETLIKQPIRENDDQVLSASNPTVFNFYNYLRTHPLLLRRHFGSSDTFSTHMSLTGKSGLAGTINLSERRLFFTTASAHLKAGCPMLALEVLSKMPKVIKKTRPFYRASSFLDTSKDCSPSSPLKLDAREDKSSAVDWSQSLINGFGSSSEGSSEKQSNSTLSFDWSQPSVVFQDDSLELKWDSDNDEENEDVPISMKELKPLQRKTDKKLDDISSNYTESFSTLDENDLLNPSEDIIAVQLKFRACLKILTVELRTLSTGYEIDGGKLRYQLYHWLEKEVIALQRTCDFCSDAEELQSAFGRNEDEFGLNEDAEDLPHQTKVKQLRENFQEKRQWLLKYQSLLRMFLSYCILHGSHGGGLASVRMELILLLQESQQETSEPLFSSPLSEQTSVPLLFACTANAKTVVANPLLHLSNLTHDILHAIINFDSPPHPDIQSNKVYVMHTLAASLSACIYQCLCGSHNYSSFQTNQFTGMVYQTVLLPHRPSLKTGSLDEALTPNTSPAQWPGITCLIRLLNSSGEEAQSGLTVLLCEILTAVYLSLFIHGLATHSSNELFRIVAHPLNEKMWSAVFGGGAHVPSKEQTHSKTLPVSSLVEEGEKQNKRFRPSKMSCRESAPLTPSSAPVSQESLAVKEKFIPPELSIWDYFIAKPFLPSSQSRAEYDSEESLGSDDDDNDDDDDVLASDFHLQEHSNSNSYSWSLMRLAMVQLVLNNLKTFYPFAGHDLAELPVSSPLCHAVLKTLQCWEQVLLRRLEIHGGPPQNYIASHTAEESLSAGPAILRHKALLEPTNTPFKSKHHLALSVKRLWQYLVKQEEIQETFIKNIFTKKRCLNEIEADLGYPGGKARIIHKESDIITAFAVNKANRNCIAIASSHDVQELDVSGILATQVYTWVDDDIEVETKGSEDFLVIHARDDLTAVQGTTPYTHSNPGTPINMPWLGSTQTGRGASVMIKKAINNVRRMTSHPTLPYYLTGAQDGSVRMFEWGHSQQITCFRSGGNSRVTRMRFNYQGNKFGIVDADGYLSLYQTNWKCCPVTGSMPKPYLTWQCHNKTANDFVFVSSSSLIATAGLSTDNRNVCLWDTLVAPANSLVHAFTCHDSGATVLAYAPKHQLLISGGRKGFTYVFDLCQRQQRQLFQSHDSPVKAVAVDPTEEYFVTGSAEGNIKIWSLSTFGLLHTFVSEHARQSIFRNIGTGVMQIETGPANHIFSCGADGTMKMRILPDQFSPLNEVLKNDVKFML

SEQ ID NO: 26309 - protein, 683 aa, Homo sapiens
MLACLTRGNLLDVLQEGFNEQQLQAYVAWVNAQLKKRPAVKPVQDLRQDLRDGVILAYLIEIVAGEKLSGVQLSPGNQQEMKNNVEKVLQFVASKKIRMHQTSAKDIVDGNLKSIMRLVLALAAHFKPGSSRTVNQGRDSRAPLQSHRPHCATAVAQGAAAALADVCHDMSRSGRDVFRYRQRNSSMDEEIENPYWSVRALVQQYEGQQRSPSESSCSSLTSPSPIHSAKSESIITQSEEKADFVIIPAEGIENRTEGTDSPLSRDWRPGSPGTYLETSWEEQLLEQQEYLEKEMEEAKKMISGLQALLLNGSLPEDEQERPLALCEPGVNPEEQLIIIQSRLDQSMEENQDLKKELLKCKQEARNLQGIKDALQQRLTQQDTSVLQLKQELLRANMDKDELHNQNVDLQRKLDERNRLLGEYKKELGQKDRLLQQHQAKLEEALRKLSDVSYHQVDLERELEHKDVLLAHCMKREADEATNYNSHNSQSNGFLLPTAGKGATSVSNRGTSDLQLVRDALRSLRNSFSGHDPQHHTIDSLEQGISSLMERLHVMETQKKQERKVRVKSPRTQVGSEYRESWPPNSKLPHSQSSPTVSSTCTKVLYFTDRSLTPFMVNIPKRLEEVTLKDFKAAIDREGNHRYHFKALDPEFGTVKEEIFHDDDAIPGWEGKIVAWVEEDHGEN

SEQ ID NO: 26310 - protein, 472 aa, Homo sapiens
MGGTQVKCLTSPSPIHSAKSESIITQSEEKADFVIIPAEGIENRTEGTDSPLSRDWRPGSPGTYLETSWEEQLLEQQEYLEKEMEEAKKMISGLQALLLNGSLPEDEQERPLALCEPGVNPEEQLIIIQSRLDQSMEENQDLKKELLKCKQEARNLQGIKDALQQRLTQQDTSVLQLKQELLRANMDKDELHNQNVDLQRKLDERNRLLGEYKKELGQKDRLLQQHQAKLEEALRKLSDVSYHQVDLERELEHKDVLLAHCMKREADEATNYNSHNSQSNGFLLPTAGKGATSVSNRGTSDLQLVRDALRSLRNSFSGHDPQHHTIDSLEQGISSLMERLHVMETQKKQERKVRVKSPRTQVGSEYRESWPPNSKLPHSQSSPTVSSTCTKVLYFTDRSLTPFMVNIPKRLEEVTLKDFKAAIDREGNHRYHFKALDPEFGTVKEEIFHDDDAIPGWEGKIVAWVEEDHGEN

SEQ ID NO: 26311 - protein, 219 aa, Homo sapiens
MLACLTRGNLLDVLQEGFNEQQLQAYVAWVNAQLKKRPAVKPVQDLRQDLRDGVILAYLIEIVAGEKLSGVQLSPGNQQEMKNNVEKVLQFVASKKIRMHQTSAKDIVDGNLKSIMRLVLALAAHFKPGSSRTVNQGRDSRAPLQSHRPHCATAVAQGAAAALADVCHDMSRSGRDVFRYRQRNSSMDEEIENPYWSVRALVQQYEGQQRSPSESSCSR

SEQ ID NO: 26312 - protein, 218 aa, Homo sapiens
MGTQVVMRFNNSLLPTEPSQQLQAYVAWVNAQLKKRPAVKPVQDLRQDLRDGVILAYLIEIVAGEKLSGVQLSPGNQQEMKNNVEKVLQFVASKKIRMHQTSAKDIVDGNLKSIMRLVLALAAHFKPGSSRTVNQGRDSRAPLQSHRPHCATAVAQGAAAALADVCHDMSRSGRDVFRYRQRNSSMDEEIENPYWSVRALVQQYEGQQRSPSESSCSR

SEQ ID NO: 26313 - protein, 3036 aa, Homo sapiens
MHLHQVLTGAVNPGDNCYSVGSVGDVPFTAYGSGCDIVILANDFECVQIIPGAKHGNIQVSCVECSNQQGRIAASYGNAVCIFEPLGINSHKRNCQLKCQWLKTGQFFLSSVTYNLAWDPQDNRLLTATDSIQLWAPPGDDILEEEEEIDNTVPPVLNDWKCVWQCKTSVSVHLMEWSPDGEYFATAGKDDCLLKVWYPMTGWKSSIIPQDHHEVKRRQSSTQFSFVYLAHPRAVTGFSWRKTSKYMPRGSVCNVLLTSCHDGVCRLWAETLLPEDCLLGEQICETTTSSIASSLSHAGRHKDRIQHALETIHHLKNLRKGQRRSSVLVTHAELMPDQTAMHEVQRHISHHANALCHFHIAASINPATDIPNVLVGTAFNVDDGNGGFVVHWLNNKEFHFTSSTEVFMHQLRKLSDKQVDHENDDADREDEEHSQEDRERGLHMKLDHDLSLDRESEAGTGSSEHEDGEREGSPRTYSRLSVPMPLPTVLLDRKIETLLTEWNKNPDMLFTIHPVDGTFLVWHVKYLDEYNPGIFRQVQVSFSSRIPVAFPSGDASSLSKNIMMYACINATKDSHHTLLHQEGMSVGSPHGSQPHSRSHSTHMNILAPTVMMISKHIDGSLNQWAVTFADKSAFTTVLTVSHKFRYCGHRFHLNDLACHSVLPLLLTSSHHNALLTPELDCQWDSDNKLSRLMDPVKHIKGSSKQPLRNAATRTFHDPNAIYSELILWRVDPIGPLSYTGGVSELARINSLHTSAFSNVAWLPTLIPSYCLGTYCNSASACFVASDGKNLRLYQAVVDARKLLDELSDPESSKLIGEVFNIVSQQSTARPGCIIELDAITNQCGSNTQLLHVFQEDFIIGYKPHKEDMEKKETEIFFQPSQGYRPPPFSEKFFLVVIEKDSNNNSILHMWHLHLKSVQACLAKASEGASSESLLSVPGQKNVDSSPETSPSVSPMPHSSSIANLQTASKLILSSRLVYSQPLDLPESVEVIRATPSAGHLSSSSIYPVCLAPYLVVTTCSDNKVRFWKCCMEANPECNKSDEKEIYHWKRWPLMNDEGEDNSSTVSIVGRPVAVSCSYTGRLAVAYKQPIHHNGFVSKEFSMHVCIFECESTGGSEWVLEQTIHLDDLVKVGSVLDSRVSVDSNLFVYSKSDALLSKDRYLIPNIKHLVHLDWVSKEDGSHILTVGVGANIFMYGRLSGIVTEQTNSKDGVAVITLPLGGSIKQGVKSRWVLLRSIDLVSSVDGTPSLPVSLSWVRDGILVVGMDCEMHVYAQWKHAVKFGDTEADSSNAEEAAMQDHSTFKSNMLARKSVVEGTAISDDVFCSPTVIQDGGLFEAAHVLSPTLPQYHPTQLLELMDLGKVRRAKAILSHLVKCIAGEVAIVRDPDAGEGTKRHLSRTISVSGSTAKETVTVGKDGTRDYTEIDSIPPLPLYALLAADQDTSYRISEESTKIPQSYEDQTVSQPEDQYSELFQIQDIPTDDIDLEPEKRENKSKVINLSQYGPAYFGQEHARVLSSHLMHSSLPGLTRLEQMFLVALADTVATTSTELDESRDKSCSGRDTLDECGLRYLLAMRLHTCLLTSLPPLYRVQLLHQGVSTCHFAWAFHSEAEEELINMIPAIQRGDPQWSELRAMGIGWWVRNINTLRRCIEKVAKASFQRNNDALDAALFYLSMKKKAVVWGLFRSQHDEKMTTFFSHNFNEDRWRKAALKNAFSLLGKQRFEQSAAFFLLAGSLKDAIEVCLEKMEDIQLAMVIARLYESEFETSSTYISILNQKILGCQKDGSGFSCKRLHPDPFLRSLAYWVMKDYTRALDTLLEQTPKEDDEHQVIIKSCNPVAFSFYNYLRTHPLLIRRNLASPEGTLATLGLKTEKNFVDKINLIERKLFFTTANAHFKVGCPVLALEVLSKIPKVTKTSALSAKKDQPDFISHRMDDVPSHSKALSDGNGSSGIEWSNVTSSQYDWSQPIVKVDEEPLNLDWGEDHDSALDEEEDDAVGLVMKSTDAREKDKQSDQKASDPNMLLTPQEEDDPEGDTEVDVIAEQLKFRACLKILMTELRTLATGYEVDGGKLRFQLYNWLEKEIAALHEICNHESVIKEYSSKTYSKVESDLLDQEEMVDKPDIGSYERHQIERRRLQAKREHAERRKSWLQKNQDLLRVFLSYCSLHGAQGGGLASVRMELKFLLQESQQETTVKQLQSPLPLPTTLPLLSASIASTKTVIANPVLYLNNHIHDILYTIVQMKTPPHPSIEDVKVHTLHSLAASLSASIYQALCDSHSYSQTEGNQFTGMAYQGLLLSDRRRLRTESIEEHATPNSSPAQWPGVSSLINLLSSAQDEDQPKLNILLCEAVVAVYLSLLIHALATNSSSELFRLAAHPLNNRMWAAVFGGGVKLVVKPRRQSENISAPPVLSEDIDKHRRRFNMRMLVPGRPVKDATPPPVPAERPSYKEKFIPPELSMWDYFVAKPFLPLSDSGVIYDSDESIHSDEEDDAFFSDTQIQEHQDPNSYSWALLHLTMVKLALHNVKNFFPIAGLEFSELPVTSPLGIAVIKNLENWEQILQEKMDQFEGPPPNYINTYPTDLSVGAGPAILRNKAMLEPENTPFKSRDSSAFPVKRLWHFLVKQEVLQETFIRYIFTKKRKQSEVEADLGYPGGKAKVIHKESDMIMAFSVNKANCNEIVLASTHDVQELDVTSLLACQSYIWIGEEYDRESKSSDDVDYRGSTTTLYQPSATSYSASQVHPPSSLPWLGTGQTSTGASVLMKRNLHNVKRMTSHPVHQYYLTGAQDGSVRMFEWTRPQQLVCFRQAGNARVTRLYFNSQGNKCGVADGEGFLSIWQVNQTASNPKPYMSWQCHSKATSDFAFITSSSLVATSGHSNDNRNVCLWDTLISPGNSLIHGFTCHDHGATVLQYAPKQQLLISGGRKGHVCIFDIRQRQLIHTFQAHDSAIKALALDPYEEYFTTGSAEGNIKVWRLTGHGLIHSFKSEHAKQSIFRNIGAGVMQIDIIQGNRLFSCGADGTLKTRVLPNAFNIPNRILDIL

SEQ ID NO: 26314 - protein, 2400 aa, Homo sapiens
MHLHQVLTGAVNPGDNCYSVGSVGDVPFTAYGSGCDIVILANDFECVQIIPGAKHGNIQVSCVECSNQQGRIAASYGNAVCIFEPLGINSHKRNCQLKCQWLKTGQFFLSSVTYNLAWDPQDNRLLTATDSIQLWAPPGDDILEEEEEIDNTVPPVLNDWKCVWQCKTSVSVHLMEWSPDGEYFATAGKDDCLLKVWYPMTGWKSSIIPQDHHEVKRRQSSTQFSFVYLAHPRAVTGFSWRKTSKYMPRGSVCNVLLTSCHDGVCRLWAETLLPEDCLLGEQICETTTSSIASSLSHAGRHKDRIQHALETIHHLKNLRKGQRRSSVLVTHAELMPDQTAMHEVQRHISHHANALCHFHIAASINPATDIPNVLVGTAFNVDDGNGGFVVHWLNNKEFHFTSSTEVFMHQLRKLSDKQVDHENDDADREDEEHSQEDRERGLHMKLDHDLSLDRESEAGTGSSEHEDGEREGSPRTYSRLSVPMPLPTVLLDRKIETLLTEWNKNPDMLFTIHPVDGTFLVWHVKYLDEYNPGIFRQVQVSFSSRIPVAFPSGDASSLSKNIMMYACINATKDSHHTLLHQEGMSVGSPHGSQPHSRSHSTHMNILAPTVMMISKHIDGSLNQWAVTFADKSAFTTVLTVSHKFRYCGHRFHLNDLACHSVLPLLLTSSHHNALLTPELDCQWDSDNKLSRLMDPVKHIKGSSKQPLRNAATRTFHDPNAIYSELILWRVDPIGPLSYTGGVSELARINSLHTSAFSNVAWLPTLIPSYCLGTYCNSASACFVASDGKNLRLYQAVVDARKLLDELSDPESSKLIGEVFNIVSQQSTARPGCIIELDAITNQCGSNTQLLHVFQEDFIIGYKPHKEDMEKKETEIFFQPSQGYRPPPFSEKFFLVVIEKDSNNNSILHMWHLHLKSVQACLGRDTLDECGLRYLLAMRLHTCLLTSLPPLYRVQLLHQGVSTCHFAWAFHSEAEEELINMIPAIQRGDPQWSELRAMGIGWWVRNINTLRRCIEKVAKASFQRNNDALDAALFYLSMKKKAVVWGLFRSQHDEKMTTFFSHNFNEDRWRKAALKNAFSLLGKQRFEQSAAFFLLAGSLKDAIEVCLEKMEDIQLAMVIARLYESEFETSSTYISILNQKILGCQKDGSGFSCKRLHPDPFLRSLAYWVMKDYTRALDTLLEQTPKEDDEHQVIIKSCNPVAFSFYNYLRTHPLLIRRNLASPEGTLATLGLKTEKNFVDKINLIERKLFFTTANAHFKVGCPVLALEVLSKIPKVTKTSALSAKKDQPDFISHRMDDVPSHSKALSDGNGSSGIEWSNVTSSQYDWSQPIVKVDEEPLNLDWGEDHDSALDEEEDDAVGLVMKSTDAREKDKQSDQKASDPNMLLTPQEEDDPEGDTEVDVIAEQLKFRACLKILMTELRTLATGYEVDGGKLRFQLYNWLEKEIAALHEICNHESVIKEYSSKTYSKVESDLLDQEEMVDKPDIGSYERHQIERRRLQAKREHAERRKSWLQKNQDLLRVFLSYCSLHGAQGGGLASVRMELKFLLQESQQETTVKQLQSPLPLPTTLPLLSASIASTKTVIANPVLYLNNHIHDILYTIVQMKTPPHPSIEDVKVHTLHSLAASLSASIYQALCDSHSYSQTEGNQFTGMAYQGLLLSDRRRLRTESIEEHATPNSSPAQWPGVSSLINLLSSAQDEDQPKLNILLCEAVVAVYLSLLIHALATNSSSELFRLAAHPLNNRMWAAVFGGGVKLVVKPRRQSENISAPPVLSEDIDKHRRRFNMRMLVPGRPVKDATPPPVPAERPSYKEKFIPPELSMWDYFVAKPFLPLSDSGVIYDSDESIHSDEEDDAFFSDTQIQEHQDPNSYSWALLHLTMVKLALHNVKNFFPIAGLEFSELPVTSPLGIAVIKNLENWEQILQEKMDQFEGPPPNYINTYPTDLSVGAGPAILRNKAMLEPENTPFKSRDSSAFPVKRLWHFLVKQEVLQETFIRYIFTKKRKQSEVEADLGYPGGKAKVIHKESDMIMAFSVNKANCNEIVLASTHDVQELDVTSLLACQSYIWIGEEYDRESKSSDDVDYRGSTTTLYQPSATSYSASQVHPPSSLPWLGTGQTSTGASVLMKRNLHNVKRMTSHPVHQYYLTGAQDGSVRMFEWTRPQQLVCFRQAGNARVTRLYFNSQGNKCGVADGEGFLSIWQVNQTASNPKPYMSWQCHSKATSDFAFITSSSLVATSGHSNDNRNVCLWDTLISPGNSLIHGFTCHDHGATVLQYAPKQQLLISGGRKGHVCIFDIRQRQLIHTFQAHDSAIKALALDPYEEYFTTGSAEGNIKVWRLTGHGLIHSFKSEHAKQSIFRNIGAGVMQIDIIQGNRLFSCGADGTLKTRVLPNAFNIPNRILDIL

SEQ ID NO: 26315 - protein, 3037 aa, Homo sapiens
MHLHQVLTGAVNPGDNCYSVGSVGDVPFTAYGSGCDIVILANDFECVQIIPGAKHGNIQVSCVECSNQQGRIAASYGNAVCIFEPLGINSHKRNCQLKCQWLKTGQFFLSSVTYNLAWDPQDNRLLTATDSIQLWAPPGDDILEEEEEIDNTVPPVLNDWKCVWQCKTSVSVHLMEWSPDGEYFATAGKDDCLLKVWYPMTGWKSSIIPQDHHEVKRRQSSTQFSFVYLAHPRAVTGFSWRKTSKYMPRGSVCNVLLTSCHDGVCRLWAETLLPEDCLLGEQICETTTSSIASSLSHAGRHKDRIQHALETIHHLKNLRKGQRRSSVLVTHAELMPDQTAMHEVQRHISHHANALCHFHIAASINPATDIPNVLVGTAFNVDDGNGGFVVHWLNNKEFHFTSSTEVFMHQLRKLSDKQVDHENDDADREDEEHSQEDRERGLHMKLDHDLSLDRESEAGTGSSEHEDGEREGSPRTYSRLSVPMPLPTVLLDRKIETLLTEWNKNPDMLFTIHPVDGTFLVWHVKYLDEYNPGIFRQVQVSFSSRIPVAFPSGDASSLSKNIMMYACINATKDSHHTLLHQEGMSVGSPHGSQPHSRSHSTHMNILAPTVMMISKHIDGSLNQWAVTFADKSAFTTVLTVSHKFRYCGHRFHLNDLACHSVLPLLLTSSHHNALLTPELDCQWDSDNKLSRLMDPVKHIKGSSKQPLRNAATRTFHDPNAIYSELILWRVDPIGPLSYTGGVSELARINSLHTSAFSNVAWLPTLIPSYCLGTYCNSASACFVASDGKNLRLYQAVVDARKLLDELSDPESSKLIGEVFNIVSQQSTARPGCIIELDAITNQCGSNTQLLHVFQEDFIIGYKPHKEDMEKKETEIFFQPSQGYRPPPFSEKFFLVVIEKDSNNNSILHMWHLHLKSVQACLAKASEGASSESLLSVPGQKNVDSSPETSPSVSPMPHSSSIANLQTASKLILSSRLVYSQPLDLPESVEVIRATPSAGHLSSSSIYPVCLAPYLVVTTCSDNKVRFWKCCMEANPECNKSDEKEIYHWKRWPLMNDEGEDNSSTVSIVGRPVAVSCSYTGRLAVAYKQPIHHNGFVSKEFSMHVCIFECESTGGSEWVLEQTIHLDDLVKVGSVLDSRVSVDSNLFVYSKSDALLSKDRYLIPNIKHLVHLDWVSKEDGSHILTVGVGANIFMYGRLSGIVTEQTNSKDGVAVITLPLGGSIKQGVKSRWVLLRSIDLVSSVDGTPSLPVSLSWVRDGILVVGMDCEMHVYAQWKHAVKFGDTEADSSNAEEAAMQDHSTFKSNMLARKSVVEGTAISDDVFCSPTVIQDGGLFEAAHVLSPTLPQYHPTQLLELMDLGKVRRAKAILSHLVKCIAGEVAIVRDPDAGEGTKRHLSRTISVSGSTAKETVTVGKDGTRDYTEIDSIPPLPLYALLAADQDTSYRISEESTKIPQSYEDQTVSQPEDQYSELFQIQDIPTDDIDLEPEKRENKSKVINLSQYGPAYFGQEHARVLSSHLMHSSLPGLTRLEQMFLVALADTVATTSTELDESRDKSCSGRDTLDECGLRYLLAMRLHTCLLTSLPPLYRVQLLHQGVSTCHFAWAFHSEAEEELINMIPAIQRGDPQWSELRAMGIGWWVRNINTLRRCIEKVAKASFQRNNDALDAALFYLSMKKKAVVWGLFRSQHDEKMTTFFSHNFNEDRWRKAALKNAFSLLGKQRFEQSAAFFLLAGSLKDAIEVCLEKMEDIQLAMVIARLYESEFETSSTYISILNQKILGCQKDGSGFSCKRLHPDPFLRSLAYWVMKDYTRALDTLLEQTPKEDDEHQVIIKSCNPVAFSFYNYLRTHPLLIRRNLASPEGTLATLGLKTEKNFVDKINLIERKLFFTTANAHFKVGCPVLALEVLSKIPKVTKTSALSAKKDQPDFISHRMDDVPSHSKALSDGNGSSGIEWSNVTSSQYDWSQPIVKVDEEPLNLDWGEDHDSALDEEEDDAVGLVMKSTDAREKDKQSDQKASDPNMLLTPQEEDDPEGDTEVDVIAEQLKFRACLKILMTELRTLATGYEVDGGKLRFQLYNWLEKEIAALHEICNHESVIKEYSSKTYSKVESDLLDQEEMVDKPDIGSYERHQIERRRLQAKREHAERRKSWLQKNQDLLRVFLSYCSLHGAQGGGLASVRMELKFLLQESQQETTVKQLQSPLPLPTTLPLLSASIASTKTVIANPVLYLNNHIHDILYTIVQMKTPPHPSIEDVKVHTLHSLAASLSASIYQALCDSHSYSSQTEGNQFTGMAYQGLLLSDRRRLRTESIEEHATPNSSPAQWPGVSSLINLLSSAQDEDQPKLNILLCEAVVAVYLSLLIHALATNSSSELFRLAAHPLNNRMWAAVFGGGVKLVVKPRRQSENISAPPVLSEDIDKHRRRFNMRMLVPGRPVKDATPPPVPAERPSYKEKFIPPELSMWDYFVAKPFLPLSDSGVIYDSDESIHSDEEDDAFFSDTQIQEHQDPNSYSWALLHLTMVKLALHNVKNFFPIAGLEFSELPVTSPLGIAVIKNLENWEQILQEKMDQFEGPPPNYINTYPTDLSVGAGPAILRNKAMLEPENTPFKSRDSSAFPVKRLWHFLVKQEVLQETFIRYIFTKKRKQSEVEADLGYPGGKAKVIHKESDMIMAFSVNKANCNEIVLASTHDVQELDVTSLLACQSYIWIGEEYDRESKSSDDVDYRGSTTTLYQPSATSYSASQVHPPSSLPWLGTGQTSTGASVLMKRNLHNVKRMTSHPVHQYYLTGAQDGSVRMFEWTRPQQLVCFRQAGNARVTRLYFNSQGNKCGVADGEGFLSIWQVNQTASNPKPYMSWQCHSKATSDFAFITSSSLVATSGHSNDNRNVCLWDTLISPGNSLIHGFTCHDHGATVLQYAPKQQLLISGGRKGHVCIFDIRQRQLIHTFQAHDSAIKALALDPYEEYFTTGSAEGNIKVWRLTGHGLIHSFKSEHAKQSIFRNIGAGVMQIDIIQGNRLFSCGADGTLKTRVLPNAFNIPNRILDIL

SEQ ID NO: 26316 - protein, 791 aa, Homo sapiens
MWNMLIVAMCLALLGCLQAQELQGHVSIILLGATGDLAKKYLWQGLFQLYLDEAGRGHSFSFHGAALTAPKQGQELMAKALESLSCPKDMAPSHCAEHKDQFLQLSQYRQLKTAEDYQALNKDIEAQLQHAGLREAGRIFYFSVPPFAYEDIARNINSSCRPGPGAWLRVVLEKPFGHDHFSAQQLATELGTFFQEEEMYRVDHYLGKQAVAQILPFRDQNRKALDGLWNRHHVERVEIIMKETVDAEGRTSFYEEYGVIRDVLQNHLTEVLTLVAMELPHNVSSAEAVLRHKLQVFQALRGLQRGSAVVGQYQSYSEQVRRELQKPDSFHSLTPTFAAVLVHIDNLRWEGVPFILMSGKALDERVGYARILFKNQACCVQSEKHWAAAQSQCLPRQLVFHIGHGDLGSPAVLVSRNLFRPSLPSSWKEMEGPPGLRLFGSPLSDYYAYSPVRERDAHSVLLSHIFHGRKNFFITTENLLASWNFWTPLLESLAHKAPRLYPGGAENGRLLDFEFSSGRLFFSQQQPEQLVPGPGPAPMPSDFQVLRAKYRESPLVSAWSEELISKLANDIEATAVRAVRRFGQFHLALSGGSSPVALFQQLATAHYGFPWAHTHLWLVDERCVPLSDPESNFQGLQAHLLQHVRIPYYNIHPMPVHLQQRLCAEEDQGAQIYAREISALVANSSFDLVLLGMGADGHTASLFPQSPTGLDGEQLVVLTTSPSQPHRRMSLSLPLINRAKKVAVLVMGRMKREITTLVSRVGHEPKKWPISGVLPHSGQLVWYMDYDAFLG

SEQ ID NO: 26317 - protein, 802 aa, Homo sapiens
MLAEPFNWHPGMWNMLIVAMCLALLGCLQAQELQGHVSIILLGATGDLAKKYLWQGLFQLYLDEAGRGHSFSFHGAALTAPKQGQELMAKALESLSCPKDMAPSHCAEHKDQFLQLSQYRQLKTAEDYQALNKDIEAQLQHAGLREAGRIFYFSVPPFAYEDIARNINSSCRPGPGAWLRVVLEKPFGHDHFSAQQLATELGTFFQEEEMYRVDHYLGKQAVAQILPFRDQNRKALDGLWNRHHVERVEIIMKETVDAEGRTSFYEEYGVIRDVLQNHLTEVLTLVAMELPHNVSSAEAVLRHKLQVFQALRGLQRGSAVVGQYQSYSEQVRRELQKPDSFHSLTPTFAAVLVHIDNLRWEGVPFILMSGKALDERVGYARILFKNQACCVQSEKHWAAAQSQCLPRQLVFHIGHGDLGSPAVLVSRNLFRPSLPSSWKEMEGPPGLRLFGSPLSDYYAYSPVRERDAHSVLLSHIFHGRKNFFITTENLLASWNFWTPLLESLAHKAPRLYPGGAENGRLLDFEFSSGRLFFSQQQPEQLVPGPGPAPMPSDFQVLRAKYRESPLVSAWSEELISKLANDIEATAVRAVRRFGQFHLALSGGSSPVALFQQLATAHYGFPWAHTHLWLVDERCVPLSDPESNFQGLQAHLLQHVRIPYYNIHPMPVHLQQRLCAEEDQGAQIYAREISALVANSSFDLVLLGMGADGHTASLFPQSPTGLDGEQLVVLTTSPSQPHRRMSLSLPLINRAKKVAVLVMGRMKREITTLVSRVGHEPKKWPISGVLPHSGQLVWYMDYDAFLG

SEQ ID NO: 26318 - protein, 358 aa, Homo sapiens
MAPQNLSTFCLLLLYLIGAVIAGRDFYKILGVPRSASIKDIKKAYRKLALQLHPDRNPDDPQAQEKFQDLGAAYEVLSDSEKRKQYDTYGEEGLKDGHQSSHGDIFSHFFGDFGFMFGGTPRQQDRNIPRGSDIIVDLEVTLEEVYAGNFVEVVRNKPVARQAPGKRKCNCRQEMRTTQLGPGRFQMTQEVVCDECPNVKLVNEERTLEVEIEPGVRDGMEYPFIGEGEPHVDGEPGDLRFRIKVVKHPIFERRGDDLYTNVTISLVESLVGFEMDITHLDGHKVHISRDKITRPGAKLWKKGEGLPNFDNNNIKGSLIITFDVDFPKEQLTEEAREGIKQLLKQGSVQKVYNGLQGY

SEQ ID NO: 26319 - protein, 375 aa, Homo sapiens
MESNKDEAERCISIALKAIQSNQPDRALRFLEKAQRLYPTPRVRALIESLNQKPQTAGDQPPPTDTTHATHRKAGGTDAPSANGEAGGESTKGYTAEQVAAVKRVKQCKDYYEILGVSRGASDEDLKKAYRRLALKFHPDKNHAPGATEAFKAIGTAYAVLSNPEKRKQYDQFGDDKSQAARHGHGHGDFHRGFEADISPEDLFNMFFGGGFPSSNVHVYSNGRMRYTYQQRQDRRDNQGDGGLGVFVQLMPILILILVSALSQLMVSSPPYSLSPRPSVGHIHRRVTDHLGVVYYVGDTFSEEYTGSSLKTVERNVEDDYIANLRNNCWKEKQQKEGLLYRARYFGDTDMYHRAQKMGTPSCSRLSEVQASLHG

SEQ ID NO: 26320 - protein, 377 aa, Homo sapiens
MESNKDEAERCISIALKAIQSNQPDRALRFLEKAQRLYPTPRVRALIESLNQKPQTAGDQPPPTDTTHATHRKAGGTDAPSANGEAGGESTKGYTAEQVAAVKRVKQCKDYYEILGVSRGASDEDLKKAYRRLALKFHPDKNHAPGATEAFKAIGTAYAVLSNPEKRKQYDQFGDDKSQAARHGHGHGDFHRGFEADISPEDLFNMFFGGGFPSSNVHVYSNGRMRYTYQQRQDRRDNQGDGGLGVFVQLMPILILILVSALSQLMVSSPPYSLSPRPSVGHIHRRVTDHLGVVYYVGDTFSEEYTGSSLKTVERNVEDDYIANLRNNCWKEKQQKEGLLYRARYFGDTDMYHRAQKMGTPSCSRLSETMKSLENFW

SEQ ID NO: 26321 - protein, 793 aa, Homo sapiens
MGVWLNKDDYIRDLKRIILCFLIVYMAILVGTDQDFYSLLGVSKTASSREIRQAFKKLALKLHPDKNPNNPNAHGDFLKINRAYEVLKDEDLRKKYDKYGEKGLEDNQGGQYESWNYYRYDFGIYDDDPEIITLERREFDAAVNSGELWFVNFYSPGCSHCHDLAPTWRDFAKEVDGLLRIGAVNCGDDRMLCRMKGVNSYPSLFIFRSGMAPVKYHGDRSKESLVSFAMQHVRSTVTELWTGNFVNSIQTAFAAGIGWLITFCSKGGDCLTSQTRLRLSGMLDGLVNVGWMDCATQDNLCKSLDITTSTTAYFPPGATLNNKEKNSILFLNSLDAKEIYLEVIHNLPDFELLSANTLEDRLAHHRWLLFFHFGKNENSNDPELKKLKTLLKNDHIQVGRFDCSSAPDICSNLYVFQPSLAVFKGQGTKEYEIHHGKKILYDILAFAKESVNSHVTTLGPQNFPANDKEPWLVDFFAPWCPPCRALLPELRRASNLLYGQLKFGTLDCTVHEGLCNMYNIQAYPTTVVFNQSNIHEYEGHHSAEQILEFIEDLMNPSVVSLTPTTFNELVTQRKHNEVWMVDFYSPWCHPCQVLMPEWKRMARTLTGLINVGSIDCQQYHSFCAQENVQRYPEIRFFPPKSNKAYHYHSYNGWNRDAYSLRIWGLGFLPQVSTDLTPQTFSEKVLQGKNHWVIDFYAPWCGPCQNFAPEFELLARMIKGKVKAGKVDCQAYAQTCQKAGIRAYPTVKFYFYERAKRNFQEEQINTRDAKAIAALISEKLETLRNQGKRNKDEL

SEQ ID NO: 26322 - protein, 747 aa, Homo sapiens
MGVWLNKDDYIRDLKRIILCFLIVYMAILVGTDQDFYSLLGVSKTASSREIRQAFKKLALKLHPDKNPNNPNAHGDFLKINRAYEVLKDEDLRKKYDKYGEKGLEDNQGGQYESWNYYRYDFGIYDDDPEIITLERREFDAAVNSGELWFVNFYSPGCSHCHDLAPTWRDFAKEVDGLLRIGAVNCGDDRMLCRMKGVNSYPSLFIFRSGMAPVKYHGDRSKESLVSFAMQHVRSTVTELWTGNFVNSIQTAFAAGIGWLITFCSKGGDCLTSQTRLRLSGMLFLNSLDAKEIYLEVIHNLPDFELLSANTLEDRLAHHRWLLFFHFGKNENSNDPELKKLKTLLKNDHIQVGRFDCSSAPDICSNLYVFQPSLAVFKGQGTKEYEIHHGKKILYDILAFAKESVNSHVTTLGPQNFPANDKEPWLVDFFAPWCPPCRALLPELRRASNLLYGQLKFGTLDCTVHEGLCNMYNIQAYPTTVVFNQSNIHEYEGHHSAEQILEFIEDLMNPSVVSLTPTTFNELVTQRKHNEVWMVDFYSPWCHPCQVLMPEWKRMARTLTGLINVGSIDCQQYHSFCAQENVQRYPEIRFFPPKSNKAYHYHSYNGWNRDAYSLRIWGLGFLPQVSTDLTPQTFSEKVLQGKNHWVIDFYAPWCGPCQNFAPEFELLARMIKGKVKAGKVDCQAYAQTCQKAGIRAYPTVKFYFYERAKRNFQEEQINTRDAKAIAALISEKLETLRNQGKRNKDEL

SEQ ID NO: 26323 - protein, 332 aa, Homo sapiens
MGVWLNKDDYIRDLKRIILCFLIVYMAILVGTDQDFYSLLGVSKTASSREIRQAFKKLALKLHPDKNPNNPNAHGDFLKINRAYEVLKDEDLRKKYDKYGEKGLEDNQGGQYESWNYYRYDFGIYDDDPEIITLERREFDAAVNSGELWFVNFYSPGCSHCHDLAPTWRDFAKEVDGLLRIGAVNCGDDRMLCRMKGVNSYPSLFIFRSGMAPVKYHGDRSKESLVSFAMQHVRSTVTELWTGNFVNSIQTAFAAGIGWLITFCSKGGDCLTSQTRLRLSGMLDGLVNVGWMDCATQDNLCKSLDITTSTTAYFPPGATLNNKEKNSILLLH

SEQ ID NO: 26324 - protein, 702 aa, Homo sapiens
MAQKHPGERGLYGAHHSGGASLRTLGPSVDPEIPSFSGLRDSAGTAPNGTRCLTEHSGPKHTQHPNPAHWLDPSHGPPGGPGPPRDAEDPDQSETSSEEESGVDQELSKENETGNQKDGNSFLSIPSACNCQGTPGIPEGPYSEGGNGSSSNFCHHCTSPALGEDELEEEYDDEESLKFPSDFSRVSSGKKPPSRRQRHRFPTKEDTREGGRRDPRSPGRHRLGRKRSQADKRKGLGLWGAEELCQLGQAGFWWLIELLVLVGEYVETCGHLIYACRQLKSSDLDLFRVWMGVWTGRLGGWAQVMFQFLSQGFYCGVGLFTRFLKLLGALLLLALALFLGFLQLGWRFLVGLGDRLGWRDKATWLFSWLDSPALQRCLTLLRDSRPWQRLVRIVQWGWLELPWVKQNINRQGNAPVASGRYCQPEEEVARLLTMAGVPEDELNPFHVLGVEATASDVELKKAYRQLAVMVHPDKNHHPRAEEAFKVLRAAWDIVSNAEKRKEYEMKRMAENELSRSVNEFLSKLQDDLKEAMNTMMCSRCQGKHRRFEMDREPKSARYCAECNRLHPAEEGDFWAESSMLGLKITYFALMDGKVYDITEWAGCQRVGISPDTHRVPYHISFGSRIPGTRGRQRATPDAPPADLQDFLSRIFQVPPGQMPNGNFFAAPQPAPGAAAASKPNSTVPKGEAKPKRRKKVRRPFQR

SEQ ID NO: 26325 - protein, 150 aa, Homo sapiens
MAARGVIAPVGESLRYAEYLQPSAKRPDADVDQQRLVRSLIAVGLGVAALAFAGRYAFRIWKPLEQVITETAKKISTPSFSSYYKGGFEQKMSRREAGLILGVSPSAGKAKIRTAHRRVMILNHPDKGGSPYVAAKINEAKDLLETTTKH

SEQ ID NO: 26326 - protein, 486 aa, Homo sapiens
MIRRVLPHGMGRGLLTRRPGTRRGGFSLDWDGKVSEIKKKIKSILPGRSCDLLQDTSHLPPEHSDVVIVGGGVLGLSVAYWLKKLESRRGAIRVLVVERDHTYSQASTGLSVGGICQQFSLPENIQLSLFSASFLRNINEYLAVVDAPPLDLRFNPSGYLLLASEKDAAAMESNVKVQRQEGAKVSLMSPDQLRNKFPWINTEGVALASYGMEDEGWFDPWCLLQGLRRKVQSLGVLFCQGEVTRFVSSSQRMLTTDDKAVVLKRIHEVHVKMDRSLEYQPVECAIVINAAGAWSAQIAALAGVGEGPPGTLQGTKLPVEPRKRYVYVWHCPQGPGLETPLVADTSGAYFRREGLGSNYLGGRSPTEQEEPDPANLEVDHDFFQDKVWPHLALRVPAFETLKVQSAWAGYYDYNTFDQNGVVGPHPLVVNMYFATGFSGHGLQQAPGIGRAVAEMVLKGRFQTIDLSPFLFTRFYLGEKIQENNII

SEQ ID NO: 26327 - protein, 275 aa, Homo sapiens
MEDEGWFDPWCLLQGLRRKVQSLGVLFCQGEVTRFVSSSQRMLTTDDKAVVLKRIHEVHVKMDRSLEYQPVECAIVINAAGAWSAQIAALAGVGEGPPGTLQGTKLPVEPRKRYVYVWHCPQGPGLETPLVADTSGAYFRREGLGSNYLGGRSPTEQEEPDPANLEVDHDFFQDKVWPHLALRVPAFETLKVQSAWAGYYDYNTFDQNGVVGPHPLVVNMYFATGFSGHGLQQAPGIGRAVAEMVLKGRFQTIDLSPFLFTRFYLGEKIQENNII

SEQ ID NO: 26328 - protein, 472 aa, Homo sapiens
MAHTGRTVGRLGEGDWDGKVSEIKKKIKSILPGRSCDLLQDTSHLPPEHSDVVIVGGGVLGLSVAYWLKKLESRRGAIRVLVVERDHTYSQASTGLSVGGICQQFSLPENIQLSLFSASFLRNINEYLAVVDAPPLDLRFNPSGYLLLASEKDAAAMESNVKVQRQEGAKVSLMSPDQLRNKFPWINTEGVALASYGMEDEGWFDPWCLLQGLRRKVQSLGVLFCQGEVTRFVSSSQRMLTTDDKAVVLKRIHEVHVKMDRSLEYQPVECAIVINAAGAWSAQIAALAGVGEGPPGTLQGTKLPVEPRKRYVYVWHCPQGPGLETPLVADTSGAYFRREGLGSNYLGGRSPTEQEEPDPANLEVDHDFFQDKVWPHLALRVPAFETLKVQSAWAGYYDYNTFDQNGVVGPHPLVVNMYFATGFSGHGLQQAPGIGRAVAEMVLKGRFQTIDLSPFLFTRFYLGEKIQENNII

SEQ ID NO: 26329 - protein, 304 aa, Homo sapiens
MAVTKELLQMDLYALLGIEEKAADKEVKKAYRQKALSCHPDKNPDNPRAAELFHQLSQALEVLTDAAARAAYDKVRKAKKQAAERTQKLDEKRKKVKLDLEARERQAQAQESEEEEESRSTRTLEQEIERLREEGSRQLEEQQRLIREQIRQERDQRLRGKAENTEGQGTPKLKLKWKCKKEDESKGGYSKDVLLRLLQKYGEVLNLVLSSKKPGTAVVEFATVKAAELAVQNEVGLVDNPLKISWLEGQPQDAVGRSHSGLSKGSVLSERDYESLVMMRMRQAAERQQLIARMQQEDQEGPPT

SEQ ID NO: 26330 - protein, 64 aa, Homo sapiens
MRVLYLLFSFLFIFLMPLPGVFGGIGDPVTCLKSGAICHPVFCPRRYKQIGTCGLPGTKCCKKP

SEQ ID NO: 26331 - protein, 149 aa, Homo sapiens
MMAVEQMPKKDWYSILGADPSANISDLKQKYQKLILMYHPDKQSTDVPAGTVEECVQKFIEIDQAWKILGNEETKREYDLQRCEDDLRNVGPVDAQVYLEEMSWNEGDHSFYLSCRCGGKYSVSKDEAEEVSLISCDTCSLIIELLHYN

SEQ ID NO: 26332 - protein, 85 aa, Homo sapiens
MMAVEQMPKKDWYSILGADPSANISDLKQKYQKLILMYHPDKQSTDVPAGTVEECVQKFIEIDQAWKILGNEETKREYDLQRCGS

SEQ ID NO: 26333 - protein, 1980 aa, Homo sapiens
MNPTNPFSGQQPSAFSASSSNVGTLPSKPPFRFGQPSLFGQNSTLSGKSSGFSQVSSFPASSGVSHSSSVQTLGFTQTSSVGPFSGLEHTSTFVATSGPSSSSVLGNTGFSFKSPTSVGAFPSTSAFGQEAGEIVNSGFGKTEFSFKPLENAVFKPILGAESEPEKTQSQIASGFFTFSHPISSAPGGLAPFSFPQVTSSSATTSNFTFSKPVSSNNSLSAFTPALSNQNVEEEKRGPKSIFGSSNNSFSSFPVSSAVLGEPFQASKAGVRQGCEEAVSQVEPLPSLMKGLKRKEDQDRSPRRHGHEPAEDSDPLSRGDHPPDKRPVRLNRPRGGTLFGRTIQDVFKSNKEVGRLGNKEAKKETGFVESAESDHMAIPGGNQSVLAPSRIPGVNKEEETESREKKEDSLRGTPARQSNRSESTDSLGGLSPSEVTAIQCKNIPDYLNDRTILENHFGKIAKVQRIFTRRSKKLAVVHFFDHASAALARKKGKSLHKDMAIFWHRKKISPNKKPFSLKEKKPGDGEVSPSTEDAPFQHSPLGKAAGRTGASSLLNKSSPVKKPSLLKAHQFEGDSFDSASEGSEGLGPCVLSLSTLIGTVAETSKEKYRLLDQRDRIMRQARVKRTDLDKARTFVGTCLDMCPEKERYMRETRSQLSVFEVVPGTDQVDHAAAVKEYSRSSADQEEPLPHELRPLPVLSRTMDYLVTQIMDQKEGSLRDWYDFVWNRTRGIRKDITQQHLCDPLTVSLIEKCTRFHIHCAHFMCEEPMSSFDAKINNENMTKCLQSLKEMYQDLRNKGVFCASEAEFQGYNVLLSLNKGDILREVQQFHPAVRNSSEVKFAVQAFAALNSNNFVRFFKLVQSASYLNACLLHCYFSQIRKDALRALNFAYTVSTQRSTIFPLDGVVRMLLFRDCEEATDFLTCHGLTVSDGCVELNRSAFLEPEGLSKTRKSVFITRKLTVSVGEIVNGGPLPPVPRHTPVCSFNSQNKYIGESLAAELPVSTQRPGSDTVGGGRGEECGVEPDAPLSSLPQSLPAPAPSPVPLPPVLALTPSVAPSLFQLSVQPEPPPPEPVPMYSDEDLAQVVDELIQEALQRDCEEVGSAGAAYAAAALGVSNAAMEDLLTAATTGILRHIAAEEVSKERERREQERQRAEEERLKQERELVLSELSQGLAVELMERVMMEFVRETCSQELKNAVETDQRVRVARCCEDVCAHLVDLFLVEEIFQTAKETLQELQCFCKYLQRWREAVTARKKLRRQMRAFPAAPCCVDVSDRLRALAPSAECPIAEENLARGLLDLGHAGRLGISCTRLRRLRNKTAHQMKVQHFYQQLLSDVAWASLDLPSLVAEHLPGRQEHVFWKLVLVLPDVEEQSPESCGRILANWLKVKFMGDEGSVDDTSSDAGGIQTLSLFNSLSSKGDQMISVNVCIKVAHGALSDGAIDAVETQKDLLGASGLMLLLPPKMKSEDMAEEDVYWLSALLQLKQLLQAKPFQPALPLVVLVPSPGGDAVEKEVEDGLMLQDLVSAKLISDYTVTEIPDTINDLQGSTKVLQAVQWLVSHCPHSLDLCCQTLIQYVEDGIGHEFSGRFFHDRRERRLGGLASQEPGAIIELFNSVLQFLASVVSSEQLCDLSWPVTEFAEAGGSRLLPHLHWNAPEHLAWLKQAVLGFQLPQMDLPPLGAPWLPVCSMVVQYASQIPSSRQTQPVLQSQVENLLHRTYCRWKSKSPSPVHGAGPSVMEIPWDDLIALCINHKLRDWTPPRLPVTSEALSEDGQICVYFFKNDLKKYDVPLSWEQARLQTQKELQLREGRLAIKPFHPSANNFPIPLLHMHRNWKRSTECAQEGRIPSTEDLMRGASAEELLAQCLSSSLLLEKEENKRFEDQLQQWLSEDSGAFTDLTSLPLYLPQTLVSLSHTIEPVMKTSVTTSPQSDMMREQLQLSEATGTCLGERLKHLERLIRSSREEEVASELHLSALLDMVDI

SEQ ID NO: 26334 - protein, 721 aa, Homo sapiens
MRAFPAAPCCVDVSDRLRALAPSAECPIAEENLARGLLDLGHAGRLGISCTRLRRLRNKTAHQMKVQHFYQQLLSDVAWASLDLPSLVAEHLPGRQEHVFWKLVLVLPDVEEQSPESCGRILANWLKVKFMGDEGSVDDTSSDAGGIQTLSLFNSLSSKGDQMISVNVCIKVAHGALSDGAIDAVETQKDLLGASGLMLLLPPKMKSEDMAEEDVYWLSALLQLKQLLQAKPFQPALPLVVLVPSPGGDAVEKEVEDGLMLQDLVSAKLISDYTVTEIPDTINDLQGSTKVLQAVQWLVSHCPHSLDLCCQTLIQYVEDGIGHEFSGRFFHDRRERRLGGLASQEPGAIIELFNSVLQFLASVVSSEQLCDLSWPVTEFAEAGGSRLLPHLHWNAPEHLAWLKQAVLGFQLPQMDLPPLGAPWLPVCSMVVQYASQIPSSRQTQPVLQSQVENLLHRTYCRWKSKSPSPVHGAGPSVMEIPWDDLIALCINHKLRDWTPPRLPVTSEALSEDGQICVYFFKNDLKKYDVPLSWEQARLQTQKELQLREGRLAIKPFHPSANNFPIPLLHMHRNWKRSTECAQEGRIPSTEDLMRGASAEELLAQCLSSSLLLEKEENKRFEDQLQQWLSEDSGAFTDLTSLPLYLPQTLVSLSHTIEPVMKTSVTTSPQSDMMREQLQLSEATGTCLGERLKHLERLIRSSREEEVASELHLSALLDMVDI

SEQ ID NO: 26335 - protein, 388 aa, Homo sapiens
MNTMYVMMAQILRSHLIKATVIPNRVKMLPYFGIIRNRMMSTHKSKKKIREYYRLLNVEEGCSADEVRESFHKLAKQYHPDSGSNTADSATFIRIEKAYRKVLSHVIEQTNASQSKGEEEEDVEKFKYKTPQHRHYLSFEGIGFGTPTQREKHYRQFRADRAAEQVMEYQKQKLQSQYFPDSVIVKNIRQSKQQKITQAIERLVEDLIQESMAKGDFDNLSGKGKPLKKFSDCSYIDPMTHNLNRILIDNGYQPEWILKQKEISDTIEQLREAILVSRKKLGNPMTPTEKKQWNHVCEQFQENIRKLNKRINDFNLIVPILTRQKVHFDAQKEIVRAQKIYETLIKTKEVTDRNPNNLDQGEGEKTPEIKKGFLNWMNLWKFIKIRSF

SEQ ID NO: 26336 - protein, 703 aa, Homo sapiens
MAAPVGPVKFWRPGTEGPGVSISEERQSLAENSGTTVVYNPYAALSIEQQRQKLPVFKLRNHILYLIENYQTVVIVGETGCGKSTQIPQYLAEAGWTAEGRVVGVTQPRRVAAVTVAGRVAEERGAVLGHEVGYCIRFDDCTDQLATRIKFLTDGMLVREMMVDPLLTKYSVIMLDEAHERTLYTDIAIGLLKKIQKKRGDLRLIVASATLDADKFRDFFNQNETSDPARDTCVILTVEGRTFPVDIFYLQSPVPDYIKSTVETVVKIHQTEGDGDVLAFLTGQEEVETVVSMLIEQARALARTGMKRHLRVLPMYAGLPSFEQMKVFERVSRSVRKVIVATNVAETSITISGIVYVIDCGFVKLRAYNPRTAIECLVVVPVSQASANQRAGRGGRSRSGKCYRLYTEEAFDKLPQSTVPEMQRSNLAPVILQLKALGIDNVLRFHFMSPPPAQSMVQALELLYALGGLDKDCRLTEPLGMRIAEFPLNPMFAKMLLESGNFGCSQEILSIAAMMQIQNIFVVPPNQKSHAIRVHRKFAVEEGDHLTMLNIYEAFIKHNKDSKWCQEHFLNYKGLVRAATVREQLKKLLVKFQVPRKSSEGDPDLVLRCIVSGFFANAARFHSTGAYRTIRDDHELHIHPASVLYAEKPPRWVIYNEVIQTSKYYMRDVTAIESAWLLELAPHFYQQGTHLSLKAKRAKVQDP

SEQ ID NO: 26337 - protein, 672 aa, Homo sapiens
MAAPVGPVKFWRPGTEGPGVSISEERQSLAENSGTTVVYNPYAALSIEQQRQKLPVFKYLAEAGWTAEGRVVGVTQPRRVAAVTVAGRVAEERGAVLGHEVGYCIRFDDCTDQLATRIKFLTDGMLVREMMVDPLLTKYSVIMLDEAHERTLYTDIAIGLLKKIQKKRGDLRLIVASATLDADKFRDFFNQNETSDPARDTCVILTVEGRTFPVDIFYLQSPVPDYIKSTVETVVKIHQTEGDGDVLAFLTGQEEVETVVSMLIEQARALARTGMKRHLRVLPMYAGLPSFEQMKVFERVSRSVRKVIVATNVAETSITISGIVYVIDCGFVKLRAYNPRTAIECLVVVPVSQASANQRAGRGGRSRSGKCYRLYTEEAFDKLPQSTVPEMQRSNLAPVILQLKALGIDNVLRFHFMSPPPAQSMVQALELLYALGGLDKDCRLTEPLGMRIAEFPLNPMFAKMLLESGNFGCSQEILSIAAMMQIQNIFVVPPNQKSHAIRVHRKFAVEEGDHLTMLNIYEAFIKHNKDSKWCQEHFLNYKGLVRAATVREQLKKLLVKFQVPRKSSEGDPDLVLRCIVSGFFANAARFHSTGAYRTIRDDHELHIHPASVLYAEKPPRWVIYNEVIQTSKYYMRDVTAIESAWLLELAPHFYQQGTHLSLKAKRAKVQDP

SEQ ID NO: 26338 - protein, 383 aa, Homo sapiens
MTATEALLRVLLLLLAFGHSTYGAECFPACNPQNGFCEDDNVCRCQPGWQGPLCDQCVTSPGCLHGLCGEPGQCICTDGWDGELCDRDVRACSSAPCANNRTCVSLDDGLYECSCAPGYSGKDCQKKDGPCVINGSPCQHGGTCVDDEGRASHASCLCPPGFSGNFCEIVANSCTPNPCENDGVCTDIGGDFRCRCPAGFIDKTCSRPVTNCASSPCQNGGTCLQHTQVSYECLCKPEFTGLTCVKKRALSPQQVTRLPSGYGLAYRLTPGVHELPVQQPEHRILKVSMKELNKKTPLLTEGQAICFTILGVLTSLVVLGTVGIVFLNKCETWVSNLRYNHMLRKKKNLLLQYNSGEDLAVNIIFPEKIDMTTFSKEAGDEEI

SEQ ID NO: 26339 - protein, 310 aa, Homo sapiens
MTATEALLRVLLLLLAFGHSTYGAECFPACNPQNGFCEDDNVCRCQPGWQGPLCDQCVTSPGCLHGLCGEPGQCICTDGWDGELCDRDVRACSSAPCANNRTCVSLDDGLYECSCAPGYSGKDCQKKDGPCVINGSPCQHGGTCVDDEGRASHASCLCPPGFSGNFCEIVANSCTPNPCENDGVCTDIGGDFRCRCPAGFIDKTCSRPVTNCASSPCQNGGTCLQHTQGQAICFTILGVLTSLVVLGTVGIVFLNKCETWVSNLRYNHMLRKKKNLLLQYNSGEDLAVNIIFPEKIDMTTFSKEAGDEEI

SEQ ID NO: 26340 - protein, 1157 aa, Homo sapiens
MGKLRRRYNIKGRQQAGPGPSKGPPEPPPVQLELEDKDTLKGVDASNALVLPGKKKKKTKAPPLSKKEKKPLTKKEKKVLQKILEQKEKKSQRAEMLQKLSEVQASEAEMRLFYTTSKLGTGNRMYHTKEKADEVVAPGQEKISSLSGAHRKRRRWPSAEEEEEEEEESESELEEESELDEDPAAEPAEAGVGTTVAPLPPAPAPSSQPVPAGMTVPPPPAAAPPLPRALAKPAVFIPVNRSPEMQEERLKLPILSEEQVIMEAVAEHPIVIVCGETGSGKTTQVPQFLYEAGFSSEDSIIGVTEPRRVAAVAMSQRVAKEMNLSQRVVSYQIRYEGNVTEETRIKFMTDGVLLKEIQKDFLLLRYKVVIIDEAHERSVYTDILIGLLSRIVTLRAKRNLPLKLLIMSATLRVEDFTQNPRLFAKPPPVIKVESRQFPVTVHFNKRTPLEDYSGECFRKVCKIHRMLPAGGILVFLTGQAEVHALCRRLRKAFPPSRARPQEKDDDQKDSVEEMRKFKKSRARAKKARAEVLPQINLDHYSVLPAGEGDEDREAEVDEEEGALDSDLDLDLGDGGQDGGEQPDASLPLHVLPLYSLLAPEKQAQVFKPPPEGTRLCVVATNVAETSLTIPGIKYVVDCGKVKKRYYDRVTGVSSFRVTWVSQASADQRAGRAGRTEPGHCYRLYSSAVFGDFEQFPPPEITRRPVEDLILQMKALNVEKVINFPFPTPPSVEALLAAEELLIALGALQPPQKAERVKQLQENRLSCPITALGRTMATFPVAPRYAKMLALSRQHGCLPYAITIVASMTVRELFEELDRPAASDEELTRLKSKRARVAQMKRTWAGQGASLKLGDLMVLLGAVGACEYASCTPQFCEANGLRYKAMMEIRRLRGQLTTAVNAVCPEAELFVDPKMQPPTESQVTYLRQIVTAGLGDHLARRVQSEEMLEDKWRNAYKTPLLDDPVFIHPSSVLFKELPEFVVYQEIVETTKMYMKGVSSVEVQWIPALLPSYCQFDKPLEEPAPTYCPERGRVLCHRASVFYRVGWPLPAIEVDFPEGIDRYKHFARFLLEGQVFRKLASYRSCLLSSPGTMLKTWARLQPRTESLLRALVAEKADCHEALLAAWKKNPKYLLAEYCEWLPQAMHPDIEKAWPPTTVH

SEQ ID NO: 26341 - protein, 514 aa, Homo sapiens
MADAEVIILPKKHKKKKERKSLPEEDVAEIQHAEEFLIKPESKVAKLDTSQWPLLLKNFDKLNVRTTHYTPLACGSNPLKREIGDYIRTGFINLDKPSNPSSHEVVAWIRRILRVEKTGHSGTLDPKVTGCLIVCIERATRLVKSQQSAGKEYVGIVRLHNAIEGGTQLSRALETLTGALFQRPPLIAAVKRQLRVRTIYESKMIEYDPERRLGIFWVSCEAGTYIRTLCVHLGLLLGVGGQMQELRRVRSGVMSEKDHMVTMHDVLDAQWLYDNHKDESYLRRVVYPLEKLLTSHKRLVMKDSAVNAICYGAKIMLPGVLRYEDGIEVNQEIVVITTKGEAICMAIALMTTAVISTCDHGIVAKIKRVIMERDTYPRKWGLGPKASQKKLMIKQGLLDKHGKPTDSTPATWKQEYVDYSESAKKEVVAEVVKAPQVVAEAAKTAKRKRESESESDETPPAAPQLIKKEKKKSKKDKKAKAGLESGAEPGDGDSDTTKKKKKKKKAKEVELVSE

SEQ ID NO: 26342 - protein, 420 aa, Homo sapiens
MADAEVIILPKKHKKKKERKSLPEEDVAEIQHAEEFLIKPESKVAKLDTSQWPLLLKNFDKLNVRTTHYTPLACGSNPLKREIGDYIRTGFINLDKPSNPSSHEVVAWIRRILRVEKTGHSGTLDPKVTGCLIVCIERATRLVKSQQSAGKEYVGIVRLHNAIEGGTQLSRALETLTGALFQRPPLIAAVKRQLRVRTIYESKMIEYDPERRLGIFWVSCEAGTYIRTLCVHLGLLLGVGGQMQELRRVRSGVMSEKDHMVTMHDVLDAQWLYDNHKDESYLRRVVYPLEKLLTSHKRLVMKDSAVNAICYGAKIMLPGVLRYEDGIEVNQEIVVITTKGEAICMAIALMTTAVISTCDHGIVAKIKRVIMERDTYPRKWGLGPKASQKKLMIKQGLLDKHGKPTDSTPATWKQEYVDYR

SEQ ID NO: 26343 - protein, 272 aa, Homo sapiens
MNGVSEGTRGCSDRQPGALTQGHSCSRKMNASRCLSEEVGSLRPLTMAVLSASFVVGVLGNGLVPWVTVFRMARTVSTVCFFHLALADFMLSLSLPILVYYIVSRQWLLGEWACKLYTGFVFLTFSTSNCLLVLISVDRCISVLYPVWALNHRTEQRASWLAFGVWLLAAALCSAHLKFRTTRKWNGCMQCYLQFNLENETAQMWTQEVFGRQMAVIMAHFLLGFLGPLAIIGTCAHLIRAKLLREGWVHANRPKRLLLVLVSALSAGSHLT

SEQ ID NO: 26344 - protein, 318 aa, Homo sapiens
MSAHNRGTELDLSWISKIQVNHPAVLRRAEQIQARRTVKKEWQAAWLLKAVTFIDLTTLSGDDTSSNIQRLCYKAKYPIREDLLKALNMHDKGITTAAVCVYPARVCDAVKALKAAGCNIPVASVAAGFPAGQTHLKTRLEEIRLAVEDGATEIDVVINRSLVLTGQWEALYDEIRQFRKACGEAHLKTILATGELGTLTNVYKASMIAMMAGSDFIKTSTGKETVNATFPVAIVMLRAIRDFFWKTGNKIGFKPAGGIRSAKDSLAWLSLVKEELGDEWLKPELFRIGASTLLSDIERQIYHHVTGRYAAYHDLPMS

SEQ ID NO: 26345 - protein, 399 aa, Homo sapiens
MNFRQLLLHLPRYLGASGSPRRLWWSPSLDTISSVGSWRGRSSKSPAHWNQVVSEAEKIVGYPTSFMSLRCLLSDELSNIAMQVRKLVGTQHPLLTTARGLVHDSWNSLQLRGLVVLLISKAAGPSSVNTSCQNYDMVSGIYSCQRSLAEITELIHIALLVHRGIVNLNELQSSDGPLKDMQFGNKIAILSGDFLLANACNGLALLQNTKVVELLASALMDLVQGVYHENSTSKESYITDDIGISTWKEQTFLSHGALLAKSCQAAMELAKHDAEVQNMAFQYGKHMAMSHKINSDVQPFIKEKTSDSMTFNLNSAPVVLHQEFLGRDLWIKQIGEAQEKGRLDYAKLRERIKAGKGVTSAIDLCRYHGNKALEALESFPPSEARSALENIVFAVTRFS

SEQ ID NO: 26346 - protein, 240 aa, Homo sapiens
MNFRQLLLHLPRYLGASGSPRRLWWSPSLDTISSVGSWRGRSSKSPAHWNQVVSEAEKIVGYPTSFMSLRCLLSDELSNIAMQVRKLVGTQHPLLTTARGLVHDSWNSLQLRGLVVLLISKAAGPSSVNTSCQNYDMVSGIYSCQRSLAEITELIHIALLVHRGIVNLNELQSSDGPLKDMQFGNKIAILSGDFLLANACNGLALLQNTKSFSFNGPIAIYQMGDCESAWILSKHPRALS

SEQ ID NO: 26347 - protein, 168 aa, Homo sapiens
MEPPNLYPVKLYVYDLSKGLARRLSPIMLGKQLEGIWHTSIVVHKDEFFFGSGGISSCPPGGTLLGPPDSVVDVGSTEVTEEIFLEYLSSLGESLFRGEAYNLFEHNCNTFSNEVAQFLTGRKIPSYITDLPSEVLSTPFGQALRPLLDSIQIQPPGGSSVGRPNGQS

SEQ ID NO: 26348 - protein, 220 aa, Homo sapiens
MASERLPNRPACLLVASGAAEGVSAQSFLHCFTMASTAFNLQVATPGGKAMEFVDVTESNARWVQDFRLKAYASPAKLESIDGARYHALLIPSCPGALTDLASSGSLARILQHFHSESKPICAVGHGVAALCCATNEDRSWVFDSYSLTGPSVCELVRAPGFARLPLVVEDFVKDSGACFSASEPDAVHVVLDRHLVTGQNASSTVPAVQNLLFLCGSRK

SEQ ID NO: 26349 - protein, 250 aa, Homo sapiens
MASERLPNRPACLLVASGAAEGVSAQSFLHCFTMASTAFNLQVATPGGKAMEFVDVTESNARWVQDFRLKAYASPAKLESIDGARYHALLIPSCPGALTDLASSGSLARILQHFHSESKPICAVGHGVAALCCATNEDRSWVFDSYSLTGPSVCELVRAPGFARLPLVVEDFVKDSGACFSGAAASCPKADRHWQHFPVEEIFLACGFKVAGLGAAPGWGRGGKQEDRPPEEQRRAGEDFPIYQCVFIYP

SEQ ID NO: 26350 - protein, 184 aa, Homo sapiens
MASERLPNRPACLLVASGAAEGVSAQSFLHCFTMASTAFNLQVATPGGKAMEFVDVTESNARWVQDFRLKAYASPAKLESIDEPICAVGHGVAALCCATNEDRSWVFDSYSLTGPSVCELVRAPGFARLPLVVEDFVKDSGACFSASEPDAVHVVLDRHLVTGQNASSTVPAVQNLLFLCGSRK

SEQ ID NO: 26351 - protein, 150 aa, Homo sapiens
MASERLPNRPACLLVASGAAEGVSAQSFLHCFTMASTAFNLQVATPGGKAMEFVDVTESNARWVQDFRLKAYASPAKLESIDEPICAVGHGVAALCCATNEDRSWVFDSYSLTGGLGLSQEPPPRSRSPLCVSSSGPPASPACRSWWRTS

SEQ ID NO: 26352 - protein, 96 aa, Homo sapiens
MAEVEETLKRLQSQKGVQGIIVVNTEGIPIKSTMDNPTTTQYASLMHSFILKARSTVRDIDPQNDLTFLRIRSKKNEIMVAPDKDYFLIVIQNPTE

SEQ ID NO: 26353 - protein, 47 aa, Homo sapiens
MAEVEETLKRLQSQKGVQGIIVVNTEGGWEPLGHCGDRSRPPAQGCP

SEQ ID NO: 26354 - protein, 259 aa, Homo sapiens
MAALMRSKDSSCCLLLLAAVLMVESSQIGSSRAKLNSIKSSLGGETPGQAANRSAGMYQGLAFGGSKKGKNLGQAYPCSSDKECEVGRYCHSPHQGSSACMVCRRKKKRCHRDGMCCPSTRCNNGICIPVTESILTPHIPALDGTRHRDRNHGHYSNHDLGWQNLGRPHTKMSHIKGHEGDPCLRSSDCIEGFCCARHFWTKICKPVLHQGEVCTKQRKKGSHGLEIFQRCDCAKGLSCKVWKDATYSSKARLHVCQKI

SEQ ID NO: 26355 - protein, 783 aa, Homo sapiens
MAKYNTGGNPTEDVSVNSRPFRVTGPNSSSGIQARKNLFNNQGNASPPAGPSNVPKFGSPKPPVAVKPSSEEKPDKEPKPPFLKPTGAGQRFGTPASLTTRDPEAKVGFLKPVGPKPINLPKEDSKPTFPWPPGNKPSLHSVNQDHDLKPLGPKSGPTPPTSENEQKQAFPKLTGVKGKFMSASQDLEPKPLFPKPAFGQKPPLSTENSHEDESPMKNVSSSKGSPAPLGVRSKSGPLKPAREDSENKDHAGEISSLPFPGVVLKPAASRGGPGLSKNGEEKKEDRKIDAAKNTFQSKINQEELASGTPPARFPKAPSKLTVGGPWGQSQEKEKGDKNSATPKQKPLPPLFTLGPPPPKPNRPPNVDLTKFHKTSSGNSTSKGQTSYSTTSLPPPPPSHPASQPPLPASHPSQPPVPSLPPRNIKPPFDLKSPVNEDNQDGVTHSDGAGNLDEEQDSEGETYEDIEASKEREKKREKEEKKRLELEKKEQKEKEKKEQEIKKKFKLTGPIQVIHLAKACCDVKGGKNELSFKQGEQIEIIRITDNPEGKWLGRTARGSYGYIKTTAVEIDYDSLKLKKDSLGAPSRPIEDDQEVYDDVAEQDDISSHSQSGSGGIFPPPPDDDIYDGIEEEDADDGFPAPPKQLDMGDEVYDDVDTSDFPVSSAEMSQGTNVGKAKTEEKDLKKLKKQEKEEKDFRKKFKYDGEIRVLYSTKVTTSITSKKWGTRDLQVKPGESLEVIQTTDDTKVLCRNEEGKYGYVLRSYLADNDGEIYDDIADGCIYDND

SEQ ID NO: 26356 - protein, 829 aa, Homo sapiens
MAKYNTGGNPTEDVSVNSRPFRVTGPNSSSGIQARKNLFNNQGNASPPAGPSNVPKFGSPKPPVAVKPSSEEKPDKEPKPPFLKPTGAGQRFGTPASLTTRDPEAKVGFLKPVGPKPINLPKEDSKPTFPWPPGNKPSLHSVNQDHDLKPLGPKSGPTPPTSENEQKQAFPKLTGVKGKFMSASQDLEPKPLFPKPAFGQKPPLSTENSHEDESPMKNVSSSKGSPAPLGVRSKSGPLKPAREDSENKDHAGEISSLPFPGVVLKPAASRGGPGLSKNGEEKKEDRKIDAAKNTFQSKINQEELASGTPPARFPKAPSKLTVGGPWGQSQEKEKGDKNSATPKQKPLPPLFTLGPPPPKPNRPPNVDLTKFHKTSSGNSTSKGQTSYSTTSLPPPPPSHPASQPPLPASHPSQPPVPSLPPRNIKPPFDLKSPVNEDNQDGVTHSDGAGNLDEEQDSEGETYEDIEASKEREKKREKEEKKRLELEKKEQKEKEKKEQEIKKKFKLTGPIQVIHLAKACCDVKGGKNELSFKQGEQIEIIRITDNPEGKWLGRTARGSYGYIKTTAVEIDYDSLKLKKDSLGAPSRPIEDDQEVYDDVAEQDDISSHSQSGSGGIFPPPPDDDIYDGIEEEDADDGSTLQVQEKSNTWSWGILKMLKGKDDRKKSIREKPKVSDSDNNEGSSFPAPPKQLDMGDEVYDDVDTSDFPVSSAEMSQGTNVGKAKTEEKDLKKLKKQEKEEKDFRKKFKYDGEIRVLYSTKVTTSITSKKWGTRDLQVKPGESLEVIQTTDDTKVLCRNEEGKYGYVLRSYLADNDGEIYDDIADGCIYDND

SEQ ID NO: 26357 - protein, 839 aa, Homo sapiens
MDGKADVKSLMAKYNTGGNPTEDVSVNSRPFRVTGPNSSSGIQARKNLFNNQGNASPPAGPSNVPKFGSPKPPVAVKPSSEEKPDKEPKPPFLKPTGAGQRFGTPASLTTRDPEAKVGFLKPVGPKPINLPKEDSKPTFPWPPGNKPSLHSVNQDHDLKPLGPKSGPTPPTSENEQKQAFPKLTGVKGKFMSASQDLEPKPLFPKPAFGQKPPLSTENSHEDESPMKNVSSSKGSPAPLGVRSKSGPLKPAREDSENKDHAGEISSLPFPGVVLKPAASRGGPGLSKNGEEKKEDRKIDAAKNTFQSKINQEELASGTPPARFPKAPSKLTVGGPWGQSQEKEKGDKNSATPKQKPLPPLFTLGPPPPKPNRPPNVDLTKFHKTSSGNSTSKGQTSYSTTSLPPPPPSHPASQPPLPASHPSQPPVPSLPPRNIKPPFDLKSPVNEDNQDGVTHSDGAGNLDEEQDSEGETYEDIEASKEREKKREKEEKKRLELEKKEQKEKEKKEQEIKKKFKLTGPIQVIHLAKACCDVKGGKNELSFKQGEQIEIIRITDNPEGKWLGRTARGSYGYIKTTAVEIDYDSLKLKKDSLGAPSRPIEDDQEVYDDVAEQDDISSHSQSGSGGIFPPPPDDDIYDGIEEEDADDGSTLQVQEKSNTWSWGILKMLKGKDDRKKSIREKPKVSDSDNNEGSSFPAPPKQLDMGDEVYDDVDTSDFPVSSAEMSQGTNVGKAKTEEKDLKKLKKQEKEEKDFRKKFKYDGEIRVLYSTKVTTSITSKKWGTRDLQVKPGESLEVIQTTDDTKVLCRNEEGKYGYVLRSYLADNDGEIYDDIADGCIYDND

SEQ ID NO: 26358 - protein, 350 aa, Homo sapiens
MQRLGATLLCLLLAAAVPTAPAPAPTATSAPVKPGPALSYPQEEATLNEMFREVEELMEDTQHKLRSAVEEMEAEEAAAKASSEVNLANLPPSYHNETNTDTKVGNNTIHVHREIHKITNNQTGQMVFSETVITSVGDEEGRRSHECIIDEDCGPSMYCQFASFQYTCQPCRGQRMLCTRDSECCGDQLCVWGHCTKMATRGSNGTICDNQRDCQPGLCCAFQRGLLFPVCTPLPVEGELCHDPASRLLDLITWELEPDGALDRCPCASGLLCQPHSHSLVYVCKPTFVGSRDQDGEILLPREVPDEYEVGSFMEEVRQELEDLERSLTEEMALREPAAAAAALLGGEEI

SEQ ID NO: 26359 - protein, 488 aa, Homo sapiens
MGDRGSSRRRRTGSRPSSHGGGGPAAAEEEVRDAAAGPDVGAAGDAPAPAPNKDGDAGVGSGHWELRCHRLQDSLFSSDSGFSNYRGILNWCVVMLILSNARLFLENLIKYGILVDPIQVVSLFLKDPYSWPAPCLVIAANVFAVAAFQVEKRLAVGALTEQAGLLLHVANLATILCFPAAVVLLVESITPVGSLLALMAHTILFLKLFSYRDVNSWCRRARAKAASAGKKASSAAAPHTVSYPDNLTYRDLYYFLFAPTLCYELNFPRSPRIRKRFLLRRILEMLFFTQLQVGLIQQWMVPTIQNSMKPFKDMDYSRIIERLLKLAVPNHLIWLIFFYWLFHSCLNAVAELMQFGDREFYRDWWNSESVTYFWQNWNIPVHKWCIRHFYKPMLRRGSSKWMARTGVFLASAFFHEYLVSVPLRMFRLWAFTGMMAQIPLAWFVGRFFQGNYGNAAVWLSLIIGQPIAVLMYVHDYYVLNYEAPAAEA

SEQ ID NO: 26360 - protein, 369 aa, Homo sapiens
MEGSLEREAPAGALAAVLKHSSTLPPESTQVRGYDFNRGVNYRALLEAFGTTGFQATNFGRAVQQVNAMIEKKLEPLSQDEDQHADLTQSRRPLTSCTIFLGYTSNLISSGIRETIRYLVQHNMVDVLVTTAGGVEEDLIKCLAPTYLGEFSLRGKELRENGINRIGNLLVPNENYCKFEDWLMPILDQMVMEQNTEGVKWTPSKMIARLGKEINNPESVYYWAQKNHIPVFSPALTDGSLGDMIFFHSYKNPGLVLDIVEDLRLINTQAIFAKCTGMIILGGGVVKHHIANANLMRNGADYAVYINTAQEFDGSDSGARPDEAVSWGKIRVDAQPVKVYADASLVFPLLVAETFAQKMDAFMHEKNED

SEQ ID NO: 26361 - protein, 322 aa, Homo sapiens
MEGSLEREAPAGALAAVLKHSSTLPPESTQVRGYDFNRGVNYRALLEAFGTTGFQATNFGRAVQQVNAMIEKKLEPLSQDEDQHADLTQSRRPLTSCTIFLGYTSNLISSGIRETIRYLVQHNMVDVLVTTAGGVEEDLIKCLAPTYLGEFSLRGKELRENGINRIGNLLVPNENYCKFEDWLMPILDQMVMEQNTEGVKWTPSKMIARLGKEINNPESVYYWAQKNHIPVFSPALTDGSLGDMIFFHSYKNPGLVLDIVEAQEFDGSDSGARPDEAVSWGKIRVDAQPVKVYADASLVFPLLVAETFAQKMDAFMHEKNED

SEQ ID NO: 26362 - protein, 327 aa, Homo sapiens
MPIIPAFWEAEAGGSREEEFETSLANMIEKKLEPLSQDEDQHADLTQSRRPLTSCTIFLGYTSNLISSGIRETIRYLVQHNMVDVLVTTAGGVEEDLIKCLAPTYLGEFSLRGKELRENGINRIGNLLVPNENYCKFEDWLMPILDQMVMEQNTEGVKWTPSKMIARLGKEINNPESVYYWAQKNHIPVFSPALTDGSLGDMIFFHSYKNPGLVLDIVEDLRLINTQAIFAKCTGMIILGGGVVKHHIANANLMRNGADYAVYINTAQEFDGSDSGARPDEAVSWGKIRVDAQPVKVYADASLVFPLLVAETFAQKMDAFMHEKNED

SEQ ID NO: 26363 - protein, 2871 aa, Homo sapiens
MSCNGGSHPRINTLGRMIRAESGPDLRYEVTSGGGGTSRMYYSRRGVITDQNSDGYCQTGTMSRHQNQNTIQELLQNCSDCLMRAELIVQPELKYGDGIQLTRSRELDECFAQANDQMEILDSLIREMRQMGQPCDAYQKRLLQLQEQMRALYKAISVPRVRRASSKGGGGYTCQSGSGWDEFTKHVTSECLGWMRQQRAEMDMVAWGVDLASVEQHINSHRGIHNSIGDYRWQLDKIKADLREKSAIYQLEEEYENLLKASFERMDHLRQLQNIIQATSREIMWINDCEEEELLYDWSDKNTNIAQKQEAFSIRMSQLEVKEKELNKLKQESDQLVLNQHPASDKIEAYMDTLQTQWSWILQITKCIDVHLKENAAYFQFFEEAQSTEAYLKGLQDSIRKKYPCDKNMPLQHLLEQIKELEKEREKILEYKRQVQNLVNKSKKIVQLKPRNPDYRSNKPIILRALCDYKQDQKIVHKGDECILKDNNERSKWYVTGPGGVDMLVPSVGLIIPPPNPLAVDLSCKIEQYYEAILALWNQLYINMKSLVSWHYCMIDIEKIRAMTIAKLKTMRQEDYMKTIADLELHYQEFIRNSQGSEMFGDDDKRKIQSQFTDAQKHYQTLVIQLPGYPQHQTVTTTEITHHGTCQDVNHNKVIETNRENDKQETWMLMELQKIRRQIEHCEGRMTLKNLPLADQGSSHHITVKINELKSVQNDSQAIAEVLNQLKDMLANFRGSEKYCYLQNEVFGLFQKLENINGVTDGYLNSLCTVRALLQAILQTEDMLKVYEARLTEEETVCLDLDKVEAYRCGLKKIKNDLNLKKSLLATMKTELQKAQQIHSQTSQQYPLYDLDLGKFGEKVTQLTDRWQRIDKQIDFRLWDLEKQIKQLRNYRDNYQAFCKWLYDAKRRQDSLESMKFGDSNTVMRFLNEQKNLHSEISGKRDKSEEVQKIAELCANSIKDYELQLASYTSGLETLLNIPIKRTMIQSPSGVILQEAADVHARYIELLTRSGDYYRFLSEMLKSLEDLKLKNTKIEVLEEELRLARDANSENCNKNKFLDQNLQKYQAECSQFKAKLASLEELKRQAELDGKSAKQNLDKCYGQIKELNEKITRLTYEIEDEKRRRKSVEDRFDQQKNDYDQLQKARQCEKENLGWQKLESEKAIKEKEYEIERLRVLLQEEGTRKREYENELAKVRNHYNEEMSNLRNKYETEINITKTTIKEISMQKEDDSKNLRNQLDRLSRENRDLKDEIVRLNDSILQATEQRRRAEENALQQKACGSEIMQKKQHLEIELKQVMQQRSEDNARHKQSLEEAAKTIQDKNKEIERLKAEFQEEAKRRWEYENELSKVRNNYDEEIISLKNQFETEINITKTTIHQLTMQKEEDTSGYRAQIDNLTRENRSLSEEIKRLKNTLTQTTENLRRVEEDIQQQKATGSEVSQRKQQLEVELRQVTQMRTEESVRYKQSLDDAAKTIQDKNKEIERLKQLIDKETNDRKCLEDENARLQRVQYDLQKANSSATETINKLKVQEQELTRLRIDYERVSQERTVKDQDITRFQNSLKELQLQKQKVEEELNRLKRTASEDSCKRKKLEEELEGMRRSLKEQAIKITNLTQQLEQASIVKKRSEDDLRQQRDVLDGHLREKQRTQEELRRLSSEVEALRRQLLQEQESVKQAHLRNEHFQKAIEDKSRSLNESKIEIERLQSLTENLTKEHLMLEEELRNLRLEYDDLRRGRSEADSDKNATILELRSQLQISNNRTLELQGLINDLQRERENLRQEIEKFQKQALEASNRIQESKNQCTQVVQERESLLVKIKVLEQDKARLQRLEDELNRAKSTLEAETRVKQRLECEKQQIQNDLNQWKTQYSRKEEAIRKIESEREKSEREKNSLRSEIERLQAEIKRIEERCRRKLEDSTRETQSQLETERSRYQREIDKLRQRPYGSHRETQTECEWTVDTSKLVFDGLRKKVTAMQLYECQLIDKTTLDKLLKGKKSVEEVASEIQPFLRGAGSIAGASASPKEKYSLVEAKRKKLISPESTVMLLEAQAATGGIIDPHRNEKLTVDSAIARDLIDFDDRQQIYAAEKAITGFDDPFSGKTVSVSEAIKKNLIDRETGMRLLEAQIASGGVVDPVNSVFLPKDVALARGLIDRDLYRSLNDPRDSQKNFVDPVTKKKVSYVQLKERCRIEPHTGLLLLSVQKRSMSFQGIRQPVTVTELVDSGILRPSTVNELESGQISYDEVGERIKDFLQGSSCIAGIYNETTKQKLGIYEAMKIGLVRPGTALELLEAQAATGFIVDPVSNLRLPVEEAYKRGLVGIEFKEKLLSAERAVTGYNDPETGNIISLFQAMNKELIEKGHGIRLLEAQIATGGIIDPKESHRLPVDIAYKRGYFNEELSEILSDPSDDTKGFFDPNTEENLTYLQLKERCIKDEETGLCLLPLKEKKKQVQTSQKNTLRKRRVVIVDPETNKEMSVQEAYKKGLIDYETFKELCEQECEWEEITITGSDGSTRVVLVDRKTGSQYDIQDAIDKGLVDRKFFDQYRSGSLSLTQFADMISLKNGVGTSSSMGSGVSDDVFSSSRHESVSKISTISSVRNLTIRSSSFSDTLEESSPIAAIFDTENLEKISITEGIERGIVDSITGQRLLEAQACTGGIIHPTTGQKLSLQDAVSQGVIDQDMATRLKPAQKAFIGFEGVKGKKKMSAAEAVKEKWLPYEAGQRFLEFQYLTGGLVDPEVHGRISTEEAIRKGFIDGRAAQRLQDTSSYAKILTCPKTKLKISYKDAINRSMVEDITGLRLLEAASVSSKGLPSPYNMSSAPGSRSGSRSGSRSGSRSGSRSGSRRGSFDATGNSSYSYSYSFSSSSIGH

SEQ ID NO: 26364 - protein, 2272 aa, Homo sapiens
MSCNGGSHPRINTLGRMIRAESGPDLRYEVTSGGGGTSRMYYSRRGVITDQNSDGYCQTGTMSRHQNQNTIQELLQNCSDCLMRAELIVQPELKYGDGIQLTRSRELDECFAQANDQMEILDSLIREMRQMGQPCDAYQKRLLQLQEQMRALYKAISVPRVRRASSKGGGGYTCQSGSGWDEFTKHVTSECLGWMRQQRAEMDMVAWGVDLASVEQHINSHRGIHNSIGDYRWQLDKIKADLREKSAIYQLEEEYENLLKASFERMDHLRQLQNIIQATSREIMWINDCEEEELLYDWSDKNTNIAQKQEAFSIRMSQLEVKEKELNKLKQESDQLVLNQHPASDKIEAYMDTLQTQWSWILQITKCIDVHLKENAAYFQFFEEAQSTEAYLKGLQDSIRKKYPCDKNMPLQHLLEQIKELEKEREKILEYKRQVQNLVNKSKKIVQLKPRNPDYRSNKPIILRALCDYKQDQKIVHKGDECILKDNNERSKWYVTGPGGVDMLVPSVGLIIPPPNPLAVDLSCKIEQYYEAILALWNQLYINMKSLVSWHYCMIDIEKIRAMTIAKLKTMRQEDYMKTIADLELHYQEFIRNSQGSEMFGDDDKRKIQSQFTDAQKHYQTLVIQLPGYPQHQTVTTTEITHHGTCQDVNHNKVIETNRENDKQETWMLMELQKIRRQIEHCEGRMTLKNLPLADQGSSHHITVKINELKSVQNDSQAIAEVLNQLKDMLANFRGSEKYCYLQNEVFGLFQKLENINGVTDGYLNSLCTVRALLQAILQTEDMLKVYEARLTEEETVCLDLDKVEAYRCGLKKIKNDLNLKKSLLATMKTELQKAQQIHSQTSQQYPLYDLDLGKFGEKVTQLTDRWQRIDKQIDFRLWDLEKQIKQLRNYRDNYQAFCKWLYDAKRRQDSLESMKFGDSNTVMRFLNEQKNLHSEISGKRDKSEEVQKIAELCANSIKDYELQLASYTSGLETLLNIPIKRTMIQSPSGVILQEAADVHARYIELLTRSGDYYRFLSEMLKSLEDLKLKNTKIEVLEEELRLARDANSENCNKNKFLDQNLQKYQAECSQFKAKLASLEELKRQAELDGKSAKQNLDKCYGQIKELNEKITRLTYEIEDEKRRRKSVEDRFDQQKNDYDQLQKARQCEKENLGWQKLESEKAIKEKEYEIERLRVLLQEEGTRKREYENELAKASNRIQESKNQCTQVVQERESLLVKIKVLEQDKARLQRLEDELNRAKSTLEAETRVKQRLECEKQQIQNDLNQWKTQYSRKEEAIRKIESEREKSEREKNSLRSEIERLQAEIKRIEERCRRKLEDSTRETQSQLETERSRYQREIDKLRQRPYGSHRETQTECEWTVDTSKLVFDGLRKKVTAMQLYECQLIDKTTLDKLLKGKKSVEEVASEIQPFLRGAGSIAGASASPKEKYSLVEAKRKKLISPESTVMLLEAQAATGGIIDPHRNEKLTVDSAIARDLIDFDDRQQIYAAEKAITGFDDPFSGKTVSVSEAIKKNLIDRETGMRLLEAQIASGGVVDPVNSVFLPKDVALARGLIDRDLYRSLNDPRDSQKNFVDPVTKKKVSYVQLKERCRIEPHTGLLLLSVQKRSMSFQGIRQPVTVTELVDSGILRPSTVNELESGQISYDEVGERIKDFLQGSSCIAGIYNETTKQKLGIYEAMKIGLVRPGTALELLEAQAATGFIVDPVSNLRLPVEEAYKRGLVGIEFKEKLLSAERAVTGYNDPETGNIISLFQAMNKELIEKGHGIRLLEAQIATGGIIDPKESHRLPVDIAYKRGYFNEELSEILSDPSDDTKGFFDPNTEENLTYLQLKERCIKDEETGLCLLPLKEKKKQVQTSQKNTLRKRRVVIVDPETNKEMSVQEAYKKGLIDYETFKELCEQECEWEEITITGSDGSTRVVLVDRKTGSQYDIQDAIDKGLVDRKFFDQYRSGSLSLTQFADMISLKNGVGTSSSMGSGVSDDVFSSSRHESVSKISTISSVRNLTIRSSSFSDTLEESSPIAAIFDTENLEKISITEGIERGIVDSITGQRLLEAQACTGGIIHPTTGQKLSLQDAVSQGVIDQDMATRLKPAQKAFIGFEGVKGKKKMSAAEAVKEKWLPYEAGQRFLEFQYLTGGLVDPEVHGRISTEEAIRKGFIDGRAAQRLQDTSSYAKILTCPKTKLKISYKDAINRSMVEDITGLRLLEAASVSSKGLPSPYNMSSAPGSRSGSRSGSRSGSRSGSRSGSRRGSFDATGNSSYSYSYSFSSSSIGH

SEQ ID NO: 26365 - protein, 2428 aa, Homo sapiens
MSCNGGSHPRINTLGRMIRAESGPDLRYEVTSGGGGTSRMYYSRRGVITDQNSDGYCQTGTMSRHQNQNTIQELLQNCSDCLMRAELIVQPELKYGDGIQLTRSRELDECFAQANDQMEILDSLIREMRQMGQPCDAYQKRLLQLQEQMRALYKAISVPRVRRASSKGGGGYTCQSGSGWDEFTKHVTSECLGWMRQQRAEMDMVAWGVDLASVEQHINSHRGIHNSIGDYRWQLDKIKADLREKSAIYQLEEEYENLLKASFERMDHLRQLQNIIQATSREIMWINDCEEEELLYDWSDKNTNIAQKQEAFSIRMSQLEVKEKELNKLKQESDQLVLNQHPASDKIEAYMDTLQTQWSWILQITKCIDVHLKENAAYFQFFEEAQSTEAYLKGLQDSIRKKYPCDKNMPLQHLLEQIKELEKEREKILEYKRQVQNLVNKSKKIVQLKPRNPDYRSNKPIILRALCDYKQDQKIVHKGDECILKDNNERSKWYVTGPGGVDMLVPSVGLIIPPPNPLAVDLSCKIEQYYEAILALWNQLYINMKSLVSWHYCMIDIEKIRAMTIAKLKTMRQEDYMKTIADLELHYQEFIRNSQGSEMFGDDDKRKIQSQFTDAQKHYQTLVIQLPGYPQHQTVTTTEITHHGTCQDVNHNKVIETNRENDKQETWMLMELQKIRRQIEHCEGRMTLKNLPLADQGSSHHITVKINELKSVQNDSQAIAEVLNQLKDMLANFRGSEKYCYLQNEVFGLFQKLENINGVTDGYLNSLCTVRALLQAILQTEDMLKVYEARLTEEETVCLDLDKVEAYRCGLKKIKNDLNLKKSLLATMKTELQKAQQIHSQTSQQYPLYDLDLGKFGEKVTQLTDRWQRIDKQIDFRLWDLEKQIKQLRNYRDNYQAFCKWLYDAKRRQDSLESMKFGDSNTVMRFLNEQKNLHSEISGKRDKSEEVQKIAELCANSIKDYELQLASYTSGLETLLNIPIKRTMIQSPSGVILQEAADVHARYIELLTRSGDYYRFLSEMLKSLEDLKLKNTKIEVLEEELRLARDANSENCNKNKFLDQNLQKYQAECSQFKAKLASLEELKRQAELDGKSAKQNLDKCYGQIKELNEKITRLTYEIEDEKRRRKSVEDRFDQQKNDYDQLQKARQCEKENLGWQKLESEKAIKEKEYEIERLRVLLQEEGTRKREYENELAKVRNHYNEEMSNLRNKYETEINITKTTIKEISMQKEDDSKNLRNQLDRLSRENRDLKDEIVRLNDSILQATEQRRRAEENALQQKACGSEIMQKKQHLEIELKQVMQQRSEDNARHKQSLEEAAKTIQDKNKEIERLKAEFQEEAKRRWEYENELSKASNRIQESKNQCTQVVQERESLLVKIKVLEQDKARLQRLEDELNRAKSTLEAETRVKQRLECEKQQIQNDLNQWKTQYSRKEEAIRKIESEREKSEREKNSLRSEIERLQAEIKRIEERCRRKLEDSTRETQSQLETERSRYQREIDKLRQRPYGSHRETQTECEWTVDTSKLVFDGLRKKVTAMQLYECQLIDKTTLDKLLKGKKSVEEVASEIQPFLRGAGSIAGASASPKEKYSLVEAKRKKLISPESTVMLLEAQAATGGIIDPHRNEKLTVDSAIARDLIDFDDRQQIYAAEKAITGFDDPFSGKTVSVSEAIKKNLIDRETGMRLLEAQIASGGVVDPVNSVFLPKDVALARGLIDRDLYRSLNDPRDSQKNFVDPVTKKKVSYVQLKERCRIEPHTGLLLLSVQKRSMSFQGIRQPVTVTELVDSGILRPSTVNELESGQISYDEVGERIKDFLQGSSCIAGIYNETTKQKLGIYEAMKIGLVRPGTALELLEAQAATGFIVDPVSNLRLPVEEAYKRGLVGIEFKEKLLSAERAVTGYNDPETGNIISLFQAMNKELIEKGHGIRLLEAQIATGGIIDPKESHRLPVDIAYKRGYFNEELSEILSDPSDDTKGFFDPNTEENLTYLQLKERCIKDEETGLCLLPLKEKKKQVQTSQKNTLRKRRVVIVDPETNKEMSVQEAYKKGLIDYETFKELCEQECEWEEITITGSDGSTRVVLVDRKTGSQYDIQDAIDKGLVDRKFFDQYRSGSLSLTQFADMISLKNGVGTSSSMGSGVSDDVFSSSRHESVSKISTISSVRNLTIRSSSFSDTLEESSPIAAIFDTENLEKISITEGIERGIVDSITGQRLLEAQACTGGIIHPTTGQKLSLQDAVSQGVIDQDMATRLKPAQKAFIGFEGVKGKKKMSAAEAVKEKWLPYEAGQRFLEFQYLTGGLVDPEVHGRISTEEAIRKGFIDGRAAQRLQDTSSYAKILTCPKTKLKISYKDAINRSMVEDITGLRLLEAASVSSKGLPSPYNMSSAPGSRSGSRSGSRSGSRSGSRSGSRRGSFDATGNSSYSYSYSFSSSSIGH

SEQ ID NO: 26366 - protein, 220 aa, Homo sapiens
MERYAAALEEVADGARQQERHYQLLSALQSLVKELPSSFQQRLSYTTLSDLALALLDGTVFEIVQGLLEIQHLTEKSLYNQRLRLQNEHRVLRQALRQKHQEAQQACRPHNLPVVQAAQQRELEAVEHRIREEQRAMDQKIILELDRKVADQQSTLEKAGVAGFYVTTNPQELMLQMNLLELIRKLQQRGCRAGNAALGLGGPWQSPAAQCDQKGSPVPP

SEQ ID NO: 26367 - protein, 604 aa, Homo sapiens
MENQAHNTMGTSPCEAELQELMEQIDIMVSNKKMDWERKMRALETRLDLRDQELANAQTCLDQKGQEVGLLRQKLDSLEKCNLAMTQNYEGQLQSLKAQFSKLTNNFEKLRLHQMKQNKVPRKELPHLKEEIPFELSNLNQKLEEFRAKSREWDKQEILYQTHLISLDAQQKLLSEKCNQFQKQAQSYQTQLNGKKQCLEDSSSEIPRLICDPDPNCEINERDEFIIEKLKSAVNEIALSRNKLQDENQKLLQELKMYQRQCQAMEAGLSEVKSELQSRDDLLRIIEMERLQLHRELLKIGECQNAQGNKTRLESSYLPSIKEPERKIKELFSVMQDQPNHEKELNKIRSQLQQVEEYHNSEQERMRNEISDLTEELHQKEITIATVTKKAALLEKQLKMELEIKEKMLAKQKVSDMKYKAVRTENTHLKGMMGDLDPGEYMSMDFTNREQSRHTSINKLQYENERLRNDLAKLHVNGKSTWTNQNTYEETGRYAYQSQIKVEQNEERLSHDCEPNRSTMPPLPPSTFQAKEMTSPLVSDDDVFPLSPPDMSFPASLAAQHFLLEEEKRAKELEKLLNTHIDELQRHTEFTLNKYSKLKQNRHI

SEQ ID NO: 26368 - protein, 342 aa, Homo sapiens
MAMEAGLSEVKSELQSRDDLLRIIEMERLQLHRELLKIGECQNAQGNKTRLESSYLPSIKEPERKIKELFSVMQDQPNHEKELNKIRSQLQQVEEYHNSEQERMRNEISDLTEELHQKEITIATVTKKAALLEKQLKMELEIKEKMLAKQKVSDMKYKAVRTENTHLKGMMGDLDPGEYMSMDFTNREQSRHTSINKLQYENERLRNDLAKLHVNGKSTWTNQNTYEETGRYAYQSQIKVEQNEERLSHDCEPNRSTMPPLPPSTFQAKEMTSPLVSDDDVFPLSPPDMSFPASLAAQHFLLEEEKRAKELEKLLNTHIDELQRHTEFTLNKYSKLKQNRHI

SEQ ID NO: 26369 - protein, 537 aa, Homo sapiens
MGCVQCKDKEATKLTEERDGSLNQSSGYRYGTDPTPQHYPSFGVTSIPNYNNFHAAGGQGLTVFGGVNSSSHTGTLRTRGGTGVTLFVALYDYEARTEDDLSFHKGEKFQILNSSEGDWWEARSLTTGETGYIPSNYVAPVDSIQAEEWYFGKLGRKDAERQLLSFGNPRGTFLIRESETTKGAYSLSIRDWDDMKGDHVKHYKIRKLDNGGYYITTRAQFETLQQLVQHYSERAAGLCCRLVVPCHKGMPRLTDLSVKTKDVWEIPRESLQLIKRLGNGQFGEVWMGTWNGNTKVAIKTLKPGTMSPESFLEEAQIMKKLKHDKLVQLYAVVSEEPIYIVTEYMNKGSLLDFLKDGEGRALKLPNLVDMAAQVAAGMAYIERMNYIHRDLRSANILVGNGLICKIADFGLARLIEDNEYTARQGAKFPIKWTAPEAALYGRFTIKSDVWSFGILLTELVTKGRVPYPGMNNREVLEQVERGYRMPCPQDCPISLHELMIHCWKKDPEERPTFEYLQSFLEDYFTATEPQYQPGENL

SEQ ID NO: 26370 - protein, 534 aa, Homo sapiens
MGCVQCKDKEATKLTEERDGSLNQSSGYRYGTDPTPQHYPSFGVTSIPNYNNFHAAGGQGLTVFGGVNSSSHTGTLRTRGGTGVTLFVALYDYEARTEDDLSFHKGEKFQILNSSEGDWWEARSLTTGETGYIPSNYVAPVDSIQAEEWYFGKLGRKDAERQLLSFGNPRGTFLIRESETTKGAYSLSIRDWDDMKGDHVKHYKIRKLDNGGYYITTRAQFETLQQLVQHYSEKADGLCFNLTVIASSCTPQTSGLAKDAWEVARRSLCLEKKLGQGCFAEVWLGTWNGNTKVAIKTLKPGTMSPESFLEEAQIMKKLKHDKLVQLYAVVSEEPIYIVTEYMNKGSLLDFLKDGEGRALKLPNLVDMAAQVAAGMAYIERMNYIHRDLRSANILVGNGLICKIADFGLARLIEDNEYTARQGAKFPIKWTAPEAALYGRFTIKSDVWSFGILLTELVTKGRVPYPGMNNREVLEQVERGYRMPCPQDCPISLHELMIHCWKKDPEERPTFEYLQSFLEDYFTATEPQYQPGENL

SEQ ID NO: 26371 - protein, 482 aa, Homo sapiens
MGCVQCKDKEATKLTEERDGSLNQSSGYRYGTDPTPQHYPSFGVTSIPNYNNFHAAGGQGLTVFGGVNSSSHTGTLRTRGGTGVTLFVALYDYEARTEDDLSFHKGEKFQILNSSEGDWWEARSLTTGETGYIPSNYVAPVDSIQAEEWYFGKLGRKDAERQLLSFGNPRGTFLIRESETTKGAYSLSIRDWDDMKGDHVKHYKIRKLDNGGYYITTRAQFETLQQLVQHYSGTWNGNTKVAIKTLKPGTMSPESFLEEAQIMKKLKHDKLVQLYAVVSEEPIYIVTEYMNKGSLLDFLKDGEGRALKLPNLVDMAAQVAAGMAYIERMNYIHRDLRSANILVGNGLICKIADFGLARLIEDNEYTARQGAKFPIKWTAPEAALYGRFTIKSDVWSFGILLTELVTKGRVPYPGMNNREVLEQVERGYRMPCPQDCPISLHELMIHCWKKDPEERPTFEYLQSFLEDYFTATEPQYQPGENL

SEQ ID NO: 26372 - protein, 277 aa, Homo sapiens
MAAGRLFLSRLRAPFSSMAKSPLEGVSSSRGLHAGRGPRRLSIEGNIAVGKSTFVKLLTKTYPEWHVATEPVATWQNIQAAGTQKACTAQSLGNLLDMMYREPARWSYTFQTFSFLSRLKVQLEPFPEKLLQARKPVQIFERSVYSDRYIFAKNLFENGSLSDIEWHIYQDWHSFLLWEFASRITLHGFIYLQASPQVCLKRLYQRAREEEKGIELAYLEQLHGQHEAWLIHKTTKLHFEALMNIPVLVLDVNDDFSEEVTKQEDLMREVNTFVKNL

SEQ ID NO: 26373 - protein, 189 aa, Homo sapiens
MAAGRLFLSRLRAPFSSMAKSPLEGVSSSRGLHAGRGPRRLSIEGNIAVGKSTFVKLLTKTYPEWHVATEPVATWQNIQAAGTQKACTAQSLGNLLDMMYREPARWSYTFQTFSFLSRLKVQLEPFPEKLLQARKPVQIFERSVYSDRLHFEALMNIPVLVLDVNDDFSEEVTKQEDLMREVNTFVKNL

SEQ ID NO: 26374 - protein, 239 aa, Homo sapiens
MAAGRLFLSRLRAPFSSMAKSPLEGVSSSRGLHAGRGPRRLSIEGNIACTAQSLGNLLDMMYREPARWSYTFQTFSFLSRLKVQLEPFPEKLLQARKPVQIFERSVYSDRYIFAKNLFENGSLSDIEWHIYQDWHSFLLWEFASRITLHGFIYLQASPQVCLKRLYQRAREEEKGIELAYLEQLHGQHEAWLIHKTTKLHFEALMNIPVLVLDVNDDFSEEVTKQEDLMREVNTFVKNL

SEQ ID NO: 26375 - protein, 151 aa, Homo sapiens
MAAGRLFLSRLRAPFSSMAKSPLEGVSSSRGLHAGRGPRRLSIEGNIACTAQSLGNLLDMMYREPARWSYTFQTFSFLSRLKVQLEPFPEKLLQARKPVQIFERSVYSDRLHFEALMNIPVLVLDVNDDFSEEVTKQEDLMREVNTFVKNL

SEQ ID NO: 26376 - protein, 255 aa, Homo sapiens
MAAGRLFLSRLRAPFSSMAKSPLEGVSSSRGLHAGRGPRRLSIEGNIGNILKQIRGRAPIQETACTAQSLGNLLDMMYREPARWSYTFQTFSFLSRLKVQLEPFPEKLLQARKPVQIFERSVYSDRYIFAKNLFENGSLSDIEWHIYQDWHSFLLWEFASRITLHGFIYLQASPQVCLKRLYQRAREEEKGIELAYLEQLHGQHEAWLIHKTTKLHFEALMNIPVLVLDVNDDFSEEVTKQEDLMREVNTFVKNL

SEQ ID NO: 26377 - protein, 89 aa, Homo sapiens
MAAGRLFLSRLRAPFSSMAKSPLEGVSSSRGLHAGRGPRRLSIEGNIGLHCPKSWKLAGYDVPGASTMVLHIPDIFLFEPPESTAGALP

SEQ ID NO: 26378 - protein, 509 aa, Homo sapiens
MQSWSRVYCSLAKRGHFNRISHGLQGLSAVPLRTYADQPIDADVTVIGSGPGGYVAAIKAAQLGFKTVCIEKNETLGGTCLNVGCIPSKALLNNSHYYHMAHGKDFASRGIEMSEVRLNLDKMMEQKSTAVKALTGGIAHLFKQNKVVHVNGYGKITGKNQVTATKADGGTQVIDTKNILIATGSEVTPFPGITIDEDTIVSSTGALSLKKVPEKMVVIGAGVIGVELGSVWQRLGADVTAVEFLGHVGGVGIDMEISKNFQRILQKQGFKFKLNTKVTGATKKSDGKIDVSIEAASGGKAEVITCDVLLVCIGRRPFTKNLGLEELGIELDPRGRIPVNTRFQTKIPNIYAIGDVVAGPMLAHKAEDEGIICVEGMAGGAVHIDYNCVPSVIYTHPEVAWVGKSEEQLKEEGIEYKVGKFPFAANSRAKTNADTDGMVKILGQKSTDRVLGAHILGPGAGEMVNEAALALEYGASCEDIARVCHAHPTLSEAFREANLAASFGKSINF

SEQ ID NO: 26379 - protein, 410 aa, Homo sapiens
MAHGKDFASRGIEMSEVRLNLDKMMEQKSTAVKALTGGIAHLFKQNKVVHVNGYGKITGKNQVTATKADGGTQVIDTKNILIATGSEVTPFPGITIDEDTIVSSTGALSLKKVPEKMVVIGAGVIGVELGSVWQRLGADVTAVEFLGHVGGVGIDMEISKNFQRILQKQGFKFKLNTKVTGATKKSDGKIDVSIEAASGGKAEVITCDVLLVCIGRRPFTKNLGLEELGIELDPRGRIPVNTRFQTKIPNIYAIGDVVAGPMLAHKAEDEGIICVEGMAGGAVHIDYNCVPSVIYTHPEVAWVGKSEEQLKEEGIEYKVGKFPFAANSRAKTNADTDGMVKILGQKSTDRVLGAHILGPGAGEMVNEAALALEYGASCEDIARVCHAHPTLSEAFREANLAASFGKSINF

SEQ ID NO: 26380 - protein, 461 aa, Homo sapiens
MQSWSRVYCSLAKRGHFNRISHGLQGLSAVPLRTYADQPIDADVTVIGSGPGGYVAAIKAAQLGFKTVCIEKNETLGGTCLNVGCIPSKALLNNSHYYHMAHGKDFASRGIEMSEVRLNLDKMMEQKSTAVKALTGGIAHLFKQNKIDEDTIVSSTGALSLKKVPEKMVVIGAGVIGVELGSVWQRLGADVTAVEFLGHVGGVGIDMEISKNFQRILQKQGFKFKLNTKVTGATKKSDGKIDVSIEAASGGKAEVITCDVLLVCIGRRPFTKNLGLEELGIELDPRGRIPVNTRFQTKIPNIYAIGDVVAGPMLAHKAEDEGIICVEGMAGGAVHIDYNCVPSVIYTHPEVAWVGKSEEQLKEEGIEYKVGKFPFAANSRAKTNADTDGMVKILGQKSTDRVLGAHILGPGAGEMVNEAALALEYGASCEDIARVCHAHPTLSEAFREANLAASFGKSINF

SEQ ID NO: 26381 - protein, 220 aa, Homo sapiens
MERYAGALEEVADGARQQERHYQLLSALQSLVKELPSSFQQRLSYTTLSDLALALLDGTVFEIVQGLLEIQHLTEKSLYNQRLRLQNEHRVLRQALRQKHQEAQQACRPHNLPVLQAAQQRELEAVEHRIREEQRAMDQKIVLELDRKVADQQSTLEKAGVAGFYVTTNPQELMLQMNLLELIRKLQQRGCWAGKAALGLGGPWQLPAAQCDQKGSPVPP

SEQ ID NO: 26382 - protein, 162 aa, Homo sapiens
MERYAGALEEVADGARQQERHYQLLSALQSLVKELPSSFQQRLSYTTLSDLALALLDGTVFEIVQGLLEIQHLTEKSLYNQRLRLQNEHRVPRTFWNPLETCRDSGVGGWRRLASSPVQTPLWPGCSAGLCSGRRCGRSTRKPSRPAGPITCLCFRRLSSEN

SEQ ID NO: 26383 - protein, 95 aa, Homo sapiens
MLGARVAAHLDALGPLVPYVPPPLLPSMFYVGLFFVNVLILYYAFLMEYIVLNVGLVFLPEDMDQALVDLGVLSDPGSGLYDADSELDVFDAYLE

SEQ ID NO: 26384 - protein, 1478 aa, Homo sapiens
MVKLDIHTLAHHLKQERLYVNSEKQLIQRLNADVLKTAEKLYRTAWIAKQQRINLDRLIITSAEASPAECCQHAKILEDTQFVDGYKQLGFQETAYGEFLSRLRENPRLIASSLVAGEKLNQENTQSVIYTVFTSLYGNCIMQEDESYLLQVLRYLIEFELKESDNPRRLLRRGTCAFSILFKLFSEGLFSAKLFLTATLHEPIMQLLVEDEDHLETDPNKLIERFSPSQQEKLFGEKGSDRFRQKVQEMVESNEAKLVALVNKFIGYLKQNTYCFPHSLRWIVSQMYKTLSCVDRLEVGEVRAMCTDLLLACFICPAVVNPEQYGIISDAPINEVARFNLMQVGRLLQQLAMTGSEEGDPRTKSSLGKFDKSCVAAFLDVVIGGRAVETPPLSSVNLLEGLSRTVVYITYSQLITLVNFMKSVMSGDQLREDRMALDNLLANLPPAKPGKSSSLEMTPYNTPQLSPATTPANKKNRLPIATRSRSRTNMLMDLHMDHEGSSQETIQEVQPEEVLVISLGTGPQLTPGMMSENEVLNMQLSDGGQGDVPVDENKLHGKPDKTLRFSLCSDNLEGISEGPSNRSNSVSSLDLEGESVSELGAGPSGSNGVEALQLLEHEQATTQDNLDDKLRKFEIRDMMGLTDDRDISETVSETWSTDVLGSDFDPNIDEDRLQEIAGAAAENMLGSLLCLPGSGSVLLDPCTGSTISETTSEAWSVEVLPSDSEAPDLKQEERLQELESCSGLGSTSDDTDVREVSSRPSTPGLSVVSGISATSEDIPNKIEDLRSECSSDFGGKDSVTSPDMDEITHGAHQLTSPPSQSESLLAMFDPLSSHEGASAVVRPKVHYARPSHPPPDPPILEGAVGGNEARLPNFGSHVLTPAEMEAFKQRHSYPERLVRSRSSDIVSSVRRPMSDPSWNRRPGNEERELPPAAAIGATSLVAAPHSSSSSPSKDSSRGETEERKDSDDEKSDRNRPWWRKRFVSAMPKAPIPFRKKEKQEKDKDDLGPDRFSTLTDDPSPRLSAQAQVAEDILDKYRNAIKRTSPSDGAMANYESTGDNHDRDLSSKLLYHSDKEVMGDGESAHDSPRDEALQNISADDLPDSASQAAHPQDSAFSYRDAKKKLRLALCSADSVAFPVLTHSTRNGLPDHTDPEDNEIVCFLKVQIAEAINLQDKNLMAQLQETMRCVCRFDNRTCRKLLASIAEDYRKRAPYIAYLTRCRQGLQTTQAHLERLLQRVLRDKEVANRYFTTVCVRLLLESKEKKIREFIQDFQKLTAADDKTAQVEDFLQFLYGAMAQDVIWQNASEEQLQDAQLAIERSVMNRIFKLAFYPNQDGDILRDQVLHEHIQRLSKVVTANHRALQIPEVYLREAPWPSAQSEIRTISAYKTPRDKVQCILRMCSTIMNLLSLANEDSVPGADDFVPVLVFVLIKANPPCLLSTVQYISSFYASCLSGEESYWWMQFTAAVEFIKTIDDRK

SEQ ID NO: 26385 - protein, 1460 aa, Homo sapiens
MVKLDIHTLAHHLKQERLYVNSEKQLIQRLNADVLKTAEKLYRTAWIAKQQRINLDRLIITSAEASPAECCQHAKILEDTQFVDGYKQLGFQETAYGEFLSRLRENPRLIASSLVAGEKLNQENTQSVIYTVFTSLYGNCIMQEDESYLLQVLRYLIEFELKESDNPRRLLRRGTCAFSILFKLFSEGLFSAKLFLTATLHEPIMQLLVEDEDHLETDPNKLIERFSPSQQEKLFGEKGSDRFRQKVQEMVESNEAKLVALVNKFIGYLKQNTYCFPHSLRWIVSQMYKTLSCVDRLEVGEVRAMCTDLLLACFICPAVVNPEQYGIISDAPINEVARFNLMQVGRLLQQLAMTGSEEGDPRTKSSLGKFDKSCVAAFLDVVIGGRAVETPPLSSVNLLEGLSRTVVYITYSQLITLVNFMKSVMSGDQLREDRMALDNLLANLPPAKPGKSSSLEMTPYNTPQLSPATTPANKKNRLPIATRSRSRTNMLMDLHMDHEGSSQETIQEVQPEEVLVISLGTGPQLTPGMMSENEVLNMQLSDGGQGDVPVDENKLHGKPDKTLRFSLCSDNLEGISEGPSNRSNSVSSLDLEGESVSELGAGPSGSNGVEALQLLEHEQATTQDNLDDKLRKFEIRDMMGLTDDRDISETVSETWSTDVLGSDFDPNIDEDRLQEIAGAAAENMLGSLLCLPGSGSVLLDPCTGSTISETTSEAWSVEVLPSDSEAPDLKQEERLQELESCSGLGSTSDDTDVREVSSRPSTPGLSVVSGISATSEDIPNKIEDLRSECSSDFGGKDSVTSPDMDEITHGAHQLTSPPSQSESLLAMFDPLSSHEGASAVVRPKVHYARPSHPPPDPPILEGAVGGNEARLPNFGSHVLTPAEMEAFKQRHSYPERLVRSRSSDIVSSVRRPMSDPSWNRRPGNEERELPPAAAIGATSLVAAPHSSSSSPSKDSSRGETEERKDSDDEKSDRNRPWWRKRFVSAMPKAPIPFRKKEKQEKDKDDLGPDRFSTLTDDPSPRLSAQAQVAEDILDKYRNAIKRTSPSDGAMANYESTEVMGDGESAHDSPRDEALQNISADDLPDSASQAAHPQDSAFSYRDAKKKLRLALCSADSVAFPVLTHSTRNGLPDHTDPEDNEIVCFLKVQIAEAINLQDKNLMAQLQETMRCVCRFDNRTCRKLLASIAEDYRKRAPYIAYLTRCRQGLQTTQAHLERLLQRVLRDKEVANRYFTTVCVRLLLESKEKKIREFIQDFQKLTAADDKTAQVEDFLQFLYGAMAQDVIWQNASEEQLQDAQLAIERSVMNRIFKLAFYPNQDGDILRDQVLHEHIQRLSKVVTANHRALQIPEVYLREAPWPSAQSEIRTISAYKTPRDKVQCILRMCSTIMNLLSLANEDSVPGADDFVPVLVFVLIKANPPCLLSTVQYISSFYASCLSGEESYWWMQFTAAVEFIKTIDDRK

SEQ ID NO: 26386 - protein, 1433 aa, Homo sapiens
MVKLDIHTLAHHLKQERLYVNSEKQLIQRLNADVLKTAEKLYRTAWIAKQQRINLDRLIITSAEASPAECCQHAKILEDTQFVDGYKQLGFQETAYGEFLSRLRENPRLIASSLVAGEKLNQENTQSVIYTVFTSLYGNCIMQEDESYLLQVLRYLIEFELKESDNPRRLLRRGTCAFSILFKLFSEGLFSAKLFLTATLHEPIMQLLVEDEDHLETDPNKLIERFSPSQQEKLFGEKGSDRFRQKVQEMVESNEAKLVALVNKFIGYLKQNTYCFPHSLRWIVSQMYKTLSCVDRLEVGEVRAMCTDLLLACFICPAVVNPEQYGIISDAPINEVARFNLMQVGRLLQQLAMTGSEEGDPRTKSSLGKFDKSCVAAFLDVVIGGRAVETPPLSSVNLLEGLSRTVVYITYSQLITLVNFMKSVMSGDQLREDRMALDNLLANLPPAKPGKSSSLEMTPYNTPQLSPATTPANKKNRLPIATRSRSRTNMLMDLHMDHEGSSQETIQEVQPEEVLVISLGTGPQLTPGMMSENEVLNMQLSDGGQGDVPVDENKLHGKPDKTLRFSLCSDNLEGISEGPSNRSNSVSSLDLEGESVSELGAGPSGSNGVEALQLLEHEQATTQDNLDDKLRKFEIRDMMGLTDDRDISETVSETWSTDVLGSDFDPNIDEDRLQEIAGAAAENMLGSLLCLPGSGSVLLDPCTGSTISETTSEAWSVEVLPSDSEAPDLKQEERLQELESCSGLGSTSDDTDVREVSSRPSTPGLSVVSGISATSEDIPNKIEDLRSECSSDFGGKDSVTSPDMDEITHGAHQLTSPPSQSESLLAMFDPLSSHEGASAVVRPKVHYARPSHPPPDPPILEGAVGGNEARLPNFGSHVLTPAEMEAFKQRHSYPERLVRSRSSDIVSSVRRPMSDPSWNRRPGNEERELPPAAAIGATSLVAAPHSSSSSPSKDSSRGETEERKDSDDEKSDRNRPWWRKRFVSAMPKDDPSPRLSAQAQVAEDILDKYRNAIKRTSPSDGAMANYESTEVMGDGESAHDSPRDEALQNISADDLPDSASQAAHPQDSAFSYRDAKKKLRLALCSADSVAFPVLTHSTRNGLPDHTDPEDNEIVCFLKVQIAEAINLQDKNLMAQLQETMRCVCRFDNRTCRKLLASIAEDYRKRAPYIAYLTRCRQGLQTTQAHLERLLQRVLRDKEVANRYFTTVCVRLLLESKEKKIREFIQDFQKLTAADDKTAQVEDFLQFLYGAMAQDVIWQNASEEQLQDAQLAIERSVMNRIFKLAFYPNQDGDILRDQVLHEHIQRLSKVVTANHRALQIPEVYLREAPWPSAQSEIRTISAYKTPRDKVQCILRMCSTIMNLLSLANEDSVPGADDFVPVLVFVLIKANPPCLLSTVQYISSFYASCLSGEESYWWMQFTAAVEFIKTIDDRK

SEQ ID NO: 26387 - protein, 1439 aa, Homo sapiens
MVKLDIHTLAHHLKQERLYVNSEKQLIQRLNADVLKTAEKLYRTAWIAKQQRINLDRLIITSAEASPAECCQHAKILEDTQFVDGYKQLGFQETAYGEFLSRLRENPRLIASSLVAGEKLNQENTQSVIYTVFTSLYGNCIMQEDESYLLQVLRYLIEFELKESDNPRRLLRRGTCAFSILFKLFSEGLFSAKLFLTATLHEPIMQLLVEDEDHLETDPNKLIERFSPSQQEKLFGEKGSDRFRQKVQEMVESNEAKLVALVNKFIGYLKQNTYCFPHSLRWIVSQMYKTLSCVDRLEVGEVRAMCTDLLLACFICPAVVNPEQYGIISDAPINEVARFNLMQVGRLLQQLAMTGSEEGDPRTKSSLGKFDKSCVAAFLDVVIGGRAVETPPLSSVNLLEGLSRTVVYITYSQLITLVNFMKSVMSGDQLREDRMALDNLLANLPPAKPGKSSSLEMTPYNTPQLSPATTPANKKNRLPIATRSRSRTNMLMDLHMDHEGSSQETIQEVQPEEVLVISLGTGPQLTPGMMSENEVLNMQLSDGGQGDVPVDENKLHGPSNRSNSVSSLDLEGESVSELGAGPSGSNGVEALQLLEHEQATTQDNLDDKLRKFEIRDMMGLTDDRDISETVSETWSTDVLGSDFDPNIDEDRLQEIAGAAAENMLGSLLCLPGSGSVLLDPCTGSTISETTSEAWSVEVLPSDSEAPDLKQEERLQELESCSGLGSTSDDTDVREVSSRPSTPGLSVVSGISATSEDIPNKIEDLRSECSSDFGGKDSVTSPDMDEITHGAHQLTSPPSQSESLLAMFDPLSSHEGASAVVRPKVHYARPSHPPPDPPILEGAVGGNEARLPNFGSHVLTPAEMEAFKQRHSYPERLVRSRSSDIVSSVRRPMSDPSWNRRPGNEERELPPAAAIGATSLVAAPHSSSSSPSKDSSRGETEERKDSDDEKSDRNRPWWRKRFVSAMPKAPIPFRKKEKQEKDKDDLGPDRFSTLTDDPSPRLSAQAQVAEDILDKYRNAIKRTSPSDGAMANYESTEVMGDGESAHDSPRDEALQNISADDLPDSASQAAHPQDSAFSYRDAKKKLRLALCSADSVAFPVLTHSTRNGLPDHTDPEDNEIVCFLKVQIAEAINLQDKNLMAQLQETMRCVCRFDNRTCRKLLASIAEDYRKRAPYIAYLTRCRQGLQTTQAHLERLLQRVLRDKEVANRYFTTVCVRLLLESKEKKIREFIQDFQKLTAADDKTAQVEDFLQFLYGAMAQDVIWQNASEEQLQDAQLAIERSVMNRIFKLAFYPNQDGDILRDQVLHEHIQRLSKVVTANHRALQIPEVYLREAPWPSAQSEIRTISAYKTPRDKVQCILRMCSTIMNLLSLANEDSVPGADDFVPVLVFVLIKANPPCLLSTVQYISSFYASCLSGEESYWWMQFTAAVEFIKTIDDRK

SEQ ID NO: 26388 - protein, 1452 aa, Homo sapiens
MVKLDIHTLAHHLKQERLYVNSEKQLIQRLNADVLKTAEKLYRTAWIAKQQRINLDRLIITSAEASPAECCQHAKILEDTQFVDGYKQLGFQETAYGEFLSRLRENPRLIASSLVAGEKLNQENTQSVIYTVFTSLYGNCIMQEDESYLLQVLRYLIEFELKESDNPRRLLRRGTCAFSILFKLFSEGLFSAKLFLTATLHEPIMQLLVEDEDHLETDPNKLIERFSPSQQEKLFGEKGSDRFRQKVQEMVESNEAKLVALVNKFIGYLKQNTYCFPHSLRWIVSQMYKTLSCVDRLEVGEVRAMCTDLLLACFICPAVVNPEQYGIISDAPINEVARFNLMQVGRLLQQLAMTGSEEGDPRTKSSLGKFDKSCVAAFLDVVIGGRAVETPPLSSVNLLEGLSRTVVYITYSQLITLVNFMKSVMSGDQLREDRMALDNLLANLPPAKPGKSSSLEMTPYNTPQLSPATTPANKKNRLPIATRSRSRTNMLMDLHMDHEGSSQETIQEVQPEEVLVISLGTGPQLTPGMMSENEVLNMQLSDGGQGDVPVDENKLHGKPDKTLRFSLCSDNLEGISEGPSNRSNSVSSLDLEGESVSELGAGPSGSNGVEALQLLEHEQATTQDNLDDKLRKFEIRDMMGLTDDRDISETVSETWSTDVLGSDFDPNIDEDRLQEIAGAAAENMLGSLLCLPGSGSVLLDPCTGSTISETTSEAWSVEVLPSDSEAPDLKQEERLQELESCSGLGSTSDDTDVREVSSRPSTPGLSVVSGISATSEDIPNKIEDLRSECSSDFGGKDSVTSPDMDEITHGASAVVRPKVHYARPSHPPPDPPILEGAVGGNEARLPNFGSHVLTPAEMEAFKQRHSYPERLVRSRSSDIVSSVRRPMSDPSWNRRPGNEERELPPAAAIGATSLVAAPHSSSSSPSKDSSRGETEERKDSDDEKSDRNRPWWRKRFVSAMPKAPIPFRKKEKQEKDKDDLGPDRFSTLTDDPSPRLSAQAQVAEDILDKYRNAIKRTSPSDGAMANYESTGDNHDRDLSSKLLYHSDKEVMGDGESAHDSPRDEALQNISADDLPDSASQAAHPQDSAFSYRDAKKKLRLALCSADSVAFPVLTHSTRNGLPDHTDPEDNEIVCFLKVQIAEAINLQDKNLMAQLQETMRCVCRFDNRTCRKLLASIAEDYRKRAPYIAYLTRCRQGLQTTQAHLERLLQRVLRDKEVANRYFTTVCVRLLLESKEKKIREFIQDFQKLTAADDKTAQVEDFLQFLYGAMAQDVIWQNASEEQLQDAQLAIERSVMNRIFKLAFYPNQDGDILRDQVLHEHIQRLSKVVTANHRALQIPEVYLREAPWPSAQSEIRTISAYKTPRDKVQCILRMCSTIMNLLSLANEDSVPGADDFVPVLVFVLIKANPPCLLSTVQYISSFYASCLSGEESYWWMQFTAAVEFIKTIDDRK

SEQ ID NO: 26389 - protein, 1487 aa, Homo sapiens
MVKLDIHTLAHHLKQERLYVNSEKQLIQRLNADVLKTAEKLYRTAWIAKQQRINLDRLIITSAEASPAECCQHAKILEDTQFVDGYKQLGFQETAYGEFLSRLRENPRLIASSLVAGEKLNQENTQSVIYTVFTSLYGNCIMQEDESYLLQVLRYLIEFELKESDNPRRLLRRGTCAFSILFKLFSEGLFSAKLFLTATLHEPIMQLLVEDEDHLETDPNKLIERFSPSQQEKLFGEKGSDRFRQKVQEMVESNEAKLVALVNKFIGYLKQNTYCFPHSLRWIVSQMYKTLSCVDRLEVGEVRAMCTDLLLACFICPAVVNPEQYGIISDAPINEVARFNLMQVGRLLQQLAMTGSEEGDPRTKSSLGKFDKSCVAAFLDVVIGGRAVETPPLSSVNLLEGLSRTVVYITYSQLITLVNFMKSVMSGDQLREDRMALDNLLANLPPAKPGKSSSLEMTPYNTPQLSPATTPANKKNRLPIATRSRSRTNMLMDLHMDHEGSSQETIQEVQPEEVLVISLGTGPQLTPGMMSENEVLNMQLSDGGQGDVPVDENKLHGKPDKTLRFSLCSDNLEGISEGPSNRSNSVSSLDLEGESVSELGAGPSGSNGVEALQLLEHEQATTQDNLDDKLRKFEIRDMMGLTDDRDISETVSETWSTDVLGSDFDPNIDEDRLQEIAGAAAENMLGSLLCLPGSGSVLLDPCTGSTISETTSEAWSVEVLPSDSEAPDLKQEERLQELESCSGLGSTSDDTDVREVSSRPSTPGLSVVSGISATSEDIPNKIEDLRSECSSDFGGKDSVTSPDMDEITHDFLYILQPKQHFQHIEAEADMRIQLSSSAHQLTSPPSQSESLLAMFDPLSSHEGASAVVRPKVHYARPSHPPPDPPILEGAVGGNEARLPNFGSHVLTPAEMEAFKQRHSYPERLVRSRSSDIVSSVRRPMSDPSWNRRPGNEERELPPAAAIGATSLVAAPHSSSSSPSKDSSRGETEERKDSDDEKSDRNRPWWRKRFVSAMPKAPIPFRKKEKQEKDKDDLGPDRFSTLTDDPSPRLSAQAQVAEDILDKYRNAIKRTSPSDGAMANYESTEVMGDGESAHDSPRDEALQNISADDLPDSASQAAHPQDSAFSYRDAKKKLRLALCSADSVAFPVLTHSTRNGLPDHTDPEDNEIVCFLKVQIAEAINLQDKNLMAQLQETMRCVCRFDNRTCRKLLASIAEDYRKRAPYIAYLTRCRQGLQTTQAHLERLLQRVLRDKEVANRYFTTVCVRLLLESKEKKIREFIQDFQKLTAADDKTAQVEDFLQFLYGAMAQDVIWQNASEEQLQDAQLAIERSVMNRIFKLAFYPNQDGDILRDQVLHEHIQRLSKVVTANHRALQIPEVYLREAPWPSAQSEIRTISAYKTPRDKVQCILRMCSTIMNLLSLANEDSVPGADDFVPVLVFVLIKANPPCLLSTVQYISSFYASCLSGEESYWWMQFTAAVEFIKTIDDRK

SEQ ID NO: 26390 - protein, 1272 aa, Homo sapiens
MEPPGGSLGPGRGTRDKKKGRSPDELPSAGGDGGKSKKFTLKRLMADELERFTSMRIKKEKEKPNSAHRNSSASYGDDPTAQSLQDVSDEQVLVLFEQMLLDMNLNEEKQQPLREKDIIIKREMVSQYLYTSKAGMSQKESSKSAMMYIQELRSGLRDMPLLSCLESLRVSLNNNPVSWVQTFGAEGLASLLDILKRLHDEKEETAGSYDSRNKHEIIRCLKAFMNNKFGIKTMLETEEGILLLVRAMDPAVPNMMIDAAKLLSALCILPQPEDMNERVLEAMTERAEMDEVERFQPLLDGLKSGTTIALKVGCLQLINALITPAEELDFRVHIRSELMRLGLHQVLQDLREIENEDMRVQLNVFDEQGEEDSYDLKGRLDDIRMEMDDFNEVFQILLNTVKDSKAEPHFLSILQHLLLVRNDYEARPQYYKLIEECISQIVLHKNGADPDFKCRHLQIEIEGLIDQMIDKTKVEKSEAKAAELEKKLDSELTARHELQVEMKKMESDFEQKLQDLQGEKDALHSEKQQIATEKQDLEAEVSQLTGEVAKLTKELEDAKKEMASLSAAAITVPPSVPSRAPVPPAPPLPGDSGTIIPPPPAPGDSTTPPPPPPPPPPPPPLPGGVCISSPPSLPGGTAISPPPPLSGDATIPPPPPLPEGVGIPSPSSLPGGTAIPPPPPLPGSARIPPPPPPLPGSAGIPPPPPPLPGEAGMPPPPPPLPGGPGIPPPPPFPGGPGIPPPPPGMGMPPPPPFGFGVPAAPVLPFGLTPKKLYKPEVQLRRPNWSKLVAEDLSQDCFWTKVKEDRFENNELFAKLTLTFSAQTKTSKAKKDQEGGEEKKSVQKKKVKELKVLDSKTAQNLSIFLGSFRMPYQEIKNVILEVNEAVLTESMIQNLIKQMPEPEQLKMLSELKDEYDDLAESEQFGVVMGTVPRLRPRLNAILFKLQFSEQVENIKPEIVSVTAACEELRKSESFSNLLEITLLVGNYMNAGSRNAGAFGFNISFLCKLRDTKSTDQKMTLLHFLAELCENDYPDVLKFPDELAHVEKASRVSAENLQKNLDQMKKQISDVERDVQNFPAATDEKDKFVEKMTSFVKDAQEQYNKLRMMHSNMETLYKELGEYFLFDPKKLSVEEFFMDLHNFRNMFLQAVKENQKRRETEEKMRRAKLAKEKAEKERLEKQQKREQLIDMNAEGDETGVMDSLLEALQSGAAFRRKRGPRQANRKAGCAVTSLLASELTKDDAMAAVPAKVSKNSETFPTILEEAKELVGRAS

SEQ ID NO: 26391 - protein, 1248 aa, Homo sapiens
MEPPGGSLGPGRGTRDKKKGRSPDELPSAGGDGGKSKKFLERFTSMRIKKEKEKPNSAHRNSSASYGDDPTAQSLQDVSDEQVLVLFEQMLLDMNLNEEKQQPLREKDIIIKREMVSQYLYTSKAGMSQKESSKSAMMYIQELRSGLRDMPLLSCLESLRVSLNNNPVSWVQTFGAEGLASLLDILKRLHDEKEETAGSYDSRNKHEIIRCLKAFMNNKFGIKTMLETEEGILLLVRAMDPAVPNMMIDAAKLLSALCILPQPEDMNERVLEAMTERAEMDEVERFQPLLDGLKSGTTIALKVGCLQLINALITPAEELDFRVHIRSELMRLGLHQVLQDLREIENEDMRVQLNVFDEQGEEDSYDLKGRLDDIRMEMDDFNEVFQILLNTVKDSKAEPHFLSILQHLLLVRNDYEARPQYYKLIEECISQIVLHKNGADPDFKCRHLQIEIEGLIDQMIDKTKVEKSEAKAAELEKKLDSELTARHELQVEMKKMESDFEQKLQDLQGEKDALHSEKQQIATEKQDLEAEVSQLTGEVAKLTKELEDAKKEMASLSAAAITVPPSVPSRAPVPPAPPLPGDSGTIIPPPPAPGDSTTPPPPPPPPPPPPPLPGGTAISPPPPLSGDATIPPPPPLPEGVGIPSPSSLPGGTAIPPPPPLPGSARIPPPPPPLPGSAGIPPPPPPLPGEAGMPPPPPPLPGGPGIPPPPPFPGGPGIPPPPPGMGMPPPPPFGFGVPAAPVLPFGLTPKKLYKPEVQLRRPNWSKLVAEDLSQDCFWTKVKEDRFENNELFAKLTLTFSAQTKTKKDQEGGEEKKSVQKKKVKELKVLDSKTAQNLSIFLGSFRMPYQEIKNVILEVNEAVLTESMIQNLIKQMPEPEQLKMLSELKDEYDDLAESEQFGVVMGTVPRLRPRLNAILFKLQFSEQVENIKPEIVSVTAACEELRKSESFSNLLEITLLVGNYMNAGSRNAGAFGFNISFLCKLRDTKSTDQKMTLLHFLAELCENDYPDVLKFPDELAHVEKASRVSAENLQKNLDQMKKQISDVERDVQNFPAATDEKDKFVEKMTSFVKDAQEQYNKLRMMHSNMETLYKELGEYFLFDPKKLSVEEFFMDLHNFRNMFLQAVKENQKRRETEEKMRRAKLAKEKAEKERLEKQQKREQLIDMNAEGDETGVMDSLLEALQSGAAFRRKRGPRQANRKAGCAVTSLLASELTKDDAMAAVPAKVSKNSETFPTILEEAKELVGRAS

SEQ ID NO: 26392 - protein, 1263 aa, Homo sapiens
MEPPGGSLGPGRGTRDKKKGRSPDELPSAGGDGGKSKKFLERFTSMRIKKEKEKPNSAHRNSSASYGDDPTAQSLQDVSDEQVLVLFEQMLLDMNLNEEKQQPLREKDIIIKREMVSQYLYTSKAGMSQKESSKSAMMYIQELRSGLRDMPLLSCLESLRVSLNNNPVSWVQTFGAEGLASLLDILKRLHDEKEETAGSYDSRNKHEIIRCLKAFMNNKFGIKTMLETEEGILLLVRAMDPAVPNMMIDAAKLLSALCILPQPEDMNERVLEAMTERAEMDEVERFQPLLDGLKSGTTIALKVGCLQLINALITPAEELDFRVHIRSELMRLGLHQVLQDLREIENEDMRVQLNVFDEQGEEDSYDLKGRLDDIRMEMDDFNEVFQILLNTVKDSKAEPHFLSILQHLLLVRNDYEARPQYYKLIEECISQIVLHKNGADPDFKCRHLQIEIEGLIDQMIDKTKVEKSEAKAAELEKKLDSELTARHELQVEMKKMESDFEQKLQDLQGEKDALHSEKQQIATEKQDLEAEVSQLTGEVAKLTKELEDAKKEMASLSAAAITVPPSVPSRAPVPPAPPLPGDSGTIIPPPPAPGDSTTPPPPPPPPPPPPPLPGGVCISSPPSLPGGTAISPPPPLSGDATIPPPPPLPEGVGIPSPSSLPGGTAIPPPPPLPGSARIPPPPPPLPGSAGIPPPPPPLPGEAGMPPPPPPLPGGPGIPPPPPFPGGPGIPPPPPGMGMPPPPPFGFGVPAAPVLPFGLTPKKLYKPEVQLRRPNWSKLVAEDLSQDCFWTKVKEDRFENNELFAKLTLTFSAQTKTSKAKKDQEGGEEKKSVQKKKVKELKVLDSKTAQNLSIFLGSFRMPYQEIKNVILEVNEAVLTESMIQNLIKQMPEPEQLKMLSELKDEYDDLAESEQFGVVMGTVPRLRPRLNAILFKLQFSEQVENIKPEIVSVTAACEELRKSESFSNLLEITLLVGNYMNAGSRNAGAFGFNISFLCKLRDTKSTDQKMTLLHFLAELCENDYPDVLKFPDELAHVEKASRVSAENLQKNLDQMKKQISDVERDVQNFPAATDEKDKFVEKMTSFVKDAQEQYNKLRMMHSNMETLYKELGEYFLFDPKKLSVEEFFMDLHNFRNMFLQAVKENQKRRETEEKMRRAKLAKEKAEKERLEKQQKREQLIDMNAEGDETGVMDSLLEALQSGAAFRRKRGPRQANRKAGCAVTSLLASELTKDDAMAAVPAKVSKNSETFPTILEEAKELVGRAS

SEQ ID NO: 26393 - protein, 904 aa, Homo sapiens
MPVRKQDTQRALHLLEEYRSKLSQTEDRQLRSSIERVINIFQSNLFQALIDIQEFYEVTLLDNPKCIDRSKPSEPIQPVNTWEISSLPSSTVTSETLPSSLSPSVEKYRYQDEDTPPQEHISPQITNEVIGPELVHVSEKNLSEIENVHGFVSHSHISPIKPTEAVLPSPPTVPVIPVLPVPAENTVILPTIPQANPPPVLVNTDSLETPTYVNGTDADYEYEEITLERGNSGLGFSIAGGTDNPHIGDDSSIFITKIITGGAAAQDGRLRVNDCILRVNEVDVRDVTHSKAVEALKEAGSIVRLYVKRRKPVSEKIMEIKLIKGPKGLGFSIAGGVGNQHIPGDNSIYVTKIIEGGAAHKDGKLQIGDKLLAVNNVCLEEVTHEEAVTALKNTSDFVYLKVAKPTSMYMNDGYAPPDITNSSSQPVDNHVSPSSFLGQTPASPARYSPVSKAVLGDDEITREPRKVVLHRGSTGLGFNIVGGEDGEGIFISFILAGGPADLSGELRKGDRIISVNSVDLRAASHEQAAAALKNAGQAVTIVAQYRPEEYSRFEAKIHDLREQMMNSSISSGSGSLRTSQKRSLYVRALFDYDKTKDSGLPSQGLNFKFGDILHVINASDDEWWQARQVTPDGESDEVGVIPSKRRVEKKERARLKTVKFNSKTRDKGEIPDDMGSKGLKHVTSNASDSESSYRGQEEYVLSYEPVNQQEVNYTRPVIILGPMKDRINDDLISEFPDKFGSCVPHTTRPKRDYEVDGRDYHFVTSREQMEKDIQEHKFIEAGQYNNHLYGTSVQSVREVAEKGKHCILDVSGNAIKRLQIAQLYPISIFIKPKSMENIMEMNKRLTEEQARKTFERAMKLEQEFTEHFTAIVQGDTLEDIYNQVKQIIEEQSGSYIWVPAKEKL

SEQ ID NO: 26394 - protein, 926 aa, Homo sapiens
MPVRKQDTQRALHLLEEYRSKLSQTEDRQLRSSIERVINIFQSNLFQALIDIQEFYEVTLLDNPKCIDRSKPSEPIQPVNTWEISSLPSSTVTSETLPSSLSPSVEKYRYQDEDTPPQEHISPQITNEVIGPELVHVSEKNLSEIENVHGFVSHSHISPIKPTEAVLPSPPTVPVIPVLPVPAENTVILPTIPQANPPPVLVNTDSLETPTYVNGTDADYEYEEITLERGNSGLGFSIAGGTDNPHIGDDSSIFITKIITGGAAAQDGRLRVNDCILRVNEVDVRDVTHSKAVEALKEAGSIVRLYVKRRKPVSEKIMEIKLIKGPKGLGFSIAGGVGNQHIPGDNSIYVTKIIEGGAAHKDGKLQIGDKLLAVNNVCLEEVTHEEAVTALKNTSDFVYLKVAKPTSMYMNDGYAPPDITNSSSQPVDNHVSPSSFLGQTPASPARYSPVSKAVLGDDEITREPRKVVLHRGSTGLGFNIVGGEDGEGIFISFILAGGPADLSGELRKGDRIISVNSVDLRAASHEQAAAALKNAGQAVTIVAQYRPEEYSRFEAKIHDLREQMMNSSISSGSGSLRTSQKRSLYVRALFDYDKTKDSGLPSQGLNFKFGDILHVINASDDEWWQARQVTPDGESDEVGVIPSKRRVEKKERARLKTVKFNSKTRDKGQSFNDKRKKNLFSRKFPFYKNKDQSEQETSDADQHVTSNASDSESSYRGQEEYVLSYEPVNQQEVNYTRPVIILGPMKDRINDDLISEFPDKFGSCVPHTTRPKRDYEVDGRDYHFVTSREQMEKDIQEHKFIEAGQYNNHLYGTSVQSVREVAEKGKHCILDVSGNAIKRLQIAQLYPISIFIKPKSMENIMEMNKRLTEEQARKTFERAMKLEQEFTEHFTAIVQGDTLEDIYNQVKQIIEEQSGSYIWVPAKEKL

SEQ ID NO: 26395 - protein, 871 aa, Homo sapiens
MPVRKQDTQRALHLLEEYRSKLSQTEDRQLRSSIERVINIFQSNLFQALIDIQEFYEVTLLDNPKCIDRSKPSEPIQPVNTWEISSLPSSTVTSETLPSSLSPSVEKYRYQDEDTPPQEHISPQITNEVIGPELVHVSEKNLSEIENVHGFVSHSHISPIKANPPPVLVNTDSLETPTYVNGTDADYEYEEITLERGNSGLGFSIAGGTDNPHIGDDSSIFITKIITGGAAAQDGRLRVNDCILRVNEVDVRDVTHSKAVEALKEAGSIVRLYVKRRKPVSEKIMEIKLIKGPKGLGFSIAGGVGNQHIPGDNSIYVTKIIEGGAAHKDGKLQIGDKLLAVNNVCLEEVTHEEAVTALKNTSDFVYLKVAKPTSMYMNDGYAPPDITNSSSQPVDNHVSPSSFLGQTPASPARYSPVSKAVLGDDEITREPRKVVLHRGSTGLGFNIVGGEDGEGIFISFILAGGPADLSGELRKGDRIISVNSVDLRAASHEQAAAALKNAGQAVTIVAQYRPEEYSRFEAKIHDLREQMMNSSISSGSGSLRTSQKRSLYVRALFDYDKTKDSGLPSQGLNFKFGDILHVINASDDEWWQARQVTPDGESDEVGVIPSKRRVEKKERARLKTVKFNSKTRDKGEIPDDMGSKGLKHVTSNASDSESSYRGQEEYVLSYEPVNQQEVNYTRPVIILGPMKDRINDDLISEFPDKFGSCVPHTTRPKRDYEVDGRDYHFVTSREQMEKDIQEHKFIEAGQYNNHLYGTSVQSVREVAEKGKHCILDVSGNAIKRLQIAQLYPISIFIKPKSMENIMEMNKRLTEEQARKTFERAMKLEQEFTEHFTAIVQGDTLEDIYNQVKQIIEEQSGSYIWVPAKEKL

SEQ ID NO: 26396 - protein, 893 aa, Homo sapiens
MPVRKQDTQRALHLLEEYRSKLSQTEDRQLRSSIERVINIFQSNLFQALIDIQEFYEVTLLDNPKCIDRSKPSEPIQPVNTWEISSLPSSTVTSETLPSSLSPSVEKYRYQDEDTPPQEHISPQITNEVIGPELVHVSEKNLSEIENVHGFVSHSHISPIKANPPPVLVNTDSLETPTYVNGTDADYEYEEITLERGNSGLGFSIAGGTDNPHIGDDSSIFITKIITGGAAAQDGRLRVNDCILRVNEVDVRDVTHSKAVEALKEAGSIVRLYVKRRKPVSEKIMEIKLIKGPKGLGFSIAGGVGNQHIPGDNSIYVTKIIEGGAAHKDGKLQIGDKLLAVNNVCLEEVTHEEAVTALKNTSDFVYLKVAKPTSMYMNDGYAPPDITNSSSQPVDNHVSPSSFLGQTPASPARYSPVSKAVLGDDEITREPRKVVLHRGSTGLGFNIVGGEDGEGIFISFILAGGPADLSGELRKGDRIISVNSVDLRAASHEQAAAALKNAGQAVTIVAQYRPEEYSRFEAKIHDLREQMMNSSISSGSGSLRTSQKRSLYVRALFDYDKTKDSGLPSQGLNFKFGDILHVINASDDEWWQARQVTPDGESDEVGVIPSKRRVEKKERARLKTVKFNSKTRDKGQSFNDKRKKNLFSRKFPFYKNKDQSEQETSDADQHVTSNASDSESSYRGQEEYVLSYEPVNQQEVNYTRPVIILGPMKDRINDDLISEFPDKFGSCVPHTTRPKRDYEVDGRDYHFVTSREQMEKDIQEHKFIEAGQYNNHLYGTSVQSVREVAEKGKHCILDVSGNAIKRLQIAQLYPISIFIKPKSMENIMEMNKRLTEEQARKTFERAMKLEQEFTEHFTAIVQGDTLEDIYNQVKQIIEEQSGSYIWVPAKEKL

SEQ ID NO: 26397 - protein, 853 aa, Homo sapiens
MPVRKQDTQRALHLLEEYRSKLSQTEDRQLRSSIERVINIFQSNLFQALIDIQEFYEVTLLDNPKCIDRSKPSEPIQPVNTWEISSLPSSTVTSETLPSSLSPSVEKYRYQDEDTPPQEHISPQITNEVIGPELVHVSEKNLSEIENVHGFVSHSHISPIKVNGTDADYEYEEITLERGNSGLGFSIAGGTDNPHIGDDSSIFITKIITGGAAAQDGRLRVNDCILRVNEVDVRDVTHSKAVEALKEAGSIVRLYVKRRKPVSEKIMEIKLIKGPKGLGFSIAGGVGNQHIPGDNSIYVTKIIEGGAAHKDGKLQIGDKLLAVNNVCLEEVTHEEAVTALKNTSDFVYLKVAKPTSMYMNDGYAPPDITNSSSQPVDNHVSPSSFLGQTPASPARYSPVSKAVLGDDEITREPRKVVLHRGSTGLGFNIVGGEDGEGIFISFILAGGPADLSGELRKGDRIISVNSVDLRAASHEQAAAALKNAGQAVTIVAQYRPEEYSRFEAKIHDLREQMMNSSISSGSGSLRTSQKRSLYVRALFDYDKTKDSGLPSQGLNFKFGDILHVINASDDEWWQARQVTPDGESDEVGVIPSKRRVEKKERARLKTVKFNSKTRDKGEIPDDMGSKGLKHVTSNASDSESSYRGQEEYVLSYEPVNQQEVNYTRPVIILGPMKDRINDDLISEFPDKFGSCVPHTTRPKRDYEVDGRDYHFVTSREQMEKDIQEHKFIEAGQYNNHLYGTSVQSVREVAEKGKHCILDVSGNAIKRLQIAQLYPISIFIKPKSMENIMEMNKRLTEEQARKTFERAMKLEQEFTEHFTAIVQGDTLEDIYNQVKQIIEEQSGSYIWVPAKEKL

SEQ ID NO: 26398 - protein, 891 aa, Homo sapiens
MPVRKQDTQRALHLLEEYRSKLSQTEDRQLRSSIERVINIFQSNLFQALIDIQEFYEVTLLDNPKCIDRSKPSEPIQPVNTWEISSLPSSTVTSETLPSSLSPSVEKYRYQDEDTPPQEHISPQITNEVIGPELVHVSEKNLSEIENVHGFVSHSHISPIKPTEAVLPSPPTVPVIPVLPVPAENTVILPTIPQANPPPVLVNTDSLETPTYVNGTDADYEYEEITLERGNSGLGFSIAGGTDNPHIGDDSSIFITKIITGGAAAQDGRLRVNDCILRVNEVDVRDVTHSKAVEALKEAGSIVRLYVKRRKPVSEKIMEIKLIKGPKGLGFSIAGGVGNQHIPGDNSIYVTKIIEGGAAHKDGKLQIGDKLLAVNNVCLEEVTHEEAVTALKNTSDFVYLKVAKPTSMYMNDGYAPPDITNSSSQPVDNHVSPSSFLGQTPASPARYSPVSKAVLGDDEITREPRKVVLHRGSTGLGFNIVGGEDGEGIFISFILAGGPADLSGELRKGDRIISVNSVDLRAASHEQAAAALKNAGQAVTIVAQYRPEEYSRFEAKIHDLREQMMNSSISSGSGSLRTSQKRSLYVRALFDYDKTKDSGLPSQGLNFKFGDILHVINASDDEWWQARQVTPDGESDEVGVIPSKRRVEKKERARLKTVKFNSKTRDKGEIPDDMGSKGLKRGQEEYVLSYEPVNQQEVNYTRPVIILGPMKDRINDDLISEFPDKFGSCVPHTTRPKRDYEVDGRDYHFVTSREQMEKDIQEHKFIEAGQYNNHLYGTSVQSVREVAEKGKHCILDVSGNAIKRLQIAQLYPISIFIKPKSMENIMEMNKRLTEEQARKTFERAMKLEQEFTEHFTAIVQGDTLEDIYNQVKQIIEEQSGSYIWVPAKEKL

SEQ ID NO: 26399 - protein, 917 aa, Homo sapiens
MPVRKQDTQRALHLLEEYRSKLSQTEDRQLRSSIERVINIFQSNLFQALIDIQEFYEVTLLDNPKCIDRSKPSEPIQPVNTWEISSLPSSTVTSETLPSSLSPSVEKYRYQDEDTPPQEHISPQITNEVIGPELVHVSEKNLSEIENVHGFVSHSHISPIKPTEAVLPSPPTVPVIPVLPVPAENTVILPTIPQANPPPVLVNTDSLETPTYVNGTDADYEYEEITLERGNSGLGFSIAGGTDNPHIGDDSSIFITKIITGGAAAQDGRLRVNDCILRVNEVDVRDVTHSKAVEALKEAGSIVRLYVKRRKPVSEKIMEIKLIKGPKGLGFSIAGGVGNQHIPGDNSIYVTKIIEGGAAHKDGKLQIGDKLLAVNNVCLEEVTHEEAVTALKNTSDFVYLKVAKPTSMYMNDGYAPPDITNSSSQPVDNHVSPSSFLGQTPASPARYSPVSKAVLGDDEITREPRKVVLHRGSTGLGFNIVGGEDGEGIFISFILAGGPADLSGELRKGDRIISVNSVDLRAASHEQAAAALKNAGQAVTIVAQYRPEEYSRFEAKIHDLREQMMNSSISSGSGSLRTSQKRSLYVRALFDYDKTKDSGLPSQGLNFKFGDILHVINASDDEWWQARQVTPDGESDEVGVIPSKRRVEKKERARLKTVKFNSKTRDKGEIPDDMGSKGLKHVTSNASDSESSYLILITDEYGCSKGRGQEEYVLSYEPVNQQEVNYTRPVIILGPMKDRINDDLISEFPDKFGSCVPHTTRPKRDYEVDGRDYHFVTSREQMEKDIQEHKFIEAGQYNNHLYGTSVQSVREVAEKGKHCILDVSGNAIKRLQIAQLYPISIFIKPKSMENIMEMNKRLTEEQARKTFERAMKLEQEFTEHFTAIVQGDTLEDIYNQVKQIIEEQSGSYIWVPAKEKL

SEQ ID NO: 26400 - protein, 788 aa, Homo sapiens
MNYIFGNNTLLYSRGSRGGNTSSSHGSAGPKQKHWAKKGSSDELQAEPEPSRWQQIVAFFTRRHSFIDCISVATSSTQANPPPVLVNTDSLETPTYVNGTDADYEYEEITLERGNSGLGFSIAGGTDNPHIGDDSSIFITKIITGGAAAQDGRLRVNDCILRVNEVDVRDVTHSKAVEALKEAGSIVRLYVKRRKPVSEKIMEIKLIKGPKGLGFSIAGGVGNQHIPGDNSIYVTKIIEGGAAHKDGKLQIGDKLLAVNNVCLEEVTHEEAVTALKNTSDFVYLKVAKPTSMYMNDGYAPPDITNSSSQPVDNHVSPSSFLGQTPASPARYSPVSKAVLGDDEITREPRKVVLHRGSTGLGFNIVGGEDGEGIFISFILAGGPADLSGELRKGDRIISVNSVDLRAASHEQAAAALKNAGQAVTIVAQYRPEEYSRFEAKIHDLREQMMNSSISSGSGSLRTSQKRSLYVRALFDYDKTKDSGLPSQGLNFKFGDILHVINASDDEWWQARQVTPDGESDEVGVIPSKRRVEKKERARLKTVKFNSKTRDKGEIPDDMGSKGLKHVTSNASDSESSYRGQEEYVLSYEPVNQQEVNYTRPVIILGPMKDRINDDLISEFPDKFGSCVPHTTRPKRDYEVDGRDYHFVTSREQMEKDIQEHKFIEAGQYNNHLYGTSVQSVREVAEKGKHCILDVSGNAIKRLQIAQLYPISIFIKPKSMENIMEMNKRLTEEQARKTFERAMKLEQEFTEHFTAIVQGDTLEDIYNQVKQIIEEQSGSYIWVPAKEKL

SEQ ID NO: 26401 - protein, 800 aa, Homo sapiens
MNYIFGNNTLLYSRGSRGGNTSSSHGSAGPKQKHWAKKGSSDELQAEPEPSRWQQIVAFFTRRHSFIDCISVATSSTQANPPPVLVNTDSLETPTYVNGTDADYEYEEITLERGNSGLGFSIAGGTDNPHIGDDSSIFITKIITGGAAAQDGRLRVNDCILRVNEVDVRDVTHSKAVEALKEAGSIVRLYVKRRKPVSEKIMEIKLIKGPKGLGFSIAGGVGNQHIPGDNSIYVTKIIEGGAAHKDGKLQIGDKLLAVNNVCLEEVTHEEAVTALKNTSDFVYLKVAKPTSMYMNDGYAPPDITNSSSQPVDNHVSPSSFLGQTPASPARYSPVSKAVLGDDEITREPRKVVLHRGSTGLGFNIVGGEDGEGIFISFILAGGPADLSGELRKGDRIISVNSVDLRAASHEQAAAALKNAGQAVTIVAQYRPEEYSRFEAKIHDLREQMMNSSISSGSGSLRTSQKRSLYVRALFDYDKTKDSGLPSQGLNFKFGDILHVINASDDEWWQARQVTPDGESDEVGVIPSKRRVEKKERARLKTVKFNSKTRDKGEIPDDMGSKGLKHVTSNASDSESSYLILITDEYGCSKGGQEEYVLSYEPVNQQEVNYTRPVIILGPMKDRINDDLISEFPDKFGSCVPHTTRPKRDYEVDGRDYHFVTSREQMEKDIQEHKFIEAGQYNNHLYGTSVQSVREVAEKGKHCILDVSGNAIKRLQIAQLYPISIFIKPKSMENIMEMNKRLTEEQARKTFERAMKLEQEFTEHFTAIVQGDTLEDIYNQVKQIIEEQSGSYIWVPAKEKL

SEQ ID NO: 26402 - protein, 392 aa, Homo sapiens
MAALRQPQVAELLAEARRAFREEFGAEPELAVSAPGRVNLIGEHTDYNQGLVLPMALELMTVLVGSPRKDGLVSLLTTSEGADEPQRLQFPLPTAQRSLEPGTPRWANYVKGVIQYYPAAPLPGFSAVVVSSVPLGGGLSSSASLEVATYTFLQQLCPDSGTIAARAQVCQQAEHSFAGMPCGIMDQFISLMGQKGHALLIDCRSLETSLVPLSDPKLAVLITNSNVRHSLASSEYPVRRRQCEEVARALGKESLREVQLEELEAARDLVSKEGFRRARHVVGEIRRTAQAAAALRRGDYRAFGRLMVESHRSLRDDYEVSCPELDQLVEAALAVPGVYGSRMTGGGFGGCTVTLLEASAAPHAMRHIQEHYGGTATFYLSQAADGAKVLCL

SEQ ID NO: 26403 - protein, 255 aa, Homo sapiens
MTMTTMPESLNSPVSGKAVFMEFGPPNQQMSPSPMSHGHYSMHCLHSAGHSQPDGAYSSASSFSRPLGYPYVNSVSSHASSPYISSVQSYPGSASLAQSRLEDPGADSEKSTVVEGGEVRFNGKGKKIRKPRTIYSSLQLQALNRRFQQTQYLALPERAELAASLGLTQTQVKIWFQNKRSKFKKLMKQGGAALEGSALANGRALSAGSPPVPPGWNPNSSSGKGSGGNAGSYIPSYTSWYPSAHQEAMQQPQLM

SEQ ID NO: 26404 - protein, 129 aa, Homo sapiens
MTMTTMPESLNSPVSGKAVFMEFGPPNQQMSPSPMSHGHYSMHCLHSAGHSQPDGAYSSASSFSRPLGYPYVNSVSSHASSPYISSVQSYPGSASLAQSRLEDPGQDLVPKQAIQVQEADEAGWGGSGG

SEQ ID NO: 26405 - protein, 357 aa, Homo sapiens
MAAAEVADTQLMLGVGLIEKDTNGEVLWVWCYPSTTATLRNLLLRKCCLTDENKLLHPFVFGQYRRTWFYITTIEVPDSSILKKVTHFSIVLTAKDFNPEKYAAFTRILCRMYLKHGSPVKMMESYIAVLTKGICQSEENGSFLSKDFDARKAYLAGSIKDIVSQFGMETVILHTALMLKKRIVVYHPKIEAVQEFTRTLPALVWHRQDWTILHSYVHLNADELEALQMCTGYVAGFVDLEVSNRPDLYDVFVNLAESEITIAPLAKEAMAMGKLHKEMGQLIVQSAEDPEKSESHVIQDIALKTREIFTNLAPFSEVSADGEKRVLNLEALKQKRFPPATENFLYHLAAAEQMLKI

SEQ ID NO: 26406 - protein, 349 aa, Homo sapiens
MLSSDHLSTVEKDTNGEVLWVWCYPSTTATLRNLLLRKCCLTDENKLLHPFVFGQYRRTWFYITTIEVPDSSILKKVTHFSIVLTAKDFNPEKYAAFTRILCRMYLKHGSPVKMMESYIAVLTKGICQSEENGSFLSKDFDARKAYLAGSIKDIVSQFGMETVILHTALMLKKRIVVYHPKIEAVQEFTRTLPALVWHRQDWTILHSYVHLNADELEALQMCTGYVAGFVDLEVSNRPDLYDVFVNLAESEITIAPLAKEAMAMGKLHKEMGQLIVQSAEDPEKSESHVIQDIALKTREIFTNLAPFSEVSADGEKRVLNLEALKQKRFPPATENFLYHLAAAEQMLKI

SEQ ID NO: 26407 - protein, 377 aa, Homo sapiens
MEALLLGAGLLLGAYVLVYYNLVKAPPCGGMGNLRGRTAVVTGANSGIGKMTALELARRGARVVLACRSQERGEAAAFDLRQESGNNEVIFMALDLASLASVRAFATAFLSSEPRLDILIHNAGISSCGRTREAFNLLLRVNHIGPFLLTHLLLPCLKACAPSRVVVVASAAHCRGRLDFKRLDRPVVGWRQELRAYADTKLANVLFARELANQLEATGVTCYAAHPGPVNSELFLRHVPGWLRPLLRPLAWLVLRAPRGGAQTPLYCALQEGIEPLSGRYFANCHVEEVPPAARDDRAAHRLWEASKRLAGLGPGEDAEPDEDPQSEDSEAPSSLSTPHPEEPTVSQPYPSPQSSPDLSKMTHRIQAKVEPEIQLS

SEQ ID NO: 26408 - protein, 327 aa, Homo sapiens
MTALELARRGARVVLACRSQERGEAAAFDLRQESGNNEVIFMALDLASLASVRAFATAFLSSEPRLDILIHNAGISSCGRTREAFNLLLRVNHIGPFLLTHLLLPCLKACAPSRVVVVASAAHCRGRLDFKRLDRPVVGWRQELRAYADTKLANVLFARELANQLEATGVTCYAAHPGPVNSELFLRHVPGWLRPLLRPLAWLVLRAPRGGAQTPLYCALQEGIEPLSGRYFANCHVEEVPPAARDDRAAHRLWEASKRLAGLGPGEDAEPDEDPQSEDSEAPSSLSTPHPEEPTVSQPYPSPQSSPDLSKMTHRIQAKVEPEIQLS

SEQ ID NO: 26409 - protein, 296 aa, Homo sapiens
MEALLLGAGLLLGAYVLVYYNLVKAPPCGGMGNLRGRTAVVTGISSCGRTREAFNLLLRVNHIGPFLLTHLLLPCLKACAPSRVVVVASAAHCRGRLDFKRLDRPVVGWRQELRAYADTKLANVLFARELANQLEATGVTCYAAHPGPVNSELFLRHVPGWLRPLLRPLAWLVLRAPRGGAQTPLYCALQEGIEPLSGRYFANCHVEEVPPAARDDRAAHRLWEASKRLAGLGPGEDAEPDEDPQSEDSEAPSSLSTPHPEEPTVSQPYPSPQSSPDLSKMTHRIQAKVEPEIQLS

SEQ ID NO: 26410 - protein, 455 aa, Homo sapiens
MVEQGDAAPLLRWAEGPAVSLPQAPQPQAGGWGRGGGGGARPAAEPPRRREPEEPAAPEVLLQPGRLELGDVEEDQVVAVFVVTFDPRSGNMVEWCLPQDIDLEGVEFKSMASGSHKIQSDFIYFRKGPFFGLACFANMPVESELERGARMKSVGILSPSYTLLYRYMHFLENQVRHQLEMPGHYSHLAAFYEDKKGVLHAGPGRGSSLPPVYWLPSIHRYMYPEMKITHPAGCMSQFIKFFGEQILILWKFALLRKRILIFSPPPVGVVCYRVYCCCCLANVSLPGIGGTIPESKPFFYVNVADIESLEVEVSYVACTTEKIFEEKRELYDVYVDNQNVKTHHDHLQPLLKINSADREKYRRLNEQRQMLLYSQEVEEDYNPCEEDLFVLFFLEQNNRIFQTLLEVSASQDKTLTAEHARGMGLDPQGDRSFLLDLLEAYGIDVMLVIDNPCCP

SEQ ID NO: 26411 - protein, 804 aa, Homo sapiens [sequence omitted]

SEQ ID NO: 26412 - protein, 773 aa, Homo sapiens
MTNQEKWAHLSPSEFSQLQKYAEYSTKKLKDVLEEFHGNGVLAKYNPEGKQDILNQTIDFEGFKLFMKTFLEAELPDDFTAHLFMSFSNKFPHSSPMVKSKPALLSGGLRMNKGAITPPRTTSPANTCSPEVIHLKDIVCYLSLLERGRPEDKLEFMFRLYDTDGNGFLDSSELENIISQMMHVAEYLEWDVTELNPILHEMMEEIDYDHDGTVSLEEWIQGGMTTIPLLVLLGLENNVKDDGQHVWRLKHFNKPAYCNLCLNMLIGVGKQGLCCSFCKYTVHERCVARAPPSCIKTYVKSKRNTDVMHHYWVEGNCPTKCDKCHKTVKCYQGLTGLHCVWCQITLHNKCASHLKPECDCGPLKDHILPPTTICPVVLQTLPTSGVSVPEERQSTVKKEKSGSQQPNKVIDKNKMQRANSVTVDGQGLQVTPVPGTHPLLVFVNPKSGGKQGERIYRKFQYLLNPRQVYSLSGNGPMPGLNFFRDVPDFRVLACGGDGTVGWVLDCIEKANVGKHPPVAILPLGTGNDLARCLRWGGGYEGENLMKILKDIENSTEIMLDRWKFEVIPNDKDEKGDPVPYSIINNYFSIGVDASIAHRFHIMREKHPEKFNSRMKNKFWYFEFGTSETFSATCKKLHESVEIECDGVQIDLINISLEGIAILNIPSMHGGSNLWGESKKRRSHRRIEKKGSDKRTTVTDAKELKFASQDLSDQLLEVVGLEGAMEMGQIYTGLKSAGRRLAQCSCVVIRTSKSLPMQIDGEPWMQTPCTVSTE

SEQ ID NO: 26413 - protein, 775 aa, Homo sapiens
MDCRTKANPDRTFDLVLKVKCHASENEDPVVLWKFPEDFGDQEILQSVPKFCFPFDVERVSQNQVGQHFTFVLTDIESKQRFGFCRLTSGGTICLCILSYLPWFEVYYKLLNTLADYLAKELENDLNETLRSLYNHPVPKANTPVNLSVNQEIFIACEQVLKDQPALVPHSYFIAPDVTGLPTIPESRNLTEYFVAVDVNNMLQLYASMLHERRIVIISSKLSTLTACIHGSAALLYPMYWQHIYIPVLPPHLLDYCCAPMPYLIGIHSSLIERVKNKSLEDVVMLNVDTNTLESPFSDLNNLPSDVVSALKNKLKKQSTATGDGVARAFLRAQAALFGSYRDALRYKPGEPITFCEESFVKHRSSVMKQFLETAINLQLFKQFIDGRLAKLNAGRGFSDVFEEEITSGGFCGGNPRSYQQWVHTVKKGGALFNTAMTKATPAVRTAYKFAKNHAKLGLKEVKSKLKHKENEEDYGTCSSSVQYTPVYKLHNEKGGNSEKRKLAQARLKRPLKSLDGALYDDEDDDDIERASKLSSEDGEEASAYLYESDDSVETRVKTPYSGEMDLLGEILDTLSTHSSDQGKLAAAKSLDFFRSMDDIDYKPTNKSNAPSENNLAFLCGGSGDQAEWNLGQDDSALHGKHLPPSPRKRVSSSGLTDSLFILKEENSNKHLGADNVSDPTSGLDFQLTSPEVSQTDKGKTEKRETLSQISDDLLIPGLGRHSSTFVPWEKEGKEAKETSEDIGLLHEVVSLCHMTSDFQQSLNISDKNTNGNQT

SEQ ID NO: 26414 - protein, 406 aa, Homo sapiens
MDCRTKANPDRTFDLVLKVKCHASENEDPVVLWKFPEDFGDQEILQSVPKFCFPFDVERVSQNQVGQHFTFVLTDIESKQRFGFCRLTSGGTICLCILSYLPWFEVYYKLLNTLADYLAKELENDLNETLRSLYNHPVPKANTPVNLSVHSYFIAPDVTGLPTIPESRNLTEYFVAVDVNNMLQLYASMLHERRIVIISSKLSTLTACIHGSAALLYPMYWQHIYIPVLPPHLLDYCCAPMPYLIGIHSSLIERVKNKSLEDVVMLNVDTNTLESPFSDLNNLPSDVVSALKNKLKKQSTATGDGVARAFLRAQAALFGSYRDALRYKPGEPITFCEESFVKHRSSVMKQFLETAINLQLFKQFIDGRLAKLNAGRGFSDVFEEEITSGGFCGGKDKLQYDYPFSQ

SEQ ID NO: 26415 - protein, 295 aa, Homo sapiens
MDCRTKANPDRTFDLVLKVKCHASENEDPVVLWKFPEDFGDQEILQSVPKFCFPFDVERVSQNQVGQHFTFVLTDIESKQRFGFCRLTSGGTICLCILSYLPWFEVYYKLLNTLADYLAKELENDLNETLRSLYNHPVPKANTPVNLSVHSYFIAPDVTGLPTIPESRNLTEYFVAVDVNNMLQLYASMLHERRIVIISSKLSTLTACIHGSAALLYPMYWQHIYIPVLPPHLLDYCCAPMPYLIGIHSSLIERVKNKSLEDVVMLNVDTNTLESPFSDLNNLPSDVVSMKAIQW

SEQ ID NO: 26416 - protein, 396 aa, Homo sapiens
MAAAPREEKRWPQPVFSNPVVLWKFPEDFGDQEILQSVPKFCFPFDVERVSQNQVGQHFTFVLTDIESKQRFGFCRLTSGGTICLCILSYLPWFEVYYKLLNTLADYLAKELENDLNETLRSLYNHPVPKANTPVNLSVHSYFIAPDVTGLPTIPESRNLTEYFVAVDVNNMLQLYASMLHERRIVIISSKLSTLTACIHGSAALLYPMYWQHIYIPVLPPHLLDYCCAPMPYLIGIHSSLIERVKNKSLEDVVMLNVDTNTLESPFSDLNNLPSDVVSALKNKLKKQSTATGDGVARAFLRAQAALFGSYRDALRYKPGEPITFCEESFVKHRSSVMKQFLETAINLQLFKQFIDGRLAKLNAGRGFSDVFEEEITSGGFCGGKDKLQYDYPFSQ

SEQ ID NO: 26417 - protein, 426 aa, Homo sapiens
MDCRTKANPDRTFDLVLKVKCHASENEDPVVLWKFPEDFGDQEILQSVPKFCFPFDVERVSQNQVGQHFTFVLTDIESKQRFGFCRLTSGGTICLCILSYLPWFEVYYKLLNTLADYLAKELENDLNETLRSLYNHPVPKANTPVNLSVNQEIFIACEQVLKDQPALVPHSYFIAPDVTGLPTIPESRNLTEYFVAVDVNNMLQLYASMLHERRIVIISSKLSTLTACIHGSAALLYPMYWQHIYIPVLPPHLLDYCCAPMPYLIGIHSSLIERVKNKSLEDVVMLNVDTNTLESPFSDLNNLPSDVVSALKNKLKKQSTATGDGVARAFLRAQAALFGSYRDALRYKPGEPITFCEESFVKHRSSVMKQFLETAINLQLFKQFIDGRLAKLNAGRGFSDVFEEEITSGGFCGGKDKLQYDYPFSQ

SEQ ID NO: 26418 - protein, 287 aa, Homo sapiens
MAAEARVSRWYFGGLASCGAACCTHPLDLLKVHLQTQQEVKLRMTGMALRVVRTDGILALYSGLSASLCRQMTYSLTRFAIYETVRDRVAKGSQGPLPFHEKVLLGSVSGLAGGFVGTPADLVNVRMQNDVKLPQGQRRNYAHALDGLYRVAREEGLRRLFSGATMASSRGALVTVGQLSCYDQAKQLVLSTGYLSDNIFTHFVASFIAGGCATFLCQPLDVLKTRLMNSKGEYQGVFHCAVETAKLGPLAFYKGLVPAGIRLIPHTVLTFVFLEQLRKNFGIKVPS

SEQ ID NO: 26419 - protein, 296 aa, Homo sapiens
MAAEARVSRWYFGGLASCGAACCTHPLDLLKVHLQTQQEVKLRMTGMALRVVRTDGILALYSGLSASLCRQMTYSLTRFAIYETVRDRVAKGSQGPLPFHEKVLLGSVSGLAGGFVGTPADLVNVRMQNDVKLPQGQRRNYAHALDGLYRVAREEGLRRLFSGATMASSRGALVTVGQLSCYDQAKQLVLSTGYLSDNIFTHFVASFIAAAGDEPPPQGGCATFLCQPLDVLKTRLMNSKGEYQGVFHCAVETAKLGPLAFYKGLVPAGIRLIPHTVLTFVFLEQLRKNFGIKVPS

SEQ ID NO: 26420 - protein, 280 aa, Homo sapiens
MLSAVARGYQGWFHPCARLSVRMSSTGIDRKGVLANRVAVVTGSTSGIGFAIARRLARDGAHVVISSRKQQNVDRAMAKLQGEGLSVAGIVCHVGKAEDREQLVAKALEHCGGVDFLVCSAGVNPLVGSTLGTSEQIWDKILSVNVKSPALLLSQLLPYMENRRGAVILVSSIAAYNPVVALGVYNVSKTALLGLTRTLALELAPKDIRVNCVVPGIIKTDFSKVFHGNESLWKNFKEHHQLQRIGESEDCAGIVSFLCSPDASYVNGENIAVAGYSTRL

SEQ ID NO: 26421 - protein, 300 aa, Homo sapiens
MLSAVARGYQGWFHPCARLSVRMSSTGIDRKGVLANRVAVVTGSTSGIGFAIARRLARDGAHVVISSRKQQNVDRAMAKLQGEGLSVAGIVCHVGKAEDREQLVAKALEHCGGVDFLVCSAGVNPLVGSTLGTSEQIWDKILSVNVKSPALLLSQLLPYMENRRGAVILVSSIAAYNPVVALGVYNVSKTALLGLTRTLALELAPKDIRVNCVVPGIIKTDFSKVVRIGFMGMSLSGRTSRNIISCRGLGSQRTVQESCPSCALQMPATSTGRTLRWQATPLGSERSGGGCVAVVPGPGA

SEQ ID NO: 26422 - protein, 928 aa, Homo sapiens
MDVGFSRTTVQTLSRSHCKNIKQKISQWEGRANGISNPEKWCPKDFGVRYNCHQEIRLKKNPIAERKSKNLDVTSRENVGLDINENTKSHDQSENENKKHEYDDTHFFKNESESNWVCSRVKEIESCKEDVLDPETSLPPGNFYTSQILWKKIEALPPDKLLNLALEHCDSSEKELNFRVLDSSYGITKSLENIYSEPEGQECGPSINPLPKPRRTFRYLSESGVTPYKERNCDKKYCENNSCAQSSLASSQEPEPKKYGGKIRGRSKRKSFEFEDIQHFRNRNSQTIREELGRNSGSALYYTQSEDNIYEDIIYPTKENPYEDIPVQPLPMWRSPSAWKLPPAKSAFKAPKLPPKPQFLHRKTMEVKNSQAYLRSKLTKDTTLPVTLTEWKLFRAGEVANTKRKNLPRLVLKIDDIFESKRGKKKVKLHSYTGKELPPTKGETSGNESDAEYLPKNRHKRLAQLQPSSKRNPHYQTLERDLIELQEQQLFELFVVVSLQKKPSGISYIPQVIQQFPGKDDHGYKQSKDMEERLKVIPKFCFPDSKDWMPTSELKSETFSFVLTGEDGSRWFGYCKKLLPVGKGKRLPEVYCMVSRLGCFNLFSKILDEVEKRREMSPALVYPFMRSVMEAPFPAPGRTITVKSYLPGAGDESIELCRPLDSRLEHVDFKCLFKCLSVCHLIRVCASLLLERRVIFVANSLSTLSKCGHAVVATLYPFTWQHTYIPVLPASMIDIVCSPTPFLIGILSCSLPQLQDLPIEEVLIVDLCADKFLQEVSDEDEILPPKLQAALMQILEERNEILTQEQNFSQDVTLNSLVSEAFVRFFVELVGHYSLNMTVTERGERVFQREPFRKSHTSRSVRHFLDLFMETQMFAGFIQDRELRKSGVKGLFEIRAIQYLETIPESEPSGMNRILRSLGSKMKFLQKK

SEQ ID NO: 26423 - protein, 816 aa, Homo sapiens
MDVGFSRTTVQTLSRSHCKNIKQKISQWEGRANGISNPEKWCPKDFGVRYNCHQEIRLKKNPIAERKSKNLDVTSRENVGLDINENTKSHDQSENENKKHEYDDTHFFKNESESNWVCSRVKEIESCKEDVLDPETSLPPGNFYTSQILWKKIEALPPDKLLNLALEHCDSSEKELNFRVLDSSYGITKSLENIYSEPEGQECGPSINPLPKPRRTFRYLSESGVTPYKERNCDKKYCENNSCAQSSLASSQEPEPKKYGGKIRGRSKRKSFEFEDIQHFRNRNSQTIREELGRNSGSALYYTQSEDNIYEDIIYPTKENPYEDIPVQPLPMWRSPSAWKLPPAKSAFKAPKLPPKPQFLHRKTMEVKNSQAYLRSKLTKDTTLPVTLTEWKLFRAGEVANTKRKNLPRLVLKIDDIFESKRGKKKVKLHSYTGKELPPTKGETSGNESDAEYLPKNRHKRLAQLQPSSKRNPHYQTLERDLIELQEQQLFELFVVVSLQKKPSGISYIPQVIQQFPGKDDHGYKQSKDMEERLKVIPKFCFPDSKDWMPTSELKSETFSFVLTGEDGSRWFGYCKKLLPVGKGKRLPEVYCMVSRLGCFNLFSKILDEVEKRREMSPALVYPFMRSVMEAPFPAPGRTITLQDLPIEEVLIVDLCADKFLQEVSDEDEILPPKLQAALMQILEERNEILTQEQNFSQDVTLNSLVSEAFVRFFVELVGHYSLNMTVTERGERVFQREPFRKSHTSRSVRHFLDLFMETQMFAGFIQDRELRKSGVKGLFEIRAIQYLETIPESEPSGMNRILRSLGSKMKFLQKK

SEQ ID NO: 26424 - protein, 871 aa, Homo sapiens
MDVGFSRTTVQTLSRSHCKNIKQKISQWEGRANGISNPEKWCPKDFGVRYNCHQEIRLKKNPIAERKSKNLDVTSRENVGLDINENTKSHDQSENENKKHEYDDTHFFKNESESNWVCSRVKEIESCKEDVLDPETSLPPGNFYTSQILWKKIEALPPDKLLNLALEHCDSSEKELNFRVLDSSYGITKSLENIYSEPEGQECGPSINPLPKPRRTFRYLSESGVTPYKERNCDKKYCENNSCAQSSLASSQEPEPKKYGGKIRGRSKRKSFEFEDIQHFRNRNSQTIREELGRNSGSALYYTQSEDNIYEDIIYPTKENPYEDIPVQPLPMWRSPSAWKLPPAKSAFKAPKLVLKIDDIFESKRGKKKVKLHSYTGKELPPTKGETSGNESDAEYLPKNRHKRLAQLQPSSKRNPHYQTLERDLIELQEQQLFELFVVVSLQKKPSGISYIPQVIQQFPGKDDHGYKQSKDMEERLKVIPKFCFPDSKDWMPTSELKSETFSFVLTGEDGSRWFGYCKKLLPVGKGKRLPEVYCMVSRLGCFNLFSKILDEVEKRREMSPALVYPFMRSVMEAPFPAPGRTITVKSYLPGAGDESIELCRPLDSRLEHVDFKCLFKCLSVCHLIRVCASLLLERRVIFVANSLSTLSKCGHAVVATLYPFTWQHTYIPVLPASMIDIVCSPTPFLIGILSCSLPQLQDLPIEEVLIVDLCADKFLQEVSDEDEILPPKLQAALMQILEERNEILTQEQNFSQDVTLNSLVSEAFVRFFVELVGHYSLNMTVTERGERVFQREPFRKSHTSRSVRHFLDLFMETQMFAGFIQDRELRKSGVKGLFEIRAIQYLETIPESEPSGMNRILRSLGSKMKFLQKK

SEQ ID NO: 26425 - protein, 471 aa, Homo sapiens
MEGQVVGRVFRLFQRRLLQLRAGPPQDNSGEALKEPERAQEHSLPNFAGGQHFFEYLLVVSLKKKRSEDDYEPIITYQFPKRENLLRGQQEEEERLLKAIPLFCFPDGNEWASLTEYPRETFSFVLTNVDGSRKIGYCRRLLPAGPGPRLPKVYCIISCIGCFGLFSKILDEVEKRHQISMAVIYPFMQGLREAAFPAPGKTVTLKSFIPDSGTEFISLTRPLDSHLEHVDFSSLLHCLSFEQILQIFASAVLERKIIFLAEGLSTLSQCIHAAAALLYPFSWAHTYIPVVPESLLATVCCPTPFMVGVQMRFQQEVMDSPMEEVLLVNLCEGTFLMSVGDEKDILPPKLQDDILDSLGQGINELKTAEQINEHVSGPFVQFFVKIVGHYASYIKREANGQGHFQERSFCKALTSKTNRRFVKKFVKTQLFSLFIQEAEKSKNPPAGYFQQKILEYEEQKKQKKPREKTVK

SEQ ID NO: 26426 - protein, 468 aa, Homo sapiens
MDGLGRRLRASLRLKRGHGGPPQDNSGEALKEPERAQEHSLPNFAGGQHFFEYLLVVSLKKKRSEDDYEPIITYQFPKRENLLRGQQEEEERLLKAIPLFCFPDGNEWASLTEYPRETFSFVLTNVDGSRKIGYCRRLLPAGPGPRLPKVYCIISCIGCFGLFSKILDEVEKRHQISMAVIYPFMQGLREAAFPAPGKTVTLKSFIPDSGTEFISLTRPLDSHLEHVDFSSLLHCLSFEQILQIFASAVLERKIIFLAEGLSTLSQCIHAAAALLYPFSWAHTYIPVVPESLLATVCCPTPFMVGVQMRFQQEVMDSPMEEVLLVNLCEGTFLMSVGDEKDILPPKLQDDILDSLGQGINELKTAEQINEHVSGPFVQFFVKIVGHYASYIKREANGQGHFQERSFCKALTSKTNRRFVKKFVKTQLFSLFIQEAEKSKNPPAGYFQQKILEYEEQKKQKKPREKTVK

SEQ ID NO: 26427 - protein, 977 aa, Homo sapiens
MKGLSGSRSHHHGVTCDSACDSLSHHSDRKPYLLSPVEHHPADHPYYTQRNSFQAECVGPFSDPLASSTFPRRHYTSQQELKDECALVPRTLATKANRIPANLLDQFERQLPLSRDGYHTLQYKRTAVEHRSDSPGRIRHLVHSVQKLFTKSHSLEGPSKGSVNGGKASPDEAQAARYGKRSKSKERRAEPKARPSTSPGWWSSDDNLDGDMCIYHAPSGVMTMGRCPDRSASQYFLEAYNTISEQAVKASRSNNDVKCSTCANLPVSLDTPLLKKSAWSSTLTVSRAREVYQKASVNMDQAMVKSESCQQERSCQYLQVPQDEWTGYTPRGKDDEIPCRRMRSGSYIKAMGDEDSGDSDTSPKPSPKVAARRESYLKATQPSLTELTTLKISNEHSPKLQIRSHSYLRAVSEVSINRSLDSLDPAGLLTSPKFRSRNESYMRAMSTISQVSEMEVNGQFESVCESVFSELESQAVEALDLPMPGCFRMRSHSYVRAIEKGCSQDDECVSLRSSSPPRTTTTVRTIQSSTVSSCITTYKKTPPPVPPRTTTKPFISITAQSSTESAQDAYMDGQGQRGDIISQSGLSNSTESLDSMKALTAAIEAANAQIHGPASQHMGNNTATVTTTTTIATVTTEDRKKDHFKKNRCLSIGIQVDDAEEPDKTGENKAPSKFQSVGVQVEEEKCFRRFTRSNSVTTAVQADLDFHDNLENSLESIEDNSCPGPMARQFSRDASTSTVSIQGSGNHYHACAADDDFDTDFDPSILPPPDPWIDSITEDPLEAVQRSVCHRDGHWFLKLLQAERDRMEGWCQQMEREERENNLPEDILGKIRTAVGSAQLLMAQKFYQFRELCEENLNPNAHPRPTSQDLAGFWDMLQLSIENISMKFDELHQLKANNWKQMDPLDKKERRAPPPVPKKPAKGPAPLIRERSLESSQRQEARKRLMAAKRAASVRQNSATESAESIEIYIPEAQTRL

SEQ ID NO: 26428 - protein, 675 aa, Homo sapiens
MNLIFHKDILFGIPANKVPQDEWTGYTPRGKDDEIPCRRMRSGSYIKAMGDEDSGDSDTSPKPSPKVAARRESYLKATQPSLTELTTLKISNEHSPKLQIRSHSYLRAVSEVSINRSLDSLDPAGLLTSPKFRSRNESYMRAMSTISQVSEMEVNGQFESVCESVFSELESQAVEALDLPMPGCFRMRSHSYVRAIEKGCSQDDECVSLRSSSPPRTTTTVRTIQSSTVSSCITTYKKTPPPVPPRTTTKPFISITAQSSTESAQDAYMDGQGQRGDIISQSGLSNSTESLDSMKALTAAIEAANAQIHGPASQHMGNNTATVTTTTTIATVTTEDRKKDHFKKNRCLSIGIQVDDAEEPDKTGENKAPSKFQSVGVQVEEEKCFRRFTRSNSVTTAVQADLDFHDNLENSLESIEDNSCPGPMARQFSRDASTSTVSIQGSGNHYHACAADDDFDTDFDPSILPPPDPWIDSITEDPLEAVQRSVCHRDGHWFLKLLQAERDRMEGWCQQMEREERENNLPEDILGKIRTAVGSAQLLMAQKFYQFRELCEENLNPNAHPRPTSQDLAGFWDMLQLSIENISMKFDELHQLKANNWKQMDPLDKKERRAPPPVPKKPAKGPAPLIRERSLESSQRQEARKRLMAAKRAASVRQNSATESAESIEIYIPEAQTRL

SEQ ID NO: 26429 - protein, 627 aa, Homo sapiens
MNLIFHKDILFGIPANKVPQDEWTGYTPRGKDDEIPCRRMRSGSYIKAMGDEDSGDSDTSPKPSPKVAARRESYLKATQPSLTELTTLKISNEHSPKLQIRSHSYLRAVSEVSINRSLDSLDPAGLLTSPKFRSRNESYMRAMSTISQVSEMEVNGQFESVCESVFSELESQAVEALDLPMPGCFRMRSHSYVRAIEKGCSQDDECVSLRSSSPPRTTTTVRTIQSSTVSSCITTYKKTPPPVPPRTTTKPFISITAQSSTESAQDAYMDGQGQRGDIISQSGLSNSTESLDSMKALTAAIEAANAQIHGPASQHMGNNTATVTTTTTIATVTTEDRKKDHFKKNRCLSIGIQVDDAEEPDKTGENKAPSKFQSVGVQVEEEKCFRRFTRSNSVTTAVQADLDFHDNLENSLESIEDNSCPGPMARQFSRDASTSTVSIQGSGNHYHACAADDDFDTDFDPSILPPPDPWIDSITEDPLEAVQRSVCHRDGHWFLKLLQAERDRMEGWCQQMEREERENNLPEDILGKIRTAVGSAQLLMAQKFYQFRELCEENLNPNAHPRPTSQDLAGFWDMLQLSIENISMKFDELHQLKANNWKQMDPLDKKVEQCRFCMVHLKTCTNTGQSK

SEQ ID NO: 26430 - protein, 683 aa, Homo sapiens
MIDLFKAEWVSSVCVQVSRNGRTDQVPQDEWTGYTPRGKDDEIPCRRMRSGSYIKAMGDEDSGDSDTSPKPSPKVAARRESYLKATQPSLTELTTLKISNEHSPKLQIRSHSYLRAVSEVSINRSLDSLDPAGLLTSPKFRSRNESYMRAMSTISQVSEMEVNGQFESVCESVFSELESQAVEALDLPMPGCFRMRSHSYVRAIEKGCSQDDECVSLRSSSPPRTTTTVRTIQSSTVSSCITTYKKTPPPVPPRTTTKPFISITAQSSTESAQDAYMDGQGQRGDIISQSGLSNSTESLDSMKALTAAIEAANAQIHGPASQHMGNNTATVTTTTTIATVTTEDRKKDHFKKNRCLSIGIQVDDAEEPDKTGENKAPSKFQSVGVQVEEEKCFRRFTRSNSVTTAVQADLDFHDNLENSLESIEDNSCPGPMARQFSRDASTSTVSIQGSGNHYHACAADDDFDTDFDPSILPPPDPWIDSITEDPLEAVQRSVCHRDGHWFLKLLQAERDRMEGWCQQMEREERENNLPEDILGKIRTAVGSAQLLMAQKFYQFRELCEENLNPNAHPRPTSQDLAGFWDMLQLSIENISMKFDELHQLKANNWKQMDPLDKKERRAPPPVPKKPAKGPAPLIRERSLESSQRQEARKRLMAAKRAASVRQNSATESAESIEIYIPEAQTRL

SEQ ID NO: 26431 - protein, 661 aa, Homo sapiens
MDLKTLKLFNSQLRCGWLLYIWNKAFMAHLRVPQDEWTGYTPRGKDDEIPCRRMRSGSYIKAMGDEDSGDSDTSPKPSPKVAARRESYLKATQPSLTELTTLKISNEHSPKLQIRSHSYLRAVSEVSINRSLDSLDPAGLLTSPKFRSRNESYMRAMSTISQVSEMEVNGQFESVCESVFSELESQAVEALDLPMPGCFRMRSHSYVRAIEKGCSQDDECVSLRSSSPPRTTTTVRTIQSSTAQSSTESAQDAYMDGQGQRGDIISQSGLSNSTESLDSMKALTAAIEAANAQIHGPASQHMGNNTATVTTTTTIATVTTEDRKKDHFKKNRCLSIGIQVDDAEEPDKTGENKAPSKFQSVGVQVEEEKCFRRFTRSNSVTTAVQADLDFHDNLENSLESIEDNSCPGPMARQFSRDASTSTVSIQGSGNHYHACAADDDFDTDFDPSILPPPDPWIDSITEDPLEAVQRSVCHRDGHWFLKLLQAERDRMEGWCQQMEREERENNLPEDILGKIRTAVGSAQLLMAQKFYQFRELCEENLNPNAHPRPTSQDLAGFWDMLQLSIENISMKFDELHQLKANNWKQMDPLDKKERRAPPPVPKKPAKGPAPLIRERSLESSQRQEARKRLMAAKRAASVRQNSATESAESIEIYIPEAQTRL

SEQ ID NO: 26432 - protein, 685 aa, Homo sapiens
MNLIFHKDILFGIPANKVPQDEWTGYTPRGKDDEIPCRRMRSGSYIKAMGDEDSGDSDTSPKPSPKVAARRESYLKATQPSLTELTTLKISNEHSPKLQIRSHSYLRAVSEVSINRSLDSLDPAGLLTSPKFRSRNESYMRAMSTISQVSEMEVNGQFESVCESVFSELESQAVEALDLPMPGCFRMRSHSYVRAIEKGCSQDDECVSLRSSSPPRTTTTVRTIQSSTGVIKLSSAVEVSSCITTYKKTPPPVPPRTTTKPFISITAQSSTESAQDAYMDGQGQRGDIISQSGLSNSTESLDSMKALTAAIEAANAQIHGPASQHMGNNTATVTTTTTIATVTTEDRKKDHFKKNRCLSIGIQVDDAEEPDKTGENKAPSKFQSVGVQVEEEKCFRRFTRSNSVTTAVQADLDFHDNLENSLESIEDNSCPGPMARQFSRDASTSTVSIQGSGNHYHACAADDDFDTDFDPSILPPPDPWIDSITEDPLEAVQRSVCHRDGHWFLKLLQAERDRMEGWCQQMEREERENNLPEDILGKIRTAVGSAQLLMAQKFYQFRELCEENLNPNAHPRPTSQDLAGFWDMLQLSIENISMKFDELHQLKANNWKQMDPLDKKERRAPPPVPKKPAKGPAPLIRERSLESSQRQEARKRLMAAKRAASVRQNSATESAESIEIYIPEAQTRL

SEQ ID NO: 26433 - protein, 929 aa, Homo sapiens
MKGLSGSRSHHHGVTCDSACDSLSHHSDRKPYLLSPVEHHPADHPYYTQRNSFQAECVGPFSDPLASSTFPRRHYTSQQELKDECALVPRTLATKANRIPANLLDQFERQLPLSRDGYHTLQYKRTAVEHRSDSPGRIRHLVHSVQKLFTKSHSLEGPSKGSVNGGKASPDEAQAARYGKRSKSKERRAEPKARPSTSPGWWSSDDNLDGDMCIYHAPSGVMTMGRCPDRSASQYFLEAYNTISEQAVKASRSNNDVKCSTCANLPVSLDTPLLKKSAWSSTLTVSRAREVYQKASVNMDQAMVKSESCQQERSCQYLQVPQDEWTGYTPRGKDDEIPCRRMRSGSYIKAMGDEDSGDSDTSPKPSPKVAARRESYLKATQPSLTELTTLKISNEHSPKLQIRSHSYLRAVSEVSINRSLDSLDPAGLLTSPKFRSRNESYMRAMSTISQVSEMEVNGQFESVCESVFSELESQAVEALDLPMPGCFRMRSHSYVRAIEKGCSQDDECVSLRSSSPPRTTTTVRTIQSSTVSSCITTYKKTPPPVPPRTTTKPFISITAQSSTESAQDAYMDGQGQRGDIISQSGLSNSTESLDSMKALTAAIEAANAQIHGPASQHMGNNTATVTTTTTIATVTTEDRKKDHFKKNRCLSIGIQVDDAEEPDKTGENKAPSKFQSVGVQVEEEKCFRRFTRSNSVTTAVQADLDFHDNLENSLESIEDNSCPGPMARQFSRDASTSTVSIQGSGNHYHACAADDDFDTDFDPSILPPPDPWIDSITEDPLEAVQRSVCHRDGHWFLKLLQAERDRMEGWCQQMEREERENNLPEDILGKIRTAVGSAQLLMAQKFYQFRELCEENLNPNAHPRPTSQDLAGFWDMLQLSIENISMKFDELHQLKANNWKQMDPLDKKVEQCRFCMVHLKTCTNTGQSK

SEQ ID NO: 26434 - protein, 278 aa, Homo sapiens
MHKAGLLGLCARAWNSVRMASSGMTRRDPLANKVALVTASTDGIGFAIARRLAQDGAHVVVSSRKQQNVDQAVATLQGEGLSVTGTVCHVGKAEDRERLVATAVKLHGGIDILVSNAAVNPFFGSIMDVTEEVWDKTLDINVKAPALMTKAVVPEMEKRGGGSVVIVSSIAAFSPSPGFSPYNVSKTALLGLTKTLAIELAPRNIRVNCLAPGLIKTSFSRMLWMDKEKEESMKETLRIRRLGEPEDCAGIVSFLCSEDASYITGETVVVGGGTPSRL

SEQ ID NO: 26435 - protein, 192 aa, Homo sapiens
MHKAGLLGLCARAWNSVRMASSGMTRRDPLANKVALVTASTDGIGFAIARRLAQDGAHVVVSSRKQQNVDQAVATLQGEGLSVTGTVCHVGKAEDRERLVATAVKLHGGIDILVSNAAVNPFFGSIMDVTEEVWDKLWMDKEKEESMKETLRIRRLGEPEDCAGIVSFLCSEDASYITGETVVVGGGTPSRL

SEQ ID NO: 26436 - protein, 158 aa, Homo sapiens
MHKAGLLGLCARAWNSVRMASSGMTRRDPLANKVALVTASTDGIGFAIARRLAQDGAHVVVSSRKQQNVDQAVATLQGEGLSVTGTVCHVGKAEDRERLVATLWMDKEKEESMKETLRIRRLGEPEDCAGIVSFLCSEDASYITGETVVVGGGTPSRL

SEQ ID NO: 26437 - protein, 244 aa, Homo sapiens
MHKAGLLGLCARAWNSVRMASSGMTRRDPLANKVALVTASTDGIGFAIARRLAQDGAHVVVSSRKQQNVDQAVATLQGEGLSVTGTVCHVGKAEDRERLVATTLDINVKAPALMTKAVVPEMEKRGGGSVVIVSSIAAFSPSPGFSPYNVSKTALLGLTKTLAIELAPRNIRVNCLAPGLIKTSFSRMLWMDKEKEESMKETLRIRRLGEPEDCAGIVSFLCSEDASYITGETVVVGGGTPSRL

SEQ ID NO: 26438 - protein, 199 aa, Homo sapiens
MHKAGLLGLCARAWNSVRMASSGMTRRDPLANKVALVTASTDGIGFAIARRLAQDGAHVVVSSRKQQNVDQAVATLQGEGLSVTGTVCHVGKAEDRERLVATTLDINVKAPALMTKAVVPEMEKRGGGSVVIVSSIAAFSPSPLWMDKEKEESMKETLRIRRLGEPEDCAGIVSFLCSEDASYITGETVVVGGGTPSRL

SEQ ID NO: 26439 - protein, 75 aa, Homo sapiens
MHKAGLLGLCARAWNSVRMLWMDKEKEESMKETLRIRRLGEPEDCAGIVSFLCSEDASYITGETVVVGGGTPSRL

SEQ ID NO: 26440 - protein, 188 aa, Homo sapiens
MHKAGLLGLCARAWNSVRMASSGMTRRDPLANKVALVTASTDGIGFAIARRLAQDGAHVVVSSRKQQNVDQAVATLQGEGLSVTGTVCHVGKAEDRERLVATAVKLHGGIDILVSNAAVNPFFGSIMDVTEEVWDKRRLSGDRVFHSSLQSISSLDGQGKRGKHERNPADKKVRRARGLCWHRVFPVL

SEQ ID NO: 26441 - protein, 226 aa, Homo sapiens
MASSGMTRRDPLANKVALVTASTDGIGFAIARRLAQDGAHVVVSSRKQQNVDQAVATLQGEGLSVTGTVCHVGKAEDRERLVATTLDINVKAPALMTKAVVPEMEKRGGGSVVIVSSIAAFSPSPGFSPYNVSKTALLGLTKTLAIELAPRNIRVNCLAPGLIKTSFSRMLWMDKEKEESMKETLRIRRLGEPEDCAGIVSFLCSEDASYITGETVVVGGGTPSRL

SEQ ID NO: 26442 - protein, 339 aa, Homo sapiens
MNWELLLWLLVLCALLLLLVQLLRFLRADGDLTLLWAEWQGRRPEWELTDMVVWVTGASSGIGEELAYQLSKLGVSLVLSARRVHELERVKRRCLENGNLKEKDILVLPLDLTDTGSHEAATKAVLQEFGRIDILVNNGGMSQRSLCMDTSLDVYRKLIELNYLGTVSLTKCVLPHMIERKQGKIVTVNSILGIISVPLSIGYCASKHALRGFFNGLRTELATYPGIIVSNICPGPVQSNIVENSLAGEVTKTIGNNGDQSHKMTTSRCVRLMLISMANDLKEVWISEQPFLLVTYLWQYMPTWAWWITNKMGKKRIENFKSGVDADSSYFKIFKTKHD

SEQ ID NO: 26443 - protein, 289 aa, Homo sapiens
MVVWVTGASSGIGEELAYQLSKLGVSLVLSARRVHELERVKRRCLENGNLKEKDILVLPLDLTDTGSHEAATKAVLQEFGRIDILVNNGGMSQRSLCMDTSLDVYRKLIELNYLGTVSLTKCVLPHMIERKQGKIVTVNSILGIISVPLSIGYCASKHALRGFFNGLRTELATYPGIIVSNICPGPVQSNIVENSLAGEVTKTIGNNGDQSHKMTTSRCVRLMLISMANDLKEVWISEQPFLLVTYLWQYMPTWAWWITNKMGKKRIENFKSGVDADSSYFKIFKTKHD

SEQ ID NO: 26444 - protein, 1271 aa, Homo sapiens
MDRGAAAAQGTAPPQDGEQPAESPEPPPPWPPPPPPPAPPPAPPLLSEASPEPIPEPCPELAPGPCPEATSESATELYTEPTPEPATEPASEPAPEPATEPAPEPATEPAPEPAPEPATESAPEPTPEPALESVPEPAPELTPEVAPELAPEPTPEPVTELAPEFCPEAAPEFRPSPAPCLLQCPVDTRERGLKTSPSPSPSPSPRTPMSWSRIKKILKEGPMLKNCNSFKRWKLRYFLVQGQKLYFAHHPAFAHFETIDLSQATVAESSCRNLCHSFCVITPQRKITLAAPNRKDMEEWINIIKTIQQGEIYKIPAAENNPFLVGMHCWYSSYSHRTQHCNVCRESIPALSRDAIICEVCKVKSHRLCALRASKDCKWNTLSITDDLLLPADEVNMPHQWVEGNMPVSSQCAVCHESCGSYQRLQDFRCLWCNSTVHDDCRRRFSKECCFRSHRSSVIPPTALSDPKGDGQLVVSSDFWNLDWSSACSCPLLIFINSKSGDHQGIVFLRKFKQYLNPSQVFDLLKGGPEAGLSMFKNFARFRILVCGGDGSVSWVLSLIDAFGLHEKCQLAVIPLGTGNDLARVLGWGAFWNKSKSPLDILNRVEQASVRILDRWSVMIRETPRQTPLLKGQVEMDVPRFEAAAIQHLESAATELNKILKAKYPTEMIIATRFLCSAVEDFVVDIVKAWGQIKQNNTAIVSVILKSDLMYDRLSVLIDVLAEEAAATSAEKSATEYADSSKADRKPFIPQIDHIAKCKLELATKAQSLQKSLKLIIFQVEQALDEESRQTISVKNFSSTFFLEDDPEDINQTSPRRRSRRGTLSSISSLKSEDLDNLNLDHLHFTPESIRFKEKCVMNNYFGIGLDAKISLDFNTRRDEHPGQYNSRLKNKMWYGLLGTKELLQRSYRKLEERVHLECDGETISLPNLQGIVVLNITSYAGGINFWGSNTATTEYEAPAIDDGKLEVVAIFGSVQMAMSRIINLHHHRIAQCHEVMITIDGEEGIPVQVDGEAWIQRPGLIKIRYKNAAQMLTRDRDFENSMKMWEYKHTEIQAAPQPQLDFQDSQESLSDEEYAQMQHLARLAENLISKLNDLSKIHQHVSVLMGSVNASANILNDIFYGQDSGNEMGAASCIPIETLSRNDAVDVTFSLKGLYDDTTAFLDEKLLRSAEDETALQSALDAMNKEFKKLSEIDWMNPIFVPEEKSSDTDSRSLRLKIKFPKLGKKKVEEERKPKSGQSVQSFIGNLWHRRHREDEAEGDDPLTPSRSQL

SEQ ID NO: 26445 - protein, 1065 aa, Homo sapiens
MDAAGRGCHLLPLPAARGPARAPAAAAAAAASPPGPCSGAACAPSAAAGAGAMNPSSSAGEEKGATGGSSSSGSGAGSCCLGAEGGADPRGAGSAAAAGAAALDEPAAAGQKEKDEALEEKLRNLTFRKQVSYRKAISRAGLQHLAPAHPLSLPVANGPAKEPRATLDWSENAVNGEHLWLETNVSGDLCYLGEENCQVRFAKSALRRKCAVCKIVVHTACIEQLEKINFRCKPTFREGGSRSPRENFVRHHWVHRRRQEGKCKQCGKGFQQKFSFHSKEIVAISCSWCKQAFHNKVTCFMLHHIEEPCSLGAHAAVIVPPTWIIKVKKPQNSLKASNRKKKRTSFKRKASKRGMEQENKGRPFVIKPISSPLMKPLLVFVNPKSGGNQGTKVLQMFMWYLNPRQVFDLSQEGPKDALELYRKVPNLRILACGGDGTVGWILSILDELQLSPQPPVGVLPLGTGNDLARTLNWGGGYTDEPVSKILCQVEDGTVVQLDRWNLHVERNPDLPPEELEDGVCKLPLNVFNNYFSLGFDAHVTLEFHESREANPEKFNSRFRNKMFYAGAAFSDFLQRSSRDLSKHVKVVCDGTDLTPKIQELKFQCIVFLNIPRYCAGTMPWGNPGDHHDFEPQRHDDGYIEVIGFTMASLAALQVGGHGERLHQCREVMLLTYKSIPMQVDGEPCRLAPAMIRISLRNQANMVQKSKRRTSMPLLNDPQSVPDRLRIRVNKISLQDYEGFHYDKEKLREASISDWLRTIAGELVQSFGAIPLGILVVRGDCDLETCRMYIDRLQEDLQSVSSGSQRVHYQDHETSFPRALSAQRLSPRWCFLDDRSQEHLHFVMEISQDEIFILDPDMVVSQPAGTPPGMPDLVVEQASGISDWWNPALRKRMLSDSGLGMIAPYYEDSDLKDLSHSRVLQSPVSSEDHAILQAVIAGDLMKLIESYKNGGSLLIQGPDHCSLLHYAAKTGNGEIVKYILDHGPSELLDMADSETGETALHKAACQRNRAVCQLLVDAGASLRKTDSKGKTPQERAQQAGDPDLAAYLESRQNYKVIGHEDLETAV

SEQ ID NO: 26446 - protein, 979 aa, Homo sapiens
MRGYHGDRGSHPRPARFADQQHMDVGPAARAPYLLGSREAFSTEPRFCAPRAGLGHISPEGPLSLSEGPSVGPEGGPAGAGVGGGSSTFPRMYPGQGPFDTCEDCVGHPQGKGAPRLPPTLLDQFEKQLPVQQDGFHTLPYQRGPAGAGPGPAPGTGTAPEPRSESPSRIRHLVHSVQKLFAKSHSLEAPGKRDYNGPKAEGRGGSGGDSYPGPGSGGPHTSHHHHHHHHHHHHQSRHGKRSKSKDRKGDGRHQAKSTGWWSSDDNLDSDSGFLAGGRPPGEPGGPFCLEGPDGSYRDLSFKGRSGGSEGRCLACTGMSMSLDGQSVKRSAWHTMMVSQGRDGYPGAGPGKGLLGPETKAKARTYHYLQVPQDDWGGYPTGGKDGEIPCRRMRSGSYIKAMGDEESGDSDGSPKTSPKAVARRFTTRRSSSVDQARINCCVPPRIHPRSSIPGYSRSLTTGQLSDELNQQLEAVCGSVFGELESQAVDALDLPGCFRMRSHSYLRAIQAGCSQDDDCLPLLATPAAVSGRPGSSFNFRKAPPPIPPGSQAPPRISITAQSSTDSAHESFTAAEGPARRCSSADGLDGPAMGARTLELAPVPPRASPKPPTLIIKTIPGREELRSLARQRKWRPSIGVQVETISDSDTENRSRREFHSIGVQVEEDKRRARFKRSNSVTAGVQADLELEGLAGLATVATEDKALQFGRSFQRHASEPQPGPRAPTYSVFRTVHTQGQWAYREGYPLPYEPPATDGSPGPAPAPTPGPGAGRRDSWIERGSRSLPDSGRASPCPRDGEWFIKMLRAEVEKLEHWCQQMEREAEDYELPEEILEKIRSAVGSTQLLLSQKVQQFFRLCQQSMDPTAFPVPTFQDLAGFWDLLQLSIEDVTLKFLELQQLKANSWKLLEPKEEKKVPPPIPKKPLRGRGVPVKERSLDSVDRQRQEARKRLLAAKRAASFRHSSATESADSIEIYIPEAQTRL

SEQ ID NO: 26447 - protein, 942 aa, Homo sapiens
MAAAAEPGARAWLGGGSPRPGSPACSPVLGSGGRARPGPGPGPGPERAGVRAPGPAAAPGHSFRKVTLTKPTFCHLCSDFIWGLAGFLCDVCNFMSHEKCLKHVRIPCTSVAPSLVRVPVAHCFGPRGLHKRKFCAVCRKVLEAPALHCEVCELHLHPDCVPFACSDCRQCHQDGHQDHDTHHHHWREGNLPSGARCEVCRKTCGSSDVLAGVRCEWCGVQAHSLCSAALAPECGFGRLRSLVLPPACVRLLPGGFSKTQSFRIVEAAEPGEGGDGADGSAAVGPGRETQATPESGKQTLKIFDGDDAVRRSQFRLVTVSRLAGAEEVLEAALRAHHIPEDPGHLELCRLPPSSQACDAWAGGKAGSAVISEEGRSPGSGEATPEAWVIRALPRAQEVLKIYPGWLKVGVAYVSVRVTPKSTARSVVLEVLPLLGRQAESPESFQLVEVAMGCRHVQRTMLMDEQPLLDRLQDIRQMSVRQVSQTRFYVAESRDVAPHVSLFVGGLPPGLSPEEYSSLLHEAGATKATVVSVSHIYSSQGAVVLDVACFAEAERLYMLLKDMAVRGRLLTALVLPDLLHAKLPPDSCPLLVFVNPKSGGLKGRDLLCSFRKLLNPHQVFDLTNGGPLPGLHLFSQVPCFRVLVCGGDGTVGWVLGALEETRYRLACPEPSVAILPLGTGNDLGRVLRWGAGYSGEDPFSVLLSVDEADAVLMDRWTILLDAHEAGSAENDTADAEPPKIVQMSNYCGIGIDAELSLDFHQAREEEPGKFTSRLHNKGVYVRVGLQKISHSRSLHKQIRLQVERQEVELPSIEGLIFINIPSWGSGADLWGSDSDTRFEKPRMDDGLLEVVGVTGVVHMGQVQGGLRSGIRIAQGSYFRVTLLKATPVQVDGEPWVQAPGHMIISAAGPKVHMLRKAKQKPRRAGTTRDARADAAPAPESDPR

SEQ ID NO: 26448 - protein, 585 aa, Homo sapiens
MDALLGTGPRRARGCLGAAGPTSSGRAARTPAAPWARFSAWLECVCVVTFDLELGQALELVYPNDFRLTDKEKSSICYLSFPDSHSGCLGDTQFSFRMRQCGGQRSPWHADDRHYNSRAPVALQREPAHYFGYVYFRQVKDSSVKRGYFQKSLVLVSRLPFVRLFQALLSLIAPEYFDKLAPCLEAVCSEIDQWPAPAPGQTLNLPVMGVVVQVRIPSRVDKSESSPPKQFDQENLLPAPVVLASVHELDLFRCFRPVLTHMQTLWELMLLGEPLLVLAPSPDVSSEMVLALTSCLQPLRFCCDFRPYFTIHDSEFKEFTTRTQAPPNVVLGVTNPFFIKTLQHWPHILRVGEPKMSGDLPKQVKLKKPSRLKTLDTKPGLYTAYTAHLHRDKALLKRLLKGVQKKRPSDVQSALLRRHLLELTQSFIIPLEHYMASLMPLQKSITPWKTPPQIQPFSQDDFLRSLEHAGPQLTCILKGDWLGLYRRFFKSPHFDGWYRQRHKEMALKLEALHLEAICEANIETWMKDKSEVEVVDLVLKLREKLVRAQGHQLPVKEATLQRAQLYIETVIGSLPKDLQAVLCPP

SEQ ID NO: 26449 - protein, 711 aa, Homo sapiens
MLDGPLFSEGPDSPRELQDEESGSCLWVQKSKLLVIEVKTISCHYSRRAPSRQPMDFQASHWARGFQNRTCGPRPGSPQPPPRRPWASRVLQEATNWRAGPLAEVRAREQEKRKAASQEREAKETERKRRKAGGARRSPPGRPRPEPRNAPRVAQLAGLPAPLRPERLAPVGRAPRPSAQPQSDPGSAWAGPWGGRRPGPPSYEAHLLLRGSAGTAPRRRWDRPPPYVAPPSYEGPHRTLGTKRGPGNSQVPTSSAPAATPARTDGGRTKKRLDPRIYRDVLGAWGLRQGQGLLGGSPGCGAARARPEPGKGVVEKSLGLAAADLNSGSDSHPQAKATGSAGTEIAPAGSATAAPCAPHPAPRSRHHLKGSREGKEGEQIWFPKCWIPSPKKQPPRHSQTLPRPWAPGGTGWRESLGLGEGAGPETLEGWKATRRAHTLPRSSQGLSRGEGVFVIDATCVVIRSQYVPTPRTQQVQLLPSGVTRVVGDSPSQSKPGKEEGEGATVFPSPCQKRLSSSRLLHQPGGGRGGEAEGGRPGDSTLEERTFRILGLPAPEVNLRDAPTQPGSPEHQALGPAASGAQGRAEGSEVAVVQRRAGRGWARTPGPYAGALREAVSRIRRHTAPDSDTDEAEELSVHSGSSDGSDTEAPGASWRNERTLPEVGNSSPEEDGKTAELSDSVGEILDVISQTEEVLFGVRDIRGTQQGNRKRQ

SEQ ID NO: 26450 - protein, 116 aa, Homo sapiens
MAPPSVPLVLLLVLLLSLAETPASAPAHRGRGGWTLNSAGYLLGPVLHLPQMGDQDGKRETALEILDLWKAIDGLPYSHPPQPSKRNVMETFAKPEIGDLGMLSMKIPKEEDVLKS

SEQ ID NO: 26451 - protein, 49 aa, Homo sapiens
MAPPSVPLVLLLVLLLSLAETPASAPAHRSSTFPKWVTKTERGRQPLRS

SEQ ID NO: 26452 - protein, 357 aa, Homo sapiens
MAAAAKPNNLSLVVHGPGDLRLENYPIPEPGPNEVLLRMHSVGICGSDVHYWEYGRIGNFIVKKPMVLGHEASGTVEKVGSSVKHLKPGDRVAIEPGAPRENDEFCKMGRYNLSPSIFFCATPPDDGNLCRFYKHNAAFCYKLPDNVTFEEGALIEPLSVGIHACRRGGVTLGHKVLVCGAGPIGMVTLLVAKAMGAAQVVVTDLSATRLSKAKEIGADLVLQISKESPQEIARKVEGQLGCKPEVTIECTGAEASIQAGIYATRSGGNLVLVGLGSEMTTVPLLHAAIREVDIKGVFRYCNTWPVAISMLASKSVNVKPLVTHRFPLEKALEAFETFKKGLGLKIMLKCDPSDQNP

SEQ ID NO: 26453 - protein, 100 aa, Homo sapiens
MAAAAKPNNLSLVVHGPGDLRLENYPIPEPGPNEVLLRMHSVGICGSDVHYWEYGRIGNFIVKKPMVLGHEASGTVEKVGSSVKHLKPGFLTMSPLRKAP

SEQ ID NO: 26454 - protein, 1649 aa, Homo sapiens
MAGGRGAPGRGRDEPPESYPQRQDHELQALEAIYGADFQDLRPDACGPVKEPPEINLVLYPQGLTGEEVYVKVDLRVKCPPTYPDVVPEIELKNAKGLSNESVNLLKSRLEELAKKHCGEVMIFELAYHVQSFLSEHNKPPPKSFHEEMLERRAQEEQQRLLEAKRKEEQEQREILHEIQRRKEEIKEEKKRKEMAKQERLEIASLSNQDHTSKKDPGGHRTAAILHGGSPDFVGNGKHRANSSGRSRRERQYSVCNSEDSPGSCEILYFNMGSPDQLMVHKGKCIGSDEQLGKLVYNALETATGGFVLLYEWVLQWQKKMGPFLTSQEKEKIDKCKKQIQGTETEFNSLVKLSHPNVVRYLAMNLKEQDDSIVVDILVEHISGVSLAAHLSHSGPIPVHQLRRYTAQLLSGLDYLHSNSVVHKVLSASNVLVDAEGTVKITDYSISKRLADICKEDVFEQTRVRFSDNALPYKTGKKGDVWRLGLLLLSLSQGQECGEYPVTIPSDLPADFQDFLKKCVCLDDKERWSPQQLLKHSFINPQPKMPLVEQSPEDSEGQDYVETVIPSNRLPSAAFFSETQRQFSRYFIEFEELQLLGKGAFGAVIKVQNKLDGCCYAVKRIPINPASRQFRRIKGEVTLLSRLHHENIVRYYNAWIERHERPAGPGTPPPDSGPLAKDDRAARGQPASDTDGLDSVEAAAPPPILSSSVEWSTSGERSASARFPATGPGSSDDEDDDEDEHGGVFSQSFLPASDSESDIIFDNEDENSKSQNQDEDCNEKNGCHESEPSVTTEAVHYLYIQMEYCEKSTLRDTIDQGLYRDTVRLWRLFREILDGLAYIHEKGMIHRDLKPVNIFLDSDDHVKIGDFGLATDHLAFSADSKQDDQTGDLIKSDPSGHLTGMVGTALYVSPEVQGSTKSAYNQKVDLFSLGIIFFEMSYHPMVTASERIFVLNQLRDPTSPKFPEDFDDGEHAKQKSVISWLLNHDPAKRPTATELLKSELLPPPQMEESELHEVLHHTLTNVDGKAYRTMMAQIFSQRISPAIDYTYDSDILKGNFSIRTAKMQQHVCETIIRIFKRHGAVQLCTPLLLPRNRQIYEHNEAALFMDHSGMLVMLPFDLRIPFARYVARNNILNLKRYCIERVFRPRKLDRFHPKELLECAFDIVTSTTNSFLPTAEIIYTIYEIIQEFPALQERNYSIYLNHTMLLKAILLHCGIPEDKLSQVYIILYDAVTEKLTRREVEAKFCNLSLSSNSLCRLYKFIEQKGDLQDLMPTINSLIKQKTGIAQLVKYGLKDLEEVVGLLKKLGIKLQVLINLGLVYKVQQHNGIIFQFVAFIKRRQRAVPEILAAGGRYDLLIPQFRGPQALGPVPTAIGVSIAIDKISAAVLNMEESVTISSCDLLVVSVGQMSMSRAINLTQKLWTAGITAEIMYDWSQSQEELQEYCRHHEITYVALVSDKEGSHVKVKSFEKERQTEKRVLETELVDHVLQKLRTKVTDERNGREASDNLAVQNLKGSFSNASGLFEIHGATVVPIVSVLAPEKLSASTRRRYETQVQTRLQTSLANLHQKSSEIEILAVDLPKETILQFLSLEWDADEQAFNTTVKQLLSRLPKQRYLKLVCDEIYNIKVEKKVSVLFLYSYRDDYYRILF

SEQ ID NO: 26455 - protein, 1621 aa, Homo sapiens
MAGGRGAPGRGRDEPPESYPQRQDHELQALEAIYGADFQDLRPDACGPVKEPPEINLVLYPQGLTGEEVYVKVDLRVKCPPTYPDVVPEIELKNAKGLSNESVNLLKSRLEELAKKHCGEVMIFELAYHVQSFLSEHNKPPPKSFHEEMLERRAQEEQQRLLEAKRKEEQEQREILHEIQRRKEEIKEEKKRKEMAKQERLEIASLSNQDHTSKKDPGGHRTAAILHGGSPDFVGNGKHRANSSGRSRRERQYSVCNSEDSPGSCEILYFNMGSPDQLMVHKGKCIGSDEQLGKLVYNALETATGGFVLLYEWVLQWQKKMGPFLTSQEKEKIDKCKKQIQGTETEFNSLVKLSHPNVVRYLAMNLKEQDDSIVVDILVEHISGVSLAAHLSHSGPIPVHQLRRYTAQLLSGLDYLHSNSVVHKVLSASNVLVDAEGTVKITDYSISKRLADICKEDVFEQTRVRFSDNALPYKTGKKGDVWRLGLLLLSLSQGQECGEYPVTIPSDLPADFQDFLKKCVCLDDKERWSPQQLLKHSFINPQPKMPLVEQSPEDSEGQDYVETVIPSNRLPSAAFFSETQRQFSRYFIEFEELQLLGKGAFGAVIKVQNKLDGCCYAVKRIPINPASRQFRRIKGEVTLLSRLHHENIVRYYNAWIERHERPAGPGTPPPDSGPLAKDDRAARGQPASDTDGLDSVEAAAPPPILSSSVEWSTSGERSASARFPATGPGSSDDEDDDEDEHGGVFSQSFLPASDSESDIIFDNEDENSKSQNQMEYCEKSTLRDTIDQGLYRDTVRLWRLFREILDGLAYIHEKGMIHRDLKPVNIFLDSDDHVKIGDFGLATDHLAFSADSKQDDQTGDLIKSDPSGHLTGMVGTALYVSPEVQGSTKSAYNQKVDLFSLGIIFFEMSYHPMVTASERIFVLNQLRDPTSPKFPEDFDDGEHAKQKSVISWLLNHDPAKRPTATELLKSELLPPPQMEESELHEVLHHTLTNVDGKAYRTMMAQIFSQRISPAIDYTYDSDILKGNFSIRTAKMQQHVCETIIRIFKRHGAVQLCTPLLLPRNRQIYEHNEAALFMDHSGMLVMLPFDLRIPFARYVARNNILNLKRYCIERVFRPRKLDRFHPKELLECAFDIVTSTTNSFLPTAEIIYTIYEIIQEFPALQERNYSIYLNHTMLLKAILLHCGIPEDKLSQVYIILYDAVTEKLTRREVEAKFCNLSLSSNSLCRLYKFIEQKGDLQDLMPTINSLIKQKTGIAQLVKYGLKDLEEVVGLLKKLGIKLQVLINLGLVYKVQQHNGIIFQFVAFIKRRQRAVPEILAAGGRYDLLIPQFRGPQALGPVPTAIGVSIAIDKISAAVLNMEESVTISSCDLLVVSVGQMSMSRAINLTQKLWTAGITAEIMYDWSQSQEELQEYCRHHEITYVALVSDKEGSHVKVKSFEKERQTEKRVLETELVDHVLQKLRTKVTDERNGREASDNLAVQNLKGSFSNASGLFEIHGATVVPIVSVLAPEKLSASTRRRYETQVQTRLQTSLANLHQKSSEIEILAVDLPKETILQFLSLEWDADEQAFNTTVKQLLSRLPKQRYLKLVCDEIYNIKVEKKVSVLFLYSYRDDYYRILF

SEQ ID NO: 26456 - protein, 616 aa, Homo sapiens
MAGGRGAPGRGRDEPPESYPQRQDHELQALEAIYGADFQDLRPDACGPVKEPPEINLVLYPQGLTGEEVYVKVDLRVKCPPTYPDVVPEIELKNAKGLSNESVNLLKSRLEELAKKHCGEVMIFELAYHVQSFLSEHNKPPPKSFHEEMLERRAQEEQQRLLEAKRKEEQEQREILHEIQRRKEEIKEEKKRKEMAKQERLEIASLSNQDHTSKKDPGGHRTAAILHGGSPDFVGNGKHRANSSGRSRRERQYSVCNSEDSPGSCEILYFNMGSPDQLMVHKGKCIGSDEQLGKLVYNALETATGGFVLLYEWVLQWQKKMGPFLTSQEKEKIDKCKKQIQGTETEFNSLVKLSHPNVVRYLAMNLKEQDDSIVVDILVEHISGVSLAAHLSHSGPIPVHQLRRYTAQLLSGLDYLHSNSVVHKVLSASNVLVDAEGTVKITDYSISKRLADICKEDVFEQTRVRFSDNALPYKTGKKGDVWRLGLLLLSLSQGQECGEYPVTIPSDLPADFQDFLKKCVCLDDKERWSPQQLLKHSFINPQPKMPLVEQSPEDSEGQDYVETVIPSNRLPSAAFFSETQRQFSRYFIEFEELQLLGKGAFGAVIKVWYRVIPSPL

SEQ ID NO: 26457 - protein, 345 aa, Homo sapiens
MNLEGTSGGILQKEFWRNRIQYNQSQKDILQSWFQHDPFPDKAAREQLAKEIGVPESNIQVWFKNYRVKQRKLDYKCFSEKDQTQGHDQSQHLTQEYLPKEARQKQTFITWTQKNRLVQAFERNPFPDIATRKKLAEQTGLQESRIQMWFQKQRSLYLKKSRMEPMNLLVDDPNERPDATVGWHPINLFLPTDSSHYFSCSHSSSGHETLPPVLPSTQAPWDPFRFHVSQGPNVMIMQPTQAVQEGEKSDQPLIIPNHLLTLPILTKDLDTPTPFWLQYQEEHQNHKEHSGSGVPQVKSHSQPEPEHREQQPLNLGQFDISNILQRWDEICQALLAEWDPLKGTH

SEQ ID NO: 26458 - protein, 574 aa, Homo sapiens
MASTEGANNMPKQVEVRMHDSHLGSEEPKHRHLGLRLCDKLGKNLLLTLTVFGVILGAVCGGLLRLASPIHPDVVMLIAFPGDILMRMLKMLILPLIISSLITGLSGLDAKASGRLGTRAMVYYMSTTIIAAVLGVILVLAIHPGNPKLKKQLGPGKKNDEVSSLDAFLDLIRNLFPENLVQACFQQIQTVTKKVLVAPPPDEEANATSAVVSLLNETVTEVPEETKMVIKKGLEFKDGMNVLGLIGFFIAFGIAMGKMGDQAKLMVDFFNILNEIVMKLVIMIMWYSPLGIACLICGKIIAIKDLEVVARQLGMYMVTVIIGLIIHGGIFLPLIYFVVTRKNPFSFFAGIFQAWITALGTASSAGTLPVTFRCLEENLGIDKRVTRFVLPVGATINMDGTALYEAVAAIFIAQMNGVVLDGGQIVTVSLTATLASVGAASIPSAGLVTMLLILTAVGLPTEDISLLVAVDWLLDRMRTSVNVVGDSFGAGIVYHLSKSELDTIDSQHRVHEDIEMTKTQSIYDDMKNHRESNSNQCVYAAHNSVIVDECKVTLAANGKSADCSVEEEPWKREK

SEQ ID NO: 26459 - protein, 565 aa, Homo sapiens
MPKQVEVRMHDSHLGSEEPKHRHLGLRLCDKLGKNLLLTLTVFGVILGAVCGGLLRLASPIHPDVVMLIAFPGDILMRMLKMLILPLIISSLITGLSGLDAKASGRLGTRAMVYYMSTTIIAAVLGVILVLAIHPGNPKLKKQLGPGKKNDEVSSLDAFLDLIRNLFPENLVQACFQQIQTVTKKVLVAPPPDEEANATSAVVSLLNETVTEVPEETKMVIKKGLEFKDGMNVLGLIGFFIAFGIAMGKMGDQAKLMVDFFNILNEIVMKLVIMIMWYSPLGIACLICGKIIAIKDLEVVARQLGMYMVTVIIGLIIHGGIFLPLIYFVVTRKNPFSFFAGIFQAWITALGTASSAGTLPVTFRCLEENLGIDKRVTRFVLPVGATINMDGTALYEAVAAIFIAQMNGVVLDGGQIVTVSLTATLASVGAASIPSAGLVTMLLILTAVGLPTEDISLLVAVDWLLDRMRTSVNVVGDSFGAGIVYHLSKSELDTIDSQHRVHEDIEMTKTQSIYDDMKNHRESNSNQCVYAAHNSVIVDECKVTLAANGKSADCSVEEEPWKREK

SEQ ID NO: 26460 - protein, 563 aa, Homo sapiens
MASTEGANNMPKQVEVRMHDSHLGSEEPKHRHLGLRLCDKLGKNLLLTLTVFGVILGAVCGGLLRLASPIHPDVVMLIAFPGDILMRMLKMLILPLIISSLITGLSGLDAKASGRLGTRAMVYYMSTTIIAAVLGVILVLAIHPGNPKLKKQLGPGKKNDEVSSLDAFLDLIRNLFPENLVQACFQQIQTVTKKVLVAPPPDEEANATSAVVSLLNETVTEVPEETKMVIKKGLEFKDGMNVLGLIGFFIAFGIAMGKMGDQAKLMVDFFNILNEIVMKLVIMIMWYSPLGIACLICGKIIAIKDLEVVARQLGMYMVTVIIGLIIHGGIFLPLIYFVVTRKNPFSFFAGIFQAWITALGTASSAGTLPVTFRCLEENLGIDKRVTRFVLPVGATINMDGTALYEAVAAIFIAQMNGVVLDGGQIVTVSLTATLASVGAASIPSAGLVTMLLILTAVGLPTEDISLLVAVDWLLDRMRTSVNVVGDSFGAGIVYHLSKSELDTIDSQHRVHEDIEMTKTQSIYDDMKNHRESNSNQCVYAAHNSVIVDECKVHFPFMDIETCI

SEQ ID NO: 26461 - protein, 560 aa, Homo sapiens
MVPHAILARGRDVCRRNGLLILSVLSVIVGCLLGFFLRTRRLSPQEISYFQFPGELLMRMLKMMILPLVVSSLMSGLASLDAKTSSRLGVLTVAYYLWTTFMAVIVGIFMVSIIHPGSAAQKETTEQSGKPIMSSADALLDLIRNMFPANLVEATFKQYRTKTTPVVKSPKVAPEEAPPRRILIYGVQEENGSHVQNFALDLTPPPEVVYKSEPGTSDGMNVLGIVFFSATMGIMLGRMGDSGAPLVSFCQCLNESVMKIVAVAVWYFPFGIVFLIAGKILEMDDPRAVGKKLGFYSVTVVCGLVLHGLFILPLLYFFITKKNPIVFIRGILQALLIALATSSSSATLPITFKCLLENNHIDRRIARFVLPVGATINMDGTALYEAVAAIFIAQVNNYELDFGQIITISITATAASIGAAGIPQAGLVTMVIVLTSVGLPTDDITLIIAVDWALDRFRTMINVLGDALAAGIMAHICRKDFARDTGTEKLLPCETKPVSLQEIVAAQQNGCVKSVAEASELTLGPTCPHHVPVQVEQDEELPAASLNHCTIQISELETNV

SEQ ID NO: 26462 - protein, 158 aa, Homo sapiens
MVPHAILARGRDVCRRNGLLILSVLSVIVGCLLGFFLRTRRLSPQEISYFQFPGELLMRMLKMMILPLVVSSLMSGLASLDAKTSSRLGVLTVAYYLWTTFMAVIVGIFMVSIIHPGSAAQKETTEQSGKPIMSSADALLDLIRQKEESWRNGPKGPG

SEQ ID NO: 26463 - protein, 118 aa, Homo sapiens
MSLIILTRDDEPRIFTPDSDAASPALHSTSPLPDPASASPLHREEKILPKVCNIVSCLSFSLPASPTDSGLASPTIITREGQQFWAKCLIWKYQLYLHGLHKKSDGRRDKQISASPST

SEQ ID NO: 26464 - protein, 400 aa, Homo sapiens
MASLSQLSSHLNYTCGAENSTGASQARPHAYYALSYCALILAIVFGNGLVCMAVLKERALQTTTNYLVVSLAVADLLVATLVMPWVVYLEVTGGVWNFSRICCDVFVTLDVMMCTASILNLCAISIDRYTAVVMPVHYQHGTGQSSCRRVALMITAVWVLAFAVSCPLLFGFNTTGDPTVCSISNPDFVIYSSVVSFYLPFGVTVLVYARIYVVLKQRRRKRILTRQNSQCNSVRPGFPQQTLSPDPAHLELKRYYSICQDTALGGPGFQERGGELKREEKTRNSLSPTIAPKLSLEVRKLSNGRLSTSLKLGPLQPRGVPLREKKATQMVAIVLGAFIVCWLPFFLTHVLNTHCQTCHVSPELYSATTWLGYVNSALNPVIYTTFNIEFRKAFLKILSC

SEQ ID NO: 26465 - protein, 367 aa, Homo sapiens
MASLSQLSSHLNYTCGAENSTGASQARPHAYYALSYCALILAIVFGNGLVCMAVLKERALQTTTNYLVVSLAVADLLVATLVMPWVVYLEVTGGVWNFSRICCDVFVTLDVMMCTASILNLCAISIDRYTAVVMPVHYQHGTGQSSCRRVALMITAVWVLAFAVSCPLLFGFNTTGDPTVCSISNPDFVIYSSVVSFYLPFGVTVLVYARIYVVLKQRRRKRILTRQNSQCNSVRPGFPQQTLSPDPAHLELKRYYSICQDTALGGPGFQERGGELKREEKTRNSLMPLREKKATQMVAIVLGAFIVCWLPFFLTHVLNTHCQTCHVSPELYSATTWLGYVNSALNPVIYTTFNIEFRKAFLKILSC

SEQ ID NO: 26466 - protein, 198 aa, Homo sapiens
MEKRGRGVKSSPIQTPNQTPQQAPVTPRKERRPSMFEKEAYTQILRERLRESIHNVQYVEPPFDDSIADIGKEWKSALAKLKFANSYRMEPLKKFQAHSVETKVQQILTESLKDVKYDDKVFSHLSLELADRILLAVKEFGYHRYKFIIKVLFIQKTGQAINIASRWIWDIAWDSWVAAKHEAESYVALVLVFALYYE

SEQ ID NO: 26467 - protein, 622 aa, Homo sapiens
MAMAPSPSLVQVYTSPAAVAVWEWQDGLGTWHPYSATVCSFIEQQFVQQKGQRFGLGSLAHSIPLGQADPSLAPYIIDLPSWTQFRQDTGTMRAVRRHLFPQHSAPGRGVVWEWLSDDGSWTAYEASVCDYLEQQVARGNQLVDLAPLGYNYTVNYTTHTQTNKTSSFCRSVRRQAGPPYPVTTIIAPPGHTGVACSCHQCLSGSRTGPVSGRYRHSMTNLPAYPVPQHPPHRTASVFGTHQAFAPYNKPSLSGARSAPRLNTTNAWGAAPPSLGSQPLYRSSLSHLGPQHLPPGSSTSGAVSASLPSGPSSSPGSVPATVPMQMPKPSRVQQALAGMTSVLMSAIGLPVCLSRAPQPTSPPASRLASKSHGSVKRLRKMSVKGATPKPEPEPEQVIKNYTEELKVPPDEDCIICMEKLSTASGYSDVTDSKAIGSLAVGHLTKCSHAFHLLCLLAMYCNGNKDGSLQCPSCKTIYGEKTGTQPQGKMEVLRFQMSLPGHEDCGTILIVYSIPHGIQGPEHPNPGKPFTARGFPRQCYLPDNAQGRKVLELLKVAWKRRLIFTVGTSSTTGETDTVVWNEIHHKTEMDRNITGHGYPDPNYLQNVLAELAAQGVTEDCLEQQ

SEQ ID NO: 26468 - protein, 575 aa, Homo sapiens
MAMAPSPSLVQVYTSPAAVAVWEWQDGLGTWHPYSATVCSFIEQQFVQQKGQRFGLGSLAHSIPLGQADPSLAPYIIDLPSWTQFRQDTGTMRAVRRHLFPQHSAPGRGVVWEWLSDDGSWTAYEASVCDYLEQQVARGNQLVDLAPLGYNYTVNYTTHTQTNKTSSFCRSVRRQAGPPYPVTTIIAPPGHTGVACSCHQCLSGSRTGPVSGRYRHSMTNLPAYPVPQHPPHRTASVFGTHQAFAPYNKPSLSGARSAPRLNTTNAWGAAPPSLGSQPLYRSSLSHLGPQHLPPGSSTSGAVSASLPSGPSSSPGSVPATVPMQMPKPSRVQQALAGATPKPEPEPEQVIKNYTEELKVPPDEDCIICMEKLSTASGYSDVTDSKAIGSLAVGHLTKCSHAFHLLCLLAMYCNGNKDGSLQCPSCKTIYGEKTGTQPQGKMEVLRFQMSLPGHEDCGTILIVYSIPHGIQGPEHPNPGKPFTARGFPRQCYLPDNAQGRKVLELLKVAWKRRLIFTVGTSSTTGETDTVVWNEIHHKTEMDRNITGHGYPDPNYLQNVLAELAAQGVTEDCLEQQ

SEQ ID NO: 26469 - protein, 172 aa, Homo sapiens
MEPWAMRALDFADESGSVSCKDMHLLLWLQKRIEMHKAEQCEEEEAMTPRPTKARAPLPSAYVPPLSLPPCPRERLKGMLKEIKPRLSRNCREDPQGCLLNLLLQSHSRSPERPLQRRERRYLQRRREKLMLARRGITLQKMEMPKQTRHRKLKVLEMPSEVCAFLITVYFW

SEQ ID NO: 26470 - protein, 163 aa, Homo sapiens
MKEDESGSVSCKDMHLLLWLQKRIEMHKAEQCEEEEAMTPRPTKARAPLPSAYVPPLSLPPCPRERLKGMLKEIKPRLSRNCREDPQGCLLNLLLQSHSRSPERPLQRRERRYLQRRREKLMLARRGITLQKMEMPKQTRHRKLKVLEMPSEVCAFLITVYFW

SEQ ID NO: 26471 - protein, 150 aa, Homo sapiens
MHLLLWLQKRIEMHKAEQCEEEEAMTPRPTKARAPLPSAYVPPLSLPPCPRERLKGMLKEIKPRLSRNCREDPQGCLLNLLLQSHSRSPERPLQRRERRYLQRRREKLMLARRGITLQKMEMPKQTRHRKLKVLEMPSEVCAFLITVYFW

SEQ ID NO: 26472 - protein, 203 aa, Homo sapiens
MAVTGWLESLRTAQKTALLQDGRRKVHYLFPDGKEMAEEYDEKTSELLVRKWRVKSALGAMGQWQLEVGDPAPLGAGNLGPELIKESNANPIFMRKDTKMSFQWRIRNLPYPKDVYSVSVDQKERCIIVRTTNKKYYKKFSIPDLDRHQLPLDDALLSFAHANCTLIISYQKPKEVVVAESELQKELKKVKTAHSNDGDCKTQ

SEQ ID NO: 26473 - protein, 1013 aa, Homo sapiens
MAEPGHSHHLSARVRGRTERRIPRLWRLLLWAGTAFQVTQGTGPELHACKESEYHYEYTACDSTGSRWRVAVPHTPGLCTSLPDPIKGTECSFSCNAGEFLDMKDQSCKPCAEGRYSLGTGIRFDEWDELPHGFASLSANMELDDSAAESTGNCTSSKWVPRGDYIASNTDECTATLMYAVNLKQSGTVNFEYYYPDSSIIFEFFVQNDQCQPNADDSRWMKTTEKGWEFHSVELNRGNNVLYWRTTAFSVWTKVPKPVLVRNIAITGVAYTSECFPCKPGTYADKQGSSFCKLCPANSYSNKGETSCHQCDPDKYSEKGSSSCNVRPACTDKDYFYTHTACDANGETQLMYKWAKPKICSEDLEGAVKLPASGVKTHCPPCNPGFFKTNNSTCQPCPYGSYSNGSDCTRCPAGTEPAVGFEYKWWNTLPTNMETTVLSGINFEYKGMTGWEVAGDHIYTAAGASDNDFMILTLVVPGFRPPQSVMADTENKEVARITFVFETLCSVNCELYFMVGVNSRTNTPVETWKGSKGKQSYTYIIEENTTTSFTWAFQRTTFHEASRKYTNDVAKIYSINVTNVMNGVASYCRPCALEASDVGSSCTSCPAGYYIDRDSGTCHSCPTNTILKAHQPYGVQACVPCGPGTKNNKIHSLCYNDCTFSRNTPTRTFNYNFSALANTVTLAGGPSFTSKGLKYFHHFTLSLCGNQGRKMSVCTDNVTDLRIPEGESGFSKSITAYVCQAVIIPPEVTGYKAGVSSQPVSLADRLIGVTTDMTLDGITSPAELFHLESLGIPDVIFFYRSNDVTQSCSSGRSTTIRVRCSPQKTVPGSLLLPGTCSDGTCDGCNFHFLWESAAACPLCSVADYHAIVSSCVAGIQKTTYVWREPKLCSGGISLPEQRVTICKTIDFWLKVGISAGTCTAILLTVLTCYFWKKNQKLEYKYSKLVMNATLKDCDLPAADSCAIMEGEDVEDDLIFTSKKSLFGKIKSFTSKRTPDGFDSVPLKTSSGGLDMDL

SEQ ID NO: 26474 - protein, 995 aa, Homo sapiens
MAEPGHSHHLSARVRGRTERRIPRLWRLLLWAGTAFQVTQGTGPELHACKESEYHYEYTACDSTGSRWRVAVPHTPGLCTSLPDPIKGTECSFSCNAGEFLDMKDQSCKPCAEGRYSLGTGIRFDEWDELPHGFASLSANMELDDSAAESTGNCTSSKWVPRGDYIASNTDECTATLMYAVNLKQSGTVNFEYYYPDSSIIFEFFVQNDQCQPNADDSRWMKTTEKGWEFHSVELNRGNNVLYWRTTAFSVWTKVPKPVLVRNIAITGVAYTSECFPCKPGTYADKQGSSFCKLCPANSYSNKGETSCHQCDPDKYSEKGSSSCNVRPACTDKDYFYTHTACDANGETQLMYKWAKPKICSEDLEGAVKLPASGVKTHCPPCNPGFFKTNNSTCQPCPYGSYSNGSDCTRCPAGTEPAVGFEYKWWNTLPTNMETTVLSGINFEYKGMTGWEVAGDHIYTAAGASDNDFMILTLVVPGFRPPQSVMADTENKEVARITFVFETLCSVNCELYFMVGVNSRTNTPVETWKGSKGKQSYTYIIEENTTTSFTWAFQRTTFHEASRKYTNDVAKIYSINVTNVMNGVASYCRPCALEASDVGSSCTSCPAGYYIDRDSGTCHSCPTNTILKAHQPYGVQACVPCGPGTKNNKIHSLCYNDCTFSRNTPTRTFNYNFSALANTVTLAGGPSFTSKGLKYFHHFTLSLCGNQGRKMSVCTDNVTDLRIPEGESGFSKSITAYVCQAVIIPPEVTGYKAGVSSQPVSLADRLIGVTTDMTLDGITSPAELFHLESLGIPDVIFFYRSNDVTQSCSSGRSTTIRVRCSPQKTVPGSLLLPGTCSDGTCDGCNFHFLWESAAACPLCSVADYHAIVSSCVAGIQKTTYVWREPKLCSGGISLPEQRVTICKTIDFWLKVGISAGTCTAILLTVLTCYFWKKNQKLEYKYSKLVMNATLKDCDLPAADSCAIMEGEDVEDDLIFTSKKSLFGKIKSFTSKFKDS

SEQ ID NO: 26475 - protein, 926 aa, Homo sapiens
MAEPGHSHHLSARVRGRTERRIPRLWRLLLWAGTAFQVTQGTGPELHACKESEYHYEYTACDSTGSRWRVAVPHTPGLCTSLPDPIKGTECSFSCNAGEFLDMKDQSCKPCAEGRYSLGTGIRFDEWDELPHGFASLSANMELDDSAAESTGNCTSSKWVPRGDYIASNTDECTATLMYAVNLKQSGTVNFEYYYPDSSIIFEFFVQNDQCQPNADDSRWMKTTEKGWEFHSVELNRGNNVLYWRTTAFSVWTKVPKPVLTQLMYKWAKPKICSEDLEGAVKLPASGVKTHCPPCNPGFFKTNNSTCQPCPYGSYSNGSDCTRCPAGTEPAVGFEYKWWNTLPTNMETTVLSGINFEYKGMTGWEVAGDHIYTAAGASDNDFMILTLVVPGFRPPQSVMADTENKEVARITFVFETLCSVNCELYFMVGVNSRTNTPVETWKGSKGKQSYTYIIEENTTTSFTWAFQRTTFHEASRKYTNDVAKIYSINVTNVMNGVASYCRPCALEASDVGSSCTSCPAGYYIDRDSGTCHSCPTNTILKAHQPYGVQACVPCGPGTKNNKIHSLCYNDCTFSRNTPTRTFNYNFSALANTVTLAGGPSFTSKGLKYFHHFTLSLCGNQGRKMSVCTDNVTDLRIPEGESGFSKSITAYVCQAVIIPPEVTGYKAGVSSQPVSLADRLIGVTTDMTLDGITSPAELFHLESLGIPDVIFFYRSNDVTQSCSSGRSTTIRVRCSPQKTVPGSLLLPGTCSDGTCDGCNFHFLWESAAACPLCSVADYHAIVSSCVAGIQKTTYVWREPKLCSGGISLPEQRVTICKTIDFWLKVGISAGTCTAILLTVLTCYFWKKNQKLEYKYSKLVMNATLKDCDLPAADSCAIMEGEDVEDDLIFTSKKSLFGKIKSFTSKRTPDGFDSVPLKTSSGGLDMDL

SEQ ID NO: 26476 - protein, 1004 aa, Homo sapiens
MAEPGHSHHLSARVRGRTERRIPRLWRLLLWAGTAFQVTQGTGPELHACKESEYHYEYTACDSTGSRWRVAVPHTPGLCTSLPDPIKGTECSFSCNAGEFLDMKDQSCKPCAEGRYSLGTGIRFDEWDELPHGFASLSANMELDDSAAESTGNCTSSKWVPRGDYIASNTDECTATLMYAVNLKQSGTVNFEYYYPDSSIIFEFFVQNDQCQPNADDSRWMKTTEKGWEFHSVELNRGNNVLYWRTTAFSVWTKVPKPVLVRNIAITGVAYTSECFPCKPGTYADKQGSSFCKLCPANSYSNKGETSCHQCDPDKYSEKGSSSCNVRPACTDKDYFYTHTACDANGETQLMYKWAKPKICSEDLEGAVKLPASGVKTHCPPCNPGFFKTNNSTCQPCPYGSYSNGSDCTRCPAGTEPAVGFEYKWWNTLPTNMETTVLSGINFEYKGMTGWEVAGDHIYTAAGASDNDFMILTLVVPGFRPPQSVMADTENKEVARITFVFETLCSVNCELYFMVGVNSRTNTPVETWKGSKGKQSYTYIIEENTTTSFTWAFQRTTFHEASRKYTNDVAKIYSINVTNVMNGVASYCRPCALEASDVGSSCTSCPAGYYIDRDSGTCHSCPTNTILKAHQPYGVQACVPCGPGTKNNKIHSLCYNDCTFSRNTPTRTFNYNFSALANTVTLAGGPSFTSKGLKYFHHFTLSLCGNQGRKMSVCTDNVTDLRIPEGESGFSKSITAYVCQAVIIPPEVTGYKAGVSSQPVSLADRLIGVTTDMTLDGITSPAELFHLESLGIPDVIFFYRSNDVTQSCSSGRSTTIRVRCSPQKTVPGSLLLPGTCSDGTCDGCNFHFLWESAAACPLCSVADYHAIVSSCVAGIQKTTYVWREPKLCSGGISLPEQRVTICKTIDFWLKVGISAGTCTAILLTVLTCYFWKKNQKLEYKYSKLVMNATLKDCDLPAADSCAIMEGEDVEDDLIFTSKKSLFGKIKSFTSKQPAPVTISLSEDS

SEQ ID NO: 26477 - protein, 387 aa, Homo sapiens
MAPADSGPHRDPPTRTAPLPMPEGPEPAVPGEQPGRGHAHAAQGGPLLGQGCQGQPQGEAVGSHSKGHKSSRGASAQKSPPVQESQSERLQAAGADSAGPKTVPSHVFSELWDPSEAWMQANYDLLSAFEAMTSQANPEALSAPTLQEEAAFPGRRVNAKMPVYSGSRPACQLQVPTLRQQCLRVPRNNPDALGDVEGVPYSVLEPVLEGWTPDQPYRTEKDNAALARETDELWRIHCLQDFKEEKPQEHESWRELYLRLRDAREQRLRVVTTKIRSARENKPSGRQTKMICFNSVAKTPYDASRRQEKSAGAADPGNGEMEPAPKPAGSSQAPSGLGDGDGGSVSGGGSSNRHAAPADKTRKQAAKKVAPLMAKAIRDYKGRFSRR

SEQ ID NO: 26478 - protein, 208 aa, Homo sapiens
MGEVEISALAYVKMCLHAARYPHAAVNGLFLAPAPRSGECLCLTDCVPLFHSHLALSVMLEVALNQVDVWGAQAGLVVAGYYHANAAVNDQSPGPLALKIAGRIAEFFPDAVLIMLDNQKLVPQPRVPPVIVLENQGLRWVPKDKNLVMWRDWEESRQMVGALLEDRAHQHLVDFDCHLDDIRQDWTNQRLNTQITQWVGPTNGNGNA

SEQ ID NO: 26479 - protein, 561 aa, Homo sapiens
MAIATSTQLARALYDNTAESPQELSFRRGDVLRVLQREGAGGLDGWCLCSLHGQQGIVPANRVKLLPAGPAPKPSLSPASPAQPGSPYPAPDHSNEDQEVYVVPPPARPCPTSGPPAGPCPPSPDLIYKIPRASGTQLAAPRDALEVYDVPPTALRVPSSGPYDCPASFSHPLTRVAPQPPGEDDAPYDVPLTPKPPAELEPDLEWEGGREPGPPIYAAPSNLKRASALLNLYEAPEELLADGEGGGTDEGIYDVPLLGPEAPPSPEPPGALASHDQDTLAQLLARSPPPPHRPRLPSAESLSRRPLPALPVPEAPSPSPVPSPAPGRKGSIQDRPLPPPPPRLPGYGGPKVEGDPEGREMEDDPAGHHNEYEGIPMAEEYDYVHLKGMDKAQGSRPPDQACTGDPELPERGMPAPQEALSPGEPLVVSTGDLQLLYFYAGQCQSHYSALQAAVAALMSSTQANQPPRLFVPHSKRVVVAAHRLVFVGDTLGRLAASAPLRAQVRAAGTALGQALRATVLAVKGAALGYPSSPAIQEMVQCVTELAGQALQFTTLLTSLAP

SEQ ID NO: 26480 - protein, 468 aa, Homo sapiens
MAIATSVYVVPPPARPCPTSGPPAGPCPPSPDLIYKIPRASGTQLAAPRDALEVYDVPPTALRVPSSGPYDCPASFSHPLTRVAPQPPGEDDAPYDVPLTPKPPAELEPDLEWEGGREPGPPIYAAPSNLKRASALLNLYEAPEELLADGEGGGTDEGIYDVPLLGPEAPPSPEPPGALASHDQDTLAQLLARSPPPPHRPRLPSAESLSRRPLPALPVPEAPSPSPVPSPAPGRKGSIQDRPLPPPPPRLPGYGGPKVEGDPEGREMEDDPAGHHNEYEGIPMAEEYDYVHLKGMDKAQGSRPPDQACTGDPELPERGMPAPQEALSPGEPLVVSTGDLQLLYFYAGQCQSHYSALQAAVAALMSSTQANQPPRLFVPHSKRVVVAAHRLVFVGDTLGRLAASAPLRAQVRAAGTALGQALRATVLAVKGAALGYPSSPAIQEMVQCVTELAGQALQFTTLLTSLAP

SEQ ID NO: 26481 - protein, 392 aa, Homo sapiens
MAIATSVYVVPPPARPCPTSGPPAGPCPPSPDLIYKIPRASGTQLAAPRDALEVYDVPPTALRVPSSGPYDCPASFSHPLTRVAPQPPGEDDAPPSPEPPGALASHDQDTLAQLLARSPPPPHRPRLPSAESLSRRPLPALPVPEAPSPSPVPSPAPGRKGSIQDRPLPPPPPRLPGYGGPKVEGDPEGREMEDDPAGHHNEYEGIPMAEEYDYVHLKGMDKAQGSRPPDQACTGDPELPERGMPAPQEALSPGEPLVVSTGDLQLLYFYAGQCQSHYSALQAAVAALMSSTQANQPPRLFVPHSKRVVVAAHRLVFVGDTLGRLAASAPLRAQVRAAGTALGQALRATVLAVKGAALGYPSSPAIQEMVQCVTELAGQALQFTTLLTSLAP

SEQ ID NO: 26482 - protein, 428 aa, Homo sapiens
MDPSVTLWQFLLQLLREQGNGHIISWTSRDGGEFKLVDAEEVARLWGLRKNKTNMNYDKLSRALRYYYDKNIIRKVSGQKFVYKFVSYPEVAGCSTEDCPPQPEVSVTSTMPNVAPAAIHAAPGDTVSGKPGTPKGAGMAGPGGLARSSRNEYMRSGLYSTFTIQSLQPQPPPHPRPAVVLPSAAPAGAAAPPSGSRSTSPSPLEACLEAEEAGLPLQVILTPPEAPNLKSEELNVEPGLGRALPPEVKVEGPKEELEVAGERGFVPETTKAEPEVPPQEGVPARLPAVVMDTAGQAGGHAASSPEISQPQKGRKPRDLELPLSPSLLGGPGPERTPGSGSGSGLQAPGPALTPSLLPTHTLTPVLLTPSSLPPSIHFWSTLSPIAPRSPAKLSFQFPSSGSAQVHIPSISVDGLSTPVVLSPGPQKP

SEQ ID NO: 26483 - protein, 95 aa, Homo sapiens
MDPSVTLWQFLLQLLREQGNGHIISWTSRDGGEFKLVDAEEVARLWGLRKNKTNMNYDKLSRALRYYYDKNIIRKVSGQKFVYKFVSYPESHCAP

SEQ ID NO: 26484 - protein, 591 aa, Homo sapiens
MSEQSICQARAAVMVYDDANKKWVPAGGSTGFSRVHIYHHTGNNTFRVVGRKIQDHQVVINCAIPKGLKYNQATQTFHQWRDARQVYGLNFGSKEDANVFASAMMHALEVLNSQETGPTLPRQNSQLPAQVQNGPSQEELEIQRRQLQEQQRQKELERERLERERMERERLERERLERERLERERLEQEQLERERQERERQERLERQERLERQERLERQERLDRERQERQERERLERLERERQERERQEQLEREQLEWERERRISSAAAPASVETPLNSVLGDSSASEPGLQAASQPAETPSQQGIVLGPLAPPPPPPLPPGPAQASVALPPPPGPPPPPPLPSTGPPPPPPPPPLPNQVPPPPPPPPAPPLPASGFFLASMSEDNRPLTGLAAAIAGAKLRKVSRMEDTSFPSGGNAIGVNSASSKTDTGRGNGPLPLGGSGLMEEMSALLARRRRIAEKGSTIETEQKEDKGEDSEPVTSKASSTSTPEPTRKPWERTNTMNGSKSPVISRRDSPRKNQIVFDNRSYDSLHRPKSTPLSQPSANGVQTEGLDYDRLKQDILDEMRKELTKLKEELIDAIRQELSKSNTA

SEQ ID NO: 26485 - protein, 570 aa, Homo sapiens
MSEQSICQARAAVMVYDDANKKWVPAGGSTGFSRVHIYHHTGNNTFRVVGRKIQDHQVVINCAIPKGLKYNQATQTFHQWRDARQVYGLNFGSKEDANVFASAMMHALEVLNSQETGPTLPRQNSQLPAQVQNGPSQEELEIQRRQLQEQQRQKELERERLERERMERERLERERLERERLERERLEQEQLERERQERERQERLERQERLERQERLERQERLDRERQERQERERLERLERERQERERQEQLEREQLEWERERRISSAAAPASVETPLNSVLGDSSASEPGLQAASQPAETPSQQGIVLGPLAPPPPPPLPPGPAQASVALPPPPGPPPPPPLPSTGPPPPPPPPPLPNQVPPPPPPPPAPPLPASGFFLASMSEDNRPLTGLAAAIAGAKLRKVSRMEDTSFPSGGNAIGVNSASSKTDTGRGNGPLPLGGSGLMEEMSALLARRRRIAEKGSTIETEQKEDKGEDSEPVTSKASSTSTPEPTRKPWERTNTMNGSKSPVISRPKSTPLSQPSANGVQTEGLDYDRLKQDILDEMRKELTKLKEELIDAIRQELSKSNTA

SEQ ID NO: 26486 - protein, 533 aa, Homo sapiens
MSEQSICQARAAVMVYDDANKKWVPAGGSTGFSRVHIYHHTGNNTFRVVGRKIQDHQVVINCAIPKGLKYNQATQTFHQWRDARQVYGLNFGSKEDANVFASAMMHALEVLNSQETGPTLPRQNSQLPAQVQNGPSQEELEIQRRQLQEQQRQKELERERLERERMERERLERERLERERLERERLEQEQLERERQERERQERLERQERLERQERLERQERLDRERQERQERERLERLERERQERERQEQLEREQLEWERERRISSAGIVLGPLAPPPPPPLPPGPAQASVALPPPPGPPPPPPLPSTGPPPPPPPPPLPNQVPPPPPPPPAPPLPASGFFLASMSEDNRPLTGLAAAIAGAKLRKVSRMEDTSFPSGGNAIGVNSASSKTDTGRGNGPLPLGGSGLMEEMSALLARRRRIAEKGSTIETEQKEDKGEDSEPVTSKASSTSTPEPTRKPWERTNTMNGSKSPVISRPKSTPLSQPSANGVQTEGLDYDRLKQDILDEMRKELTKLKEELIDAIRQELSKSNTA

SEQ ID NO: 26487 - protein, 452 aa, Homo sapiens
MAAATLLRATPHFSGLAAGRTFLLQGLLRLLKAPALPLLCRGLAVEAKKTYVRDKPHVNVGTIGHVDHGKTTLTAAITKILAEGGGAKFKKYEEIDNAPEERARGITINAAHVEYSTAARHYAHTDCPGHADYVKNMITGTAPLDGCILVVAANDGPMPQTREHLLLARQIGVEHVVVYVNKADAVQDSEMVELVELEIRELLTEFGYKGEETPVIVGSALCALEGRDPELGLKSVQKLLDAVDTYIPVPARDLEKPFLLPVEAVYSVPGRGTVVTGTLERGILKKGDECELLGHSKNIRTVVTGIEMFHKSLERAEAGDNLGALVRGLKREDLRRGLVMVKPGSIKPHQKVEAQVYILSKEEGGRHKPFVSHFMPVMFSLTWDMACRIILPPEKELAMPGEDLKFNLILRQPMILEKGQRFTLRDGNRTIGTGLVTNTLAMTEEEKNIKWG

SEQ ID NO: 26488 - protein, 255 aa, Homo sapiens
MASPGAGRAPPELPERNCGYREVEYWDQRYQGAADSAPYDWFGDFSSFRALLEPELRPEDRILVLGCGNSALSYELFLGGFPNVTSVDYSSVVVAAMQARHAHVPQLRWETMDVRKLDFPSASFDVVLEKGTLDALLAGERDPWTVSSEGVHTVDQVLSEVSRVLVPGGRFISMTSAAPHFRTRHYAQAYYGWSLRHATYGSGFHFHLYLMHKGGKLSVAQLALGAQILSPPRPPTSPCFLQDSDHEDFLSAIQL

SEQ ID NO: 26489 - protein, 245 aa, Homo sapiens
MVTPVTWMDNPIEVYVNDSVWVPGPTDDRCPAKPEEEGMMINISIVYRYPPICLGRAPGCLMPAVQNWLVEVPTVSPNSRFTYHMVSGMSLRPRVNYLQDFSYQRSLKFRPKGKPCPKEIPKESKNTEVLVWEECVANSAVILQNNEFGTIIDWAPRGQFYHNCSGQTQSCPSAQVSPAVDSDLTESLDKHKHKKLQSFYPWEWGEKGISTPRPEIISPVSGPEHPELWRLWPDTTLEFGLEIKL

SEQ ID NO: 26490 - protein, 205 aa, Homo sapiens
MEFLWAPLLGLCCSLAAADRHTVFWNSSNPKFRNEDYTIHVQLNDYVDIICPHYEDHSVADAAMEQYILYLVEHEEYQLCQPQSKDQVRWQCNRPSAKHGPEKLSEKFQRFTPFTLGKEFKEGHSYYYISKPIHQHEDRCLRLKVTVSGKITHSPQAHDNPQEKRLAADDPEVRVLHSIGHSAAPRLFPLAWTVLLLPLLLLQTP

SEQ ID NO: 26491 - protein, 183 aa, Homo sapiens
MEFLWAPLLGLCCSLAAADRHTVFWNSSNPKFRNEDYTIHVQLNDYVDIICPHYEDHSVADAAMEQYILYLVEHEEYQLCQPQSKDQVRWQCNRPSAKHGPEKLSEKFQRFTPFTLGKEFKEGHSYYYISHSPQAHDNPQEKRLAADDPEVRVLHSIGHSAAPRLFPLAWTVLLLPLLLLQTP

SEQ ID NO: 26492 - protein, 1238 aa, Homo sapiens
MGDAKEAGAEGPPAGAAARGGLSLLSQGESEESSAQGSALFLGGNEVKSRAVVKYSSAPPRTAFARLEEKTDLKLPPANWLRESAKLGPAGTTILGNSKKSKPFSSFGMAYDFIDSVGNDVDVVSDSENIKKLLKIPYSKSHVSMAVHRIGRTLLLDELDIQELFMRSSQTGDWTWLKEFYQRLIDQKWQRKKKSKEHWYQKAILSKFLYYSINGDGAAQPVSSTAEQQESSSSDQTNDSEGASWPAPFEMPSSVSEDPSASSQGSEPLEPSYIVGHVASAPKEQNLITLFNDGEHSQGLKNDFVRNILWTFEDIHMLVGSNMPIFGGGRYPAVSLRLRDNNKPINVLTGIDYWLDNLICNVPELVMCFHVNGIVQKYEMIKTEEIPNLENSNFSTKVIKDIAQNILSFLKSNCTKEGHTYWLFKASGSDIVKLYDLTTLCEETEDKYQNPFTMPVAILLYKVACNMMMKKNQNKKHYGTIRTLLLNCLKLLDKSRHPQIIASANYMLSELFQLDEPKKEENSESPLNENSDESYSEEEEEMPDSDENGSYSTSSDPSDDSKAVAIIKSVGELSVPEKYKSIHQIRPSCAFPVCHDTEERCRLVLSYVLEGLKSVDSSIKKESDLPAADPSTPIPLKYEDESSRGGPEGLEKQMALFLDKMGSLQKGNYSSQSGMIPGSWQHKMKLQLILKSSKAYYVLSDAAMSLQKYGRALRYIKLALQSHDTYCCLCTNMLSEVLLFLSQYLTLCGDIQLMLAQNANNRAAHLEEFHYQTKEDQEILHSLHRESSCQGFAWATDLSTDLESQLSVSCKCYEAANEILQFSDLKSQNPEHYVQVLKRMGNIRNEIGVFYMNQAAALQSERLVSKSVSAAEQQLWKKSFSCFEKGIHNFESIEDATNAALLLCNTGRLMRICAQAHCGAGDELKREFSPEEGLYYNKAIDYYLKALRSLGTRDIHPAVWDSVNWELSTTYFTMATLQQDYAPLSRKAQEQIEKEVSEAMMKSLKYCDVDSVSARQPLCQYRAATIHHRLASMYHSCLRNQVGDEHLRKQHRVLADLHYSKAAKLFQLLKDAPCELLRVQLERVAFAEFQMTSQNSNVGKLKTLSGALDIMVRTEHAFQLIQKELIEEFGQPKSGDAAAAADASPSLNREEVMKLLSIFESRLSFLLLQSIKLLSSTKKKTSNNIEDDTILKTNKHIYSQLLRATANKTATLLERINVIVHLLGQLAAGSAASSNAVQ

SEQ ID NO: 26493 - protein, 796 aa, Homo sapiens
MGDAKEAGAEGPPAGAAARGGLSLLSQGESEESSAQGSALFLGGNEVKSRAVVKYSSAPPRTAFARLEEKTDLKLPPANWLRESAKLGPAGTTILGNSKKSKPFSSFGMAYDFIDSVGNDVDVVSDSENIKKLLKIPYSKSHVSMAVHRIGRTLLLDELDIQELFMRSSQTGDWTWLKEFYQRLIDQKWQRKKKSKEHWYQKAILSKFLYYSINGDGAAQPVSSTAEQQESSSSDQTNDSEGASWPAPFEMPSSVSEDPSASSQGSEPLEPSYIVGHVASAPKEQNLITLFNDGEHSQGLKNDFVRNILWTFEDIHMLVGSNMPIFGGGRYPAVSLRLRDNNKPINVLTGIDYWLDNLICNVPELVMCFHVNGIVQKYEMIKTEEIPNLENSNFSTKVIKDIAQNILSFLKSNCTKEGHTYWLFKASGSDIVKLYDLTTLCEETEDKYQNPFTMPVAILLYKVACNMMMKKNQNKKHYGTIRTLLLNCLKLLDKSRHPQIIASANYMLSELFQLDEPKKEENSESPLNENSDESYSEEEEEMPDSDENGSYSTSSDPSDDSKAVAIIKSVGELSVPEKYKSIHQIRPSCAFPVCHDTEERCRLVLSYVLEGLKSVDSSIKKESDLPAADPSTPIPLKYEDESSRGGPEGLEKQMALFLDKMGSLQKGNYSSQSGMIPGSWQHKMKLQLILKSSKAYYVLSDAAMSLQKYGRALRYIKLALQSHDTYCCLCTNMLSEVLLFLSQYLTLCGDIQLMLAQNANNRAAHLEEFHYQTKEDQEILHSLHRESSCQGFKTGK

SEQ ID NO: 26494 - protein, 593 aa, Homo sapiens
MGDAKEAGAEGPPAGAAARGGLSLLSQGESEESSAQGSALFLGGNEVKSRAVVKYSSAPPRTAFARLEEKTDLKLPPANWLRESAKLGPAGTTILGNSKKSKPFSSFGMAYDFIDSVGNDVDVVSDSENIKKLLKIPYSKSHVSMAVHRIGRTLLLDELDIQELFMRSSQTGDWTWLKEFYQRLIDQKWQRKKKSKEHWYQKAILSKFLYYSINGDGAAQPVSSTAEQQESSSSDQTNDSEGASWPAPFEMPSSVSEDPSASSQGSEPLEPSYIVGHVASAPKEQNLITLFNDGEHSQGLKNDFVRNILWTFEDIHMLVGSNMPIFGGGRYPAVSLRLRDNNKPINVLTGIDYWLDNLICNVPELVMCFHVNGIVQKYEMIKTEEIPNLENSNFSTKVIKDIAQNILSFLKSNCTKEGHTYWLFKASGSDIVKLYDLTTLCEETEDKYQNPFTMPVAILLYKVACNMMMKKNQNKKHYGTIRTLLLNCLKLLDKSRHPQIIASANYMLSELFQLDEPKKEENSESPLNENSDESYSEEEEEMPDSDENGSYSTSSDPSDDSKAVAIIKSVGELSVPEKYKSIHQIRLCISSLP

SEQ ID NO: 26495 - protein, 1204 aa, Homo sapiens
MGDAKEAGAEGPPAGAAARGGLSLLSQGESEESSAQGSALFLGGNEVKSRAVVKYSSAPPRTAFARLEEKTDLKLPPANWLRESAKLGPAGTTILGNSKKSKPFSSFGMAYDFIDSVGNDVDVVSDSENIKKLLKIPYSKSHVSMAVHRIGRTLLLDELDIQELFMRSSQTGDWTWLKEFYQRLIDQKWQRKKKSKEHWYQKAILSKFLYYSINGDGAAQPVSSTAEQQESSSSDQTNDSEGASWPAPFEMPSSVSEDPSASSQGLKNDFVRNILWTFEDIHMLVGSNMPIFGGGRYPAVSLRLRDNNKPINVLTGIDYWLDNLICNVPELVMCFHVNGIVQKYEMIKTEEIPNLENSNFSTKVIKDIAQNILSFLKSNCTKEGHTYWLFKASGSDIVKLYDLTTLCEETEDKYQNPFTMPVAILLYKVACNMMMKKNQNKKHYGTIRTLLLNCLKLLDKSRHPQIIASANYMLSELFQLDEPKKEENSESPLNENSDESYSEEEEEMPDSDENGSYSTSSDPSDDSKAVAIIKSVGELSVPEKYKSIHQIRPSCAFPVCHDTEERCRLVLSYVLEGLKSVDSSIKKESDLPAADPSTPIPLKYEDESSRGGPEGLEKQMALFLDKMGSLQKGNYSSQSGMIPGSWQHKMKLQLILKSSKAYYVLSDAAMSLQKYGRALRYIKLALQSHDTYCCLCTNMLSEVLLFLSQYLTLCGDIQLMLAQNANNRAAHLEEFHYQTKEDQEILHSLHRESSCQGFAWATDLSTDLESQLSVSCKCYEAANEILQFSDLKSQNPEHYVQVLKRMGNIRNEIGVFYMNQAAALQSERLVSKSVSAAEQQLWKKSFSCFEKGIHNFESIEDATNAALLLCNTGRLMRICAQAHCGAGDELKREFSPEEGLYYNKAIDYYLKALRSLGTRDIHPAVWDSVNWELSTTYFTMATLQQDYAPLSRKAQEQIEKEVSEAMMKSLKYCDVDSVSARQPLCQYRAATIHHRLASMYHSCLRNQVGDEHLRKQHRVLADLHYSKAAKLFQLLKDAPCELLRVQLERVAFAEFQMTSQNSNVGKLKTLSGALDIMVRTEHAFQLIQKELIEEFGQPKSGDAAAAADASPSLNREEVMKLLSIFESRLSFLLLQSIKLLSSTKKKTSNNIEDDTILKTNKHIYSQLLRATANKTATLLERINVIVHLLGQLAAGSAASSNAVQ

SEQ ID NO: 26496 - protein, 584 aa, Homo sapiens
MKMMLVRRFRVLILMVFLVACALHIALDLLPRLERRGARPSGEPGCSCAQPAAEVAAPGWAQVRGRPGEPPAASSAAGDAGWPNKHTLRILQDFSSDPSSNLSSHSLEKLPPAAEPAERALRGRDPGALRPHDPAHRPLLRDPGPRRSESPPGPGGDASLLARLFEHPLYRVAVPPLTEEDVLFNVNSDTRLSPKAAENPDWPHAGAEGAEFLSPGEAAVDSYPNWLKFHIGINRYELYSRHNPAIEALLHDLSSQRITSVAMKSGGTQLKLIMTFQNYGQALFKPMKQTREQETPPDFFYFSDYERHNAEIAAFHLDRILDFRRVPPVAGRMVNMTKEIRDVTRDKKLWRTFFISPANNICFYGECSYYCSTEHALCGKPDQIEGSLAAFLPDLSLAKRKTWRNPWRRSYHKRKKAEWEVDPDYCEEVKQTPPYDSSHRILDVMDMTIFDFLMGNMDRHHYETFEKFGNETFIIHLDNGRGFGKYSHDELSILVPLQQCCRIRKSTYLRLQLLAKEEYKLSLLMAESLRGDQVAPVLYQPHLEALDRRLRVVLKAVRDCVERNGLHSVVDDDLDTEHRAASAR

SEQ ID NO: 26497 - protein, 252 aa, Homo sapiens
MVNMTKEIRDVTRDKKLWRTFFISPANNICFYGECSYYCSTEHALCGKPDQIEGSLAAFLPDLSLAKRKTWRNPWRRSYHKRKKAEWEVDPDYCEEVKQTPPYDSSHRILDVMDMTIFDFLMGNMDRHHYETFEKFGNETFIIHLDNGRGFGKYSHDELSILVPLQQCCRIRKSTYLRLQLLAKEEYKLSLLMAESLRGDQVAPVLYQPHLEALDRRLRVVLKAVRDCVERNGLHSVVDDDLDTEHRAASAR

SEQ ID NO: 26498 - protein, 676 aa, Homo sapiens
MQSWRRRKSLWLALSASWLLLVLLGGFSLLRLALPPRPRPGASQGWPRWLDAELLQSFSQPGELPEDAVSPPQAPHGGSCNWESCFDTSKCRGDGLKVFVYPAVGTISETHRRILASIEGSRFYTFSPAGACLLLLLSLDAQTGECSSMPLQWNRGRNHLVLRLHPAPCPRTFQLGQAMVAEASPTVDSFRPGFDVALPFLPEAHPLRGGAPGQLRQHSPQPGVALLALEEERGGWRTADTGSSACPWDGRCEQDPGPGQTQRQETLPNATFCLISGHRPEAASRFLQALQAGCIPVLLSPRWELPFSEVIDWTKAAIVADERLPLQVLAALQEMSPARVLALRQQTQFLWDAYFSSVEKVIHTTLEVIQDRIFGTSAHPSLLWNSPPGALLALSTFSTSPQDFPFYYLQQGSRPEGRFSALIWVGPPGQPPLKLIQAVAGSQHCAQILVLWSNERPLPSRWPETAVPLTVIDGHRKVSDRFYPYSTIRTDAILSLDARSSLSTSEVDFAFLVWQSFPERMVGFLTSSHFWDEAHGGWGYTAERTNEFSMVLTTAAFYHRYYHTLFTHSLPKALRTLADEAPTCVDVLMNFIVAAVTKLPPIKVPYGKQRQEAAPLAPGGPGPRPKPPAPAPDCINQIAAAFGHMPLLSSRLRLDPVLFKDPVSVQRKKYRSLEKP

SEQ ID NO: 26499 - protein, 919 aa, Homo sapiens
MTGYTMLRNGGAGNGGQTCMLRWSNRIRLTWLSFTLFVILVFFPLIAHYYLTTLDEADEAGKRIFGPRVGNELCEVKHVLDLCRIRESVSEELLQLEAKRQELNSEIAKLNLKIEACKKSIENAKQDLLQLKNVISQTEHSYKELMAQNQPKLSLPIRLLPEKDDAGLPPPKATRGCRLHNCFDYSRCPLTSGFPVYVYDSDQFVFGSYLDPLVKQAFQATARANVYVTENADIACLYVILVGEMQEPVVLRPAELEKQLYSLPHWRTDGHNHVIINLSRKSDTQNLLYNVSTGRAMVAQSTFYTVQYRPGFDLVVSPLVHAMSEPNFMEIPPQVPVKRKYLFTFQGEKIESLRSSLQEARSFEEEMEGDPPADYDDRIIATLKAVQDSKLDQVLVEFTCKNQPKPSLPTEWALCGEREDRLELLKLSTFALIITPGDPRLVISSGCATRLFEALEVGAVPVVLGEQVQLPYQDMLQWNEAALVVPKPRVTEVHFLLRSLSDSDLLAMRRQGRFLWETYFSTADSIFNTVLAMIRTRIQIPAAPIREEAAAEIPHRSGKAAGTDPNMADNGDLDLGPVETEPPYASPRYLRNFTLTVTDFYRSWNCAPGPFHLFPHTPFDPVLPSEAKFLGSGTGFRPIGGGAGGSGKEFQAALGGNVPREQFTVVMLTYEREEVLMNSLERLNGLPYLNKVVVVWNSPKLPSEDLLWPDIGVPIMVVRTEKNSLNNRFLPWNEIETEAILSIDDDAHLRHDEIMFGFRVWREARDRIVGFPGRYHAWDIPHQSWLYNSNYSCELSMVLTGAAFFHKYYAYLYSYVMPQAIRDMVDEYINCEDIAMNFLVSHITRKPPIKVTSRWTFRCPGCPQALSHDDSHFHERHKCINFFVKVYGYMPLLYTQFRVDSVLFKTRLPHDKTKCFKFI

SEQ ID NO: 26500 - protein, 214 aa, Homo sapiens
MNVFRILGDLSHLLAMILLLGKIWRSKCCKGISGKSQILFALVFTTRYLDLFTNFISIYNTVMKVVFLLCAYVTVYMIYGKFRKTFDSENDTFRLEFLLVPVIGLSFLENYSFTLLEILWTFSIYLESVAILPQLFMISKTGEAETITTHYLFFLGLYRALYLANWIRRYQTENFYDQIAVVSGVVQTIFYCDFFYLYVTKVLKGKKLSLPMPI

SEQ ID NO: 26501 - protein, 220 aa, Homo sapiens
MNVFRILGDLSHLLAMILLLGKIWRSKCCKGISGKSQILFALVFTTRYLDLFTNFISIYNTVMKVVFLLCAYVTVYMIYGKFRKTFDSENDTFRLEFLLVPVIGLSFLENYSFTLLEILWTFSIYLESVAILPQLFMISKTGEAETITTHYLFFLGLYRALYLANWIRRYQTENFYDQIAVVSGVVQTIFYCDFFYLYVTKGRSWDDSNADTGLRSYSSI

SEQ ID NO: 26502 - protein, 791 aa, Homo sapiens
MGDQRLQDWLRSPGMDSKPWYCNKRPSKCFAKCKHRRLRFPPMDTQNWVFVKEGMDDFRYGCPSPEDTLVCRRDEFLLPKISLRGPQADPKSGQKKLLKKAALFSKLSPAQLARKAFVEQVEAQLMAKHPLAMYPNLGEDMPPDLLLQVLKHLDPERELEDAWACCETQEKTTEVPTEPGKHPCGEFCLKPPETPVSHLLPEPPETGVSHLSPEPPKTPVSSLRPEPPETGVSHLRPEPPETGVSHIRPGPPITRRRSSLLRQLLKLDSERKLEDARAPCEGREKTTDEPTEPGKYPCGKFCPRPFETPLSHLRQEPPKTPVSSLRPEPPETGESHLRLEHSKTRRGSSLRSEPSETGVSRLRLAPPKTRRGSSLHAEPSKTGVSHLSPEPPKTEVSHLHPVPPKTGVCHLRLEPPDTSQVSNLLLYILKVLDSGRTLKDVWDRCEARVKKTKEPTEPHKSPCGEPCLQPPETQVSHPHPEHPKTRRRSSLHSQPPKTRRTSSLRSEPPKTRRTSSLRSEPPKTRRTSSLGPEPPKTRRVSSLRPELPKSRRVSSLHPEPPKAPESHQFSEPPKIRASYIKELLQEDTPSTKECVSDSLQYRYTSEKLREFFKWAGDLGADEESIRNLFDFTPKYRATHEDQKFKKVKECSSELKYSMELDEKDEDKFFSQEKYWGRKFHTPSNSYTAQRVKMKYGAWYLKPKLWKKLRSDEPLIDPKLLLKKPDEPDVLDDLYGPIAFKDFILSKGYEMPGIIQRLFARRGWTYDSVKTPIQRAMIFYKYKEIVEASEED

SEQ ID NO: 26503 - protein, 957 aa, Homo sapiens
MYGSARTITNLEGSPSRSPRLPRSPRLGHRRTSSGGGGGTGKTLSMENIQSLNAAYATSGPMYLSDHEGVASTTYPKGTMTLGRATNRAVYGGRVTAMGSSPNIASAGLSHTDVLSYTDQHGGLTGSSHHHHHQVPSMLRQVRDSTMLDLQAQLKELQRENDLLRKELDIKDSKLGSSMNSIKTFWSPELKKERVLRKEEAARMSVLKEQMRVSHEENQHLQLTIQALQDELRTQRDLNHLLQQESGNRGAEHFTIELTEENFRRLQAEHDRQAKELFLLRKTLEEMELRIETQKQTLNARDESIKKLLEMLQSKGLPSKSLEDDNERTRRMAEAESQVSHLEVILDQKEKENIHLREELHRRSQLQPEPAKTKALQTVIEMKDTKIASLERNIRDLEDEIQMLKANGVLNTEDREEEIKQIEVYKSHSKFMKTKIDQLKQELSKKESELLALQTKLETLSNQNSDCKQHIEVLKESLTAKEQRAAILQTEVDALRLRLEEKESFLNKKTKQLQDLTEEKGTLAGEIRDMKDMLEVKERKINVLQKKIENLQEQLRDKDKQLTNLKDRVKSLQTDSSNTDTALATLEEALSEKERIIERLKEQRERDDRERLEEIESFRKENKDLKEKVNALQAELTEKESSLIDLKEHASSLASAGLKRDSKLKSLEIAIEQKKEECSKLEAQLKKAHNIEDDSRMNPEFADQIKQLDKEASYYRDECGKAQAEVDRLLEILKEVENEKNDKDKKIAELESLTLRHMKDQNKKVANLKHNQQLEKKKNAQLLEEVRRREDSMADNSQHLQIEELMNALEKTRQELDATKARLASTQQSLAEKEAHLANLRIERRKQLEEILEMKQEALLAAISEKDANIALLELSASKKKKTQEEVMALKREKDRLVHQLKQQTQNRMKLMADNYDDDHHHYHHHHHHHHHRSPGRSQHSNHRPSPDQDDEEGIWA

SEQ ID NO: 26504 - protein, 59 aa, Homo sapiens
MDKELPKASPSEPALNIKKSGKSFKCKKPTKNVQVFLINRQLGRNRSDTDLSKWLWMLP

SEQ ID NO: 26505 - protein, 976 aa, Homo sapiens
MERRWPLGLGLVLLLCAPLPPGARAKEVTLMDTSKAQGELGWLLDPPKDGWSEQQQILNGTPLYMYQDCPMQGRRDTDHWLRSNWIYRGEEASRVHVELQFTVRDCKSFPGGAGPLGCKETFNLLYMESDQDVGIQLRRPLFQKVTTVAADQSFTIRDLVSGSVKLNVERCSLGRLTRRGLYLAFHNPGACVALVSVRVFYQRCPETLNGLAQFPDTLPGPAGLVEVAGTCLPHARASPRPSGAPRMHCSPDGEWLVPVGRCHCEPGYEEGGSGEACVACPSGSYRMDMDTPHCLTCPQQSTAESEGATICTCESGHYRAPGEGPQVACTGPPSAPRNLSFSASGTQLSLRWEPPADTGGRQDVRYSVRCSQCQGTAQDGGPCQPCGVGVHFSPGARGLTTPAVHVNGLEPYANYTFNVEAQNGVSGLGSSGHASTSVSISMGHAESLSGLSLRLVKKEPRQLELTWAGSRPRSPGANLTYELHVLNQDEERYQMVLEPRVLLTELQPDTTYIVRVRMLTPLGPGPFSPDHEFRTSPPVSRGLTGGEIVAVIFGLLLGAALLLGILVFRSRRAQRQRQQRQRDRATDVDREDKLWLKPYVDLQAYEDPAQGALDFTRELDPAWLMVDTVIGEGEFGEVYRGTLRLPSQDCKTVAIKTLKDTSPGGQWWNFLREATIMGQFSHPHILHLEGVVTKRKPIMIITEFMENGALDAFLREREDQLVPGQLVAMLQGIASGMNYLSNHNYVHRDLAARNILVNQNLCCKVSDFGLTRLLDDFDGTYETQGGKIPIRWTAPEAIAHRIFTTASDVWSFGIVMWEVLSFGDKPYGEMSNQEVMKSIEDGYRLPPPVDCPAPLYELMKNCWAYDRARRPHFQKLQAHLEQLLANPHSLRTIANFDPRMTLRLPSLSGSDGIPYRTVSEWLESIRMKRYILHFHSAGLDTMECVLELTAEDLTQMGITLPGHQKRILCSIQGFKD

SEQ ID NO: 26506 - protein, 490 aa, Homo sapiens
MERRWPLGLGLVLLLCAPLPPGARAKEVTLMDTSKAQGELGWLLDPPKDGWSEQQQILNGTPLYMYQDCPMQGRRDTDHWLRSNWIYRGEEASRVHVELQFTVRDCKSFPGGAGPLGCKETFNLLYMESDQDVGIQLRRPLFQKVTTVAADQSFTIRDLVSGSVKLNVERCSLGRLTRRGLYLAFHNPGACVALVSVRVFYQRCPETLNGLAQFPDTLPGPAGLVEVAGTCLPHARASPRPSGAPRMHCSPDGEWLVPVGRCHCEPGYEEGGSGEACVACPSGSYRMDMDTPHCLTCPQQSTAESEGATICTCESGHYRAPGEGPQVACTGPPSAPRNLSFSASGTQLSLRWEPPADTGGRQDVRYSVRCSQCQGTAQDGGPCQPCGVGVHFSPGARGLTTPAVHVNGLEPYANYTFNVEAQNGVSGLGSSGHASTSVSISMGHADPTLSLWTPRVTVRPVSETGEERTEATRADLGGVPAPKPWGEPDL

SEQ ID NO: 26507 - protein, 474 aa, Homo sapiens
MERRWPLGLGLVLLLCAPLPPGARAKEVTLMDTSKAQGELGWLLDPPKDGWSEQQQILNGTPLYMYQDCPMQGRRDTDHWLRSNWIYRGEEASRVHVELQFTVRDCKSFPGGAGPLGCKETFNLLYMESDQDVGIQLRRPLFQKVTTVAADQSFTIRDLVSGSVKLNVERCSLGRLTRRGLYLAFHNPGACVALVSVRVFYQRCPETLNGLAQFPDTLPGPAGLVEVAGTCLPHARASPRPSGAPRMHCSPDGEWLVPVGRCHCEPGYEEGGSGEACVACPSGSYRMDMDTPHCLTCPQQSTAESEGATICTCESGHYRAPGEGPQVACTGPPSAPRNLSFSASGTQLSLRWEPPADTGGRQDVRYSVRCSQCQGTAQDGGPCQPCGVGVHFSPGARGLTTPAVHVNGLEPYANYTFNVEAQNGVSGLGSSGHASTSVSISMGHAGERLRGAGTGTWWRQKGLRPQNKLMGRKP

SEQ ID NO: 26508 - protein, 576 aa, Homo sapiens
MSTSSLRRQMKNIVHNYSEAEIKVREATSNDPWGPSSSLMSEIADLTYNVVAFSEIMSMIWKRLNDHGKNWRHVYKAMTLMEYLIKTGSERVSQQCKENMYAVQTLKDFQYVDRDGKDQGVNVREKAKQLVALLRDEDRLREERAHALKTKEKLAQTATASSAAVGSGPPPEAEQAWPQSSGEEELQLQLALAMSKEEADQPPSCGPEDDAQLQLALSLSREEHDKEERIRRGDDLRLQMAIEESKRETGGKEESSLMDLADVFTAPAPAPTTDPWGGPAPMAAAVPTAAPTSDPWGGPPVPPAADPWGGPAPTPASGDPWRPAAPAGPSVDPWGGTPAPAAGEGPTPDPWGSSDGGVPVSGPSASDPWTPAPAFSDPWGGSPAKPSTNGTTAAGGFDTEPDEFSDFDRLRTALPTSGSSAGELELLAGEVPARSPGAFDMSGVRGSLAEAVGSPPPAATPTPTPPTRKTPESFLGPNAALVDLDSLVSRPGPTPPGAKASNPFLPGGGPATGPSVTNPFQPAPPATLTLNQLRLSPVPPVPGAPPTYISPLGGGPGLPPMMPPGPPAPNTNPFLL

SEQ ID NO: 26509 - protein, 662 aa, Homo sapiens
MGDQSWLWNQAAPGVRSPVFACSVEKGNVPLVLSEHLAHSRDPGSGAVRFLISPEPWASAILGTSGLLASPVLPAALDAVTCQHLPQPSSGSRPISPRIGALCPLLLQPGTMSTSSLRRQMKNIVHNYSEAEIKVREATSNDPWGPSSSLMSEIADLTYNVVAFSEIMSMIWKRLNDHGKNWRHVYKAMTLMEYLIKTGSERVSQQCKENMYAVQTLKDFQYVDRDGKDQGVNVREKAKQLVALLRDEDRLREERAHALKTKEKLAQTATASSAAVGSGPPPEAEQAWPQSSGEEELQLQLALAMSKEEADQEERIRRGDDLRLQMAIEESKRETGGKEESSLMDLADVFTAPAPAPTTDPWGGPAPMAAAVPTAAPTSDPWGGPPVPPAADPWGGPAPTPASGDPWRPAAPAGPSVDPWGGTPAPAAGEGPTPDPWGSSDGGVPVSGPSASDPWTPAPAFSDPWGGSPAKPSTNGTTAAGGFDTEPDEFSDFDRLRTALPTSGSSAGELELLAGEVPARSPGAFDMSGVRGSLAEAVGSPPPAATPTPTPPTRKTPESFLGPNAALVDLDSLVSRPGPTPPGAKASNPFLPGGGPATGPSVTNPFQPAPPATLTLNQLRLSPVPPVPGAPPTYISPLGGGPGLPPMMPPGPPAPNTNPFLL

SEQ ID NO: 26510 - protein, 550 aa, Homo sapiens
MSTSSLRRQMKNIVHNYSEAEIKVREATSNDPWGPSSSLMSEIADLTYNVVAFSEIMSMIWKRLNDHGKNWRHVYKAMTLMEYLIKTGSERVSQQCKENMYAVQTLKDFQYVDRDGKDQGVNVREKAKQLVALLRDEDRLREERAHALKTKEKLAQTATASSAAVGSGPPPEAEQAWPQSSGEEELQLQLALAMSKEEADQEERIRRGDDLRLQMAIEESKRETGGKEESSLMDLADVFTAPAPAPTTDPWGGPAPMAAAVPTAAPTSDPWGGPPVPPAADPWGGPAPTPASGDPWRPAAPAGPSVDPWGGTPAPAAGEGPTPDPWGSSDGGVPVSGPSASDPWTPAPAFSDPWGGSPAKPSTNGTTAGGFDTEPDEFSDFDRLRTALPTSGSSAGELELLAGEVPARSPGAFDMSGVRGSLAEAVGSPPPAATPTPTPPTRKTPESFLGPNAALVDLDSLVSRPGPTPPGAKASNPFLPGGGPATGPSVTNPFQPAPPATLTLNQLRLSPVPPVPGAPPTYISPLGGGPGLPPMMPPGPPAPNTNPFLL

SEQ ID NO: 26511 - protein, 491 aa, Homo sapiens
MDHTDNELQGTNSSGSLGGLDVRRRIPIKLISKQANKAKPAPRTQRTINRMPAKAPPGDEEGFDYNEEERYDCKGGELFANQRRFPGHLFWDFQINILGEKDDTPVHFCDKCGLPIKIYGRMIPCKHVFCYDCAILHEKKGDKMCPGCSDPVQRIEQCTRGSLFMCSIVQGCKRTYLSQRDLQAHINHRHMRAGKPVTRASLENVHPPIAPPPTEIPERFIMPPDKHHMSHIPPKQHIMMPPPPLQHVPHEHYNQPHEDIRAPPAELSMAPPPPRSVSQETFRISTRKHSNLITVPIQDDSNSGAREPPPPAPAPAHHHPEYQGQPVVSHPHHIMPPQQHYAPPPPPPPPISHPMPHPPQAAGTPHLVYSQAPPPPMTSAPPPITPPPGHIIAQMPPYMNHPPPGPPPPQHGGPPVTAPPPHHYNPNSLPQFTEDQGTLSPPFTQPGGMSPGIWPAPRGPPPPPRLQGPPSQTPLPGPHHPDQTRYRPYYQ

SEQ ID NO: 26512 - protein, 490 aa, Homo sapiens
MDHTDNELQGTNSSGSLGGLDVRRRIPIKLISKQANKAKPAPRTQRTINRMPAKAPPGDEGFDYNEEERYDCKGGELFANQRRFPGHLFWDFQINILGEKDDTPVHFCDKCGLPIKIYGRMIPCKHVFCYDCAILHEKKGDKMCPGCSDPVQRIEQCTRGSLFMCSIVQGCKRTYLSQRDLQAHINHRHMRAGKPVTRASLENVHPPIAPPPTEIPERFIMPPDKHHMSHIPPKQHIMMPPPPLQHVPHEHYNQPHEDIRAPPAELSMAPPPPRSVSQETFRISTRKHSNLITVPIQDDSNSGAREPPPPAPAPAHHHPEYQGQPVVSHPHHIMPPQQHYAPPPPPPPPISHPMPHPPQAAGTPHLVYSQAPPPPMTSAPPPITPPPGHIIAQMPPYMNHPPPGPPPPQHGGPPVTAPPPHHYNPNSLPQFTEDQGTLSPPFTQPGGMSPGIWPAPRGPPPPPRLQGPPSQTPLPGPHHPDQTRYRPYYQ

SEQ ID NO: 26513 - protein, 910 aa, Homo sapiens
MGVRGLQGFVGSTCPHICTVVNFKELAEHHRSKYPGCTPTIVVDAMCCLRYWYTPESWICGGQWREYFSALRDFVKTFTAAGIKLIFFFDGMVEQDKRDEWVKRRLKNNREISRIFHYIKSHKEQPGRNMFFIPSGLAVFTRFALKTLGQETLCSLQEADYEVASYGLQHNCLGILGEDTDYLIYDTCPYFSISELCLESLDTVMLCREKLCESLGLCVADLPLLACLLGNDIIPEGMFESFRYKCLSSYTSVKENFDKKGNIILAVSDHISKVLYLYQGEKKLEEILPLGPNKALFYKGMASYLLPGQKSPWFFQKPKGVITLDKQVISTSSDAESREEVPMCSDAESRQEVPMCTGPESRREVPVYTDSEPRQEVPMCSDPEPRQEVPTCTGPESRREVPMCSDPEPRQEVPMCTGPEARQEVPMYTDSEPRQEVPMYTDSEPRQEVPMYTGSEPRQEVPMYTGPESRQEVPMYTGPESRQEVLIRTDPESRQEIMCTGHESKQEVPICTDPISKQEDSMCTHAEINQKLPVATDFEFKLEALMCTNPEIKQEDPTNVGPEVKQQVTMVSDTEILKVARTHHVQAESYLVYNIMSSGEIECSNTLEDELDQALPSQAFIYRPIRQRVYSLLLEDCQDVTSTCLAVKEWFVYPGNPLRHPDLVRPLQMTIPGGTPSLKILWLNQEPEIQVRRLDTLLACFNLSSSREELQAVESPFQALCCLLIYLFVQVDTLCLEDLHAFIAQALCLQGKSTSQLVNLQPDYINPRAVQLGSLLVRGLTTLVLVNSACGFPWKTSDFMPWNVFDGKLFHQKYLQSEKGYAVEVLLEQNRSRLTKFHNLKAVVCKACMKENRRITGRAHWGSHHAGRWGRQGSSYHRTGSGYSRSSQGQPWRDQGPGSRQYEHDQWRRY

SEQ ID NO: 26514 - protein, 764 aa, Homo sapiens
MGVRGLQGFVGSTCPHICTVVNFKELAEHHRSKYPGCTPTIVVDAMCCLRYWYTPESWICGGQWREYFSALRDFVKTFTAAGIKLIFFFDGMVEQDKRDEWVKRRLKNNREISRIFHYIKSHKEQPGRNMFFIPSGLAVFTRFALKTLGQETLCSLQEADYEVASYGLQHNCLGILGEDTDYLIYDTCPYFSISELCLESLDTVMLCREKLCESLGLCVADLPLLACLLGNDIIPEGMFESFRYKCLSSYTSVKENFDKKGNIILAVSDHISKVLYLYQGEKKLEEILPLGPNKALFYKGMASYLLPGQKSPWFFQKPKGVITLDKQVISTSSDAESREEVPMCSDAESRQEVPMCTGPESRREVPVYTDSEPRQEVPMCSDPEPRQEVPTCTGPESRREVPMCSDPEPRQEVPMCTGPEARQEVPMYTDSEPRQEVPMYTDSEPRQEVPMYTGSEPRQEVPMYTGPESRQEVPMYTGPESRQEVLIRTDPESRQEIMCTGHESKQEVPICTDPISKQEDSMCTHAEINQKLPVATDFEFKLEALMCTNPEIKQEDPTNVGPEVKQQVTMVSDTEILKVARTHHVQAESYLVYNIMSSGEIECSNTLEDELDQALPSQAFIYRPIRQRVYSLLLEDCQDVTSTCLAVKEWFVYPGNPLRHPDLVRPLQMTIPGGTPSLKILWLNQEPEIQVRRLDTLLACFNLSSSREELQAVESPFQALCCLLIYLFVQVDTLCLEDLHAFIAQALCLQGKSTSQLVNLQVQT

SEQ ID NO: 26515 - protein, 242 aa, Homo sapiens
MTIPGGTPSLKILWLNQEPEIQVRRLDTLLACFNLSSSREELQAVESPFQALCCLLIYLFVQVDTLCLEDLHAFIAQALCLQGKSTSQLVNLQPDYINPRAVQLGSLLVRGLTTLVLVNSACGFPWKTSDFMPWNVFDGKLFHQKYLQSEKGYAVEVLLEQNRSRLTKFHNLKAVVCKACMKENRRITGRAHWGSHHAGRWGRQGSSYHRTGSGYSRSSQGQPWRDQGPGSRQYEHDQWRRY

SEQ ID NO: 26516 - protein, 186 aa, Homo sapiens
MGGRGADAGSSGGTGPTEGYSPPAASTRAAARAKARGGGRGGRRNTTPSVPSLRGAAPRSFHPPAAMSERLRPRKRRRNGNEEDNHLPPQTKRSSRNPVFQDSWDTESSGSDSGGSSSSSSSSINSPDRASGPEGSLSQTMAGSSPNTPQPVPEQSALCQGLYFHINQTLREAHFHSLQHRGRPLT

SEQ ID NO: 26517 - protein, 207 aa, Homo sapiens
MGGRGADAGSSGGTGPTEGYSPPAASTRAAARAKARGGGRGGRRNTTPSVPSLRGAAPRSFHPPAAMSERLRPRKRRRNGNEEDNHLPPQTKRSSRNPVFQDSWDTETVPVMRNSKENRLRGNKAFCASSGSDSGGSSSSSSSSINSPDRASGPEGSLSQTMAGSSPNTPQPVPEQSALCQGLYFHINQTLREAHFHSLQHRGRPLT

SEQ ID NO: 26518 - protein, 255 aa, Homo sapiens
MAELRVLVAVKRVIDYAVKIRVKPDRTGVVTDGVKHSMNPFCEIAVEEAVRLKEKKLVKEVIAVSCGPAQCQETIRTALAMGADRGIHVEVPPAEAERLGPLQVARVLAKLAEKEKVDLVLLGKQAIDDDCNQTGQMTAGFLDWPQGTFASQVTLEGDKLKVEREIDGGLETLRLKLPAVVTADLRLNEPRYATLPNIMKAKKKKIEVIKPGDLGVDLTSKLSVISVEDPPQRTAGVKVETTEDLVAKLKEIGRI

SEQ ID NO: 26519 - protein, 346 aa, Homo sapiens
MYLSLWVTINTVNLRNTLSGLRGAVTTVGMIKSDVPGTQEWLDERRRQGDLPLPTNSNPVLSLELCDPGQGPAPFQAVVVLIQPGRGLALRPPPSCLFPPDPTPSPPAGQIRVKPDRTGVVTDGVKHSMNPFCEIAVEEAVRLKEKKLVKEVIAVSCGPAQCQETIRTALAMGADRGIHVEVPPAEAERLGPLQVARVLAKLAEKEKVDLVLLGKQAIDDDCNQTGQMTAGFLDWPQGTFASQVTLEGDKLKVEREIDGGLETLRLKLPAVVTADLRLNEPRYATLPNIMKAKKKKIEVIKPGDLGVDLTSKLSVISVEDPPQRTAGVKVETTEDLVAKLKEIGRI

SEQ ID NO: 26520 - protein, 617 aa, Homo sapiens
MLVPLAKLSCLAYQCFHALKIKKNYLPLCATRWSSTSTVPRITTHYTIYPRDKDKRWEGVNMERFAEEADVVIVGAGPAGLSAAVRLKQLAVAHEKDIRVCLVEKAAQIGAHTLSGACLDPGAFKELFPDWKEKGAPLNTPVTEDRFGILTEKYRIPVPILPGLPMNNHGNYIVRLGHLVSWMGEQAEALGVEVYPGYAAAEVLFHDDGSVKGIATNDVGIQKDGAPKATFERGLELHAKVTIFAEGCHGHLAKQLYKKFDLRANCEPQTYGIGLKELWVIDEKNWKPGRVDHTVGWPLDRHTYGGSFLYHLNEGEPLVALGLVVGLDYQNPYLSPFREFQRWKHHPSIRPTLEGGKRIAYGARALNEGGFQSIPKLTFPGGLLIGCSPGFMNVPKIKGTHTAMKSGILAAESIFNQLTSENLQSKTIGLHVTEYEDNLKNSWVWKELYSVRNIRPSCHGVLGVYGGMIYTGIFYWILRGMEPWTLKHKGSDFERLKPAKDCTPIEYPKPDGQISFDLLSSVALSGTNHEHDQPAHLTLRDDSIPVNRNLSIYDGPEQRFCPAGVYEFVPVEQGDGFRLQINAQNCVHCKTCDIKDPSQNINWVVPEGGGGPAYNGM

SEQ ID NO: 26521 - protein, 570 aa, Homo sapiens
MLVPLAKLSCLGVNMERFAEEADVVIVGAGPAGLSAAVRLKQLAVAHEKDIRVCLVEKAAQIGAHTLSGACLDPGAFKELFPDWKEKGAPLNTPVTEDRFGILTEKYRIPVPILPGLPMNNHGNYIVRLGHLVSWMGEQAEALGVEVYPGYAAAEVLFHDDGSVKGIATNDVGIQKDGAPKATFERGLELHAKVTIFAEGCHGHLAKQLYKKFDLRANCEPQTYGIGLKELWVIDEKNWKPGRVDHTVGWPLDRHTYGGSFLYHLNEGEPLVALGLVVGLDYQNPYLSPFREFQRWKHHPSIRPTLEGGKRIAYGARALNEGGFQSIPKLTFPGGLLIGCSPGFMNVPKIKGTHTAMKSGILAAESIFNQLTSENLQSKTIGLHVTEYEDNLKNSWVWKELYSVRNIRPSCHGVLGVYGGMIYTGIFYWILRGMEPWTLKHKGSDFERLKPAKDCTPIEYPKPDGQISFDLLSSVALSGTNHEHDQPAHLTLRDDSIPVNRNLSIYDGPEQRFCPAGVYEFVPVEQGDGFRLQINAQNCVHCKTCDIKDPSQNINWVVPEGGGGPAYNGM

SEQ ID NO: 26522 - protein, 941 aa, Homo sapiens
MVFLPLKWSLATMSFLLSSLLALLTVSTPSWCQSTEASPKRSDGTPFPWNKIRLPEYVIPVHYDLLIHANLTTLTFWGTTKVEITASQPTSTIILHSHHLQISRATLRKGAGERLSEEPLQVLEHPRQEQIALLAPEPLLVGLPYTVVIHYAGNLSETFHGFYKSTYRTKEGELRILASTQFEPTAARMAFPCFDEPAFKASFSIKIRREPRHLAISNMPLVKSVTVAEGLIEDHFDVTVKMSTYLVAFIISDFESVSKITKSGVKVSVYAVPDKINQADYALDAAVTLLEFYEDYFSIPYPLPKQDLAAIPDFQSGAMENWGLTTYRESALLFDAEKSSASSKLGITMTVAHELAHQWFGNLVTMEWWNDLWLNEGFAKFMEFVSVSVTHPELKVGDYFFGKCFDAMEVDALNSSHPVSTPVENPAQIREMFDDVSYDKGACILNMLREYLSADAFKSGIVQYLQKHSYKNTKNEDLWDSMASICPTDGVKGMDGFCSRSQHSSSSSHWHQEGVDVKTMMNTWTLQKGFPLITITVRGRNVHMKQEHYMKGSDGAPDTGYLWHVPLTFITSKSDMVHRFLLKTKTDVLILPEEVEWIKFNVGMNGYYIVHYEDDGWDSLTGLLKGTHTAVSSNDRASLINNAFQLVSIGKLSIEKALDLSLYLKHETEIMPVFQGLNELIPMYKLMEKRDMNEVETQFKAFLIRLLRDLIDKQTWTDEGSVSERMLRSQLLLLACVHNYQPCVQRAEGYFRKWKESNGNLSLPVDVTLAVFAVGAQSTEGWDFLYSKYQFSLSSTEKSQIEFALCRTQNKEKLQWLLDESFKGDKIKTQEFPQILTLIGRNPVGYPLAWQFLRKNWNKLVQKFELGSSSIAHMVMGTTNQFSTRTRLEEVKGFFSSLKENGSQLRCVQQTIETIEENIGWMDKNFDKIRVWLQSEKLERM

SEQ ID NO: 26523 - protein, 948 aa, Homo sapiens
MVFLPLKWSLATMSFLLSSLLALLTVSTPSWCQSTEASPKRSDGTPFPWNKIRLPEYVIPVHYDLLIHANLTTLTFWGTTKVEITASQPTSTIILHSHHLQISRATLRKGAGERLSEEPLQVLEHPRQEQIALLAPEPLLVGLPYTVVIHYAGNLSETFHGFYKSTYRTKEGELRILASTQFEPTAARMAFPCFDEPAFKASFSIKIRREPRHLAISNMPLVKSVTVAEGLIEDHFDVTVKMSTYLVAFIISDFESVSKITKSGVKVSVYAVPDKINQADYALDAAVTLLEFYEDYFSIPYPLPKQDLAAIPDFQSGAMENWGLTTYRESALLFDAEKSSASSKLGITMTVAHELAHQWFGNLVTMEWWNDLWLNEGFAKFMEFVSVSVTHPELKVGDYFFGKCFDAMEVDALNSSHPVSTPVENPAQIREMFDDVSYDKGACILNMLREYLSADAFKSGIVQYLQKHSYKNTKNEDLWDSMASICPTDGVKGMDGFCSRSQHSSSSSHWHQEGVDVKTMMNTWTLQKGFPLITITVRGRNVHMKQEHYMKGSDGAPDTGYLWHVPLTFITSKSDMVHRFLLKTKTDVLILPEEVEWIKFNVGMNGYYIVHYEDDGWDSLTGLLKGTHTAVSSNDRASLINNAFQLVSIGKLSIEKALDLSLYLKHETEIMPVFQGLNELIPMYKLMEKRDMNEVETQFKAFLIRLLRDLIDKQTWTDEGSVSERMLRSQLLLLACVHNYQPCVQRAEGYFRKWKESNGNLSLPVDVTLAVFAVGAQSTEGWDFLYSKYQFSLSSTEKSQIEFALCRTQNKEKLQWLLDESFKGDKIKTQEFPQILTLIGRNPVGYPLAWQFLRKNWNKLVQKFELGSSSIAHMVMGTTNQFSTRTRLEEVKGFFSSLKENGSQLRCVQQTIETIEENIGWMDKNFDKIRVWLQSEKLEHDPEADATG

SEQ ID NO: 26524 - protein, 388 aa, Homo sapiens
MSDEASAITSYEKFLTPEEPFPLLGPPRGVGTCPSEEPGCLDISDFGCQLSSCHRTDPLHRFHTNRWNLTSCGTSVASSEGSEELFSSVSVGDQDDCYSLLDDQDFTSFDLFPEGSVCSDVSSSISTYWDWSDSEFEWQLPGSDIASGSDVLSDVIPSIPSSPCLLPKKKNKHRNLDELPWSAMTNDEQVEYIEYLSRKVSTEMGLREQLDIIKIIDPSAQISPTDSEFIIELNCLTDEKLKQVRNYIKEHSPRQRPAREAWKRSNFSCASTSGVSGASASASSSSASMVSSASSSGSSVGNSASNSSANMSRAHSDSNLSASAAERIRDSKKRSKQRKLQQKAFRKRQLKEQRQARKERLSGLFLNEEVLSLKVTEEDHEADVDVLM

SEQ ID NO: 26525 - protein, 345 aa, Homo sapiens
MSDEASAITSYEKFLTPEEPFPLLGPPRGVGTCPSEEPGCLDISDFGCQLSSCHRTDPLHRFHTNRWNLTSCGTSVASSEGSEELFSSVSVGDQDDCYSLLDDQDFTSFDLFPEGSVCSDVSSSISTYWDWSDSEFEWQLPGSDIASGSDVLSDVIPSIPSSPCLLPKKKNKHRNLDELPWSAMTNDEQVEYIEYLSRKVSTEMGLREQLDIIKIIDPSAQISPTDSEFIIELNCLTDEKLKQVRNYIKEHSPRQRPAREAWKRSNFSCASTSGVSGASASASSSSASMKRSKQRKLQQKAFRKRQLKEQRQARKERLSGLFLNEEVLSLKVTEEDHEADVDVLM

SEQ ID NO: 26526 - protein, 280 aa, Homo sapiens
MGSCVSRDLFTSAHKNCPMPQGADPLNPDLPSGRTPTVAPDCVIGKDKQMDFCWDPWQRCFQTTNGYLSDSRSRPGNYNVAALATSSLVGVVQSIKDHITKPTAMARGRVAHLIEWKGWSAQPAGWELSPAEDEHYCCLPDELREARFAAGVAEQFAITEATLSAWSSLDEEELHPENSPQGIVQLQDLESIYLQDSLPSGPSQDDSLQAFSSPSPSPDSCPSPEEPPSTAGIPQPPSPELQHRRRLPGAQGPEGGTHPPGSLPSMDSGSLWEEDEVFYN

SEQ ID NO: 26527 - protein, 960 aa, Homo sapiens
MFHSSAMVNSHRKPMFNIHRGFYCLTAILPQICICSQFSVPSSYHFTEDPGAFPVATNGERFPWQELRLPSVVIPLHYDLFVHPNLTSLDFVASEKIEVLVSNATQFIILHSKDLEITNATLQSEEDSRYMKPGKELKVLSYPAHEQIALLVPEKLTPHLKYYVAMDFQAKLGDGFEGFYKSTYRTLGGETRILAVTDFEPTQARMAFPCFDEPLFKANFSIKIRRESRHIALSNMPKVKTIELEGGLLEDHFETTVKMSTYLVAYIVCDFHSLSGFTSSGVKVSIYASPDKRNQTHYALQASLKLLDFYEKYFDIYYPLSKLDLIAIPDFAPGAMENWGLITYRETSLLFDPKTSSASDKLWVTRVIAHELAHQWFGNLVTMEWWNDIWLKEGFAKYMELIAVNATYPELQFDDYFLNVCFEVITKDSLNSSRPISKPAETPTQIQEMFDEVSYNKGACILNMLKDFLGEEKFQKGIIQYLKKFSYRNAKNDDLWSSLSNSCLESDFTSGGVCHSDPKMTSNMLAFLGENAEVKEMMTTWTLQKGIPLLVVKQDGCSLRLQQERFLQGVFQEDPEWRALQERYLWHIPLTYSTSSSNVIHRHILKSKTDTLDLPEKTSWVKFNVDSNGYYIVHYEGHGWDQLITQLNQNHTLLRPKDRVGLIHDVFQLVGAGRLTLDKALDMTYYLQHETSSPALLEGLSYLESFYHMMDRRNISDISENLKRYLLQYFKPVIDRQSWSDKGSVWDRMLRSALLKLACDLNHAPCIQKAAELFSQWMESSGKLNIPTDVLKIVYSVGAQTTAGWNYLLEQYELSMSSAEQNKILYALSTSKHQEKLLKLIELGMEGKVIKTQNLAALLHAIARRPKGQQLAWDFVRENWTHLLKKFDLGSYDIRMIISGTTAHFSSKDKLQEVKLFFESLEAQGSHLDIFQTVLETITKNIKWLEKNLPTLRTWLMVNT

SEQ ID NO: 26528 - protein, 532 aa, Homo sapiens
MFHSSAMVNSHRKPMFNIHRGFYCLTAILPQICICSQFSVPSSYHFTEDPGAFPVATNGERFPWQELRLPSVVIPLHYDLFVHPNLTSLDFVASEKIEVLVSNATQFIILHSKDLEITNATLQSEEDSRYMKPGKELKVLSYPAHEQIALLVPEKLTPHLKYYVAMDFQAKLGDGFEGFYKSTYRTLGGETRILAVTDFEPTQARMAFPCFDEPLFKANFSIKIRRESRHIALSNMPKVKTIELEGGLLEDHFETTVKMSTYLVAYIVCDFHSLSGFTSSGVKVSIYASPDKRNQTHYALQASLKLLDFYEKYFDIYYPLSKLDLIAIPDFAPGAMENWGLITYRETSLLFDPKTSSASDKLWVTRVIAHELAHQWFGNLVTMEWWNDIWLKEGFAKYMELIAVNATYPELQFDDYFLNVCFEVITKDSLNSSRPISKPAETPTQIQEMFDEVSYNKGACILNMLKDFLGEEKFQKGIIQYLKKFSYRNAKNDDLWSSLSNSCLESDFTSGGVCHSDPKMTSNMVRIKRVTE

SEQ ID NO: 26529 - protein, 915 aa, Homo sapiens
MFHSSAMVNSHRKPMFNIHRGFYCLTAILPQICICSQFSVPSSYHFTEDPGAFPVATNGERFPWQELRLPSVVIPLHYDLFVHPNLTSLDFVASEKIEVLVSNATQFIILHSKDLEITNATLQSEEDSRYMKPGKELKVLSYPAHEQIALLVPEKLTPHLKYYVAMDFQAKLGDGFEGFYKSTYRTLGGETRILAVTDFEPTQARMAFPCFDEPLFKANFSIKIRRESRHIALSNMPKVSIYASPDKRNQTHYALQASLKLLDFYEKYFDIYYPLSKLDLIAIPDFAPGAMENWGLITYRETSLLFDPKTSSASDKLWVTRVIAHELAHQWFGNLVTMEWWNDIWLKEGFAKYMELIAVNATYPELQFDDYFLNVCFEVITKDSLNSSRPISKPAETPTQIQEMFDEVSYNKGACILNMLKDFLGEEKFQKGIIQYLKKFSYRNAKNDDLWSSLSNSCLESDFTSGGVCHSDPKMTSNMLAFLGENAEVKEMMTTWTLQKGIPLLVVKQDGCSLRLQQERFLQGVFQEDPEWRALQERYLWHIPLTYSTSSSNVIHRHILKSKTDTLDLPEKTSWVKFNVDSNGYYIVHYEGHGWDQLITQLNQNHTLLRPKDRVGLIHDVFQLVGAGRLTLDKALDMTYYLQHETSSPALLEGLSYLESFYHMMDRRNISDISENLKRYLLQYFKPVIDRQSWSDKGSVWDRMLRSALLKLACDLNHAPCIQKAAELFSQWMESSGKLNIPTDVLKIVYSVGAQTTAGWNYLLEQYELSMSSAEQNKILYALSTSKHQEKLLKLIELGMEGKVIKTQNLAALLHAIARRPKGQQLAWDFVRENWTHLLKKFDLGSYDIRMIISGTTAHFSSKDKLQEVKLFFESLEAQGSHLDIFQTVLETITKNIKWLEKNLPTLRTWLMVNT

SEQ ID NO: 26530 - protein, 350 aa, Homo sapiens
MFHSSAMVNSHRKPMFNIHRGFYCLTAILPQICICSQFSVPSSYHFTEDPGAFPVATNGERFPWQELRLPSVVIPLHYDLFVHPNLTSLDFVASEKIEVLVSNATQFIILHSKDLEITNATLQSEEDSRYMKPGKELKVLSYPAHEQIALLVPEKLTPHLKYYVAMDFQAKLGDGFEGFYKSTYRTLGGETRILAVTDFEPTQARMAFPCFDEPLFKANFSIKIRRESRHIALSNMPKVKTIELEGGLLEDHFETTVKMSTYLVAYIVCDFHSLSGFTSSGVKVSIYASPDKRNQTHYALQASLKLLDFYEKYFDIYYPLSKLGMFKFHIIVFIFAHKTCFDLFPLSLSM

SEQ ID NO: 26531 - protein, 171 aa, Homo sapiens
MWTLKSSLVLLLCLTCSYAFMFSSLRQKTSEPQGKVPCGEHFRIRQNLPEHTQGWLGSKWLWLLFAVVPFVILQCQRDSEKNKEQSPPGLRGFPFRTPLKKNQNASLYKDCVFNTLNELEVELLKFVSEVQNLKGAMATGSGSNLKLRRSEMPADPYHVTICKIWGEESSS

SEQ ID NO: 26532 - protein, 441 aa, Homo sapiens
MLLPGRARQPPTPQPVQHPGLRRQVEPPGQLLRLFYCTVLVCSKEISALTDFSGYLTKLLQNHTTYACDGDYLNLQCPRHSTISVQSAFYGQDYQMCSSQKPASQREDSLTCVAATTFQKVLDECQNQRACHLLVNSRVFGPDLCPGSSKYLLVSFKCQPNELKNKTVCEDQELKLHCHESKFLNIYSATYGRRTQERDICSSKAERLPPFDCLSYSALQVLSRRCYGKQRCKIIVNNHHFGSPCLPGVKKYLTVTYACVPKNILTAIDPAIANLKPSLKQKDGEYGINFDPSGSKVLRKDGILVSNSLAAFAYIRAHPERAALLFVSSVCIGLALTLCALVIRESCAKDFRDLQLGREQLVPGSDKVEEDSEDEEEEEDPSESDFPGELSGFCRTSYPIYSSIEAAELAERIERREQIIQEIWMNSGLDTSLPRNMGQFY

SEQ ID NO: 26533 - protein, 69 aa, Homo sapiens
MLLPGRARQPPTPQPVQHPGLRRQVEPPGQLLRLFYCTVLVCSKEISALTDFSEGAGRMPEPAGLPPPG

SEQ ID NO: 26534 - protein, 438 aa, Homo sapiens
MLLPGRARQPPTPQPVQHPGLRRQVEPPGQLLRLFYCTVLVCSKEISALTDFSGYLTKLLQNHTTYACDGDYLNLQCPRHSTISVQSAFYGQDYQMCSSQKPASQREDSLTCVAATTFQKVLDECQNQRACHLLVNSRVFGPDLCPGSSKYLLVSFKCQPNELKNKTVCEDQELKLHCHESKFLNIYSATYGRRTQERDICSSKAERLPPFDCLSYSALQVLSRRCYGKQRCKIIVNNHHFGSPCLPGVKKYLTVTYACVPKNILTAIDPAIANLKPSLKQKDGINFDPSGSKVLRKDGILVSNSLAAFAYIRAHPERAALLFVSSVCIGLALTLCALVIRESCAKDFRDLQLGREQLVPGSDKVEEDSEDEEEEEDPSESDFPGELSGFCRTSYPIYSSIEAAELAERIERREQIIQEIWMNSGLDTSLPRNMGQFY

SEQ ID NO: 26535 - protein, 437 aa, Homo sapiens
MAAPSWRGARLVQSVLRVWQVGPHVARERVIPFSSLLGFQRRCVSCVAGSAFSGPRLASASRSNGQGSALDHFLGFSQPDSSVTPCVPAVSMNRDEQDVLLVHHPDMPENSRVLRVVLLGAPNAGKSTLSNQLLGRKVFPVSRKVHTTRCQALGVITEKETQVILLDTPGIISPGKQKRHHLELSLLEDPWKSMESADLVVVLVDVSDKWTRNQLSPQLLRCLTKYSQIPSVLVMNKVDCLKQKSVLLELTAALTEGVVNGKKLKMRQAFHSHPGTHCPSPAVKDPNTQSVGNPQRIGWPHFKEIFMLSALSQEDVKTLKQYLLTQAQPGPWEYHSAVLTSQTPEEICANIIREKLLEHLPQEVPYNVQQKTAVWEEGPGGELVIQQKLLVPKESYVKLLIGPKGHVISQIAQEAGHDLMDIFLCDVDIRLSVKLLK

SEQ ID NO: 26536 - protein, 276 aa, Homo sapiens
MAAPSWRGARLVQSVLRVWQVGPHVARERVIPFSSLLGFQRRCVSCVAGSAFSGPRLASASRSNGQGSALDHFLGFSQPDSSVTPCVPAVSMNRDEQDVLLVHHPDMPENSRVLRVVLLGAPNAGKSTLSNQLLGRKVFPVSRKVHTTRCQALGVITEKETQVILLDTPGIISPGKQKRHHLELSLLEDPWKSMESADLVVVLVDVSDKWTRNQLSPQLLRCLTKYSQIPSVLVMNKVDCLKQKSVLLELTAALTEAIPSDTGPARALGVPQCSPH

SEQ ID NO: 26537 - protein, 361 aa, Homo sapiens
MHCSCLAEGIPANPGNWISGLAFPDWAYKAESSPGSRQIQLWHFILELLQKEEFRHVIAWQQGEYGEFVIKDPDEVARLWGRRKCKPQMNYDKLSRALRYYYNKRILHKTKGKRFTYKFNFSKLIVVNYPLWEVRAPPSPHLLLGAPALCRPALVPVGVQSELLHSMLFAHQAMVEQLTGQQTPRGPPETSGDKKGSSSSVYRLGSAPGPCRLGLCCHLGSVQGELPGVASFTPPLPPPLPSNWTCLSGPFLPPLPSEQQLPGAFKPDILLPGPRSLPGAWHFPGLPLLAGLGQGAGERLWLLSLRPEGLEVKPAPMMEAKGGLDPREVFCPETRRLKTGEESLTSPNLENLKAVWPLDPP

SEQ ID NO: 26538 - protein, 508 aa, Homo sapiens
MAGQRTCQRRSSRAGPGKMQEPPKSIEEFLKFQNWDYWPREIHFRDDDKWSCTLKKIKEDSSFVSIYTHLWENVPRIFEALLIMESKLKEYSLILQNHTSEIFKWKSMISETSSYRKLERYGEFLKKYHKKKKIMLSDEMETEKNIEGCSFTGFKANELTQLPRHLDAEQIYLFILKAHNFDERVFKIWKTHFLSEASIALLHDSFWWWFLHKFRPDRENQDCLFDRISESYVTLFMSIPLSRKDAFFQIYPDCLAQAIYATFHEAFPESSYLFNDEFKEDLGNNIFLWCSGLKPQKGFWIHWKLKELSTTTIHGSKKAPAKSVKERIADSQEHISTSIDFNIIKILNNPRAYTLPISKEESRLSRLATKSHYSSTGPEFNRVLFNFGGQSPLILYYLKMHELAGISKAPKKTKIKLTKIFQEPLPAPTYRDVIKEAKRQFARNQKDFRILQAKATKKPHEVKQDFEKFLHKLRSEAEIERECVASLSSSSSSSPSSTDNYNFEEEEY

SEQ ID NO: 26539 - protein, 304 aa, Homo sapiens
MAGQRTCQRRSSRAGPGKMQEPPKSIEEFLKFQNWDYWPREIHFRDDDKWSCTLKKIKEDSSFVSIYTHLWENVPRIFEALLIMESKLKEYSLILQNHTSEIFKWKSMISETSSYRKLERYGEFLKKYHKKKKIMLSDEMETEKNIEGCSFTGFKANELTQLPRHLDAEQIYLFILKAHNFDERVFKIWKTHFLSEASIALLHDSFWWWFLHKFRIYPDCLAQAIYATFHEAFPESSYLFNDEFKEDLGNNIFLWCSGLKPQKGFWIHWKLKELSTTTIHGSKKAPAKSVKERIADSQEHISTS

SEQ ID NO: 26540 - protein, 851 aa, Homo sapiens
MSSKQEIMSDQRFRRVAKDPRFWEMPEKDRKVKIDKRFRAMFHDKKFKLNYAVDKRGRPISHSTTEDLKRFYDLSDSDSNLSGEDSKALSQKKIKKKKTQTKKEIDSKNLVEKKKETKKANHKGSENKTDLDNSIGIKKMKTSCKFKIDSNISPKKDSKEFTQKNKKEKKNIVQHTTDSSLEEKQRTLDSGTSEIVKSPRIECSKTRREMQSVVQLIMTRDSDGYENSTDGEMCDKDALEEDSESVSEIGSDEESENEITSVGRASGDDDGSEDDEEEDEDEEEDEDEDSEDDDKSDSGPDLARGKGNIETSSEDEDDTADLFPEESGFEHAWRELDKDAPRADEITRRLAVCNMDWDRLKAKDLLALFNSFKPKGGVIFSVKIYPSEFGKERMKEEQVQGPVELLSIPEDAPEKDWTSREKLRDYQFKRLKYYYAVVDCDSPETASKIYEDCDGLEFESSCSFIDLRFIPDDITFDDEPKDVASEVNLTAYKPKYFTSAAMGTSTVEITWDETDHERITMLNRKFKKEELLDMDFQAYLASSSEDEEEIEEELQGDDGVNVEEDGKTKKSQKDDEEQIAKYRQLLQVIQEKEKKGKENDMEMEIKWVPGLKESAEEMVKNKLEGKDKLTPWEQFLEKKKEKKRLKRKQKALAEEASEEELPSDVDLNDPYFAEEVKQIGINKKSVKSAKDGTSPEEEIEIERQKAEMALLMMDEDEDSKKHFNYNKIVEHQNLSKKKKKQLMKKKELIEDDFEVNVNDARFQAMYTSHLFNLDPSDPNFKKTKAMEKILEEKARQRERKEQELTQAIKKKESEIEKESQRKSIDPALSMLIKSIKTKTEQFQARKKQKVK

SEQ ID NO: 26541 - protein, 206 aa, Homo sapiens
MAATKTASYDEHFRPEKLREWPEPESVSLMEVLAREDIDEAVCAILFKENSIVKVTVPPFVDPLFQRQQEVDEERRTGLQCETGKRHSIKELEEIEKARLHASSPYFTFTSHCVIPKEWHKASARARSKTYKYSPEKLIYADKKQKRKEKKTADLSQAAFERQFLSSKLSQKNKVGERKGLVSRGLGRGWHAGLCSTHEQHILVPE

SEQ ID NO: 26542 - protein, 1451 aa, Homo sapiens
MVSKRRLSKSEDKESLTEDASKTRKQPLSKKTKKSHIANEVEENDSIFVKLLKISGIILKTGESQNQLAVDQIAFQKKLFQTLRRHPSYPKIIEEFVSGLESYIEDEDSFRNCLLSCERLQDEEASMGASYSKSLIKLLLGIDILQPAIIKTLFEKLPEYFFENKNSDEINIPRLIVSQLKWLDRVVDGKDLTTKIMQLISIAPENLQHDIITSLPEILGDSQHADVGKELSDLLIENTSLTVPILDVLSSLRLDPNFLLKVRQLVMDKLSSIRLEDLPVIIKFILHSVTAMDTLEVISELREKLDLQHCVLPSRLQASQVKLKSKGRASSSGNQESSGQSCIILLFDVIKSAIRYEKTISEAWIKAIENTASVSEHKVFDLVMLFIIYSTNTQTKKYIDRVLRNKIRSGCIQEQLLQSTFSVHYLVLKDMCSSILSLAQSLLHSLDQSIISFGSLLYKYAFKFFDTYCQQEVVGALVTHICSGNEAEVDTALDVLLELVVLNPSAMMMNAVFVKGILDYLDNISPQQIRKLFYVLSTLAFSKQNEASSHIQDDMHLVIRKQLSSTVFKYKLIGIIGAVTMAGIMAADRSESPSLTQERANLSDEQCTQVTSLLQLVHSCSEQSPQASALYYDEFANLIQHEKLDPKALEWVGHTICNDFQDAFVVDSCVVPEGDFPFPVKALYGLEEYDTQDGIAINLLPLLFSQDFAKDGGPVTSQESGQKLVSPLCLAPYFRLLRLCVERQHNGNLEEIDGLLDCPIFLTDLEPGEKLESMSAKERSFMCSLIFLTLNWFREIVNAFCQETSPEMKGKVLTRLKHIVELQIILEKYLAVTPDYVPPLGNFDVETLDITPHTVTAISAKIRKKGKIERKQKTDGSKTSSSDTLSEEKNSECDPTPSHRGQLNKEFTGKEEKTSLLLHNSHAFFRELDIEVFSILHCGLVTKFILDTEMHTEATEVVQLGPPELLFLLEDLSQKLESMLTPPIARRVPFLKNKGSRNIGFSHLQQRSAQEIVHCVFQLLTPMCNHLENIHNYFQCLAAENHGVVDGPGVKVQEYHIMSSCYQRLLQIFHGLFAWSGFSQPENQNLLYSALHVLSSRLKQGEHSQPLEELLSQSVHYLQNFHQSIPSFQCALYLIRLLMVILEKSTASAQNKEKIASLARQFLCRVWPSGDKEKSNISNDQLHALLCIYLEHTESILKAIEEIAGVGVPELINSPKDASSSTFPTLTRHTFVVFFRVMMAELEKTVKKIEPGTAADSQQIHEEKLLYWNMAVRDFSILINLIKVFDSHPVLHVCLKYGRLFVEAFLKQCMPLLDFSFRKHREDVLSLLETFQLDTRLLHHLCGHSKIHQDTRLTQHVPLLKKTLELLVCRVKAMLTLNNCREAFWLGNLKNRDLQGEEIKSQNSQESTADESEDDMSSQASKSKATEDGEEDEVSAGEKEQDSDESYDDSD

SEQ ID NO: 26543 - protein, 1471 aa, Homo sapiens
MVSKRRLSKSEDKESLTEDASKTRKQPLSKKTKKSHIANEVEENDSIFVKLLKISGIILKTGESQNQLAVDQIAFQKKLFQTLRRHPSYPKIIEEFVSGLESYIEDEDSFRNCLLSCERLQDEEASMGASYSKSLIKLLLGIDILQPAIIKTLFEKLPEYFFENKNSDEINIPRLIVSQLKWLDRVVDGKDLTTKIMQLISIAPENLQHDIITSLPEILGDSQHADVGKELSDLLIENTSLTVPILDVLSSLRLDPNFLLKVRQLVMDKLSSIRLEDLPVIIKFILHSVTAMDTLEVISELREKLDLQHCVLPSRLQASQVKLKSKGRASSSGNQESSGQSCIILLFDVIKSAIRYEKTISEAWIKAIENTASVSEHKVFDLVMLFIIYSTNTQTKKYIDRVLRNKIRSGCIQEQLLQSTFSVHYLVLKDMCSSILSLAQSLLHSLDQSIISFGSLLYKYAFKFFDTYCQQEVVGALVTHICSGNEAEVDTALDVLLELVVLNPSAMMMNAVFVKGILDYLDNISPQQIRKLFYVLSTLAFSKQNEASSHIQDDMHLVIRKQLSSTVFKYKLIGIIGAVTMAGIMAADRSESPSLTQERANLSDEQCTQVTSLLQLVHSCSEQSPQASALYYDEFANLIQHEKLDPKALEWVGHTICNDFQDAFVVDSCVVPEGDFPFPVKALYGLEEYDTQDGIAINLLPLLFSQDFAKDGGPVTSQESGQKLVSPLCLAPYFRLLRLCVERQHNGNLEEIDGLLDCPIFLTDLEPGEKLESMSAKERSFMCSLIFLTLNWFREIVNAFCQETSPEMKGKVLTRLKHIVELQIILEKYLAVTPDYVPPLGNFDVETLDITPHTVTAISAKIRKKGKIERKQKTDGSKTSSSDTLSEEKNSECDPTPSHRGQLNKEFTGKEEKTSLLLHNSHAFFRELDIEVFSILHCGLVTKFILDTEMHTEATEVVQLGPPELLFLLEDLSQKLESMLTPPIARRVPFLKNKGSRNIGFSHLQQRSAQEIVHCVFQLLTPMCNHLENIHNYFQCLAAENHGVVDGPGVKVQEYHIMSSCYQRLLQIFHGLFAWSGFSQPENQNLLYSALHVLSSRLKQGEHSQPLEELLSQSVHYLQNFHQSIPSFQCALYLIRLLMVILEKSTASAQNKEKIASLARQFLCRVWPSGDKEKSNISNDQLHALLCIYLEHTESILKAIEEIAGVGVPELINSPKDASSSTFPTLTRHTFVVFFRVMMAELEKTVKKIEPGTAADSQQIHEEKLLYWNMAVRDFSILINLIKVFDSHPVLHVCLKYGRLFVEAFLKQCMPLLDFSFRKHREDVLSLLETFQLDTRLLHHLCGHSKIHQDTRLTQHVPLLKKTLELLVCRVKAMLTLNNCREAFWLGNLKNRDLQGEEIKSQNSQESTADESEDDMSSQASKSKATEVSLQNPPESGTDGCILLIVLSWWSRTLPTYVYCQMLLCPFPFPP

SEQ ID NO: 26544 - protein, 1249 aa, Homo sapiens
MVSKRRLSKSEDKESLTEDASKTRKQPLSKKTKKSHIANEVEENDSIFVKLLKISGIILKTGESQNQLAVDQIAFQKKLFQTLRRHPSYPKIIEEFVSGLESYIEDEDSFRNCLLSCERLQDEEASMGASYSKSLIKLLLGIDILQPAIIKTLFEKLPEYFFENKNSDEINIPRLIVSQLKWLDRVVDGKDLTTKIMQLISIAPENLQHDIITSLPEILGDSQHADVGKELSDLLIENTSLTVPILDVLSSLRLDPNFLLKVRQLVMDKLSSIRLEDLPVIIKFILHSVTAMDTLEVISELREKLDLQHCVLPSRLQASQVKLKSKGRASSSGNQESSGQSCIILLFDVIKSAIRYEKTISEAWIKAIENTASVSEHKVFDLVMLFIIYSTNTQTKKYIDRVLRNKIRSGCIQEQLLQSTFSVHYLVLKDMCSSILSLAQSLLHSLDQSIISFGSLLYKYAFKFFDTYCQQEVVGALVTHICSGNEAEVDTALDVLLELVVLNPSAMMMNAVFVKGILDYLDNISPQQIRKLFYVLSTLAFSKQNEASSHIQDDMHLVIRKQLSSTVFKYKLIGIIGAVTMAGIMAADRSESPSLTQERANLSDEQCTQVTSLLQLVHSCSEQSPQASALYYDEFANLIQHEKLDPKALEWVGHTICNDFQDAFVVDSCVVPEGDFPFPVKALYGLEEYDTQDGIAINLLPLLFSQDFAKDGGPVTSQESGQKLVSPLCLAPYFRLLRLCVERQHNGNLEEIDGLLDCPIFLTDLEPGEKLESMSAKERSFMCSLIFLTLNWFREIVNAFCQETSPEMKGKVLTRLKHIVELQIILEKYLAVTPDYVPPLGNFDVETLDITPHTVTAISAKIRKKGKIERKQKTDGSKTSSSDTLSEEKNSECDPTPSHRGQLNKEFTGKEEKTSLLLHNSHAFFRELDIEVFSILHCGLVTKFILDTEMHTEATEVVQLGPPELLFLLEDLSQKLESMLTPPIARRVPFLKNKGSRNIGFSHLQQRSAQEIVHCVFQLLTPMCNHLENIHNYFQCLAAENHGVVDGPGVKVQEYHIMSSCYQRLLQIFHGLFAWSGFSQPENQNLLYSALHVLSSRLKQGEHSQPLEELLSQSVHYLQNFHQSIPSFQCALYLIRLLMVILEKSTASAQNKEKIASLARQFLCRVWPSGDKEKSNISNDQLHALLCIYLEHTESILKAIEEIAGVGVPELINSPKDASSSTFPTLTRFMKRNSSTGTWLFETSVSSST

SEQ ID NO: 26545 - protein, 241 aa, Homo sapiens
MVSKRRLSKSEDKESLTEDASKTRKQPLSKKTKKSHIANEVEENDSIFVKLLKISGIILKTGESQNQLAVDQIAFQKKLFQTLRRHPSYPKIIEEFVSGLESYIEDEDSFRNCLLSCERLQDEEASMGASYSKSLIKLLLGIDILQPAIIKTLFEKLPEYFFENKNSDEINIPRLIVSQLKWLDRVVDGKDLTTKIMQLISIAPENLQHDIITSLPEILGDSQHADVGKELRWINPLSSSK

SEQ ID NO: 26546 - protein, 318 aa, Homo sapiens
MNTRNRVVNSGLGASPASRPTRDPQDPSGRQGELSPVEDQREGLEAAPKGPSRESVVHAGQRRTSAYTLIAPNINRRNEIQRIAEQELANLEKWKEQNRAKPVHLVPRRLGGSQSETEVRQKQQLQLMQSKYKQKLKREESVRIKKEAEEAELQKMKAIQREKSNKLEEKKRLQENLRREAFREHQQYKTAEFLSKLNTESPDRSACQSAVCGPQSSTWKLPILPRDHSWARSWAYRDSLKAEENRKLQKMKDEQHQKSELLELKRQQQEQERAKIHQTEHRRVNNAFLDRLQGKSQPGGLEQSGGCWNMNSGNSWGI

SEQ ID NO: 26547 - protein, 307 aa, Homo sapiens
MNTRNRVVNSGLGASPASRPTRDPQDPSGRQGELSPVEDQREGLEAAPKGPSRESVVHAGQRRTSAYTLIAPNINRRNEIQRIAEQELANLEKWKEQNRAKPVHLVPRRLGGSQSETEVRQKQQLQLMQSKYKQKLKREESVRIKKEAEEAELQKMKAIQREKSNKLEEKKRLQENLRREAFREHQQYKTAEFLSKLNTESPDRSACQSAVCGPQSSTWARSWAYRDSLKAEENRKLQKMKDEQHQKSELLELKRQQQEQERAKIHQTEHRRVNNAFLDRLQGKSQPGGLEQSGGCWNMNSGNSWGI

SEQ ID NO: 26548 - protein, 410 aa, Homo sapiens
MNTRNRVVNSGLGASPASRPTRDPQDPSGRQGELSPVEDQREGLEAAPKGPSRESVVHAGQRRTSAYTLIAPNINRRNEIQRIAEQELANLEKWKEQNRAKPVHLVPRRLGGSQSETEVRQKQQLQLMQSKYKQKLKREESVRIKKEAEEAELQKMKAIQREKSNKLEEKKRLQENLRREAFREHQQYKTAEFLSKLNTESPDRSACQSAVCGPQSSTWKLPILPRDHSWARSWAYRDSLKAEENRKLQKMKDEQHQKSELLELKRQQQEQERAKIHQTEHRRVNNAFLDRLQGKSQPGGLEQSGGCWNMNSGNSWGSLLVFSRHLRVYEKILTPIWPSSTDLEKPHEMLFLNVILFSLTVFTLISTAHTLDRAVRSDWLLLVLIYACLEELIPELIFNLYCQGNATLFF

SEQ ID NO: 26549 - protein, 475 aa, Homo sapiens
MGMWASLDALWEMPAEKRIFGAVLLFSWTVYLWETFLAQRQRRIYKTTTHVPPELGQIMDSETFEKSRLYQLDKSTFSFWSGLYSETEGTLILLFGGIPYLWRLSGRFCGYAGFGPEYEITQSLVFLLLATLFSALTGLPWSLYNTFVIEEKHGFNQQTLGFFMKDAIKKFVVTQCILLPVSSLLLYIIKIGGDYFFIYAWLFTLVVSLVLVTIYADYIAPLFDKFTPLPEGKLKEEIEVMAKSIDFPLTKVYVVEGSKRSSHSNAYFYGFFKNKRIVLFDTLLEEYSVLNKDIQEDSGMEPRNEEEGNSEEIKAKVKNKKQGCKNEEVLAVLGHELGHWKLGHTVKNIIISQMNSFLCFFLFAVLIGRKELFAAFGFYDSQPTLIGLLIIFQFIFSPYNEVLSFCLTVLSRRFEFQADAFAKKLGKAKDLYSALIKLNKDNLGFPVSDWLFSMWHYSHPPLLERLQALKTMKQH

SEQ ID NO: 26550 - protein, 251 aa, Homo sapiens
MPRFASPLLRNVIIRSQFDGIKRKQCLQYLKTLRTLQYDGFKTVYFGETNIPESLVTGEDISDGYFIQTPTWCIVHAAGSQGWVPWKYRVFLRDELCIKQEDSLFSEFCDVVRKAYGKCVIVVKERRQQEEQRPKEDREAEGQFYIPTVISLASIMCCPEVAKSCGHELLSLPSPCNYLNPLDSAWSSLKWFIINNRNEFCLQSIDSGYSYQCILFSNLISKGIERINASKWRTLTSKVRRWENYYLGKFS

SEQ ID NO: 26551 - protein, 132 aa, Homo sapiens
MAFDSTWKVDRSENYDKFMEKMGVNIVKRKLAAHDNLKLTITQEGNKFTVKESSAFRNIEVVFELGVTFNYNLADGTELRGTWSLEGNKLIGKFKRTDNGNELNTVREIIGDELVQTYVYEGVEAKRIFKKD

SEQ ID NO: 26552 - protein, 798 aa, Homo sapiens
MAASLPGPGSRLFRTYGAADGRRQRRPGREAAQWFPPQDRRRFFNSSGSSDASIGDPSQSDDPDDPDDPDFPGSPVRRRRRRPGGRVPKDRPSLTVTPKRWKLRARPSLTVTPRRLGLRARPPQKCSTPCGPLRLPPFPSRDSGRLSPDLSVCGQPRDGDELGISASLFSSLASPCPGSPTPRDSVISIGTSACLVAASAVPSGLHLPEVSLDRASLPCSQEEATGGAKDTRMVHQTRASLRSVLFGLMNSGTPEDSEFRADGKNMRESCCKRKLVVGNGPEGPGLSSTGKRRATGQDSCQERGLQEAVRREHQEASVPKGRIVPRGIDRLERTRSSRKSKHQEATETSLLHSHRFKKGQKLGKDSFPTQDLTPLQNVCFWTKTRASFSFHKKKIVTDVSEVCSIYTTATSLSGSLLSECSNRPVMNRTSGAPSSWHSSSMYLLSPLNTLSISNKKASDAEKVYGECSQKGPVPFSHCLPTEKLQRCEKIGEGVFGEVFQTIADHTPVAIKIIAIEGPDLVNGSHQKTFEEILPEIIISKELSLLSGEVCNRTEGFIGLNSVHCVQGSYPPLLLKAWDHYNSTKGSANDRPDFFKDDQLFIVLEFEFGGIDLEQMRTKLSSLATAKSILHQLTASLAVAEASLRFEHRDLHWGNVLLKKTSLKKLHYTLNGKSSTIPSCGLQVSIIDYTLSRLERDGIVVFCDVSMDEDLFTGDGDYQFDIYRLMKKENNNRWGEYHPYSNVLWLHYLTDKMLKQMTFKTKCNTPAMKQIKRKIQEFHRTMLNFSSATDLLCQHSLFK

SEQ ID NO: 26553 - protein, 314 aa, Homo sapiens
MAASLPGPGSRLFRTYGAADGRRQRRPGREAAQWFPPQDRRRFFNSSGSSDASIGDPSQSDDPDDPDDPDFPGSPVRRRRRRPGGRVPKDRPSLTVTPKRWKLRARPSLTVTPRRLGLRARPPQKCSTPCGPLRLPPFPSRDSGRLSPDLSVCGQPRDGDELGISASLFSSLASPCPGSPTPRDSVISIGTSACLVAASAVPSGLHLPEVSLDRASLPCSQEEATGGAKDTRMVHQTRASLRSVLFGLMNSGTPEDSEFRADGKNMRESCCKRKLVVGNGPEGPGLSSTGKRRATGQDSCQERGLQEAVRREHH

SEQ ID NO: 26554 - protein, 464 aa, Homo sapiens
MMARRDPKSWAKRLVRAQTLQKQRRAPVGPRSPPPDEEDPRLKCKNCGAFGHTARSTRCPMKCWKAALVPATLGKKEGKENLKPWKPRAEANPGPLNKDKGEKEERPRQQDPQRNALLHMFSGKPPEKPLPNGKGSTESSEHLRVASGPMPVHTTSKRPRVDPVLADRSATEMSGRGSVLASLSPLRKASLSSSSSLGPKERQTGAAADIPQPAFRHQGPEPLLVVKPTHSSPEGGCREVPQAASKTHGLLQAVRPQAQDKRPAVTSQPCPPAATHSLGLGSNLSFGPGAKRPAQAPIQACLNFPKKPRLGPFQIPESAIQGGELRAPENLQPPPAATELGPSTSPQMGRRTPAQVPSVDRQPPHSTPCLPTAQACTMSHHPAAGHDGAQPLRVLFRRLENGRWSSSLLAAPSFHSPEKPGAFLAQSPHVSEKSEAPCVRVPPSVLYEDLQVSSSSEDSDSDLE

SEQ ID NO: 26555 - protein, 462 aa, Homo sapiens
MSIAGVAAQEIRVPLKTGFLHNGRAMGNMRKTYWSSRSEFKNNFLNIDPITMAYSLNSSAQERLIPLGHASKSAPMNGHCFAENGPSQKSSLPPLLIPPSENLGPHEEDQVVCGFKKLTVNGVCASTPPLTPIKNSPSLFPCAPLCERGSRPLPPLPISEALSLDDTDCEVEFLTSSDTDFLLEDSTLSDFKYDVPGRRSFRGCGQINYAYFDTPAVSAADLSYVSDQNGGVPDPNPPPPQTHRRLRRSHSGPAGSFNKPAIRISNCCIHRASPNSDEDKPEVPPRVPIPPRPVKPDYRRWSAEVTSSTYSDEDRPPKVPPREPLSPSNSRTPSPKSLPSYLNGVMPPTQSFAPDPKYVSSKALQRQNSEGSASKVPCILPIIENGKKVSSTHYYLLPERPPYLDKYEKFFREAEETNGGAQIQPLPADCGISSATEKPDSKTKMDLGGHVKRKHLSYVVSP

SEQ ID NO: 26556 - protein, 529 aa, Homo sapiens
MFTVLTRQPCEQAGLKALYRTPTIIALVVLLVSIVVLVSITVIQIHKQEVLPPGLKYGIVLDAGSSRTTVYVYQWPAEKENNTGVVSQTFKCSVKGSGISSYGNNPQDVPRAFEECMQKVKGQVPSHLHGSTPIHLGATAGMRLLRLQNETAANEVLESIQSYFKSQPFDFRGAQIISGQEEGVYGWITANYLMGNFLEKNLWHMWVHPHGVETTGALDLGGASTQISFVAGEKMDLNTSDIMQVSLYGYVYTLYTHSFQCYGRNEAEKKFLAMLLQNSPTKNHLTNPCYPRDYSISFTMGHVFDSLCTVDQRPESYNPNDVITFEGTGDPSLCKEKVASIFDFKACHDQETCSFDGVYQPKIKGPFVAFAGFYYTASALNLSGSFSLDTFNSSTWNFCSQNWSQLPLLLPKFDEVYARSYCFSANYIYHLFVNGYKFTEETWPQIHFEKEVGNSSIAWSLGYMLSLTNQIPAESPLIRLPIEPPVFVGTLAFFTAAALLCLAFLAYLCSATRRKRHSEHAFDHAVDSD

SEQ ID NO: 26557 - protein, 452 aa, Homo sapiens
MFTVLTRQPCEQAGLKALYRTPTIIALVVLLVSIVVLVSITVIQIHKQEVLPPGLKYGIVLDAGSSRTTVYVYQWPAEKENNTGVVSQTFKCSVKGSGISSYGNNPQDVPRAFEECMQKVKGQVPSHLHGSTPIHLGATAGMRLLRLQNETAANEVLESIQSYFKSQPFDFRGAQIISGQEEGVYGWITANYLMGNFLEKNLWHMWVHPHGVETTGALDLGGASTQISFVAGEKMDLNTSDIMQVSLYGYVYTLYTHSFQCYGRNEAEKKFLAMLLQNSPTKNHLTNPCYPRDYSISFTMGHVFDSLCTVDQRPESYNPNDVITFEGTGDPSLCKEKVASIFDFKACHDQETCSFDGVYQPKIKGPFVAFAGFYYTASALNLSGSFSLDTFNSSTWNFCSQNWSQLPLLLPKFDEVYARSYCFSANYIYHLFVNGYKFTEETWPQIHFEKEE

SEQ ID NO: 26558 - protein, 633 aa, Homo sapiens
MELAQEARELGCWAVEEMGVPVAARAPESTLRRLCLGQGADIWAYILQHVHSQRTVKKIRGNLLWYGHQDSPQVRRKLELEAAVTRLRAEIQELDQSLELMERDTEAQDTAMEQARQHTQDTQRRALLLRAQAGAMRRQQHTLRDPMQRLQNQLRRLQDMERKAKVDVTFGSLTSAALGLEPVVLRDVRTACTLRAQFLQNLLLPQAKRGSLPTPHDDHFGTSYQQWLSSVETLLTNHPPGHVLAALEHLAAEREAEIRSLCSGDGLGDTEISRPQAPDQSDSSQTLPSMVHLIQEGWRTVGVLVSQRSTLLKERQVLTQRLQGLVEEVERRVLGSSERQVLILGLRRCCLWTELKALHDQSQELQDAAGHRQLLLRELQAKQQRILHWRQLVEETQEQVRLLIKGNSASKTRLCRSPGEVLALVQRKVVPTFEAVAPQSRELLRCLEEEVRHLPHILLGTLLRHRPGELKPLPTVLPSIHQLHPASPRGSSFIALSHKLGLPPGKASELLLPAAASLRQDLLLLQDQRSLWCWDLLHMKTSLPPGLPTQELLQIQASQEKQQKENLGQALKRLEKLLKQALERIPELQGIVGDWWEQPGQAALSEELCQGLSLPQWRLRWVQAQGALQKLCS

SEQ ID NO: 26559 - protein, 290 aa, Homo sapiens
MELAQEARELGCWAVEEMGVPVAARAPESTLRRLCLGQGADIWAYILQHVHSQRTVKKIRGNLLWYGHQDSPQVRRKLELEAAVTRLRAEIQELDQSLELMERDTEAQDTAMEQARQHTQDTQRRALLLRAQAGAMRRQQHTLRDPMQRLQNQLRRLQDMERKAKVDVTFGSLTSAALGLEPVVLRDVRTACTLRAQFLQNLLLPQAKRGSLPTPHDDHFGTSYQQWLSSVETLLTNHPPGHVLAALEHLAAEREAEIRSLCSGDGLGDTEISRRAGGLWVCWSPSGAPS

SEQ ID NO: 26560 - protein, 172 aa, Homo sapiens
MSSSGGAPGASASSAPPAQEEGMTWWYRWLCRLSGVLGAVSCAISGLFNCITIHPLNIAAGVWMIMNAFILLLCEAPFCCQFIEFANTVAEKVDRLRSWQKAVFYCGMAVVPIVISLTLTTLLGNAIAFATGVLYGLSALGKKGDAISYARIQQQRQQADEEKLAETLEGEL

SEQ ID NO: 26561 - protein, 130 aa, Homo sapiens
MSSSGGAPGASASSAPPAQEEGMTWWYRWLCRLSGVLGAVSCAISGLFNCITIHPLNIAAGVWMMMAVVPIVISLTLTTLLGNAIAFATGVLYGLSALGKKGDAISYARIQQQRQQADEEKLAETLEGEL

SEQ ID NO: 26562 - protein, 191 aa, Homo sapiens
MSSSGGAPGASASSAPPAQEEGMTWWYRWLCRLSGVLGAVSCAISGLFNCITIHPLNIAAGVWMMMAVVPIVISLTLTTLLGNAIAFATGVLYGLSALGKKAQTEAGSFAAQHPREPGPFSEGTRQAFATPAVVSGEIRMPAGAMRSPMPGSSSRGSRRMRRSSRRPWRGSCEGLGAPPSLSPLLALCGSK

SEQ ID NO: 26563 - protein, 233 aa, Homo sapiens
MSSSGGAPGASASSAPPAQEEGMTWWYRWLCRLSGVLGAVSCAISGLFNCITIHPLNIAAGVWMIMNAFILLLCEAPFCCQFIEFANTVAEKVDRLRSWQKAVFYCGMAVVPIVISLTLTTLLGNAIAFATGVLYGLSALGKKAQTEAGSFAAQHPREPGPFSEGTRQAFATPAVVSGEIRMPAGAMRSPMPGSSSRGSRRMRRSSRRPWRGSCEGLGAPPSLSPLLALCGSK

SEQ ID NO: 26564 - protein, 532 aa, Homo sapiens
MGKKVAIIGAGVSGLASIRSCLEEGLEPTCFEKSNDIGGLWKFSDHAEEGRASIYKSVFSNSSKEMMCFPDFPFPDDFPNFMHNSKIQEYIIAFAKEKNLLKYIQFKTFVSSVNKHPDFATTGQWDVTTERDGKKESAVFDAVMVCSGHHVYPNLPKESFPGLNHFKGKCFHSRDYKEPGVFNGKRVLVVGLGNSGCDIATELSRTAEQVMISSRSGSWVMSRVWDNGYPWDMLLVTRFGTFLKNNLPTAISDWLYVKQMNARFKHENYGLMPLNGVLRKEPVFNDELPASILCGIVSVKPNVKEFTETSAIFEDGTIFEGIDCVIFATGYSFAYPFLDESIIKSRNNEIILFKGVFPPLLEKSTIAVIGFVQSLGAAIPTVDLQSRWAAQVIKGTCTLPSMEDMMNDINEKMEKKRKWFGKSETIQTDYIVYMDELSSFIGAKPNIPWLFLTDPKLAMEVYFGPCSPYQFRLVGPGQWPGARNAILTQWDRSLKPMQTRVVGRLQKPCFFFHWLKLFAIPILLIAVFLVLT

SEQ ID NO: 26565 - protein, 457 aa, Homo sapiens
MTTDEGAKNNEESPTATVAEQGEDITSKKDRGVLKIVKRVGNGEETPMIGDKVYVHYKGKLSNGKKFDSSHDRNEPFVFSLGKGQVIKAWDIGVATMKKGEICHLLCKPEYAYGSAGSLPKIPSNATLFFEIELLDFKGEDLFEDGGIIRRTKRKGEGYSNPNEGATVEIHLEGRCGGRMFDCRDVAFTVGEGEDHDIPIGIDKALEKMQREEQCILYLGPRYGFGEAGKPKFGIEPNAELIYEVTLKSFEKAKESWEMDTKEKLEQAAIVKEKGTVYFKGGKYMQAVIQYGKIVSWLEMEYGLSEKESKASESFLLAAFLNLAMCYLKLREYTKAVECCDKALGLDSANEKGLYRRGEAQLLMNEFESAKGDFEKVLEVNPQNKAARLQISMCQKKAKEHNERDRRIYANMFKKFAEQDAKEEANKAMGKKTSEGVTNEKGTDSQAMEEEKPEGHV

SEQ ID NO: 26566 - protein, 268 aa, Homo sapiens
MTTDEGAKNNEESPTATVAEQGEDITSKKDRGVLKIVKRVGNGEETPMIGDKVYVHYKGKLSNGKKFDSSHDRNEPFVFSLGKGQVIKAWDIGVATMKKGEICHLLCKPEYAYGSAGSLPKIPSNATLFFEIELLDFKGEDLFEDGGIIRRTKRKGEGYSNPNEGATVEIHLEGRCGGRMFDCRDVAFTVGEGEDHDIPIGIDKALEKMQREEQCILYLGPRPKNPGRWIPKKNWSRLPLSKRREPYTSRCVSPYAILSISKNLFKCW

SEQ ID NO: 26567 - protein, 327 aa, Homo sapiens
MGGSALNQGVLEGDDAPGQSLYERLSQRMLDISGDRGVLKDVIREGAGDLVAPDASVLVKYSGYLEHMDRPFDSNYFRKTPRLMKLGEDITLWGMELGLLSMRRGELARFLFKPNYAYGTLGCPPLIPPNTTVLFEIELLDFLDCAESDKFCALSAEQQDQFPLQKVLKVAATEREFGNYLFRQNRFYDAKVRYKRALLLLRRRSAPPEEQHLVEAAKLPVLLNLSFTYLKLDRPTIALCYGEQALIIDQKNAKALFRCGQACLLLTEYQKARDFLVRAQKEQPFNHDINNELKKLASCYRDYVDKEKEMWHRMFAPCGDGSTAGES

SEQ ID NO: 26568 - protein, 322 aa, Homo sapiens
MSASSWPQNGMPPSSLYERLSQRMLDISGDRGVLKDVIREGAGDLVAPDASVLVKYSGYLEHMDRPFDSNYFRKTPRLMKLGEDITLWGMELGLLSMRRGELARFLFKPNYAYGTLGCPPLIPPNTTVLFEIELLDFLDCAESDKFCALSAEQQDQFPLQKVLKVAATEREFGNYLFRQNRFYDAKVRYKRALLLLRRRSAPPEEQHLVEAAKLPVLLNLSFTYLKLDRPTIALCYGEQALIIDQKNAKALFRCGQACLLLTEYQKARDFLVRAQKEQPFNHDINNELKKLASCYRDYVDKEKEMWHRMFAPCGDGSTAGES

SEQ ID NO: 26569 - protein, 297 aa, Homo sapiens
MGGSALNQGVLEGDDAPGQSLYERLSQRMLDISGDRGVLKDVIREGAGDLVAPDASVLDITLWGMELGLLSMRRGELARFLFKPNYAYGTLGCPPLIPPNTTVLFEIELLDFLDCAESDKFCALSAEQQDQFPLQKVLKVAATEREFGNYLFRQNRFYDAKVRYKRALLLLRRRSAPPEEQHLVEAAKLPVLLNLSFTYLKLDRPTIALCYGEQALIIDQKNAKALFRCGQACLLLTEYQKARDFLVRAQKEQPFNHDINNELKKLASCYRDYVDKEKEMWHRMFAPCGDGSTAGES

SEQ ID NO: 26570 - protein, 222 aa, Homo sapiens
MPKTMHFLFRFIVFFYLWGLFTAQRQKKEESTEEVKIEVLHRPENCSKTSKKGDLLNAHYDGYLAKDGSKFYCSRTQNEGHPKWFVLGVGQVIKGLDIAMTDMCPGEKRKVVIPPSFAYGKEGYAEGKIPPDATLIFEIELYAVTKGPRSIETFKQIDMDNDRQLSKAEINLYLQREFEKDEKPRDKSYQDAVLEDIFKKNDHDGDGFISPKEYNVYQHDEL

SEQ ID NO: 26571 - protein, 221 aa, Homo sapiens
MPKTMHFLFRFIVFFYLWGLFTAQRQKKEESTEEVKIEVLHRPENCSKTSKKGDLLNAHYDGYLAKDGSKFYCSRTQNEGHPKWFVLGVGQVIKGLDIAMTDMCPGEKRKVVIPPSFAYGKEGYEGKIPPDATLIFEIELYAVTKGPRSIETFKQIDMDNDRQLSKAEINLYLQREFEKDEKPRDKSYQDAVLEDIFKKNDHDGDGFISPKEYNVYQHDEL

SEQ ID NO: 26572 - protein, 127 aa, Homo sapiens
MPKTMHFLFRFIVFFYLWGLFTAQRQKKEESTEEVKIEVLHRPENCSKTSKKGDLLNAHYDGYLAKDGSKFYCSRTQNEGHPKWFVLGVGQVIKGLDIAMTDMCPGEKRKVVIPPSFAYGKEGYGST

SEQ ID NO: 26573 - protein, 376 aa, Homo sapiens
MQWTSLLLLAGLFSLSQAQYEDDPHWWFHYLRSQQSTYYDPYDPYPYETYEPYPYGVDEGPAYTYGSPSPPDPRDCPQECDCPPNFPTAMYCDNRNLKYLPFVPSRMKYVYFQNNQITSIQEGVFDNATGLLWIALHGNQITSDKVGRKVFSKLRHLERLYLDHNNLTRMPGPLPRSLRELHLDHNQISRVPNNALEGLENLTALYLQHNEIQEVGSSMRGLRSLILLDLSYNHLRKVPDGLPSALEQLYMEHNNVYTVPDSYFRGAPKLLYVRLSHNSLTNNGLASNTFNSSSLLELDLSYNQLQKIPPVNTNLENLYLQGNRINEFSISSFCTVVDVVNFSKLQVLRLDGNEIKRSAMPADAPLCLRLASLIEI

SEQ ID NO: 26574 - protein, 429 aa, Homo sapiens
MLPRLLLLICAPLCEPAELFLIASPSHPTEGSPVTLTCKMPFLQSSDAQFQFCFFRDTRALGPGWSSSPKLQIAAMWKEDTGSYWCEAQTMASKVLRSRRSQINVHRVPVADVSLETQPPGGQVMEGDRLVLICSVAMGTGDITFLWYKGAVGLNLQSKTQRSLTAEYEIPSVRESDAEQYYCVAENGYGPSPSGLVSITVRIPVSRPILMLRAPRAQAAVEDVLELHCEALRGSPPILYWFYHEDITLGSRSAPSGGGASFNLSLTEEHSGNYSCEANNGLGAQRSEAVTLNFTVPTGARSNHLTSGVIEGLLSTLGPATVALLFCYGLKRKIGRRSARDPLRSLPSPLPQEFTYLNSPTPGQLQPIYENVNVVSGDEVYSLAYYNQPEQESVAAETLGTHMEDKVSLDIYSRLRKANITDVDYEDAM

SEQ ID NO: 26575 - protein, 428 aa, Homo sapiens
MLPRLLLLICAPLCEPAELFLIASPSHPTEGSPVTLTCKMPFLQSSDAQFQFCFFRDTRALGPGWSSSPKLQIAAMWKEDTGSYWCEAQTMASKVLRSRRSQINVHRVPVADVSLETQPPGGQVMEGDRLVLICSVAMGTGDITFLWYKGAVGLNLQSKTQRSLTAEYEIPSVRESDAEQYYCVAENGYGPSPSGLVSITVRIPVSRPILMLRAPRAQAAVEDVLELHCEALRGSPPILYWFYHEDITLGSRSAPSGGGASFNLSLTEEHSGNYSCEANNGLGAQRSEAVTLNFTVPTGARSNHLTSGVIEGLLSTLGPATVALLFCYGLKRKIGRRSARDPLRSLPSPLPQEFTYLNSPTPGQLQPIYENVNVVSGDEVYSLAYYNQPEQESVAETLGTHMEDKVSLDIYSRLRKANITDVDYEDAM

SEQ ID NO: 26576 - protein, 366 aa, Homo sapiens
MLPRLLLLICAPLCEPAELFLIASPSHPTEGSPVTLTCKMPFLQSSDAQFQFCFFRDTRALGPGWSSSPKLQIAAMWKEDTGSYWCEAQTMASKVLRSRRSQINVHRVPVADVSLETQPPGGQVMEGDRLVLICSVAMGTGDITFLWYKGAVGLNLQSKTQRSLTAEYEIPSVRESDAEQYYCVAENGYGPSPSGLVSITVRIPVSRPILMLRAPRAQAAVEDVLELHCEALRGSPPILYWFYHEDITLGSRSAPSGGGASFNLSLTEEHSGNYSCEANNGLGAQRSEAVTLNFTGRRSARDPLRSLPSPLPQEFTYLNSPTPGQLQPIYENEPREQSVAVHGRQQHSSEQKAQKPWGHIWRTRFP

SEQ ID NO: 26577 - protein, 199 aa, Homo sapiens
MPFLQSSDAQFQFCFFRDTRALGPGWSSSPKLQIAAMWKEDTGSYWCEAQTMASKVLRSRRSQINVHRVPVADVSLETQPPGGQVMEGDRLVLICSVAMGTGDITFLWYKGAVGLNLQSKTQRSLTAEYEIPSVRESDAEQYYCVAENGYGPSPSGLVSITVRSKFHYPSFSQPVTNWAPHFPGAHKVSLGHAEEVQWG

SEQ ID NO: 26578 - protein, 515 aa, Homo sapiens
MLLWASLLAFAPVCGQSAAAHKPVISVHPPWTTFFKGERVTLTCNGFQFYATEKTTWYHRHYWGEKLTLTPGNTLEVRESGLYRCQARGSPRSNPVRLLFSSDSLILQAPYSVFEGDTLVLRCHRRRKEKLTAVKYTWNGNILSISNKSWDLLIPQASSNNNGNYRCIGYGDENDVFRSNFKIIKIQELFPHPELKATDSQPTEGNSVNLSCETQLPPERSDTPLHFNFFRDGEVILSDWSTYPELQLPTVWRENSGSYWCGAETVRGNIHKHSPSLQIHVQRIPVSGVLLETQPSGGQAVEGEMLVLVCSVAEGTGDTTFSWHREDMQESLGRKTQRSLRAELELPAIRQSHAGGYYCTADNSYGPVQSMVLNVTVRETPGNRDGLVAAGATGGLLSALLLAVALLFHCWRRRKSGVGFLGDETRLPPAPGPGESSHSICPAQVELQSLYVDVHPKKGDLVYSEIQTTQLGEEEEANTSRTLLEDKDVSVVYSEVKTQHPDNSAGKISSKDEES

SEQ ID NO: 26579 - protein, 509 aa, Homo sapiens
MLLWASLLAFAPVCGQSAAAHKPVISVHPPWTTFFKGERVTLTCNGFQFYATEKTTWYHRHYWGEKLTLTPGNTLEVRESGLYRCQARGSPRSNPVRLLFSSDSLILQAPYSVFEGDTLVLRCHRRRKEKLTAVKYTWNGNILSISNKSWDLLIPQASSNNNGNYRCIGYGDENDVFRSNFKIIKIQELFPHPELKATDSQPTEGNSVNLSCETQLPPERSDTPLHFNFFRDGEVILSDWSTYPELQLPTVWRENSGSYWCGAETVRGNIHKHSPSLQIHVQRIPVSGVLLETQPSGGQAVEGEMLVLVCSVAEGTGDTTFSWHREDMQESLGRKTQRSLRAELELPAIRQSHAGGYYCTADNSYGPVQSMVLNVTVRETPGNRDGLVAAGATGGLLSALLLAVALLFHCWRRRKSGVGFLGDETRLPPAPGPGESSHSICPAQVELQSLYVDGEDSLLGSCSWPQPWKDNALSALGNAPGLPKVSQIQIFPDIMCPRRVEMMLRKRHL

SEQ ID NO: 26580 - protein, 434 aa, Homo sapiens
MLLWTAVLLFVPCVGKTVWLYLQAWPNPVFEGDALTLRCQGWKNTPLSQVKFYRDGKFLHFSKENQTLSMGAATVQSRGQYSCSGQVMYIPQTFTQTSETAMVQVQELFPPPVLSAIPSPEPREGSLVTLRCQTKLHPLRSALRLLFSFHKDGHTLQDRGPHPELCIPGAKEGDSGLYWCEVAPEGGQVQKQSPQLEVRVQAPVSRPVLTLHHGPADPAVGDMVQLLCEAQRGSPPILYSFYLDEKIVGNHSAPCGGTTSLLFPVKSEQDAGNYSCEAENSVSRERSEPKKLSLKGSQVLFTPASNWLVPWLPASLLGLMVIAAALLVYVRSWRKAGPLPSQIPPTAPGGEQCPLYANVHHQKGKDEGVVYSVVHRTSKRSEARSAEFTVGRKDSSIICAEVRCLQPSEVSSTEVNMRSRTLQEPLSDCEEVLC

SEQ ID NO: 26581 - protein, 413 aa, Homo sapiens
MLPSLGPMLLWTAVLLFVPCVGKTVWLYLQAWPNPVFEGDALTLRCQGWKNTPLSQVKFYRDGKFLHFSKENQTLSMGAATVQSRGQYSCSGQVMYIPQTFTQTSETAMVQVQELFPPPVLSAIPSPEPREGSLVTLRCQTKLHPLRSALRLLFSFHKDGHTLQDRGPHPELCIPGAKEGDSGLYWCEVAPEGGQVQKQSPQLEVRVQAPVSRPVLTLHHGPADPAVGDMVQLLCEAQRGSPPILYSFYLDEKIVGNHSAPCGGTTSLLFPVKSEQDAGNYSCEAENSVSRERSEPKKLSLKGSQVLFTPASNWLVPWLPASLLGLMVIAAALLVYVRSWRKAGPLPSQIPPTAPGGEQCPLYANVHHQKGKDEGVVYSVVHRTSKRSEARSAEFTVGRKFYHLCGGEMPAAQ

SEQ ID NO: 26582 - protein, 397 aa, Homo sapiens
MLLWTAVLLFVPCVGKTVWLYLQAWPNPVFEGDALTLRCQGWKNTPLSQVKFYRDGKFLHFSKENQTLSMGAATVQSRGQYSCSGQVMYIPQTFTQTSETAMVQVQELFPPPVLSAIPSPEPREGSLVTLRCQTKLHPLRSALRLLFSFHKDGHTLQDRGPHPELCIPGAKEGDSGLYWCEVAPEGGQVQKQSPQLEVRVQAPVSRPVLTLHHGPADPAVGDMVQLLCEAQRGSPPILYSFYLDEKIVGNHSAPCGGTTSLLFPVKSEQDAGNYSCEAENSVSRERSEPKKLSLKGSQVLFTPASNWLVPWLPASLLGLMVIAAALLVYVRSWRKAGPLPSQIPPTAPGGEQCPLYANVHHQKGKDEGVVYSVVHRTSKRSEGQFYHLCGGEMPAAQ

SEQ ID NO: 26583 - protein, 311 aa, Homo sapiens
MLLWTAVLLFVPCVGKTVWLYLQAWPNPVFEGDALTLRCQGWKNTPLSQVKFYRDGKFLHFSKENQTLSMGAATVQSRGQYSCSGQVMYIPQTFTQTSETAMVQVQAPVSRPVLTLHHGPADPAVGDMVQLLCEAQRGSPPILYSFYLDEKIVGNHSAPCGGTTSLLFPVKSEQDAGNYSCEAENSVSRERSEPKKLSLKGSQVLFTPASNWLVPWLPASLLGLMVIAAALLVYVRSWRKAGPLPSQIPPTAPGGEQCPLYANVHHQKGKDEGVVYSVVHRTSKRSEARSAEFTVGRKFYHLCGGEMPAAQ

SEQ ID NO: 26584 - protein, 101 aa, Homo sapiens
MGAMAKPDCIITCDSKNLTIKTESTLKTTQFSGTLGEKFEENTADGRRTQTVCNFTDGALVQHQEWDGKESTITRKLKDGKLVVERVMNHVACTRIYEKAQ

SEQ ID NO: 26585 - protein, 1215 aa, Homo sapiens
MASQVLVYPPYVYQTQSSAFCSVKKLKVEPSSCVFQERNYPRTYVNGRNFGNSHPPTKGSAFQTKIPFNRPRGHNFSLQTSAVVLKNTAGATKVIAAQAQQAHVQAPQIGAWRNRLHFLEGPQRCGLKRKSEELDNHSSAMQIVDELSILPAMLQTNMGNPVTVVTATTGSKQNCTTGEGDYQLVQHEVLCSMKNTYEVLDFLGRGTFGQVVKCWKRGTNEIVAIKILKNHPSYARQGQIEVSILARLSTENADEYNFVRAYECFQHRNHTCLVFEMLEQNLYDFLKQNKFSPLPLKVIRPILQQVATALKKLKSLGLIHADLKPENIMLVDPVRQPYRVKVIDFGSASHVSKTVCSTYLQSRYYRAPEIILGLPFCEAIDMWSLGCVIAELFLGWPLYPGALEYDQIRYISQTQGLPGEQLLNVGTKSTRFFCKETDMSHSGWRLKTLEEHEAETGMKSKEARKYIFNSLDDVAHVNTVMDLEGSDLLAEKADRREFVSLLKKMLLIDADLRITPAETLNHPFVNMKHLLDFPHSNHVKSCFHIMDICKSHLNSCDTNNHNKTSLLRPVASSSTATLTANFTKIGTLRSQALTTSAHSVVHHGIPLQAGTAQFGCGDAFQQTLIICPPAIQGIPATHGKPTSYSIRVDNTVPLVTQAPAVQPLQIRPGVLSQTWSGRTQQMLVPAWQQVTPLAPATTTLTSESVAGSHRLGDWGKMISCSNHYNSVMPQPLLTNQITLSAPQPVSVGIAHVVWPQPATTKKNKQCQNRGILVKLMEWEPGREEINAFSWSNSLQNTNIPHSAFISPKIINGKDVEEVSCIETQDNQNSEGEARNCCETSIRQDSDSSVSDKQRQTIIIADSPSPAVSVITISSDTDEEETSQRHSLRECKGSLDCEACQSTLNIDRMCSLSSPDSTLSTSSSGQSSPSPCKRPNSMSDEEQESSCDTVDGSPTSDSSGHDSPFAESTFVEDTHENTELVSSADTETKPAVCSVVVPPVELENGLNADEHMANTDSICQPLIKGRSAPGRLNQPSAVGTRQQKLTSAFQQQHLNFSQVQHFGSGHQEWNGNFGHRRQQAYIPTSVTSNPFTLSHGSPNHTAVHAHLAGNTHLGGQPTLLPYPSSATLSSAAPVAHLLASPCTSRPMLQHPTYNISHPSGIVHQVPVGLNPRLLPSPTIHQTQYKPIFPPHSYIAASPAYTGFPLSPTKLSQYPYM

SEQ ID NO: 26586 - protein, 1194 aa, Homo sapiens
MASQVLVYPPYVYQTQSSAFCSVKKLKVEPSSCVFQERNYPRTYVNGRNFGNSHPPTKGSAFQTKIPFNRPRGHNFSLQTSAVVLKNTAGATKVIAAQAQQAHVQAPQIGAWRNRLHFLEGPQRCGLKRKSEELDNHSSAMQIVDELSILPAMLQTNMGNPVTVVTATTGSKQNCTTGEGDYQLVQHEVLCSMKNTYEVLDFLGRGTFGQVVKCWKRGTNEIVAIKILKNHPSYARQGQIEVSILARLSTENADEYNFVRAYECFQHRNHTCLVFEMLEQNLYDFLKQNKFSPLPLKVIRPILQQVATALKKLKSLGLIHADLKPENIMLVDPVRQPYRVKVIDFGSASHVSKTVCSTYLQSRYYRAPEIILGLPFCEAIDMWSLGCVIAELFLGWPLYPGALEYDQIRYISQTQGLPGEQLLNVGTKSTRFFCKETDMSHSGWRLKTLEEHEAETGMKSKEARKYIFNSLDDVAHVNTVMDLEGSDLLAEKADRREFVSLLKKMLLIDADLRITPAETLNHPFVNMKHLLDFPHSNHVKSCFHIMDICKSHLNSCDTNNHNKTSLLRPVASSSTATLTANFTKIGTLRSQALTTSAHSVVHHGIPLQAGTAQFGCGDAFQQTLIICPPAIQGIPATHGKPTSYSIRVDNTVPLVTQAPAVQPLQIRPGVLSQTWSGRTQQMLVPAWQQVTPLAPATTTLTSESVAGSHRLGDWGKMISCSNHYNSVMPQPLLTNQITLSAPQPVSVGIAHVVWPQPATTKKNKQCQNRSNSLQNTNIPHSAFISPKIINGKDVEEVSCIETQDNQNSEGEARNCCETSIRQDSDSSVSDKQRQTIIIADSPSPAVSVITISSDTDEEETSQRHSLRECKGSLDCEACQSTLNIDRMCSLSSPDSTLSTSSSGQSSPSPCKRPNSMSDEEQESSCDTVDGSPTSDSSGHDSPFAESTFVEDTHENTELVSSADTETKPAVCSVVVPPVELENGLNADEHMANTDSICQPLIKGRSAPGRLNQPSAVGTRQQKLTSAFQQQHLNFSQVQHFGSGHQEWNGNFGHRRQQAYIPTSVTSNPFTLSHGSPNHTAVHAHLAGNTHLGGQPTLLPYPSSATLSSAAPVAHLLASPCTSRPMLQHPTYNISHPSGIVHQVPVGLNPRLLPSPTIHQTQYKPIFPPHSYIAASPAYTGFPLSPTKLSQYPYM

SEQ ID NO: 26587 - protein, 1219 aa, Homo sapiens
MFGAGDEDDTDFLSPSGGARLASLFGLDQAAAGHGNEFFQYTAPKQPKKGQGTAATGNQATPKTAPATMSTPTILVATAVHAYRYTNGQYVKQGKFGAAVLGNHTAREYRILLYISQQQPVTVARIHVNFELMVRPNNYSTFYDDQRQNWSIMFESEKAAVEFNKQVCIAKCNSTSSLDAVLSQDLIVADGPAVEVGDSLEVAYTGWLFQNHVLGQVFDSTANKDKLLRLKLGSGKVIKGWEDGMLGMKKGGKRLLIVPPACAVGSEGVIGWTQATDSILVFEVEVRRVKFARDSGSDGHSVSSRDSAAPSPIPGADNLSADPVVSPPTSIPFKSGEPALRTKSNSLSEQLAINTSPDAVKAKLISRMAKMGQPMLPILPPQLDSNDSEIEDVNTLQGGGQPVVTPSVQPSLHPAHPALPQMTSQAPQPSVTGLQAPSAALMQVSSLDSHSAVSGNAQSFQPYAGMQAYAYPQASAVTSQLQPVRPLYPAPLSQPPHFQGSGDMASFLMTEARQHNTEIRMAVSKVADKMDHLMTKVEELQKHSAGNSMLIPSMSVTMETSMIMSNIQRIIQENERLKQEILEKSNRIEEQNDKISELIERNQRYVEQSNLMMEKRNNSLQTATENTQARVLHAEQEKAKVTEELAAATAQVSHLQLKMTAHQKKETELQMQLTESLKETDLLRGQLTKVQAKLSELQETSEQAQSKFKSEKQNRKQLELKVTSLEEELTDLRVEKESLEKNLSERKKKSAQERSQAEEEIDEIRKSYQEELDKLRQLLKKTRVSTDQAAAEQLSLVQAELQTQWEAKCEHLLASAKDEHLQQYQEVCAQRDAYQQKLVQLQEKCLALQAQITALTKQNEQHIKELEKNKSQMSGVEAAASDPSEKVKKIMNQVFQSLRREFELEESYNGRTILGTIMNTIKMVTLQLLNQQEQEKEESSSEEEEEKAEERPRRPSQEQSASASSGQPQAPLNRERPESPMVPSEQVVEEAVPLPPQALTTSQDGHRRKGDSEAEALSEIKDGSLPPELSCIPSHRVLGPPTSIPPEPLGPVSMDSECEESLAASPMAAKPDNPSGKVCVREVAPDGPLQESSTRLSLTSDPEEGDPLALGPESPGEPQPPQLKKDDVTSSTGPHKELSSTEAGSTVAGAALRPSHHSQRSSLSGDEEDELFKGATLKALRPKAQPEEEDEDEVSMKGRPPPTPLFGDDDDDDDIDWLG

SEQ ID NO: 26588 - protein, 1209 aa, Homo sapiens
MFGAGDEDDTDFLSPSGGARLASLFGLDQAAAGHGNEFFQYTAPKQPKKGQGTAATGNQATPKTAPATMSTPTILVATAVHAYRYTNGQYVKQGKFGAAVLGNHTAREYRILLYISQQQPVTVARIHVNFELMVRPNNYSTFYDDQRQNWSIMFESEKAAVEFNKQVCIAKCNSTSSLDAVLSQDLIVADGPAVEVGDSLEVAYTGWLFQNHVLGQVFDSTANKDKLLRLKLGSGKVIKGWEDGMLGMKKGGKRLLIVPPACAVGSEGVIGWTQATDSILVFEVEVRRVKFARDSGSDGHSVSSRDSAAPSPIPGADNLSADPVVSPPTSIPFKSGEPALRTKSNSLSEQLAINTSPDAVKAKLISRMAKMGQPMLPILPPQLDSNDSEIEDVNTLQGGGQPVVTPSVQPSLHPAHPALPQMTSQAPQPSVTGLQAPSAALMQVSSLDSHSAVSGNAQSFQPYAGMQAYAYPQASAVTSQLQPVRPLYPAPLSQPPHFQGSGDMASFLMTEARQHNTEIRMAVSKVADKMDHLMTKVEELQKHSAGNSMLIPSMSVTMETSMIMSNIQRIIQENERLKQEILEKSNRIEEQNDKISELIERNQRYVEQSNLMMEKRNNSLQTATENTQAKVTEELAAATAQVSHLQLKMTAHQKKETELQMQLTESLKETDLLRGQLTKVQAKLSELQETSEQAQSKFKSEKQNRKQLELKVTSLEEELTDLRVEKESLEKNLSERKKKSAQERSQAEEEIDEIRKSYQEELDKLRQLLKKTRVSTDQAAAEQLSLVQAELQTQWEAKCEHLLASAKDEHLQQYQEVCAQRDAYQQKLVQLQEKCLALQAQITALTKQNEQHIKELEKNKSQMSGVEAAASDPSEKVKKIMNQVFQSLRREFELEESYNGRTILGTIMNTIKMVTLQLLNQQEQEKEESSSEEEEEKAEERPRRPSQEQSASASSGQPQAPLNRERPESPMVPSEQVVEEAVPLPPQALTTSQDGHRRKGDSEAEALSEIKDGSLPPELSCIPSHRVLGPPTSIPPEPLGPVSMDSECEESLAASPMAAKPDNPSGKVCVREVAPDGPLQESSTRLSLTSDPEEGDPLALGPESPGEPQPPQLKKDDVTSSTGPHKELSSTEAGSTVAGAALRPSHHSQRSSLSGDEEDELFKGATLKALRPKAQPEEEDEDEVSMKGRPPPTPLFGDDDDDDDIDWLG

SEQ ID NO: 26589 - protein, 472 aa, Homo sapiens
MFGAGDEDDTDFLSPSGGARLASLFGLDQAAAGHGNEFFQYTAPKQPKKGQGTAATGNQATPKTAPATMSTPTILVATAVHAYRYTNGQYVKQGKFGAAVLGNHTAREYRILLYISQQQPVTVARIHVNFELMVRPNNYSTFYDDQRQNWSIMFESEKAAVEFNKQVCIAKCNSTSSLDAVLSQDLIVADGPAVEVGDSLEVAYTGWLFQNHVLGQVFDSTANKDKLLRLKLGSGKVIKGWEDGMLGMKKGGKRLLIVPPACAVGSEGVIGWTQATDSILVFEVEVRRVKFARDSGSDGHSVSSRDSAAPSPIPGADNLSADPVVSPPTSIPFKSGEPALRTKSNSLSEQLAINTSPDAVKAKLISRMAKMGQPMLPILPPQLDSNDSEIEDVNTLQGGGQPVVTPSVQPSLHPAHPALPQMTSQAPQPSVTGLQAPSAALMQVSSLDSHSAVSGNAQSFQVTFYNRINYIL

SEQ ID NO: 26590 - protein, 330 aa, Homo sapiens
MLLLINVILTLWVSCANGQVKPCDFPDIKHGGLFHENMRRPYFPVAVGKYYSYYCDEHFETPSGSYWDYIHCTQNGWSPAVPCLRKCYFPYLENGYNQNYGRKFVQGNSTEVACHPGYGLPKAQTTVTCTEKGWSPTPRCIRVRTCSKSDIEIENGFISESSSIYILNKEIQYKCKPGYATADGNSSGSITCLQNGWSAQPICINSSEKCGPPPPISNGDTTSFLLKVYVPQSRVEYQCQPYYELQGSNYVTCSNGEWSEPPRCIHPCIITEENMNKNNIKLKGRSDRKYYAKTGDTIEFMCKLGYNANTSILSFQAVCREGIVEYPRCE

SEQ ID NO: 26591 - protein, 269 aa, Homo sapiens
MLLLINVILTLWVSCANGQVKPCDFPDIKHGGLFHENMRRPYFPVAVGKYYSYYCDEHFETPSGSYWDYIHCTQNGWSPAVPCLRKCYFPYLENGYNQNYGRKFVQGNSTEVACHPGYGLPKAQTTVTCTEKGWSPTPRCIRVNSSEKCGPPPPISNGDTTSFLLKVYVPQSRVEYQCQPYYELQGSNYVTCSNGEWSEPPRCIHPCIITEENMNKNNIKLKGRSDRKYYAKTGDTIEFMCKLGYNANTSILSFQAVCREGIVEYPRCE

SEQ ID NO: 26592 - protein, 1017 aa, Homo sapiens
MMSEGKPPDKKRPRRSLSISKNKKKASNSIISCFNNAPPAKLACPVCSKMVPRYDLNRHLDEMCANNDFVQVDPGQVGLINSNVSMVDLTSVTLEDVTPKKSPPPKTNLTPGQSDSAKREVKQKISPYFKSNDVVCKNQDELRNRSVKVICLGSLASKLSRKYVKAKKSIDKDEEFAGSSPQSSKSTVVKSLIDNSSEIEDEDQILENSSQKENVFKCDSLKEECIPEHMVRGSKIMEAESQKATRECEKSALTPGFSDNAIMLFSPDFTLRNTLKSTSEDSLVKQECIKEVVEKREACHCEEVKMTVASEAKIQLSDSEAKSHSSADDASAWSNIQEAPLQDDSCLNNDIPHSIPLEQGSSCNGPGQTTGHPYYLRSFLVVLKTVLENEDDMLLFDEQEKGIVTKFYQLSATGQKLYVRLFQRKLSWIKMTKLEYEEIALDLTPVIEELTNAGFLQTESELQELSEVLELLSAPELKSLAKTFHLVNPNGQKQQLVDAFLKLAKQRSVCTWGKNKPGIGAVILKRAKALAGQSVRICKGPRAVFSRILLLFSLTDSMEDEDAACGGQGQLSTVLLVNLGRMEFPSYTINRKTHIFQDRDDLIRYAAATHMLSDISSAMANGNWEEAKELAQCAKRDWNRLKNHPSLRCHEDLPLFLRCFTVGWIYTRILSRFVEILQRLHMYEEAVRELESLLSQRIYCPDSRGRWWDRLALNLHQHLKRLEPTIKCITEGLADPEVRTGHRLSLYQRAVRLRESPSCKKFKHLFQQLPEMAVQDVKHVTITGRLCPQRGMCKSVFVMEAGEAADPTTVLCSVEELALAHYRRSGFDQGIHGEGSTFSTLYGLLLWDIIFMDGIPDVFRNACQAFPLDLCTDSFFTSRRPALEARLQLIHDAPEESLRAWVAATWHEQEGRVASLVSWDRFTSLQQAQDLVSCLGGPVLSGVCRHLAADFRHCRGGLPDLVVWNSQSRHFKLVEVKGPNDRLSHKQMIWLAELQKLGAEVEVCHVVAVGAKSQSLS

SEQ ID NO: 26593 - protein, 533 aa, Homo sapiens
MMSEGKPPDKKRPRRSLSISKNKKKASNSIISCFNNAPPAKLACPVCSKMVPRYDLNRHLDEMCANNDFVQVDPGQVGLINSNVSMVDLTSVTLEDVTPKKSPPPKTNLTPGQSDSAKREVKQKISPYFKSNDVVCKNQDELRNRSVKVICLGSLASKLSRKYVKAKKSIDKDEEFAGSSPQSSKSTVVKSLIDNSSEIEDEDQILENSSQKENVFKCDSLKEECIPEHMVRGSKIMEAESQKATRECEKSALTPGFSDNAIMLFSPDFTLRNTLKSTSEDSLVKQECIKEVVEKREACHCEEVKMTVASEAKIQLSDSEAKSHSSADDASAWSNIQEAPLQDDSCLNNDIPHSIPLEQGSSCNGPGQTTGHPYYLRSFLVVLKTVLENEDDMLLFDEQEKGIVTKFYQLSATGQKLYVRLFQRKLSWIKMTKLEYEEIALDLTPVIEELTNAGFLQTESELQELSEVLELLSAPELKSLAKTFHLVNPNGQKQQLVDAFLKLAKQRSVCTWGKNKPGIGAVILKRFCWLLLQ

SEQ ID NO: 26594 - protein, 2871 aa, Homo sapiens
MRRGRLLEIALGFTVLLASYTSHGADANLEAGNVKETRASRAKRRGGGGHDALKGPNVCGSRYNAYCCPGWKTLPGGNQCIVPICRHSCGDGFCSRPNMCTCPSGQIAPSCGSRSIQHCNIRCMNGGSCSDDHCLCQKGYIGTHCGQPVCESGCLNGGRCVAPNRCACTYGFTGPQCERDYRTGPCFTVISNQMCQGQLSGIVCTKTLCCATVGRAWGHPCEMCPAQPHPCRRGFIPNIRTGACQDVDECQAIPGLCQGGNCINTVGSFECKCPAGHKLNEVSQKCEDIDECSTIPGICEGGECTNTVSSYFCKCPPGFYTSPDGTRCIDVRPGYCYTALTNGRCSNQLPQSITKMQCCCDAGRCWSPGVTVAPEMCPIRATEDFNKLCSVPMVIPGRPEYPPPPLGPIPPVLPVPPGFPPGPQIPVPRPPVEYLYPSREPPRVLPVNVTDYCQLVRYLCQNGRCIPTPGSYRCECNKGFQLDLRGECIDVDECEKNPCAGGECINNQGSYTCQCRAGYQSTLTRTECRDIDECLQNGRICNNGRCINTDGSFHCVCNAGFHVTRDGKNCEDMDECSIRNMCLNGMCINEDGSFKCICKPGFQLASDGRYCKDINECETPGICMNGRCVNTDGSYRCECFPGLAVGLDGRVCVDTHMRSTCYGGYKRGQCIKPLFGAVTKSECCCASTEYAFGEPCQPCPAQNSAEYQALCSSGPGMTSAGSDINECALDPDICPNGICENLRGTYKCICNSGYEVDSTGKNCVDINECVLNSLLCDNGQCRNTPGSFVCTCPKGFIYKPDLKTCEDIDECESSPCINGVCKNSPGSFICECSSESTLDPTKTICIETIKGTCWQTVIDGRCEININGATLKSQCCSSLGAAWGSPCTLCQVDPICGKGYSRIKGTQCEDIDECEVFPGVCKNGLCVNTRGSFKCQCPSGMTLDATGRICLDIRLETCFLRYEDEECTLPIAGRHRMDACCCSVGAAWGTEECEECPMRNTPEYEELCPRGPGFATKEITNGKPFFKDINECKMIPSLCTHGKCRNTIGSFKCRCDSGFALDSEERNCTDIDECRISPDLCGRGQCVNTPGDFECKCDEGYESGFMMMKNCMDIDECQRDPLLCRGGVCHNTEGSYRCECPPGHQLSPNISACIDINECELSAHLCPNGRCVNLIGKYQCACNPGYHSTPDRLFCVDIDECSIMNGGCETFCTNSEGSYECSCQPGFALMPDQRSCTDIDECEDNPNICDGGQCTNIPGEYRCLCYDGFMASEDMKTCVDVNECDLNPNICLSGTCENTKGSFICHCDMGYSGKKGKTGCTDINECEIGAHNCGKHAVCTNTAGSFKCSCSPGWIGDGIKCTDLDECSNGTHMCSQHADCKNTMGSYRCLCKEGYTGDGFTCTDLDECSENLNLCGNGQCLNAPGGYRCECDMGFVPSADGKACEDIDECSLPNICVFGTCHNLPGLFRCECEIGYELDRSGGNCTDVNECLDPTTCISGNCVNTPGSYICDCPPDFELNPTRVGCVDTRSGNCYLDIRPRGDNGDTACSNEIGVGVSKASCCCSLGKAWGTPCEMCPAVNTSEYKILCPGGEGFRPNPITVILEDIDECQELPGLCQGGKCINTFGSFQCRCPTGYYLNEDTRVCDDVNECETPGICGPGTCYNTVGNYTCICPPDYMQVNGGNNCMDMRRSLCYRNYYADNQTCDGELLFNMTKKMCCCSYNIGRAWNKPCEQCPIPSTDEFATLCGSQRPGFVIDIYTGLPVDIDECREIPGVCENGVCINMVGSFRCECPVGFFYNDKLLVCEDIDECQNGPVCQRNAECINTAGSYRCDCKPGYRFTSTGQCNDRNECQEIPNICSHGQCIDTVGSFYCLCHTGFKTNDDQTMCLDINECERDACGNGTCRNTIGSFNCRCNHGFILSHNNDCIDVDECASGNGNLCRNGQCINTVGSFQCQCNEGYEVAPDGRTCVDINECLLEPRKCAPGTCQNLDGSYRCICPPGYSLQNEKCEDIDECVEEPEICALGTCSNTEGSFKCLCPEGFSLSSSGRRCQDLRMSYCYAKFEGGKCSSPKSRNHSKQECCCALKGEGWGDPCELCPTEPDEAFRQICPYGSGIIVGPDDSAVDMDECKEPDVCKHGQCINTDGSYRCECPFGYILAGNECVDTDECSVGNPCGNGTCKNVIGGFECTCEEGFEPGPMMTCEDINECAQNPLLCAFRCVNTYGSYECKCPVGYVLREDRRMCKDEDECEEGKHDCTEKQMECKNLIGTYMCICGPGYQRRPDGEGCVDENECQTKPGICENGRCLNTRGSYTCECNDGFTASPNQDECLDNREGYCFTEVLQNMCQIGSSNRNPVTKSECCCDGGRGWGPHCEICPFQGTVAFKKLCPHGRGFMTNGADIDECKVIHDVCRNGECVNDRGSYHCICKTGYTPDITGTSCVDLNECNQAPKPCNFICKNTEGSYQCSCPKGYILQEDGRSCKDLDECATKQHNCQFLCVNTIGGFTCKCPPGFTQHHTSCIDNNECTSDINLCGSKGICQNTPGSFTCECQRGFSLDQTGSSCEDVDECEGNHRCQHGCQNIIGGYRCSCPQGYLQHYQWNQCVDENECLSAHICGGASCHNTLGSYKCMCPAGFQYEQFSGGCQDINECGSAQAPCSYGCSNTEGGYLCGCPPGYFRIGQGHCVSGMGMGRGNPEPPVSGEMDDNSLSPEACYECKINGYPKRGRKRRSTNETDASNIEDQSETEANVSLASWDVEKTAIFAFNISHVSNKVRILELLPALTTLTNHNRYLIESGNEDGFFKINQKEGISYLHFTKKKPVAGTYSLQISSTPLYKKKELNQLEDKYDKDYLSGELGDNLKMKIQVLLH

SEQ ID NO: 26595 - protein, 703 aa, Homo sapiens
MERAAPSRRVPLPLLLLGGLALLAAGVDADVLLEACCADGHRMATHQKDCSLPYATESKECRMVQEQCCHSQLEELHCATGISLANEQDRCATPHGDNASLEATFVKRCCHCCLLGRAAQAQGQSCEYSLMVGYQCGQVFQACCVKSQETGDLDVGGLQETDKIIEVEEEQEDPYLNDRCRGGGPCKQQCRDTGDEVVCSCFVGYQLLSDGVSCEDVNECITGSHSCRLGESCINTVGSFRCQRDSSCGTGYELTEDNSCKDIDECESGIHNCLPDFICQNTLGSFRCRPKLQCKSGFIQDALGNCIDINECLSISAPCPIGHTCINTEGSYTCQKNVPNCGRGYHLNEEGTRCVDVDECAPPAEPCGKGHRCVNSPGSFRCECKTGYYFDGISRMCVDVNECQRYPGRLCGHKCENTLGSYLCSCSVGFRLSVDGRSCEDINECSSSPCSQECANVYGSYQCYCRRGYQLSDVDGVTCEDIDECALPTGGHICSYRCINIPGSFQCSCPSSGYRLAPNGRNCQDIDECVTGIHNCSINETCFNIQGGFRCLAFECPENYRRSAATLQQEKTDTVRCIKSCRPNDVTCVFDPVHTISHTVISLPTFREFTRPEEIIFLRAITPPHPASQANIIFDITEGNLRDSFDIIKRYMDGMTVGVVRQVRPIVGPFHAVLKLEMNYVVGGVVSHRNVVNVHIFVSEYWF

SEQ ID NO: 26596 - protein, 566 aa, Homo sapiens
MERAAPSRRVPLPLLLLGGLALLAAGVDADVLLEACCADGHRMATHQKDCSLPYATESKECRMVQEQCCHSQLEELHCATGISLANEQDRCATPHGDNASLEATFVKRCCHCCLLGRAAQAQGQSCEYSLMVGYQCGQVFQACCVKSQETGDLDVGGLQETDKIIEVEEEQEDPYLNDRCRGGGPCKQQCRDTGDEVVCSCFVGYQLLSDGVSCEDVNECITGSHSCRLGESCINTVGSFRCQRDSSCGTGYELTEDNSCKDIDECESGIHNCLPDFICQNTLGSFRCRPKLQCKSGFIQDALGNCIDINECLSISAPCPIGHTCINTEGSYTCQKNVPNCGRGYHLNEEGTRCVDVDECAPPAEPCGKGHRCVNSPGSFRCECKTGYYFDGISRMCVDVNECQRYPGRLCGHKCENTLGSYLCSCSVGFRLSVDGRSCEDINECSSSPCSQECANVYGSYQCYCRRGYQLSDVDGVTCEDIDECALPTGGHICSYRCINIPGSFQCSCPSSGYRLAPNGRNCQDIDECVTGIHNCSINETCFNIQGGFRCLAFECPENYRRSAAT

SEQ ID NO: 26597 - protein, 601 aa, Homo sapiens
MERAAPSRRVPLPLLLLGGLALLAAGVDADVLLEACCADGHRMATHQKDCSLPYATESKECRMVQEQCCHSQLEELHCATGISLANEQDRCATPHGDNASLEATFVKRCCHCCLLGRAAQAQGQSCEYSLMVGYQCGQVFQACCVKSQETGDLDVGGLQETDKIIEVEEEQEDPYLNDRCRGGGPCKQQCRDTGDEVVCSCFVGYQLLSDGVSCEDVNECITGSHSCRLGESCINTVGSFRCQRDSSCGTGYELTEDNSCKDIDECESGIHNCLPDFICQNTLGSFRCRPKLQCKSGFIQDALGNCIDINECLSISAPCPIGHTCINTEGSYTCQKNVPNCGRGYHLNEEGTRCVDVDECAPPAEPCGKGHRCVNSPGSFRCECKTGYYFDGISRMCVDVNECQRYPGRLCGHKCENTLGSYLCSCSVGFRLSVDGRSCEDINECSSSPCSQECANVYGSYQCYCRRGYQLSDVDGVTCEDIDECALPTGGHICSYRCINIPGSFQCSCPSSGYRLAPNGRNCQDIDECVTGIHNCSINETCFNIQGGFRCLAFECPENYRRSAATQKSKKGRQNTPAGSSKEDCRVLPWKQGLEDTHLDA

SEQ ID NO: 26598 - protein, 683 aa, Homo sapiens
MERAAPSRRVPLPLLLLGGLALLAAGVDADVLLEACCADGHRMATHQKDCSLPYATESKECRMVQEQCCHSQLEELHCATGISLANEQDRCATPHGDNASLEATFVKRCCHCCLLGRAAQAQGQSCEYSLMVGYQCGQVFQACCVKSQETGDLDVGGLQETDKIIEVEEEQEDPYLNDRCRGGGPCKQQCRDTGDEVVCSCFVGYQLLSDGVSCEDVNECITGSHSCRLGESCINTVGSFRCQRDSSCGTGYELTEDNSCKDIDECESGIHNCLPDFICQNTLGSFRCRPKLQCKSGFIQDALGNCIDINECLSISAPCPIGHTCINTEGSYTCQKNVPNCGRGYHLNEEGTRCVDVDECAPPAEPCGKGHRCVNSPGSFRCECKTGYYFDGISRMCVDVNECQRYPGRLCGHKCENTLGSYLCSCSVGFRLSVDGRSCEDINECSSSPCSQECANVYGSYQCYCRRGYQLSDVDGVTCEDIDECALPTGGHICSYRCINIPGSFQCSCPSSGYRLAPNGRNCQDIDECVTGIHNCSINETCFNIQGGFRCLAFECPENYRRSAATRCERLPCHENRECSKLPLRITYYHLSFPTNIQAPAVVFRMGPSSAVPGDSMQLAITGGNEEGFFTTRKVSPHSGVVALTKPVPEPRDLLLTVKMDLSRHGTVSSFVAKLFIFVSAEL

SEQ ID NO: 26599 - protein, 519 aa, Homo sapiens
MTCPDKPGQLINWFICSLCVPRVRKLWSSRRPRTRRNLLLGTACAIYLGFLVSQVGRASLQHGQAAEKGPHRSRDTAEPSFPEIPLDGTLAPPESQGNGSTLQPNVVYITLRSKRSKPANIRGTVKPKRRKKHAVASAAPGQEALVGPSLQPQEAAREADAVAPGYAQGANLVKIGERPWRLVRGPGVRAGGPDFLQPSSRESNIRIYSESAPSWLSKDDIRRMRLLADSAVAGLRPVSSRSGARLLVLEGGAPGAVLRCGPSPCGLLKQPLDMSEVFAFHLDRILGLNRTLPSVSRKAEFIQDGRPCPIILWDASLSSASNDTHSSVKLTWGTYQQLLKQKCWQNGRVPKPESGCTEIHHHEWSKMALFDFLLQIYNRLDTNCCGFRPRKEDACVQNGLRPKCDDQGSAALAHIIQRKHDPRHLVFIDNKGFFDRSEDNLNFKLLEGIKEFPASAVSVLKSQHLRQKLLQSLFLDKVYWESQGGRQGIEKLIDVIEHRAKILITYINAHGVKVLPMNE

SEQ ID NO: 26600 - protein, 527 aa, Homo sapiens
MTCPDKPGQLINWFICSLCVPRVRKLWSSRRPRTRRNLLLGTACAIYLGFLVSQVGRASLQHGQAAEKGPHRSRDTAEPSFPEIPLDGTLAPPESQGNGSTLQPNVVYITLRSKRSKPANIRGTVKPKRRKKHAVASAAPGQEALVGPSLQPQEAAREADAVAPGYAQGANLVKIGERPWRLVRGPGVRAGGPDFLQPSSRESNIRIYSESAPSWLSKDDIRRMRLLADSAVAGLRPVSSRSGARLLVLEGGAPGAVLRCGPSPCGLLKQPLDMSEVFAFHLDRILGLNRTLPSVSRKAEFIQAAAAACLSMRLAFFIFPAWEDMRVPGKCCIGHARLTWGTYQQLLKQKCWQNGRVPKPESGCTEIHHHEWSKMALFDFLLQIYNRLDTNCCGFRPRKEDACVQNGLRPKCDDQGSAALAHIIQRKHDPRHLVFIDNKGFFDRSEDNLNFKLLEGIKEFPASAVSVLKSQHLRQKLLQSLFLDKVYWESQGGRQGIEKLIDVIEHRAKILITYINAHGVKVLPMNE

SEQ ID NO: 26601 - protein, 331 aa, Homo sapiens
MTCPDKPGQLINWFICSLCVPRVRKLWSSRRPRTRRNLLLGTACAIYLGFLVSQVGRASLQHGQAAEKGPHRSRDTAEPSFPEIPLDGTLAPPESQGNGSTLQPNVVYITLRSKRSKPANIRGTVKPKRRKKHAVASAAPGQEALVGPSLQPQEAAREADAVAPGYAQGANLVKIGERPWRLVRGPGVRAGGPDFLQPSSRESNIRIYSESAPSWLSKDDIRRMRLLADSAVAGLRPVSSRSGARLLVLEGGAPGAVLRCGPSPCGLLKQPLDMSEVFAFHLDRILGLNRTLPSVSRKAEFIQGNRFTCFVICSCWGFWFIFFFPSLSFSK

SEQ ID NO: 26602 - protein, 657 aa, Homo sapiens
MRLKIGFILRSLLVVGSFLGLVVLWSSLTPRPDDPSPLSRMREDRDVNDPMPNRGGNGLAPGEDRFKPVVPWPHVEGVEVDLESIRRINKAKNEQEHHAGGDSQKDIMQRQYLTFKPQTFTYHDPVLRPGILGNFEPKEPEPPGVVGGPGEKAKPLVLGPEFKQAIQASIKEFGFNMVASDMISLDRSVNDLRQEECKYWHYDENLLTSSVVIVFHNEGWSTLMRTVHSVIKRTPRKYLAEIVLIDDFSNKEHLKEKLDEYIKLWNGLVKVFRNERREGLIQARSIGAQKAKLGQVLIYLDAHCEVAVNWYAPLVAPISKDRTICTVPLIDVINGNTYEIIPQGGGDEDGYARGAWDWSMLWKRVPLTPQEKRLRKTKTEPYRSPAMAGGLFAIEREFFFELGLYDPGLQIWGGENFEISYKIWQCGGKLLFVPCSRVGHIYRLEGWQGNPPPIYVGSSPTLKNYVRVVEVWWDEYKDYFYASRPESQALPYGDISELKKFREDHNCKSFKWFMEEIAYDITSHYPLPPKNVDWGEIRGFETAYCIDSMGKTNGGFVELGPCHRMGGNQLFRINEANQLMQYDQCLTKGADGSKVMITHCNLNEFKEWQYFKNLHRFTHIPSGKCLDRSEVLHQVFISNCDSSKTTQKWEMNNIHSV

SEQ ID NO: 26603 - protein, 408 aa, Homo sapiens
MSKRDIVLTNVTVVQLLRQPCPVTRAPPPPEPKAEVEPQPQPEPTPVREEIKPPPPPLPPHPATPPPKMVSVARELTVGINGFGRIGRLVLRACMEKGVKVVAVNDPFIDPEYMVYMFKYDSTHGRYKGSVEFRNGQLVVDNHEISVYQCKEPKQIPWRAVGSPYVVESTGVYLSIQAASDHISAGAQRVVISAPSPDAPMFVMGVNENDYNPGSMNIVSNASCTTNCLAPLAKVIHERFGIVEGLMTTVHSYTATQKTVDGPSRKAWRDGRGAHQNIIPASTGAAKAVTKVIPELKGKLTGMAFRVPTPDVSVVDLTCRLAQPAPYSAIKEAVKAAAKGPMAGILAYTEDEVVSTDFLGDTHSSIFDAKAGIALNDNFVKLISWYDNEYGYSHRVVDLLRYMFSRDK

SEQ ID NO: 26604 - protein, 565 aa, Homo sapiens
MRPRSALPRLLLPLLLLPAAGPAQFHGEKGISIPDHGFCQPISIPLCTDIAYNQTIMPNLLGHTNQEDAGLEVHQFYPLVKVQCSPELRFFLCSMYAPVCTVLEQAIPPCRSICERARQGCEALMNKFGFQWPERLRCEHFPRHGAEQICVGQNHSEDGAPALLTTAPPPGLQPGAGGTPGGPGGGGAPPRYATLEHPFHCPRVLKVPSYLSYKFLGERDCAAPCEPARPDGSMFFSQEETRFARLWILTWSVLCCASTFFTVTTYLVDMQRFRYPERPIIFLSGCYTMVSVAYIAGFVLQERVVCNERFSEDGYRTVVQGTKKEGCTILFMMLYFFSMASSIWWVILSLTWFLAAGMKWGHEAIEANSQYFHLAAWAVPAVKTITILAMGQIDGDLLSGVCFVGLNSLDPLRGFVLAPLFVYLFIGTSFLLAGFVSLFRIRTIMKHDGTKTEKLERLMVRIGVFSVLYTVPATIVIACYFYEQAFREHWERSWVSQHCKSLAIPCPAHYTPRMSPDFTVYMIKYLMTLIVGITSGFWIWSGKTLHSWRKFYTRLTNSRHGETTV

SEQ ID NO: 26605 - protein, 501 aa, Homo sapiens
MRSSLAPGVWFFRAFSRDSWFRGLILLLTFLIYACYHMSRKPISIVKSRLHQNCSEQIKPINDTHSLNDTMWCSWAPFDKDNYKELLGGVDNAFLIAYAIGMFISGVFGERLPLRYYLSAGMLLSGLFTSLFGLGYFWNIHELWYFVVIQVCNGLVQTTGWPSVVTCVGNWFGKGKRGFIMGIWNSHTSVGNILGSLIAGIWVNGQWGLSFIVPGIITAVMGVITFLFLIEHPEDVDCAPPQHHGEPAENQDNPEDPGNSPCSIRESGLETVAKCSKGPCEEPAAISFFGALRIPGVVEFSLCLLFAKLVSYTFLYWLPLYIANVAHFSAKEAGDLSTLFDVGGIIGGIVAGLVSDYTNGRATTCCVMLILAAPMMFLYNYIGQDGIASSIVMLIICGGLVNGPYALITTAVSADLGTHKSLKGNAKALSTVTAIIDGTGSIGAALGPLLAGLISPTGWNNVFYMLISADVLACLLLCRLVYKEILAWKVSLSRGSGYKEI

SEQ ID NO: 26606 - protein, 505 aa, Homo sapiens
MRSSLAPGVWFFRAFSRDSWFRGLILLLTFLIYACYHMSRKPISIVKSRLHQNCSEQIKPINDTHSLNDTMWCSWAPFDKDNYKELLGGVDNAFLIAYAIGMFISGVFGERLPLRYYLSAGMLLSGLFTSLFGLGYFWNIHELWYFVVIQVCNGLVQTTGWPSVVTCVGNWFGKGKRGFIMGIWNSHTSVGNILGSLIAGIWVNGQWGLSFIVPGIITAVMGVITFLFLIEHPEDVDCAPPQHHGEPAENQDNPEDPGNSPCSIRESGLETVAKCSKGPCEEPAAISFFGALRIPGVVEFSLCLLFAKLVSYTFLYWLPLYIANVAHFSAKEAGDLSTLFDVGGIIGGIVAGLVSDYTNGRATTCCVMLILAAPMMFLYNYIGQDGIASSIVMLIICGGLVNGPYALITTAVSADLGTHKSLKGNAKALSTVTAIIDGTGSIGAALGPLLAGLISPTGWNNVFYMLISADVLACLLLCRLVYKEILAWKVSLSRGSGSSMVLTHQ

SEQ ID NO: 26607 - protein, 385 aa, Homo sapiens
MRSSLAPGVWFFRAFSRDSWFRGLILLLTFLIYACYHMSRKPISIVKSRLHQNCSEQIKPINDTHSLNDTMWCSWAPFDKDNYKELLGGVDNAFLIAYAIGMFISGVFGERLPLRYYLSAGMLLSGLFTSLFGLGYFWNIHELWYFVVIQVCNGLVQTTGWPSVVTCVGNWFGKGKRGFIMGIWNSHTSVGNILGSLIAGIWVNGQWGLSFIVPGIITAVMGVITFLFLIEHPEDVDCAPPQHHGEPAENQDNPEDPGNSPCSIRESGLETVAKCSKGPCEEPAAISFFGALRIPGVVEFSLCLLFAKLVSYTFLYWLPLYIANVAHFSAKEAGDLSTLFDVGGIIDVPVQLHWPGRDCQLHSDADHLWGPGQWPIRAHHHCCLC

SEQ ID NO: 26608 - protein, 126 aa, Homo sapiens
MFLYNYIGQDGIASSIVMLIICGGLVNGPYALITTAVSADLGTHKSLKGNAKALSTVTAIIDGTGSIGAALGPLLAGLISPTGWNNVFYMLISADVLACLLLCRLVYKEILAWKVSLSRGSGYKEI

SEQ ID NO: 26609 - protein, 429 aa, Homo sapiens
MRVSVPGPAAAAAPAAGREPSTPGGGSGGGGAVAAASGAAVPGSVQLALSVLHALLYAALFAFAYLQLWRLLLYRERRLSYQSLCLFLCLLWAALRTTLFSAAFSLSGSLPLLRPPAHLHFFPHWLLYCFPSCLQFSTLCLLNLYLAEVICKVRCATELDRHKILLHLGFIMASLLFLVVNLTCAMLVHGDVPENQLKWTVFVRALINDSLFILCAISLVCYICKITKMSSANVYLESKGMSLCQTVVVGSVVILLYSSRACYNLVVVTISQDTLESPFNYGWDNLSDKAHVEDISGEEYIVFGMVLFLWEHVPAWSVVLFFRAQRLNQNLAPAGMINSHSYSSRAYFFDNPRRYDSDDDLPRLGSSREGSLPNSQSLGWYGTMTGCGSSSYTVTPHLNGPMTDTAPLLFTCSNLDLNNHHSLYVTPQN

SEQ ID NO: 26610 - protein, 706 aa, Homo sapiens
MNESKPGDSQNLACVFCRKHDDCPNKYGEKKTKEKWNLTVHYYCLLMSSGIWQRGKEEEGVYGFLIEDIRKEVNRASKLKCCVCKKNGASIGCVAPRCKRSYHFPCGLQRECIFQFTGNFASFCWDHRPVQIITSNNYRESLPCTICLEFIEPIPSYNILRSPCCKNAWFHRDCLQVQAINAGVFFFRCTICNNSDIFQKEMLRMGIHIPEKDASWELEENAYQELLQHYERCDVRRCRCKEGRDYNAPDSKWEIKRCQCCGSSGTHLACSSLRSWEQNWECLECRGIIYNSGEFQKAKKHVLPNSNNVGITDCLLEESSPKLPRQSPGSQSKDLLRQGSKFRRNVSTLLIELGFQIKKKTKRLYINKANIWNSALDAFRNRNFNPSYAIEVAYVIENDNFGSEHPGSKQEFLSLLMQHLENSSLFEGSLSKNLSLNSQALKENLYYEAGKMLAISLVHGGPSPGFFSKTLFNCLVYGPENTQPILDDVSDFDVAQIIIRINTATTVADLKSIINECYNYLELIGCLRLITTLSDKYMLVKDILGYHVIQRVHTPFESFKQGLKTLGVLEKIQAYPEAFCSILCHKPESLSAKILSELFTVHTLPDVKALGFWNSYLQAVEDGKSTTTMEDILIFATGCSSIPPAGFKPTPSIECLHVDFPVGNKCNNCLAIPITNTYKEFQENMDFTIRNTLRLEKEESSHYIGH

SEQ ID NO: 26611 - protein, 1034 aa, Homo sapiens
MASVFMCGVEDLLFSGSRFVWNLTVSTLRRWYTERLRACHQVLRTWCGLQDVYQMTEGRHCQVHLLDDRRLELLVQPKLLARELLDLVASHFNLKEKEYFGITFIDDTGQQNWLQLDHRVLDHDLPKKPGPTILHFAVRFYIESISFLKDKTTVELFFLNAKACVHKGQIEVESETIFKLAAFILQEAKGDYTSDENARKDLKTLPAFPTKTLQEHPSLAYCEDRVIEHYLKIKGLTRGQAVVQYMKIVEALPTYGVHYYAVKDKQGLPWWLGISYKGIGQYDIQDKVKPRKLFQWKQLENLYFREKKFAVEVHDPRRISVSRRTFGQSGLFVQTWYANSSLIKSIWVMAISQHQFYLDRKQSKAKIPSARSLDEIAMDLTETGTQRASKLVTLETKSQFIMASNGSLISSGSQDSEVSEEQKREKILELKKKEKLLQEKLLKKVEELKKICLREAELTGKMPKEYPLNIGEKPPQVRRRVGTAFKLDDNLLPSEEDPALQELESNFLIQQKLVEAAKKLANEPDLCKTVKKKRKQDYTDAMKKLQEIENAINEYRIRCGKKPSQKATVLPEDIIPSESSSLSDTTTYDDPSDAFTFPGQRSSSVPHSPRILPPKSLGIERIHFRKSSINEQFVDTRQSREMLSTHSSPYKTLERRPQGGRSMPTTPVLTRNAYSSSHLEPESSSQHCRQRSGSLESQSHLLSEMDSDKPFFSLSKSQRSSSTEILDDGSSYTSQSSTEYYCVTPVTGPYYTTQTLDTRTRGRRRSKKQNVSTSNSGSMPNLAQKDSLRNGVYSKSQEPPSSSYYIAGYTPYAECDFYYSGGYVYENDTEGQYSVNPSYRSSAHYGYERQRDYSRSFHEDEVDRVPHNPYATLRLPRKAAAKSEHITKNIHKALVAEHLRGWYQRASGQKDQGHSPQTSFDSDRGSQRCLGFAGLQVPCSPSSRASSYSSVSSTNASGNWRTQLTIGLSDYETPAHSSYTSCYGNVYNPLPSPSRQYTEISQLDGTDGNQLEDNLESSEQRLFWHEDSKPGTLV

SEQ ID NO: 26612 - protein, 980 aa, Homo sapiens
MTEGRHCQVHLLDDRRLELLVQPKLLARELLDLVASHFNLKEKEYFGITFIDDTGQQNWLQLDHRVLDHDLPKKPGPTILHFAVRFYIESISFLKDKTTVELFFLNAKACVHKGQIEVESETIFKLAAFILQEAKGDYTSDENARKDLKTLPAFPTKTLQEHPSLAYCEDRVIEHYLKIKGLTRGQAVVQYMKIVEALPTYGVHYYAVKDKQGLPWWLGISYKGIGQYDIQDKVKPRKLFQWKQLENLYFREKKFAVEVHDPRRISVSRRTFGQSGLFVQTWYANSSLIKSIWVMAISQHQFYLDRKQSKAKIPSARSLDEIAMDLTETGTQRASKLVTLETKSQFIMASNGSLISSGSQDSEVSEEQKREKILELKKKEKLLQEKLLKKVEELKKICLREAELTGKMPKEYPLNIGEKPPQVRRRVGTAFKLDDNLLPSEEDPALQELESNFLIQQKLVEAAKKLANEPDLCKTVKKKRKQDYTDAMKKLQEIENAINEYRIRCGKKPSQKATVLPEDIIPSESSSLSDTTTYDDPSDAFTFPGQRSSSVPHSPRILPPKSLGIERIHFRKSSINEQFVDTRQSREMLSTHSSPYKTLERRPQGGRSMPTTPVLTRNAYSSSHLEPESSSQHCRQRSGSLESQSHLLSEMDSDKPFFSLSKSQRSSSTEILDDGSSYTSQSSTEYYCVTPVTGPYYTTQTLDTRTRGRRRSKKQNVSTSNSGSMPNLAQKDSLRNGVYSKSQEPPSSSYYIAGYTPYAECDFYYSGGYVYENDTEGQYSVNPSYRSSAHYGYERQRDYSRSFHEDEVDRVPHNPYATLRLPRKAAAKSEHITKNIHKALVAEHLRGWYQRASGQKDQGHSPQTSFDSDRGSQRCLGFAGLQVPCSPSSRASSYSSVSSTNASGNWRTQLTIGLSDYETPAHSSYTSCYGNVYNPLPSPSRQYTEISQLDGTDGNQLEDNLESSEQRLFWHEDSKPGTLV

SEQ ID NO: 26613 - protein, 505 aa, Homo sapiens
MDPGNENSATEAAAIIDLDPDFEPQSRPRSCTWPLPRPEIANQPSEPPEVEPDLGEKVHTEGRSEPILLPSRLPEPAGGPQPGILGAVTGPRKGGSRRNAWGNQSYAELISQAIESAPEKRLTLAQIYEWMVRTVPYFKDKGDSNSSAGWKNSIRHNLSLHSKFIKVHNEATGKSSWWMLNPEGGKSGKAPRRRAASMDSSSKLLRGRSKAPKKKPSVLPAPPEGATPTSPVGHFAKWSGSPCSRNREEADMWTTFRPRSSSNASSVSTRLSPLRPESEVLAEEIPASVSSYAGGVPPTLNEGLELLDGLNLTSSHSLLSRSGLSGFSLQHPGVTGPLHTYSSSLFSPAEGPLSAGEGCFSSSQALEALLTSDTPPPPADVLMTQVDPILSQAPTLLLLGGLPSSSKLATGVGLCPKPLEAPGPSSLVPTLSMIAPPPVMASAPIPKALGTPVLTPPTEAASQDRMPQDLDLDMYMENLECDMDNIISDLMDEGEGLDFNFEPDP

SEQ ID NO: 26614 - protein, 450 aa, Homo sapiens
MDPGNENSATEAAAIIDLDPDFEPQSRPRSCTWPLPRPEIANQPSEPPEVEPDLGEKAIESAPEKRLTLAQIYEWMVRTVPYFKDKGDSNSSAGWKNSIRHNLSLHSKFIKVHNEATGKSSWWMLNPEGGKSGKAPRRRAASMDSSSKLLRGRSKAPKKKPSVLPAPPEGATPTSPVGHFAKWSGSPCSRNREEADMWTTFRPRSSSNASSVSTRLSPLRPESEVLAEEIPASVSSYAGGVPPTLNEGLELLDGLNLTSSHSLLSRSGLSGFSLQHPGVTGPLHTYSSSLFSPAEGPLSAGEGCFSSSQALEALLTSDTPPPPADVLMTQVDPILSQAPTLLLLGGLPSSSKLATGVGLCPKPLEAPGPSSLVPTLSMIAPPPVMASAPIPKALGTPVLTPPTEAASQDRMPQDLDLDMYMENLECDMDNIISDLMDEGEGLDFNFEPDP

SEQ ID NO: 26615 - protein, 814 aa, Homo sapiens
MAVQRAASPRRPPAPLWPRLLLPLLLLLLPAPSEGLGHSAELAFAVEPSDDVAVPGQPIVLDCRVEGTPPVRITWRKNGVELPESTHSTLLANGSLMIRHFRLEPGGSPSDEGDYECVAQNRFGLVVSRKARIQAATMSDFHVHPQATVGEEGGVARFQCQIHGLPKPLITWEKNRVPIDTDNERYTLLPKGVLQITGLRAEDGGIFHCVASNIASIRISHGARLTVSGSGSGAYKEPAILVGPENLTLTVHQTAVLECVATGNPRPIVSWSRLDGRPIGVEGIQVLGTGNLIISDVTVQHSGVYVCAANRPGTRVRRTAQGRLVVQAPAEFVQHPQSISRPAGTTAMFTCQAQGEPPPHVTWLKNGQVLGPGGHVRLKNNNSTLTISGIGPEDEAIYQCVAENSAGSSQASARLTVLWAEGLPGPPRNVRAVSVSSTEVRVSWSEPLANTKEIIGYVLHIRKAADPPELEYQEAVSKSTFQHLVSDLEPSTAYSFYIKAYTPRGASSASVPTLASTLGEAPAPPPLSVRVLGSSSLQLLWEPWPRLAQHEGGFKLFYRPASKTSFTGPILLPGTVSSYNLSQLDPTAVYEVKLLAYNQHGDGNATVRFVSLRGASERTALSPPCDCRKEEAANQTSTTGIVIGIHIGVTCIIFCVLFLLFGQRGRVLLCKDVENQLSPPQGPRSQRDPGILALNGARRGQRGQLGRDEKRVDMKELEQLFPPASAAGQPDPRPTQDPAAPAPCEETQLSVLPLQGCGLMEGKTTEAKTTEATAPCAGLAAAPPPPDGGPGLLSEGQASRPAAARVTQPAHSEQ

SEQ ID NO: 26616 - protein, 506 aa, Homo sapiens
MLSKVLPVLLGILLILQSRVEGPQTESKNEASSRDVVYGPQPQPLENQLLSEETKSTETETGSRVGKLPEASRILNTILSNYDHKLRPGIGEKPTVVTVEISVNSLGPLSILDMEYTIDIIFSQTWYDERLCYNDTFESLVLNGNVVSQLWIPDTFFRNSKRTHEHEITMPNQMVRIYKDGKVLYTIRMTIDAGCSLHMLRFPMDSHSCPLSFSSFSYPENEMIYKWENFKLEINEKNSWKLFQFDFTGVSNKTEIITTPVGDFMVMTIFFNVSRRFGYVAFQNYVPSSVTTMLSWVSFWIKTESAPARTSLGITSVLTMTTLGTFSRKNFPRVSYITALDFYIAICFVFCFCALLEFAVLNFLIYNQTKAHASPKLRHPRINSRAHARTRARSRACARQHQEAFVCQIVTTEGSDGEERPSCSAQQPPSPGSPEGPRSLCSKLACCEWCKRFKKYFCMVPDCEGSTWQQGRLCIHVYRLDNYSRVVFPVTFFFFNVLYWLVCLNL

SEQ ID NO: 26617 - protein, 365 aa, Homo sapiens
MLSKVLPVLLGILLILQSRVEGPQTESKNEASSRDVVYGPQPQPLENQLLSEETKSTETETGSRVGKLPEASRILNTILSNYDHKLRPGIGEKPTVVTVEISVNSLGPLSILDMEYTIDIIFSQTWYDERLCYNDTFESLVLNGNVVSQLWIPDTFFRNSKRTHEHEITMPNQMVRIYKDGKVLYTIRMTIDAGCSLHMLRFPMDSHSCPLSFSSFSYPENEMIYKWENFKLEINEKNSWKLFQFDFTGVSNKTEIITTPVGDFMVMTIFFNVSRRFGYVAFQNYVPSSVTTMLSWVSFWIKTESAPARTSLGITSVLTMTTLGTFSRKNFPRVSYITALDFYIAICFVFCFCALLEFAVLNFLM

SEQ ID NO: 26618 - protein, 496 aa, Homo sapiens
MFAKATRNFLREVDADGDLIAVSNLNDSDKLQLLSLVTKKKRFWCWQRPKYQFLSLTLGDVLIEDQFPSPVVVESDFVKYEGKFANHVSGTLETALGKVKLNLGGSSRVESQSSFGTLRKQEVDLQQLIRDSAERTINLRNPVLQQVLEGRNEVLCVLTQKITTMQKCVISEHMQVEEKCGGIVGIQTKTVQVSATEDGNVTKDSNVVLEIPAATTIAYGVIELYVKLDGQFEFCLLRGKQGGFENKKRIDSVYLDPLVFREFAFIDMPDAAHGISSQDGPLSVLKQATLLLERNFHPFAELPEPQQTALSDIFQAVLFDDELLMVLEPVCDDLVSGLSPTVAVLGELKPRQQQDLVAFLQLVGCSLQGGCPGPEDAGSKQLFMTAYFLVSALAEMPDSAAALLGTCCKLQIIPTLCHLLRALSDDGVSDLEDPTLTPLKDTERFGIVQRLFASADISLERLKSSVKAVILKDSKVFPLLLCITLNGLCALGREHS

SEQ ID NO: 26619 - protein, 101 aa, Homo sapiens
MPDSAAALLGTCCKLQIIPTLCHLLRALSDDGVSDLEDPTLTPLKDTERFGIVQRLFASADISLERLKSSVKAVILKDSKVFPLLLCITLNGLCALGREHS

SEQ ID NO: 26620 - protein, 332 aa, Homo sapiens
MQKCVISEHMQVEEKCGGIVGIQTKTVQVSATEDGNVTKDSNVVLEIPAATTIAYGVIELYVKLDGQFEFCLLRGKQGGFENKKRIDSVYLDPLVFREFAFIDMPDAAHGISSQDGPLSVLKQATLLLERNFHPFAELPEPQQTALSDIFQAVLFDDELLMVLEPVCDDLVSGLSPTVAVLGELKPRQQQDLVAFLQLVGCSLQGGCPGPEDAGSKQLFMTAYFLVSALAEMPDSAAALLGTCCKLQIIPTLCHLLRALSDDGVSDLEDPTLTPLKDTERFGIVQRLFASADISLERLKSSVKAVILKDSKVFPLLLCITLNGLCALGREHS

SEQ ID NO: 26621 - protein, 603 aa, Homo sapiens
MSCGNEFVETLKKIGYPKADNLNGEDFDWLFEGVEDESFLKWFCGNVNEQNVLSERELEAFSILQKSGKPILEGAALDEALKTCKTSDLKTPRLDDKELEKLEDEVQTLLKLKNLKIQRRNKCQLMASVTSHKSLRLNAKEEEATKKLKQSQGILNAMITKISNELQALTDEVTQLMMFFRHSNLGQGTNPLVFLSQFSLEKYLSQEEQSTAALTLYTKKQFFQGIHEVVESSNEDNFQLLDIQTPSICDNQEILEERRLEMARLQLAYICAQHQLIHLKASNSSMKSSIKWAEESLHSLTSKAVDKENLDAKISSLTSEIMKLEKEVTQIKDRSLPAVVRENAQLLNMPVVKGDFDLQIAKQDYYTARQELVLNQLIKQKASFELLQLSYEIELRKHRDIYRQLENLVQELSQSNMMLYKQLEMLTDPSVSQQINPRNTIDTKDYSTHRLYQVLEGENKKKELFLTHGNLEEVAEKLKQNISLVQDQLAVSAQEHSFFLSKRNKDVDMLCDTLYQGGNQLLLSDQELTEQFHKVESQLNKLNHLLTDILADVKTKRKTLANNKLHQMEREFYVYFLKDEDYLKDIVENLETQSKIKAVSLED

SEQ ID NO: 26622 - protein, 489 aa, Homo sapiens
MSCGNEFVETLKKIGYPKADNLNGEDFDWLFEGVEDESFLKWFCGNVNEQNVLSERELEAFSILQKSGKPILEGAALDEALKTCKTSDLKTPRLDDKELEKLEDEVQTLLKLKNLKIQRRNKCQLMASVTSHKSLRLNAKEEEATKKLKQSQGILNAMITKISNELQALTDEVTQLMMFFRHSNLGQGTNPLVFLSQFSLEKYLSQEEQSTAALTLYTKKQFFQGIHEVVESSNEDNFQLLDIQTPSICDNQEILEERRLEMARLQLAYICAQHQLIHLKASNSSMKSSIKWAEESLHSLTSKAVDKENLDAKISSLTSEIMKLEKEVTQIKDRSLPAVVRENAQLLNMPVVKGDFDLQIAKQDYYTARQELVLNQLIKQKASFELLQLSYEIELRKHRDIYRQLENLVQELSQSNMMLYKQLEMLTDPSVSQQINPRNTIDTKDYSTHRLYQVLEGENKKKELFLTHGNLEEVAEAGEWHEPRRRGLQ

SEQ ID NO: 26623 - protein, 1297 aa, Homo sapiens
MAVPSLWPWGACLPVIFLSLGFGLDTVEVCPSLDIRSEVAELRQLENCSVVEGHLQILLMFTATGEDFRGLSFPRLTQVTDYLLLFRVYGLESLRDLFPNLAVIRGTRLFLGYALVIFEMPHLRDVALPALGAVLRGAVRVEKNQELCHLSTIDWGLLQPAPGANHIVGNKLGEECADVCPGVLGAAGEPCAKTTFSGHTDYRCWTSSHCQRVCPCPHGMACTARGECCHTECLGGCSQPEDPRACVACRHLYFQGACLWACPPGTYQYESWRCVTAERCASLHSVPGRASTFGIHQGSCLAQCPSGFTRNSSSIFCHKCEGLCPKECKVGTKTIDSIQAAQDLVGCTHVEGSLILNLRQGYNLEPQLQHSLGLVETITGFLKIKHSFALVSLGFFKNLKLIRGDAMVDGNYTLYVLDNQNLQQLGSWVAAGLTIPVGKIYFAFNPRLCLEHIYRLEEVTGTRGRQNKAEINPRTNGDRAACQTRTLRFVSNVTEADRILLRWERYEPLEARDLLSFIVYYKESPFQNATEHVGPDACGTQSWNLLDVELPLSRTQEPGVTLASLKPWTQYAVFVRAITLTTEEDSPHQGAQSPIVYLRTLPAAPTVPQDVISTSNSSSHLLVRWKPPTQRNGNLTYYLVLWQRLAEDGDLYLNDYCHRGLRLPTSNNDPRFDGEDGDPEAEMESDCCPCQHPPPGQVLPPLEAQEASFQKKFENFLHNAITIPISPWKVTSINKSPQRDSGRHRRAAGPLRLGGNSSDFEIQEDKVPRERAVLSGLRHFTEYRIDIHACNHAAHTVGCSAATFVFARTMPHREADGIPGKVAWEASSKNSVLLRWLEPPDPNGLILKYEIKYRRLGEEATVLCVSRLRYAKFGGVHLALLPPGNYSARVRATSLAGNGSWTDSVAFYILGPEEEDAGGLHVLLTATPVGLTLLIVLAALGFFYGKKRNRTLYASVNPEYFSASDMYVPDEWEVPREQISIIRELGQGSFGMVYEGLARGLEAGEESTPVALKTVNELASPRECIEFLKEASVMKAFKCHHVVRLLGVVSQGQPTLVIMELMTRGDLKSHLRSLRPEAENNPGLPQPALGEMIQMAGEIADGMAYLAANKFVHRDLAARNCMVSQDFTVKIGDFGMTRDVYETDYYRKGGKGLLPVRWMAPESLKDGIFTTHSDVWSFGVVLWEIVTLAEQPYQGLSNEQVLKFVMDGGVLEELEGCPLQLQELMSRCWQPNPRLRPSFTHILDSIQEELRPSFRLLSFYYSPECRGARGSLPTTDAEPDSSPTPRDCSPQNGGPGH

SEQ ID NO: 26624 - protein, 290 aa, Homo sapiens
MSSYFVNPLYSKYKAAAAAAAAAGEAINPTYYDCHFAPEVGGRHAAAAAALQLYGNSAAGFPHAPPQAHAHPHPSPPPSGTGCGGREGRGQEYFHPGGGSPAAAYQAAPPPPPHPPPPPPPPPCGGIACHGEPAKFYGYDNLQRQPIFTTQQEAELVQYPDCKSSSGNIGEDPDHLNQSSSPSQMFPWMRPQAAPGRRRGRQTYSRFQTLELEKEFLFNPYLTRKRRIEVSHALALTERQVKIWFQNRRMKWKKENNKDKFPVSRQEVKDGETKKEAQELEEDRAEGLTN

SEQ ID NO: 26625 - protein, 289 aa, Homo sapiens
MSSYFVNPLYSKYKAAAAAAAAAGEAINPTYYDCHFAPEVGGRHAAAAAALQLYGNSAAGFPHAPPQAHAHPHPSPPPSGTGCGGREGRGQEYFHPGGGSPAAAYQAAPPPPPHPPPPPPPPPCGGIACHGEPAKFYGYDNLQRQPIFTTQQEAELVQYPDCKSSSGNIGEDPDHLNQSSSPSQMFPWMRPQAPGRRRGRQTYSRFQTLELEKEFLFNPYLTRKRRIEVSHALALTERQVKIWFQNRRMKWKKENNKDKFPVSRQEVKDGETKKEAQELEEDRAEGLTN

SEQ ID NO: 26626 - protein, 67 aa, Homo sapiens
MFPWMRPQAAPGRRRGRQTYSRFQTLELEKEFLFNPYLTRKRRIEVSHALALTERQVKIWFQNRRMK

SEQ ID NO: 26627 - protein, 343 aa, Homo sapiens
MLLLKKHTEDISSVYEIRERLGSGAFSEVVLAQERGSAHLVALKCIPKKALRGKEALVENEIAVLRRISHPNIVALEDVHESPSHLYLAMELVTGGELFDRIMERGSYTEKDASHLVGQVLGAVSYLHSLGIVHRDLKPENLLYATPFEDSKIMVSDFGLSKIQAGNMLGTACGTPGYVAPELLEQKPYGKAVDVWALGVISYILLCGYPPFYDESDPELFSQILRASYEFDSPFWDDISESAKDFIRHLLERDPQKRFTCQQALRHLWISGDTAFDRDILGSVSEQIRKNFARTHWKRAFNATSFLRHIRKLGQIPEGEGASEQGMARHSHSGLRAGQPPKW

SEQ ID NO: 26628 - protein, 366 aa, Homo sapiens
MLLLKKHTEDISSVYEIRERLGSGAFSEVVLAQERGSAHLVALKCIPKKALRGKEALVENEIAVLRRISHPNIVALEDVHESPSHLYLAMELVTGGELFDRIMERGSYTEKDASHLVGQVLGAVSYLHSLGIVHRDLKPENLLYATPFEDSKIMVSDFGLSKIQAGNMLGTACGTPGYAEPVTLSGMAACVPVRASVCLWPPAPELLEQKPYGKAVDVWALGVISYILLCGYPPFYDESDPELFSQILRASYEFDSPFWDDISESAKDFIRHLLERDPQKRFTCQQALRHLWISGDTAFDRDILGSVSEQIRKNFARTHWKRAFNATSFLRHIRKLGQIPEGEGASEQGMARHSHSGLRAGQPPKW

SEQ ID NO: 26629 - protein, 241 aa, Homo sapiens
MERGSYTEKDASHLVGQVLGAVSYLHSLGIVHRDLKPENLLYATPFEDSKIMVSDFGLSKIQAGNMLGTACGTPGYVAPELLEQKPYGKAVDVWALGVISYILLCGYPPFYDESDPELFSQILRASYEFDSPFWDDISESAKDFIRHLLERDPQKRFTCQQALRHLWISGDTAFDRDILGSVSEQIRKNFARTHWKRAFNATSFLRHIRKLGQIPEGEGASEQGMARHSHSGLRAGQPPKW

SEQ ID NO: 26630 - protein, 426 aa, Homo sapiens
MEAAFGQVAGSACPRRGGEGRDWKAESLADLWPKSSPGDSHRWCKGPGAGPAGPQLREAARASSGLGGGGRHPSRIPAIALQDMLLLKKHTEDISSVYEIRERLGSGAFSEVVLAQERGSAHLVALKCIPKKALRGKEALVENEIAVLRRISHPNIVALEDVHESPSHLYLAMELVTGGELFDRIMERGSYTEKDASHLVGQVLGAVSYLHSLGIVHRDLKPENLLYATPFEDSKIMVSDFGLSKIQAGNMLGTACGTPGYVAPELLEQKPYGKAVDVWALGVISYILLCGYPPFYDESDPELFSQILRASYEFDSPFWDDISESAKDFIRHLLERDPQKRFTCQQALRHLWISGDTAFDRDILGSVSEQIRKNFARTHWKRAFNATSFLRHIRKLGQIPEGEGASEQGMARHSHSGLRAGQPPKW

SEQ ID NO: 26631 - protein, 360 aa, Homo sapiens
MWRRVCGGLAGRRPSGDMLLLKKHTEDISSVYEIRERLGSGAFSEVVLAQERGSAHLVALKCIPKKALRGKEALVENEIAVLRRISHPNIVALEDVHESPSHLYLAMELVTGGELFDRIMERGSYTEKDASHLVGQVLGAVSYLHSLGIVHRDLKPENLLYATPFEDSKIMVSDFGLSKIQAGNMLGTACGTPGYVAPELLEQKPYGKAVDVWALGVISYILLCGYPPFYDESDPELFSQILRASYEFDSPFWDDISESAKDFIRHLLERDPQKRFTCQQALRHLWISGDTAFDRDILGSVSEQIRKNFARTHWKRAFNATSFLRHIRKLGQIPEGEGASEQGMARHSHSGLRAGQPPKW

SEQ ID NO: 26632 - protein, 231 aa, Homo sapiens
MQDEERYMTLNVQSKKRSSAQTSQLTFKDYSVTLHWYKILLGISGTVNGILTLTLISLILLVSQGVLLKCQKGSCSNATQYEDTGDLKVNNGTRRNISNKDLCASRSADQTVLCQSEWLKYQGKCYWFSNEMKSWSDSYVYCLERKSHLLIIHDQLEMAFIQKNLRQLNYVWIGLNFTSLKMTWTWVDGSPIDSKIFFIKGPAKENSCAAIKESKIFSETCSSVFKWICQY

SEQ ID NO: 26633 - protein, 181 aa, Homo sapiens
MQDEERYMTLNVQSKKRSSAQTSQLTFKDYSVTLHWYKILLGISGTVNGILTLTLISLILLVLCQSEWLKYQGKCYWFSNEMKSWSDSYVYCLERKSHLLIIHDQLEMAFIQKNLRQLNYVWIGLNFTSLKMTWTWVDGSPIDSKIFFIKGPAKENSCAAIKESKIFSETCSSVFKWICQY

SEQ ID NO: 26634 - protein, 64 aa, Homo sapiens
MQDEERYMTLNVQSKKRSSAQTSQLTFKDYSVTLHWYKILLGISGTVNGILTLTLISLILLDSS

SEQ ID NO: 26635 - protein, 78 aa, Homo sapiens
MQDEERYMTLNVQSKKRSSAQTSQLTFKDYSVTLHWYKILLGISGTVNGILTLTLISLILLGFYTEKPKTIKLRMDWA

SEQ ID NO: 26636 - protein, 225 aa, Homo sapiens
MDQQAIYAELNLPTDSGPESSSPSSLPRDVCQGSPWHQFALKLSCAGIILLVLVVTGLSVSVTSLIQKSSIEKCSVDIQQSRNKTTERPGLLNCPIYWQQLREKCLLFSHTVNPWNNSLADCSTKESSLLLIRDKDELIHTQNLIRDKAILFWIGLNFSLSEKNWKWINGSFLNSNDLEIRGDAKENSCISISQTSVYSEYCSTEIRWICQKELTPVRNKVYPDS

SEQ ID NO: 26637 - protein, 232 aa, Homo sapiens
MLGAMFRAGTPMPPNLNSQGGGHYFIDRDGKAFRHILNFLRLGRLDLPRGYGETALLRAEADFYQIRPLLDALRELEASQGTPAPTAALLHADVDVSPRLVHFSARRGPHHYELSSVQVDTFRANLFCTDSECLGALRARFGVASGDRAEGSPHFHLEWAPRPVELPEVEYGRLGLQPLWTGGPGERREVVGTPSFLEEVLRVALEHGFRLDSVFPDPEDLLNSRSLRFVRH

SEQ ID NO: 26638 - protein, 271 aa, Homo sapiens
MSPPPVPSSPPSFGGPVTLNVGGTLYSTTLETLTRFPDSMLGAMFRAGTPMPPNLNSQGGGHYFIDRDGKAFRHILNFLRLGRLDLPRGYGETALLRAEADFYQIRPLLDALRELEASQGTPAPTAALLHADVDVSPRLVHFSARRGPHHYELSSVQVDTFRANLFCTDSECLGALRARFGVASGDRAEGSPHFHLEWAPRPVELPEVEYGRLGLQPLWTGGPGERREVVGTPSFLEEVLRVALEHGFRLDSVFPDPEDLLNSRSLRFVRH

SEQ ID NO: 26639 - protein, 210 aa, Homo sapiens
MAKLRVAYEYTEAEDKSIRLGLFLIISGVVSLFIFGFCWLSPALQDLQATEANCTVLSVQQIGEVFECTFTCGADCRGTSQYPCVQVYVNNSESNSRALLHSDEHQLLTNPKCSYIPPCKRENQKNLESVMNWQQYWKDEIGSQPFTCYFNQHQRPDDVLLHRTHDEIVLLHCFLWPLVTFVVGVLIVVLTICAKSLAVKAEAMKKRKFS

SEQ ID NO: 26640 - protein, 279 aa, Homo sapiens
MDFSPSSELGFHFVAFILLTRHRTAFPASGKKRETDYSDGDPLDVHKRLPSSAGEDRAVMLGFAMMGFSVLMFFLLGTTILKPFMLSIQREESTCTAIHTDIMDDWLDCAFTCGVHCHGQGKYPCLQVFVNLSHPGQKALLHYNEEAVQINPKCFYTPKCHQDRNDLLNSALDIKEFFDHKNGTPFSCFYSPASQSEDVILIKKYDQMAIFHCLFWPSLTLLGGALIVGMVRLTQHLSLLCEKYSTVVRDEVGGKVPYIEQHQFKLCIMRRSKGRAEKS

SEQ ID NO: 26641 - protein, 277 aa, Homo sapiens
MQPFSIPVQITLQGSRRRQGRTAFPASGKKRETDYSDGDPLDVHKRLPSSAGEDRAVMLGFAMMGFSVLMFFLLGTTILKPFMLSIQREESTCTAIHTDIMDDWLDCAFTCGVHCHGQGKYPCLQVFVNLSHPGQKALLHYNEEAVQINPKCFYTPKCHQDRNDLLNSALDIKEFFDHKNGTPFSCFYSPASQSEDVILIKKYDQMAIFHCLFWPSLTLLGGALIVGMVRLTQHLSLLCEKYSTVVRDEVGGKVPYIEQHQFKLCIMRRSKGRAEKS

SEQ ID NO: 26642 - protein, 275 aa, Homo sapiens
MFPLLYELTAVSPSPFPQRTAFPASGKKRETDYSDGDPLDVHKRLPSSAGEDRAVMLGFAMMGFSVLMFFLLGTTILKPFMLSIQREESTCTAIHTDIMDDWLDCAFTCGVHCHGQGKYPCLQVFVNLSHPGQKALLHYNEEAVQINPKCFYTPKCHQDRNDLLNSALDIKEFFDHKNGTPFSCFYSPASQSEDVILIKKYDQMAIFHCLFWPSLTLLGGALIVGMVRLTQHLSLLCEKYSTVVRDEVGGKVPYIEQHQFKLCIMRRSKGRAEKS

SEQ ID NO: 26643 - protein, 257 aa, Homo sapiens
MTAFPASGKKRETDYSDGDPLDVHKRLPSSAGEDRAVMLGFAMMGFSVLMFFLLGTTILKPFMLSIQREESTCTAIHTDIMDDWLDCAFTCGVHCHGQGKYPCLQVFVNLSHPGQKALLHYNEEAVQINPKCFYTPKCHQDRNDLLNSALDIKEFFDHKNGTPFSCFYSPASQSEDVILIKKYDQMAIFHCLFWPSLTLLGGALIVGMVRLTQHLSLLCEKYSTVVRDEVGGKVPYIEQHQFKLCIMRRSKGRAEKS

SEQ ID NO: 26644 - protein, 173 aa, Homo sapiens
MQPFSIPVQITLQGSRRRQGRTAFPASGKKRETDYSDGDPLDVHKRLPSSAGEDRAVMLGFAMMGFSVLMFFLLGTTILKPFMLSIQREESTCTAIHTDIMDDWLDCAFTCGVHCHGQGKYPCLQVFVNLSHPGQKALLHYNEEAVQINPKRDVTDCRVKEKQTLTVSDEHKQ

SEQ ID NO: 26645 - protein, 1823 aa, Homo sapiens
MALSSAWRSVLPLWLLWSAACSRAASGDDNAFPFDIEGSSAVGRQDPPETSEPRVALGRLPPAAEKCNAGFFHTLSGECVPCDCNGNSNECLDGSGYCVHCQRNTTGEHCEKCLDGYIGDSIRGAPQFCQPCPCPLPHLANFAESCYRKNGAVRCICNENYAGPNCERCAPGYYGNPLLIGSTCKKCDCSGNSDPNLIFEDCDEVTGQCRNCLRNTTGFKCERCAPGYYGDARIAKNCAVCNCGGGPCDSVTGECLEEGFEPPTGMDCPTISCDKCVWDLTDALRLAALSIEEGKSGVLSVSSGAAAHRHVNEINATIYLLKTKLSERENQYALRKIQINNAENTMKSLLSDVEELVEKENQASRKGQLVQKESMDTINHASQLVEQAHDMRDKIQEINNKMLYYGEEHELSPKEISEKLVLAQKMLEEIRSRQPFFTQRELVDEEADEAYELLSQAESWQRLHNETRTLFPVVLEQLDDYNAKLSDLQEALDQALNYVRDAEDMNRATAARQRDHEKQQERVREQMEVVNMSLSTSADSLTTPRLTLSELDDIIKNASGIYAEIDGAKSELQVKLSNLSNLSHDLVQEAIDHAQDLQQEANELSRKLHSSDMNGLVQKALDASNVYENIVNYVSEANETAEFALNTTDRIYDAVSGIDTQIIYHKDESENLLNQARELQAKAESSSDEAVADTSRRVGGALARKSALKTRLSDAVKQLQAAERGDAQQRLGQSRLITEEANRTTMEVQQATAPMANNLTNWSQNLQHFDSSAYNTAVNSARDAVRNLTEVVPQLLDQLRTVEQKRPASNVSASIQRIRELIAQTRSVASKIQVSMMFDGQSAVEVHSRTSMDDLKAFTSLSLYMKPPVKRPELTETADQFILYLGSKNAKKEYMGLAIKNDNLVYVYNLGTKDVEIPLDSKPVSSWPAYFSIVKIERVGKHGKVFLTVPSLSSTAEEKFIKKGEFSGDDSLLDLDPEDTVFYVGGVPSNFKLPTSLNLPGFVGCLELATLNNDVISLYNFKHIYNMDPSTSVPCARDKLAFTQSRAASYFFDGSGYAVVRDITRRGKFGQVTRFDIEVRTPADNGLILLMVNGSMFFRLEMRNGYLHVFYDFGFSGGPVHLEDTLKKAQINDAKYHEISIIYHNDKKMILVVDRRHVKSMDNEKMKIPFTDIYIGGAPPEILQSRALRAHLPLDINFRGCMKGFQFQKKDFNLLEQTETLGVGYGCPEDSLISRRAYFNGQSFIASIQKISFFDGFEGGFNFRTLQPNGLLFYYASGSDVFSISLDNGTVIMDVKGIKVQSVDKQYNDGLSHFVISSVSPTRYELIVDKSRVGSKNPTKGKIEQTQASEKKFYFGGSPISAQYANFTGCISNAYFTRVDRDVEVEDFQRYTEKVHTSLYECPIESSPLFLLHKKGKNLSKPKASQNKKGGKSKDAPSWDPVALKLPERNTPRNSHCHLSNSPRAIEHAYQYGGTANSRQEFEHLKGDFGAKSQFSIRLRTRSSHGMIFYVSDQEENDFMTLFLAHGRLVYMFNVGHKKLKIRSQEKYNDGLWHDVIFIRERSSGRLVIDGLRVLEESLPPTEATWKIKGPIYLGGVAPGKAVKNVQINSIYSFSGCLSNLQLNGASITSASQTFSVTPCFEGPMETGTYFSTEGGYVVLDESFNIGLKFEIAFEVRPRSSSGTLVHGHSVNGEYLNVHMKNGQVIVKVNNGIRDFSTSVTPKQSLCDGRWHRITVIRDSNVVQLDVDSEVNHVVGPLNPKPIDHREPVFVGGVPESLLTPRLAPSKPFTGCIRHFVIDGHPVSFSKAALVSGAVSINSCPAA

SEQ ID NO: 26646 - protein, 1816 aa, Homo sapiens
MALSSAWRSVLPLWLLWSAACSRAASGDDNAFPFDIEGSSAVGRQDPPETSEPRVALGRLPPAAEKCNAGFFHTLSGECVPCDCNGNSNECLDGSGYCVHCQRNTTGEHCEKCLDGYIGDSIRGAPQFCQPCPCPLPHLANFAESCYRKNGAVRCICNENYAGPNCERCAPGYYGNPLLIGSTCKKCDCSGNSDPNLIFEDCDEVTGQCRNCLRNTTGFKCERCAPGYYGDARIAKNCAVCNCGGGPCDSVTGECLEEGFEPPTGCDKCVWDLTDALRLAALSIEEGKSGVLSVSSGAAAHRHVNEINATIYLLKTKLSERENQYALRKIQINNAENTMKSLLSDVEELVEKENQASRKGQLVQKESMDTINHASQLVEQAHDMRDKIQEINNKMLYYGEEHELSPKEISEKLVLAQKMLEEIRSRQPFFTQRELVDEEADEAYELLSQAESWQRLHNETRTLFPVVLEQLDDYNAKLSDLQEALDQALNYVRDAEDMNRATAARQRDHEKQQERVREQMEVVNMSLSTSADSLTTPRLTLSELDDIIKNASGIYAEIDGAKSELQVKLSNLSNLSHDLVQEAIDHAQDLQQEANELSRKLHSSDMNGLVQKALDASNVYENIVNYVSEANETAEFALNTTDRIYDAVSGIDTQIIYHKDESENLLNQARELQAKAESSSDEAVADTSRRVGGALARKSALKTRLSDAVKQLQAAERGDAQQRLGQSRLITEEANRTTMEVQQATAPMANNLTNWSQNLQHFDSSAYNTAVNSARDAVRNLTEVVPQLLDQLRTVEQKRPASNVSASIQRIRELIAQTRSVASKIQVSMMFDGQSAVEVHSRTSMDDLKAFTSLSLYMKPPVKRPELTETADQFILYLGSKNAKKEYMGLAIKNDNLVYVYNLGTKDVEIPLDSKPVSSWPAYFSIVKIERVGKHGKVFLTVPSLSSTAEEKFIKKGEFSGDDSLLDLDPEDTVFYVGGVPSNFKLPTSLNLPGFVGCLELATLNNDVISLYNFKHIYNMDPSTSVPCARDKLAFTQSRAASYFFDGSGYAVVRDITRRGKFGQVTRFDIEVRTPADNGLILLMVNGSMFFRLEMRNGYLHVFYDFGFSGGPVHLEDTLKKAQINDAKYHEISIIYHNDKKMILVVDRRHVKSMDNEKMKIPFTDIYIGGAPPEILQSRALRAHLPLDINFRGCMKGFQFQKKDFNLLEQTETLGVGYGCPEDSLISRRAYFNGQSFIASIQKISFFDGFEGGFNFRTLQPNGLLFYYASGSDVFSISLDNGTVIMDVKGIKVQSVDKQYNDGLSHFVISSVSPTRYELIVDKSRVGSKNPTKGKIEQTQASEKKFYFGGSPISAQYANFTGCISNAYFTRVDRDVEVEDFQRYTEKVHTSLYECPIESSPLFLLHKKGKNLSKPKASQNKKGGKSKDAPSWDPVALKLPERNTPRNSHCHLSNSPRAIEHAYQYGGTANSRQEFEHLKGDFGAKSQFSIRLRTRSSHGMIFYVSDQEENDFMTLFLAHGRLVYMFNVGHKKLKIRSQEKYNDGLWHDVIFIRERSSGRLVIDGLRVLEESLPPTEATWKIKGPIYLGGVAPGKAVKNVQINSIYSFSGCLSNLQLNGASITSASQTFSVTPCFEGPMETGTYFSTEGGYVVLDESFNIGLKFEIAFEVRPRSSSGTLVHGHSVNGEYLNVHMKNGQVIVKVNNGIRDFSTSVTPKQSLCDGRWHRITVIRDSNVVQLDVDSEVNHVVGPLNPKPIDHREPVFVGGVPESLLTPRLAPSKPFTGCIRHFVIDGHPVSFSKAALVSGAVSINSCPAA

SEQ ID NO: 26647 - protein, 120 aa, Homo sapiens
MALSSAWRSVLPLWLLWSAACSRAASGDDNAFPFDIEGSSAVGRQDPPETSEPRVALGRLPPAAEVQCPCHCHPAGAPAPPRAVPHSSFSLSPPLSSPQCLESFTWARSVRKLEIKSFPL

SEQ ID NO: 26648 - protein, 666 aa, Homo sapiens
MADMEDLFGSDADSEAERKDSDSGSDSDSDQENAASGSNASGSESDQDERGDSGQPSNKELFGDDSEDEGASHHSGSDNHSERSDNRSEASERSDHEDNDPSDVDQHSGSEAPNDDEDEGHRSDGGSHHSEAEGSEKAHSDDEKWGREDKSDQSDDEKIQNSDDEERAQGSDEDKLQNSDDDEKMQNTDDEERPQLSDDERQQLSEEEKANSDDERPVASDNDDEKQNSDDEEQPQLSDEEKMQNSDDERPQASDEEHRHSDDEEEQDHKSESARGSDSEDEVLRMKRKNAIASDSEADSDTEVPKDNSGTMDLFGGADDISSGSDGEDKPPTPGQPVDENGLPQDQQEEEPIPETRIEVEIPKVNTDLGNDLYFVKLPNFLSVEPRPFDPQYYEDEFEDEEMLDEEGRTRLKLKVENTIRWRIRRDEEGNEIKESNARIVKWSDGSMSLHLGNEVFDVYKAPLQGDHNHLFIRQGTGLQGQAVFKTKLTFRPHSTDSATHRKMTLSLADRCSKTQKIRILPMAGRDPECQRTEMIKKEEERLRASIRRESQQRRMREKQHQRGLSASYLEPDRYDEEEEGEESISLAAIKNRYKGGIREERARIYSSDSDEGSEEDKAQRLLKAKKLTSDEEGEPSGKRKAEDDDKANKKHKKYVISDEEEEDDD

SEQ ID NO: 26649 - protein, 606 aa, Homo sapiens
MADMEDLFGSDADSEAERKDSDSGSDSDSDQENAASGSNASGSESDQDERGDSGQPSNKELFGDDSEDEGASHHSGSDNHSERSDNRSEASERSDHEDNDPSDVDQHSGSEAPNDDEDEGHRSDGGSHHSEAEGSEKAHSDDEKWGREDKSDQSDDEKIQNSDDEERAQGSDEDKLQNSDDDEKMQNTDDEERPQLSDDERQQLSEEEKANSDDERPVASDNDDEKQNSDDEEQPQLSDEEKMQNSDDERPQASDEEHRHSDDEEEQDHKSESARGSDSEDEVLRMKRKNAIASDSEADSDTEVPKDNSGTMDLFGGADDISSGSDGEDKPPTPGQPVDENGLPQDQQEEEPIPETRIEVEIPKVNTDLGNDLYFVKLPNFLSVEPSMSLHLGNEVFDVYKAPLQGDHNHLFIRQGTGLQGQAVFKTKLTFRPHSTDSATHRKMTLSLADRCSKTQKIRILPMAGRDPECQRTEMIKKEEERLRASIRRESQQRRMREKQHQRGLSASYLEPDRYDEEEEGEESISLAAIKNRYKGGIREERARIYSSDSDEGSEEDKAQRLLKAKKLTSDEEGEPSGKRKAEDDDKANKKHKKYVISDEEEEDDD

SEQ ID NO: 26650 - protein, 164 aa, Homo sapiens
MSSCPVHDCPSWDPERLEPVETGSRGALRLRGGAPGSAAGFRASIWGPAGYPSPVGLGHPASLPRPAYSPRCPEPDARHGWGSGSNAGYRGPDRAGRTPCPAQDREGRSSSPVPPPRLKAMTSQARKQNGGALIDTVDWTREAPDSDPVMSMQKTQKPQTTVGQ

SEQ ID NO: 26651 - protein, 115 aa, Homo sapiens
MEAPAQLLFLLLLWLPDTTGEIVMTQSPATLSVSPGERATLSCRASQSVSSNLAWYQQKPGQAPRLLIYGASTRATGIPARFSGSGSGTEFTLTISSLQSEDFAVYYCQQYNNWP

SEQ ID NO: 26652 - protein, 117 aa, Homo sapiens; identical to SEQ ID NO: 21646

SEQ ID NO: 26653 - protein, 161 aa, Homo sapiens
MAKEEPQSISRDLQELQKKLSLLIDSFQNNSKVVAFMKSPVGQYLDSHPFLAFTLLVFIVMSAVPVGFFLLIVVLTTLAALLGVIILEGLVISVGGFSLLCILCGLGFVSLAMSGMMIASYVVVSSLISCWFSPRPLTQQNTSCDFLPAMKSAEFEGLYQE

SEQ ID NO: 26654 - protein, 185 aa, Homo sapiens
MAKEEPQSISRDLQELQKKLSLLIDSFQNNSKLPQHSRISLDSDDGVSRLGSAGSKVVAFMKSPVGQYLDSHPFLAFTLLVFIVMSAVPVGFFLLIVVLTTLAALLGVIILEGLVISVGGFSLLCILCGLGFVSLAMSGMMIASYVVVSSLISCWFSPRPLTQQNTSCDFLPAMKSAEFEGLYQE

SEQ ID NO: 26655 - protein, 117 aa, Homo sapiens
MDMRVPAQLLGLLLLWVPGARCDIQLTQSPSSLSASVGDRVTITCRVSQGISSYLNWYRQKPGKVPKLLIYSASNLQSGVPSRFSGSGSGTDFTLTISSLQPEDVATYYGQRTYNAP

SEQ ID NO: 26656 - protein, 120 aa, Homo sapiens
MRLPAQLLGLLMLWVSGSSGDIVMTQSPLSLPVTPGEPASISCRSSQSLLHSNGYNYLDWYLQKPGQSPQLLIYLGSNRASGVPDRFSGSGSGTDFTLKISRVEAEDVGVYYCMQALQTP

SEQ ID NO: 26657 - protein, 117 aa, Homo sapiens
MDMRVPAQLLGLLLLWFPGARCNIQMTQSPSAMSASVGDRVTITCRARQGISNYLAWFQQKPGKVPKHLIYAASSLQSGVPSRFSGSGSGTEFTLTISSLQPEDFATYYCLQHNSYP

SEQ ID NO: 26658 - protein, 120 aa, Homo sapiens
MRLPAQLLGLLMLWVPGSSGDVVMTQSPLSLPVTLGQPASISCRSSQSLVYSDGNTYLNWFQQRPGQSPRRLIYKVSNWDSGVPDRFSGSGSGTDFTLKISRVEAEDVGVYYCMQGTHWP

SEQ ID NO: 26659 - protein, 146 aa, Homo sapiens
MVDELVLLLHALLMRHRALSIENSQLMEQLRLLVCERASLLRQVRPPSCPVPFPETFNGESSRLPEFIVQTASYMLVNENRFCNDAMKVAFLISLLTGEAEEWVVPYIEMDSPILGDYRAFLDEMKQCFGWDDDEDDDDEEEEDDY

SEQ ID NO: 26660 - protein, 1193 aa, Homo sapiens
MPALWLGCCLCFSLLLPAARATSRREVCDCNGKSRQCIFDRELHRQTGNGFRCLNCNDNTDGIHCEKCKNGFYRHRERDRCLPCNCNSKGSLSARCDNSGRCSCKPGVTGARCDRCLPGFHMLTDAGCTQDQRLLDSKCDCDPAGIAGPCDAGRCVCKPAVTGERCDRCRSGYYNLDGGNPEGCTQCFCYGHSASCRSSAEYSVHKITSTFHQDVDGWKAVQRNGSPAKLQWSQRHQDVFSSAQRLDPVYFVAPAKFLGNQQVSYGQSLSFDYRVDRGGRHPSAHDVILEGAGLRITAPLMPLGKTLPCGLTKTYTFRLNEHPSNNWSPQLSYFEYRRLLRNLTALRIRATYGEYSTGYIDNVTLISARPVSGAPAPWVEQCICPVGYKGQFCQDCASGYKRDSARLGPFGTCIPCNCQGGGACDPDTGDCYSGDENPDIECADCPIGFYNDPHDPRSCKPCPCHNGFSCSVMPETEEVVCNNCPPGVTGARCELCADGYFGDPFGEHGPVRPCQPCQCNNNVDPSASGNCDRLTGRCLKCIHNTAGIYCDQCKAGYFGDPLAPNPADKCRACNCNPMGSEPVGCRSDGTCVCKPGFGGPNCEHGAFSCPACYNQVKIQMDQFMQQLQRMEALISKAQGGDGVVPDTELEGRMQQAEQALQDILRDAQISEGASRSLGLQLAKVRSQENSYQSRLDDLKMTVERVRALGSQYQNRVRDTHRLITQMQLSLAESEASLGNTNIPASDHYVGPNGFKSLAQEATRLAESHVESASNMEQLTRETEDYSKQALSLVRKALHEGVGSGSGSPDGAVVQGLVEKLEKTKSLAQQLTREATQAEIEADRSYQHSLRLLDSVSRLQGVSDQSFQVEEAKRIKQKADSLSSLVTRHMDEFKRTQKNLGNWKEEAQQLLQNGKSGREKSDQLLSRANLAKSRAQEALSMGNATFYEVESILKNLREFDLQVDNRKAEAEEAMKRLSYISQKVSDASDKTQQAERALGSAAADAQRAKNGAGEALEISSEIEQEIGSLNLEANVTADGALAMEKGLASLKSEMREVEGELERKELEFDTNMDAVQMVITEAQKVDTRAKNAGVTIQDTLNTLDGLLHLMDQPLSVDEEGLVLLEQKLSRAKTQINSQLRPMMSELEERARQQRGHLHLLETSIDGILADVKNLENIRDNLPPGCYNTQALEQQ

SEQ ID NO: 26661 - protein, 1111 aa, Homo sapiens
MPALWLGCCLCFSLLLPAARATSRREVCDCNGKSRQCIFDRELHRQTGNGFRCLNCNDNTDGIHCEKCKNGFYRHRERDRCLPCNCNSKGSLSARCDNSGRCSCKPGVTGARCDRCLPGFHMLTDAGCTQDQRLLDSKCDCDPAGIAGPCDAGRCVCKPAVTGERCDRCRSGYYNLDGGNPEGCTQCFCYGHSASCRSSAEYSVHKITSTFHQDVDGWKAVQRNGSPAKLQWSQRHQDVFSSAQRLDPVYFVAPAKFLGNQQVSYGQSLSFDYRVDRGGRHPSAHDVILEGAGLRITAPLMPLGKTLPCGLTKTYTFRLNEHPSNNWSPQLSYFEYRRLLRNLTALRIRATYGEYSTGYIDNVTLISARPVSGAPAPWVEQCICPVGYKGQFCQDCASGYKRDSARLGPFGTCIPCNCQGGGACDPDTGDCYSGDENPDIECADCPIGFYNDPHDPRSCKPCPCHNGFSCSVMPETEEVVCNNCPPGVTGARCELCADGYFGDPFGEHGPVRPCQPCQCNNNVDPSASGNCDRLTGRCLKCIHNTAGIYCDQCKAGYFGDPLAPNPADKCRACNCNPMGSEPVGCRSDGTCVCKPGFGGPNCEHGAFSCPACYNQVKIQMDQFMQQLQRMEALISKAQGGDGVVPDTELEGRMQQAEQALQDILRDAQISEGASRSLGLQLAKVRSQENSYQSRLDDLKMTVERVRALGSQYQNRVRDTHRLITQMQLSLAESEASLGNTNIPASDHYVGPNGFKSLAQEATRLAESHVESASNMEQLTRETEDYSKQALSLVRKALHEGVGSGSGSPDGAVVQGLVEKLEKTKSLAQQLTREATQAEIEADRSYQHSLRLLDSVSRLQGVSDQSFQVEEAKRIKQKADSLSSLVTRHMDEFKRTQKNLGNWKEEAQQLLQNGKSGREKSDQLLSRANLAKSRAQEALSMGNATFYEVESILKNLREFDLQVDNRKAEAEEAMKRLSYISQKVSDASDKTQQAERALGSAAADAQRAKNGAGEALEISSEIEQEIGSLNLEANVTADGALAMEKGLASLKSEMREVEGELERKELEFDTNMDAVQMVITEAQKVDTRAKNAGVTIQDTLNTLDGLLHLMGM

SEQ ID NO: 26662 - protein, 1575 aa, Homo sapiens
MAAAALLLGLALLAPRAAGAGMGACYDGAGRPQRCLPVFENAAFGRLAQASHTCGSPPEDFCPHVGAAGAGAHCQRCDAADPQRHHNASYLTDFHSQDESTWWQSPSMAFGVQYPTSVNITLRLGKAYEITYVRLKFHTSRPESFAIYKRSRADGPWEPYQFYSASCQKTYGRPEGQYLRPGEDERVAFCTSEFSDISPLSGGNVAFSTLEGRPSAYNFEESPGLQEWVTSTELLISLDRLNTFGDDIFKDPKVLQSYYYAVSDFSVGGRCKCNGHASECGPDVAGQLACRCQHNTTGTDCERCLPFFQDRPWARGTAEAAHECLPCNCSGRSEECTFDRELFRSTGHGGRCHHCRDHTAGPHCERCQENFYHWDPRMPCQPCDCQSAGSLHLQCDDTGTCACKPTVTGWKCDRCLPGFHSLSEGGCRPCTCNPAGSLDTCDPRSGRCPCKENVEGNLCDRCRPGTFNLQPHNPAGCSSCFCYGHSKVCASTAQFQVHHILSDFHQGAEGWWARSVGGSEHPPQWSPNGVLLSPEDEEELTAPEKFLGDQRFSYGQPLILTFRVPPGDSPLPVQLRLEGTGLALSLRHSSLSGPQDAGHPREVELRFHLQETSEDVAPPLPPFHFQRLLANLTSLRLRVSPGPSPAGPVFLTEVRLTSARPGLSPPASWVEICSCPTGYTGQFCESCAPGYKREMPQGGPYASCVPCTCNQHGTCDPNTGICVCSHHTEGPSCERCLPGFYGNPFAGQADDCQPCPCPGQSACTTIPESREVVCTHCPPGQRGRRCEVCDDGFFGDPLGLFGHPQPCHQCQCSGNVDPNAVGNCDPLSGHCLRCLHNTTGDHCEHCQEGFYGSALAPRPADKCMPCSCHPQGSVSEQMPCDPVTGQCSCLPHVTARDCSRCYPGFFDLQPGRGCRSCKCHPLGSQEDQCHPKTGQCTCRPGVTGQACDRCQLGFFGFSIKGCRACRCSPLGAASAQCHENGTCVCRPGFEGYKCDRCHDNFFLTADGTHCQQCPSCYALVKEEAAKLKARLTLTEGWLQGSDCGSPWGPLDILLGEAPRGDVYQGHHLLPGAREAFLEQMMSLEGAVKAAREQLQRLNKGARCAQAGSQKTCTQLADLEAVLESSEEEILHAAAILASLEIPQEGPSQPTKWSHLATEARALARSHRDTATKIAATAWRALLASNTSYALLWNLLEGRVALETQRDLEDRYQEVQAAQKALRTAVAEVLPEAESVLATVQQVGADTAPYLALLASPGALPQKSRAEDLGLKAKALEKTVASWQHMATEAARTLQTAAQATLRQTEPLTKLHQEARAALTQASSSVQAATVTVMGARTLLADLEGMKLQFPRPKDQAALQRKADSVSDRLLADTRKKTKQAERMLGNAAPLSSSAKKKGREAEVLAKDSAKLAKALLRERKQAHRRASRLTSQTQATLQQASQQVLASEARRQELEEAERVGAGLSEMEQQIRESRISLEKDIETLSELLARLGSLDTHQAPAQALNETQWALERLRLQLGSPGSLQRKLSLLEQESQQQELQIQGFESDLAEIRADKQNLEAILHSLPENCASWQ

SEQ ID NO: 26663 - protein, 94 aa, Homo sapiens
MSCQQNQQQCQPPPSCPSPKCPPKSPAQCLPPPSSDCALSSGGCGPSSESGCCLSHHRHFRSHQCRRQRSNSCDRGSGQQGGGSCRGHGSGGCC

SEQ ID NO: 26664 - protein, 166 aa, Homo sapiens
MSTVGLFHFPTPLTRICPAPWGLRLWEKLTLLSPGIAVTPVQMAGKKDYPALLSLDENELEEQFVKGHGPGGQATNKTSNCVVLKHIPSGIVVKCHQTRSVDQNRKLARKILQEKVDVFYNGENSPVHKEKREAAKKKQERKKRAKETLEKKKLLKELWESSKKVH

SEQ ID NO: 26665 - protein, 119 aa, Homo sapiens
MSTVGLFHFPTPLTRICPAPWGLRLWEKLTLLSPGIAVTPVQMAGKKDYPALLSLDENELEEQFVKGHGPGGQATNKTSNCVVLKHIPSGIVVKVDHRRPLRGEAPPKGSTASRDFSQV

SEQ ID NO: 26666 - protein, 138 aa, Homo sapiens
MKFTTLLFLAAVAGALVYAEDASSDSTGADPAQEAGTSKPNEEISGPAEPASPPETTTTAQETSAAAVQGTAKVTSSRQELNPLKSIVEKSILLTEQALAKAGKGMHGGVPGGKQFIENGSEFAQKLLKKFSLLKPWA

SEQ ID NO: 26667 - protein, 332 aa, Homo sapiens
MATIKSELIKNFAEEEAIHHNKISIVGTGSVGVACAISILLKGLSDELVLVDVDEGKLKGETMDLQHGSPFMKMPNIVSSKDYLVTANSNLVIITAGARQKKGETRLDLVQRNVSIFKLMIPNITQYSPHCKLLIVTNPVDILTYVAWKLSGFPKNRVIGSGCNLDSARFRYFIGQRLGIHSESCHGLILGEHGDSSVPVWSGVNIAGVPLKDLNPDIGTDKDPEQWENVHKKVISSGYEMVKMKGYTSWGISLSVADLTESILKNLRRVHPVSTLSKGLYGINEDIFLSVPCILGENGITDLIKVKLTLEEEACLQKSAETLWEIQKELKL

SEQ ID NO: 26668 - protein, 416 aa, Homo sapiens
MPRQLSAAAALFASLAVILHDGSQMRAKAFPETRDYSQPTAAATVQDIKKPVQQPAKQAPHQTLAARFMDGHITFQTAATVKIPTTTPATTKNTATTSPITYTLVTTQATPNNSHTAPPVTEVTVGPSLAPYSLPPTITPPAHTTGTSSSTVSHTTGNTTQPSNQTTLPATLSIALHKSTTGQKPVQPTHAPGTTAAAHNTTRTAAPASTVPGPTLAPQPSSVKTGIYQVLNGSRLCIKAEMGIQLIVQDKESVFSPRRYFNIDPNATQASGNCGTRKSNLLLNFQGGFVNLTFTKDEESYYISEVGAYLTVSDPETIYQGIKHAVVMFQTAVGHSFKCVSEQSLQLSAHLQVKTTDVQLQAFDFEDDHFGNVDECSSDYTIVLPVIGAIVVGLCLMGMGVYKIRLRCQSSGYQRI

SEQ ID NO: 26669 - protein, 280 aa, Homo sapiens
MDLQGRGVPSIDRLRVLLMLFHTMAQIMAEQEVENLSGLSTNPEKDIFVVRENGTTCLMAEFAAKFIVPYDVWASNYVDLITEQADIALTRGAEVKGRCGHSQSELQVFWVDRAYALKMLFVKESHNMSKGPEATWRLSKVQFVYDSSEKTHFKDAVSAGKHTANSHHLSALVTPAGKSYECQAQQTISLASSDPQKTVTMILSAVHIQPFDIISDFVFSEEHKCPVDEREQLEETLPLILGLILGLVIMVTLAIYHVHHKMTANQVQIPRDRSQYKHMG

SEQ ID NO: 26670 - protein, 236 aa, Homo sapiens
MDLQGRGVPSIDRLRVLLMLFHTMAQIMAEQEVENLSGLSTNPEKDIFVVRENGTTCLMAEFAAKFIVPYDVWASNYVDESHNMSKGPEATWRLSKVQFVYDSSEKTHFKDAVSAGKHTANSHHLSALVTPAGKSYECQAQQTISLASSDPQKTVTMILSAVHIQPFDIISDFVFSEEHKCPVDEREQLEETLPLILGLILGLVIMVTLAIYHVHHKMTANQVQIPRDRSQYKHMG

SEQ ID NO: 26671 - protein, 433 aa, Homo sapiens
MQRMIQQFAAEYTSKNSSTQDPSQPNSTKNQSLPKASPVTTSPTAATTQNPVLSKLLMADQDSPLDLTVRKSQSEPSEQDGVLDLSTKKSPCAGSTSLSHSPGCSSTQGNGRPGRPSQYRPDGLRSGDGVPPRSLQDGTREGFGHSTSLKVPLARSLQISEELLSRNQLSTAASLGPSGLQNHGQHLILSREASWAKPHYEFNLSRMKFRGNGALSNISDLPFLAENSAFPKMALQAKQDGKKDVSHSSPVDLKIPQVRGMDLSWESRTGDQYSYSSLVMGSQTESALSKKLRAILPKQSRKSMLDAGPDSWGSDAEQSTSGQPYPTSDQEGDPGSKQPRKKRGRYRQYNSEILEEAISVVMSGKMSVSKAQSIYGIPHSTLEYKVKERLGTLKNPPKKKMKLMRSEGPDVSVKIELDPQGEAAQSANESKNE

SEQ ID NO: 26672 - protein, 406 aa, Homo sapiens
MQRMIQQFAAEYTSKNSSTQDPSQPNSTKNQSLPKASPVTTSPTAATTQNPVLSKLLMADQDSPLDLTVRKSQSEPSEQDGVLDLSTKKSPCAGSTSLSHSPGCSSTQGNGRPGRPSQYRPDGLRSGDGVPPRSLQDGTREGFGHSTSLKVPLARSLQISEELLSRNQLSTAASLGPSGLQNHGQHLILSREASWAKPHYEFNLSRMKFRGNGALSNISDLPFLAENSAFPKMALQAKQDGKKDVSHSSPVDLKIPQVRGMDLSWESRTGDQYSYSSLVMGSQTESALSKKLRAILPKQSRKSMLDAGPDSWGSDAEQSTSGQPYPTSDQEGDPGSKQPRKKRGRYRQYNSEILEEAISVVMSGKMSVSKAQSIYGIPHSTLEYKVKERLGTLKNPPKKKMKLMSG

SEQ ID NO: 26673 - protein, 1557 aa, Homo sapiens
MQRMIQQFAAEYTSKNSSTQDPSQPNSTKNQSLPKASPVTTSPTAATTQNPVLSKLLMADQDSPLDLTVRKSQSEPSEQDGVLDLSTKKSPCAGSTSLSHSPGCSSTQGNGENSTEAKAVDSNNQSKSPLEKFMVKLCTHHQKQFIRVLNDLYTESQPGTEDLQPSDSGAMDVSTCNAGCAQLSTKHKEKDALCLDMKSSASVDLFVDSSDSHSPLHLTEQTPKKPPPEINPVDGRENALTVVQKDSSELPTTKSNSINSSSVDSFTPGYLTASNCSSVNFHHIPKILEGQTTGQEQDTNVNICEDGKDHMQSSALVESLITVKMAAENSEEGNTCIIPQRNLFKALSEEAWNSGFMGNSSRTADKENTLQCPKTPLRQDLEANEQDARPKQENHLHSLGRNKVGYHLHPSDKGQFDHSKDGWLGPGPMPAVHKAANGHSRTKMISTSIKTARKSKRASGLRINDYDNQCDVVYISQPITECHFENQKSILSSRKTARKSTRGYFFNGDCCELPTVRTLARNLHSQEKASCSALASEAVFTPKQTLTIPAPRHTVDVQLPREDNPEEPSKEITSHEEGGGDVSPRKEPQEPEVCPTKIKPNLSSSPRSEETTASSLVWPLPAHLPEEDLPEGGSTVSAPTASGMSSPEHNQPPVALLDTEEMSVPQDCHLLPSTESFSGGVSEDVISRPHSPPEIVSREESPQCSENQSSPMGLEPPMSLGKAEDNQSISAEVESGDTQELNVDPLLKESSTFTDENPSETEESEAAGGIGKLEGEDGDVKCLSEKDTYDTSIDSLEENLDKKKKGKKFPEASDRCLRSQLSDSSSADRCLRNQSSDSSSACLEIKVPKNPSAKRSKKEGHPGGTTPKGLLPDSFHTETLEDTEKPSVNERPSEKDAEQEGEGGGIITRQTLKNMLDKEVKELRGEIFPSRDPITTAGQPLPGERLEIYVQSKMDEKNAHIPSESIACKRDPEQAKEEPGHIPTQHVEEAVNEVDNENTQQKDDESDAPCSSLGLSSSGSGDAARAPKSVPRPKRLTSSTYNLRHAHSLGSLDASKVTSEKEAAQVNPIMPKENGASESGDPLDEDDVDTVVDEQPKFMEWCAEEENQELIANFNAQYMKVQKGWIQLEKEGQPTPRARNKSDKLKEIWKSKKRSRKCRSSLESQKCSPVQMLFMTNFKLSNVCKWFLETTETRSLVIVKKLNTRLPGDVPPVKHPLQKYAPSSLYPSSLQAERLKKHLKKFPGATPAKNNWKMQKLWAKFRENPDQVEPEDGSDVSPGPNSEDSIEEVKEDRNSHPPANLPTPASTRILRKYSNIRGKLRAQQRLIKNEKMECPDALAVESKPSRKSVCINPLMSPKLALQVDADGFPVKPKSTEGMKGRKGKQVSEILPKAEVQSKRKRTEGSSPPDSKNKGPTVKASKEKHADGATKTPAAKRPAARDRSSQPPKKTSLKENKVKIPKKSAGKSCPPSRKEKENTNKRPSQSIASETLTKPAKQKGAGESSSRPQKATNRKQSSGKTRARPSTKTPESSAAQRKRKLKAKLDCSHSKRRRLDAK

SEQ ID NO: 26674 - protein, 715 aa, Homo sapiens
MAANMYRVGDYVYFENSSSNPYLIRRIEELNKTANGNVEAKVVCFYRRRDISSTLIALADKHATLSVCYKAGPGADNGEEGEIEEEMENPEMVDLPEKLKHQLRHRELFLSRQLESLPATHIRGKCSVTLLNETESLKSYLEREDFFFYSLVYDPQQKTLLADKGEIRVGNRYQADITDLLKEGEEDGRDQSRLETQVWEAHNPLTDKQIDQFLVVARSVGTFARALDCSSSVRQPSLHMSAAAASRDITLFHAMDTLHKNIYDISKAISALVPQGGPVLCRDEMEEWSASEANLFEEALEKYGKDFTDIQQDFLPWKSLTSIIEYYYMWKTTDRYVQQKRLKAAEAESKLKQVYIPNYNKPNPNQISVNNVKAGVVNGTGAPGQSPGAGRACESCYTTQSYQWYSWGPPNMQCRLCASCWTYWKKYGGLKMPTRLDGERPGPNRSNMSPHGLPARSSGSPKFAMKTRQAFYLHTTKLTRIARRLCREILRPWHAARHPYLPINSAAIKAECTARLPEASQSPLVLKQAVRKPLEAVLRYLETHPRPPKPDPVKSVSSVLSSLTPAKVAPVINNGSPTILGKRSYEQHNGVDGNMKKRLLMPSRGLANHGQARHMGPSRNLLLNGKSYPTKVRLIRGGSLPPVKRRRMNWIDAPDDVFYMATEETRKIRKLLSSSETKRAARRPYKPIALRQSQALPPRPPPPAPVNDEPIVIED

SEQ ID NO: 26675 - protein, 430 aa, Homo sapiens
MAANMYRVGDYVYFENSSSNPYLIRRIEELNKTANGNVEAKVVCFYRRRDISSTLIALADKHATLSVCYKAGPGADNGEEGEIEEEMENPEMVDLPEKLKHQLRHRELFLSRQLESLPATHIRGKCSVTLLNETESLKSYLEREDFFFYSLVYDPQQKTLLADKGEIRVGNRYQADITDLLKEGEEDGRDQSRLETQVWEAHNPLTDKQIDQFLVVARSVGTFARALDCSSSVRQPSLHMSAAAASRDITLFHAMDTLHKNIYDISKAISALVPQGGPVLCRDEMEEWSASEANLFEEALEKYGKDFTDIQQDFLPWKSLTSIIEYYYMWKTTDRYVQQKRLKAAEAESKLKQVYIPNYNKPNPNQISVNNVKAGVVNGTGAPGQSPGAGRACESCYMSSLRILLDILEEIWWLENANPVRWREARTKPQ

SEQ ID NO: 26676 - protein, 698 aa, Homo sapiens
MAANMYRVGDYVYFENSSSNPYLIRRIEELNKTANGNVEAKVVCFYRRRDISSTLIALADKHAREIEEEMENPEMVDLPEKLKHQLRHRELFLSRQLESLPATHIRGKCSVTLLNETESLKSYLEREDFFFYSLVYDPQQKTLLADKGEIRVGNRYQADITDLLKEGEEDGRDQSRLETQVWEAHNPLTDKQIDQFLVVARSVGTFARALDCSSSVRQPSLHMSAAAASRDITLFHAMDTLHKNIYDISKAISALVPQGGPVLCRDEMEEWSASEANLFEEALEKYGKDFTDIQQDFLPWKSLTSIIEYYYMWKTTDRYVQQKRLKAAEAESKLKQVYIPNYNKPNPNQISVNNVKAGVVNGTGAPGQSPGAGRACESCYTTQSYQWYSWGPPNMQCRLCASCWTYWKKYGGLKMPTRLDGERPGPNRSNMSPHGLPARSSGSPKFAMKTRQAFYLHTTKLTRIARRLCREILRPWHAARHPYLPINSAAIKAECTARLPEASQSPLVLKQAVRKPLEAVLRYLETHPRPPKPDPVKSVSSVLSSLTPAKVAPVINNGSPTILGKRSYEQHNGVDGNMKKRLLMPSRGLANHGQARHMGPSRNLLLNGKSYPTKVRLIRGGSLPPVKRRRMNWIDAPDDVFYMATEETRKIRKLLSSSETKRAARRPYKPIALRQSQALPPRPPPPAPVNDEPIVIED

SEQ ID NO: 26677 - protein, 482 aa, Homo sapiens
MAAVFDLDLETEEGSEGEGEPELSPADACPLAELRAAGLEPVGHYEEVELTETSVNVGPERIGPHCFELLRVLGKGGYGKVFQVRKVQGTNLGKIYAMKVLRKAKIVRNAKDTAHTRAERNILESVKHPFIVELAYAFQTGGKLYLILECLSGGELFTHLEREGIFLEDTACFYLAEITLALGHLHSQGIIYRDLKPENIMLSSQGHIKLTDFGLCKESIHEGAVTHTFCGTIEYMAPEILVRSGHNRAVDWWSLGALMYDMLTGSPPFTAENRKKTMDKIIRGKLALPPYLTPDARDLVKKFLKRNPSQRIGGGPGDAADVQRHPFFRHMNWDDLLAWRVDPPFRPCLQSEEDVSQFDTRFTRQTPVDSPDDTALSESANQAFLGFTYVAPSVLDSIKEGFSFQPKLRSPRRLNSSPRAPVSPLKFSPFEGFRPSPSLPEPTELPLPPLLPPPPPSTTAPLPIRPPSGTKKSKRGRGRPGR

SEQ ID NO: 26678 - protein, 154 aa, Homo sapiens
MAAVFDLDLETEEGSEGEGEPELSPADACPLAELRAAGLEPVGHYEEVELTETSVNVGPERIGPHCFELLRVLGKGGYGKVFQVRKVQGTNLGKIYAMKVLRKAKIVRNAKDTAHTRAERNILESVKHPFIVELAYAFQTGGKLYLILECLSVD

SEQ ID NO: 26679 - protein, 705 aa, Homo sapiens
MEKPRSIEETPSSEPMEEEEDDDLELFGGYDSFRSYNSSVGSESSSYLEESSEAENEDREAGELPTSPLHLLSPGTPRSLDGSGSEPAVCEMCGIVGTREAFFSKTKRFCSVSCSRSYSSNSKKASILARLQGKPPTKKAKVLHKAAWSAKIGAFLHSQGTGQLADGTPTGQDALVLGFDWGKFLKDHSYKAAPVSCFKHVPLYDQWEDVMKGMKVEVLNSDAVLPSRVYWIASVIQTAGYRVLLRYEGFENDASHDFWCNLGTVDVHPIGWCAINSKILVPPRTIHAKFTDWKGYLMKRLVGSRTLPVDFHIKMVESMKYPFRQGMRLEVVDKSQVSRTRMAVVDTVIGGRLRLLYEDGDSDDDFWCHMWSPLIHPVGWSRRVGHGIKMSERRSDMAHHPTFRKIYCDAVPYLFKKVRAVYTEGGWFEEGMKLEAIDPLNLGNICVATVCKVLLDGYLMICVDGGPSTDGLDWFCYHASSHAIFPATFCQKNDIELTPPKGYEAQTFNWENYLEKTKSKAAPSRLFNMDCPNHGFKVGMKLEAVDLMEPRLICVATVKRVVHRLLSIHFDGWDSEYDQWVDCESPDIYPVGWCELTGYQLQPPVAAEPATPLKAKEATKKKKKQFGKKRKRIPPTKTRPLRQGSKKPLLEDDPQGARKISSEPVPGEIIAVRVKEEHLDVASPDKASSPELPVSVENIKQETDD

SEQ ID NO: 26680 - protein, 614 aa, Homo sapiens
MEKPRSIEETPSSEPMEEEEDDDLELFGGYDSFRSYNSSVGSESSSYLEESSEAENEDREAGELPTSPLHLLSPGTPRSLDGSGSEPAVCEMCGIVGTREAFFSKTKRFCSVSCSRSYSSNSKKASILARLQGKPPTKKAKVLHKAAWSAKIGAFLHSQGTGQLADGTPTGQDALVLGFDWGKFLKDHSYKAAPVSCFKHVPLYDQWEDVMKGMKVEVLNSDAVLPSRVYWIASVIQTAGYRVLLRYEGFENDASHDFWCNLGTVDVHPIGWCAINSKILVPPRTIHAKFTDWKGYLMKRLVGSRTLPVDFHIKMVESMKYPFRQGMRLEVVDKSQVSRTRMAVVDTVIGGRLRLLYEDGDSDDDFWCHMWSPLIHPVGWSRRVGHGIKMSERRSDMAHHPTFRKIYCDAVPYLFKKVRAVYTEGGWFEEGMKLEAIDPLNLGNICVATVCKVLLDGYLMICVDGGPSTDGLDWFCYHASSHAIFPATFCQKNDIELTPPKGYEAQTFNWENYLEKTKSKAAPSRLFNMDCPNHGFKVGMKLEAVDLMEPRLICVATVKRVVHRLLSIHFDGWDSEYDQWVDCESPDIYPVGWCELTGYQLQPPVAAGKLPRSL

SEQ ID NO: 26681 - protein, 617 aa, Homo sapiens
MEKPRSIEETPSSEPMEEEEDDDLELFGGYDSFRSYNSSVGSESSSYLEESSEAENEDREAGELPTSPLHLLSPGTPRSLDGSGSEPAVCEMCGIVGTREAFFSKTKRFCSVSCSRSYSSNSKKASILARLQGKPPTKKAKVLHKAAWSAKIGAFLHSQGTGQLADGTPTGQDALVLGFDWGKFLKDHSYKAAPVSCFKHVPLYDQWEDVMKGMKVEVLNSDAVLPSRVYWIASVIQTAGYRVLLRYEGFENDASHDFWCNLGTVDVHPIGWCAINSKILVPPRTIHAKFTDWKGYLMKRLVGSRTLPVDFHIKMVESMKYPFRQGMRLEVVDKSQVSRTRMAVVDTVIGGRLRLLYEDGDSDDDFWCHMWSPLIHPVGWSRRVGHGIKMSERRSDMAHHPTFRKIYCDAVPYLFKKVRAVYTEGGWFEEGMKLEAIDPLNLGNICVATVCKVLLDGYLMICVDGGPSTDGLDWFCYHASSHAIFPATFCQKNDIELTPPKGYEAQTFNWENYLEKTKSKAAPSRLFNMDCPNHGFKVGMKLEAVDLMEPRLICVATVKRVVHRLLSIHFDGWDSEYDQWVDCESPDIYPVGWCELTGYQLQPPVAAGVGSRGPKRL

SEQ ID NO: 26682 - protein, 656 aa, Homo sapiens
MEASYESESESESEAGPGTQRPGTGTVSAAVREHLRKLCLREFPCGAGSWNKSRFLPQTWRTWRELVPREEDVVSPGEETVEALLGLVRSRHSPWALLNNSNAEDSFLRELAIRNPLTITDTFFYSYFRSLRVIDKKVTLVDKDLLKFLKLEELVLSANRIKEVDATNLPPTLKVLELYGNEISSMECLCAHPPAGLQHLGLGHNKLLGPLESLYVTANHWPNLVSLDLGFNDLTDLQSMVTSLRTLRHLRLLVLQGNPLALVPYYRGLTIDSLAQLCVLDDITVSPNEKHLFRGLSLNGDLLAQEAQFVVTIGNIRGVLDTSVLDPEPRPEGPFITYNYYVTYDFVKDEEGEMNESAGVLAEIVKPSPSLELLVEESPEEVVEDVIEDIVEEVTEEVEGSLESEVEESGESELSVISGPSTILQMPRASAEELAKLRLRIDPRLCPSPGTVLFSTAHKPWAEVIPCSYEMQHSLRDLVPLKAFLLAGTTVTIVEEKILSWPVVLPAVDSPLSAKKGKGEKDKKGKEKDRTGKGEKEPAKEWKVLKKKKEPPKELRQDPPILQVLGRGLVILEPLLAGEPLVSTVCNFGVVRTLTSDRLTLARDSKKIKKVAKKEKPKAVIPIYEGDYHPEPLTVEVQIQLNQCRSAEEALRMFAV

SEQ ID NO: 26683 - protein, 471 aa, Homo sapiens
MECLCAHPPAGLQHLGLGHNKLLGPLESLYVTANHWPNLVSLDLGFNDLTDLQSMVTSLRTLRHLRLLVLQGNPLALVPYYRGLTIDSLAQLCVLDDITVSPNEKHLFRGLSLNGDLLAQEAQFVVTIGNIRGVLDTSVLDPEPRPEGPFITYNYYVTYDFVKDEEGEMNESAGVLAEIVKPSPSLELLVEESPEEVVEDVIEDIVEEVTEEVEGSLESEVEESGESELSVISGPSTILQMPRASAEELAKLRLRIDPRLCPSPGTVLFSTAHKPWAEVIPCSYEMQHSLRDLVPLKAFLLAGTTVTIVEEKILSWPVVLPAVDSPLSAKKGKGEKDKKGKEKDRTGKGEKEPAKEWKVLKKKKEPPKELRQDPPILQVLGRGLVILEPLLAGEPLVSTVCNFGVVRTLTSDRLTLARDSKKIKKVAKKEKPKAVIPIYEGDYHPEPLTVEVQIQLNQCRSAEEALRMFAV

SEQ ID NO: 26684 - protein, 527 aa, Homo sapiens
MECLCAHPPAGLQHLGLGHNKLLGPLESLYVTANHWGRVRLGLGDAVLTAAACVFLLFSELRSICFLVCGSRLLAPCSPGFLTPRRSCSPSRPNLVSLDLGFNDLTDLQSMVTSLRTLRHLRLLVLQGNPLALVPYYRGLTIDSLAQLCVLDDITVSPNEKHLFRGLSLNGDLLAQEAQFVVTIGNIRGVLDTSVLDPEPRPEGPFITYNYYVTYDFVKDEEGEMNESAGVLAEIVKPSPSLELLVEESPEEVVEDVIEDIVEEVTEEVEGSLESEVEESGESELSVISGPSTILQMPRASAEELAKLRLRIDPRLCPSPGTVLFSTAHKPWAEVIPCSYEMQHSLRDLVPLKAFLLAGTTVTIVEEKILSWPVVLPAVDSPLSAKKGKGEKDKKGKEKDRTGKGEKEPAKEWKVLKKKKEPPKELRQDPPILQVLGRGLVILEPLLAGEPLVSTVCNFGVVRTLTSDRLTLARDSKKIKKVAKKEKPKAVIPIYEGDYHPEPLTVEVQIQLNQCRSAEEALRMFAV

SEQ ID NO: 26685 - protein, 1374 aa, Homo sapiens
MSSSFFNPSFAFSSHFDPDGAPLSELSWPSSLAVVAVSFSGLFAVIVLMLACLCCKKGGIGFKEFENAEGDEYAADLAQGSPATAAQNGPDVYVLPLTEVSLPMAKQPGRSVQLLKSTDVGRHSLLYLKEIGRGWFGKVFLGEVNSGISSAQVVVKELQASASVQEQMQFLEEVQPYRALKHSNLLQCLAQCAEVTPYLLVMEFCPLGDLKGYLRSCRVAESMAPDPRTLQRMACEVACGVLHLHRNNFVHSDLALRNCLLTADLTVKIGDYGLAHCKYREDYFVTADQLWVPLRWIAPELVDEVHSNLLVVDQTKSGNVWSLGVTIWELFELGTQPYPQHSDQQVLAYTVREQQLKLPKPQLQLTLSDRWYEVMQFCWLQPEQRPTAEEVHLLLSYLCAKGATEAEEEFERRWRSLRPGGGGVGPGPGAAGPMLGGVVELAAASSFPLLEQFAGDGFHADGDDVLTVTETSRGLNFEYKWEAGRGAEAFPATLSPGRTARLQELCAPDGAPPGVVPVLSAHSPSLGSEYFIRLEEAAPAAGHDPDCAGCAPSPPATADQDDDSDGSTAASLAMEPLLGHGPPVDVPWGRGDHYPRRSLARDPLCPSRSPSPSAGPLSLAEGGAEDADWGVAAFCPAFFEDPLGTSPLGSSGAPPLPLTGEDELEEVGARRAAQRGHWRSNVSANNNSGSRCPESWDPVSAGGHAEGCPSPKQTPRASPEPGYPGEPLLGLQAASAQEPGCCPGLPHLCSAQGLAPAPCLVTPSWTETASSGGDHPQAEPKLATEAEGTTGPRLPLPSVPSPSQEGAPLPSEEASAPDAPDALPDSPTPATGGEVSAIKLASALNGSSSSPEVEAPSSEDEDTAEATSGIFTDTSSDGLQARRPDVVPAFRSLQKQVGTPDSLDSLDIPSSASDGGYEVFSPSATGPSGGQPRALDSGYDTENYESPEFVLKEAQEGCEPQAFAELASEGEGPGPETRLSTSLSGLNEKNPYRDSAYFSDLEAEAEATSGPEKKCGGDRAPGPELGLPSTGQPSEQVCLRPGVSGEAQGSGPGEVLPPLLQLEGSSPEPSTCPSGLVPEPPEPQGPAKVRPGPSPSCSQFFLLTPVPLRSEGNSSEFQGPPGLLSGPAPQKRMGGPGTPRAPLRLALPGLPAALEGRPEEEEEDSEDSDESDEELRCYSVQEPSEDSEEEAPAVPVVVAESQSARNLRSLLKMPSLLSETFCEDLERKKKAVSFFDDVTVYLFDQESPTRELGEPFPGAKESPPTFLRGSPGSPSAPNRPQQADGSPNGSTAEEGGGFAWDDDFPLMTAKAAFAMALDPAAPAPAAPTPTPAPFSRFTVSPAPTSRFSITHVSDSDAESKRGPEAGAGGESKEA

SEQ ID NO: 26686 - protein, 446 aa, Homo sapiens
MLGGVVELAAASSFPLLEQFAGDGFHADGDDVLTELCAPDGAPPGVVPVLSAHSPSLGSEYFIRLEEAAPAAGHDPDCAGCAPSPPATADQDDDSDGSTAASLAMEPLLGHGPPVDVPWGRGDHYPRRSLARDPLCPSRSPSPSAGPLSLAEGGAEDADWGVAAFCPAFFEDPLGTSPLGSSGAPPLPLTGEDELEEVGARRAAQRGHWRSNVSANNNSGSRCPESWDPVSAGGHAEGCPSPKQTPRASPEPGYPGEPLLGLQAASAQEPGCCPGLPHLCSAQGLAPAPCLVTPSWTETASSGGDHPQAEPKLATEAEGTTGPRLPLPSVPSPSQEGAPLPSEEASAPDAPDALPDSPTPATGGEVSAIKLASALNGSSSSPEVEAPSSEDEDTAEATSGIFTDTSSDGLQARRPDVVPAFRSLQKQWPQREESLPRLCLLLRPRG

SEQ ID NO: 26687 - protein, 879 aa, Homo sapiens
MSSSFFNPSFAFSSHFDPDGAPLSELSWPSSLAVVAVSFSGLFAVIVLMLACLCCKKGGIGFKEFENAEGDEYAADLAQGSPATAAQNGPDVYVLPLTEVSLPMAKQPGRSVQLLKSTDVGRHSLLYLKEIGRGWFGKVFLGEVNSGISSAQVVVKELQASASVQEQMQFLEEVQPYRALKHSNLLQCLAQCAEVTPYLLVMEFCPLGDLKGYLRSCRVAESMAPDPRTLQRMACEVACGVLHLHRNNFVHSDLALRNCLLTADLTVKIGDYGLAHCKYREDYFVTADQLWVPLRWIAPELVDEVHSNLLVVDQTKSGNVWSLGVTIWELFELGTQPYPQHSDQQVLAYTVREQQLKLPKPQLQLTLSDRWYEVMQFCWLQPEQRPTAEEVHLLLSYLCAKGATEAEEEFERRWRSLRPGGGGVGPGPGAAGPMLGGVVELAAASSFPLLEQFAGDGFHADGDDVLTELCAPDGAPPGVVPVLSAHSPSLGSEYFIRLEEAAPAAGHDPDCAGCAPSPPATADQDDDSDGSTAASLAMEPLLGHGPPVDVPWGRGDHYPRRSLARDPLCPSRSPSPSAGPLSLAEGGAEDADWGVAAFCPAFFEDPLGTSPLGSSGAPPLPLTGEDELEEVGARRAAQRGHWRSNVSANNNSGSRCPESWDPVSAGGHAEGCPSPKQTPRASPEPGYPGEPLLGLQAASAQEPGCCPGLPHLCSAQGLAPAPCLVTPSWTETASSGGDHPQAEPKLATEAEGTTGPRLPLPSVPSPSQEGAPLPSEEASAPDAPDALPDSPTPATGGEVSAIKLASALNGSSSSPEVEAPSSEDEDTAEATSGIFTDTSSDGLQARRPDVVPAFRSLQKQWPQREESLPRLCLLLRPRG

SEQ ID NO: 26688 - protein, 598 aa, Homo sapiens
MTPIVTVLICLGLSLGPRTHVQTGTIPKPTLWAEPDSVITQGSPVTLSCQGSLEAQEYRLYREKKSASWITRIRPELVKNGQFHIPSITWEHTGRYGCQYYSRARWSELSDPLVLVMTGAYPKPTLSAQPSPVVTSGGRVTLQCESQVAFGGFILCKEGEEEHPQCLNSQPHARGSSRAIFSVGPVSPNRRWSHRCYGYDLNSPYVWSSPSDLLELLVPGVSKKPSLSVQPGPVVAPGESLTLQCVSDVGYDRFVLYKEGERDLRQLPGRQPQAGLSQANFTLGPVSRSYGGQYRCYGAHNLSSECSAPSDPLDILITGQIRGTPFISVQPGPTVASGENVTLLCQSWRQFHTFLLTKAGAADAPLRLRSIHEYPKYQAEFPMSPVTSAHAGTYRCYGSLNSDPYLLSHPSEPLELVVSGPSMGSSPPPTGPISTPAGPEDQPLTPTGSDPQSGLGRHLGVVIGILVAVVLLLLLLLLLFLILRHRRQGKHWTSTQRKADFQHPAGAVGPEPTDRGLQWRSSPAADAQEENLYAAVKDTQPEDGVEMDTRAAASEAPQDVTYAQLHSLTLRRKATEPPPSQEREPPAEPSIYATLAIH

SEQ ID NO: 26689 - protein, 597 aa, Homo sapiens
MTPIVTVLICLGLSLGPRTHVQTGTIPKPTLWAEPDSVITQGSPVTLSCQGSLEAQEYRLYREKKSASWITRIRPELVKNGQFHIPSITWEHTGRYGCQYYSRARWSELSDPLVLVMTGAYPKPTLSAQPSPVVTSGGRVTLQCESQVAFGGFILCKEGEEEHPQCLNSQPHARGSSRAIFSVGPVSPNRRWSHRCYGYDLNSPYVWSSPSDLLELLVPGVSKKPSLSVQPGPVVAPGESLTLQCVSDVGYDRFVLYKEGERDLRQLPGRQPQAGLSQANFTLGPVSRSYGGQYRCYGAHNLSSECSAPSDPLDILITGQIRGTPFISVQPGPTVASGENVTLLCQSWRQFHTFLLTKAGAADAPLRLRSIHEYPKYQAEFPMSPVTSAHAGTYRCYGSLNSDPYLLSHPSEPLELVVSGPSMGSSPPPTGPISTPGPEDQPLTPTGSDPQSGLGRHLGVVIGILVAVVLLLLLLLLLFLILRHRRQGKHWTSTQRKADFQHPAGAVGPEPTDRGLQWRSSPAADAQEENLYAAVKDTQPEDGVEMDTRAAASEAPQDVTYAQLHSLTLRRKATEPPPSQEREPPAEPSIYATLAIH

SEQ ID NO: 26690 - protein, 510 aa, Homo sapiens
MTPIVTVLICLGLSLGPRTHVQTGTIPKPTLWAEPDSVITQGSPVTLSCQGSLEAQEYRLYREKKSASWITRIRPELVKNGQFHIPSITWEHTGRYGCQYYSRARWSELSDPLVLVMTGAYPKPTLSAQPSPVVTSGGRVTLQCESQVAFGGFILCKEGEEEHPQCLNSQPHARGSSRAIFSVGPVSPNRRWSHRCYGYDLNSPYVWSSPSDLLELLVPGVSKKPSLSVQPGPVVAPGESLTLQCVSDVGYDRFVLYKEGERDLRQLPGRQPQAGLSQANFTLGPVSRSYGGQYRCYGAHNLSSECSAPSDPLDILITGQIRGTPFISVQPGPTVASGENVTLLCQSWRQFHTFLLTKAGAADAPLRLRSIHEYPKYQAEFPMSPVTSAHAGTYRCYGSLNSDPYLLSHPSEPLELVVSGPSMGSSPPPTGPISTPAGPEDQPLTPTGSDPQSGLGRHLGVVIGILVAVVLLLLLLLLLFLILRHRRQGKHWTSSPAQLPTPRKKTSMLP

SEQ ID NO: 26691 - protein, 482 aa, Homo sapiens
MTGAYPKPTLSAQPSPVVTSGGRVTLQCESQVAFGGFILCKEGEEEHPQCLNSQPHARGSSRAIFSVGPVSPNRRWSHRCYGYDLNSPYVWSSPSDLLELLVPGVSKKPSLSVQPGPVVAPGESLTLQCVSDVGYDRFVLYKEGERDLRQLPGRQPQAGLSQANFTLGPVSRSYGGQYRCYGAHNLSSECSAPSDPLDILITGQIRGTPFISVQPGPTVASGENVTLLCQSWRQFHTFLLTKAGAADAPLRLRSIHEYPKYQAEFPMSPVTSAHAGTYRCYGSLNSDPYLLSHPSEPLELVVSGPSMGSSPPPTGPISTPAGPEDQPLTPTGSDPQSGLGRHLGVVIGILVAVVLLLLLLLLLFLILRHRRQGKHWTSTQRKADFQHPAGAVGPEPTDRGLQWRSSPAADAQEENLYAAVKDTQPEDGVEMDTRAAASEAPQDVTYAQLHSLTLRRKATEPPPSQEREPPAEPSIYATLAIH

SEQ ID NO: 26692 - protein, 373 aa, Homo sapiens
MASELAMSNSDLPTSPLAMEYVNDFDLMKFEVKKEPVETDRIISQCGRLIAGGSLSSTPMSTPCSSVPPSPSFSAPSPGSGSEQKAHLEDYYWMTGYPQQLNPEALGFSPEDAVEALISNSHQLQGGFDGYARGAQQLAAAAGAGAGASLGGSGEEMGPAAAVVSAVIAAAAAQSGAGPHYHHHHHHAAGHHHHPTAGAPGAAGSAAASAGGAGGAGGGGPASAGGGGGGGGGGGGGGAAGAGGALHPHHAAGGLHFDDRFSDEQLVTMSVRELNRQLRGVSKEEVIRLKQKRRTLKNRGYAQSCRFKRVQQRHVLESEKNQLLQQVDHLKQEISRLVRERDAYKEKYEKLVSSGFRENGSSSDNPSSPEFFM

SEQ ID NO: 26693 - protein, 403 aa, Homo sapiens
MASELAMSNSDLPTSPLAMEYVNDFDLMKFEVKKEPVETDRIISQCGRLIAGGSLSSTPMSTPCSSVPPSPSFSAPSPGSGSEQKAHLEDYYWMTGYPQQLNPEALGFSPEDAVEALISNSHQLQGGFDGYARGAQQLAAAAGAGAGASLGGSGEEMGPAAAVVSAVIAAAAAQSGAGPHYHHHHHHAAGHHHHPTAGAPGAAGSAAASAGGAGGAGGGGPASAGGGGGGGGGGGGGGAAGAGGALHPHHAAGGLHFDDRFSDEQLVTMSVRELNRQLRGVSKEEVIRLKQKRRTLKNRGYAQSCRFKRVQQRHVLESEKNQLLQQVDHLKQEISRLVRERDAYKEKYEKLVSSGFRENGSSSDNPSSPEFFITEPTRKLEPSVGYATFWKPQHRVLTSVFTK

SEQ ID NO: 26694 - protein, 81 aa, Homo sapiens
MLIKVKTLTGKEIEIDIEPTDKVERIKERVEEKEGIPPQQQRLIYSGKQMNDEKTAADYKILGGSVLHLVLALRGGGGLRQ

SEQ ID NO: 26695 - protein, 866 aa, Homo sapiens
MLRPGAQLLRGLLLRSCPLQGSPGRPRSVCGREGEEKPPLSAETQWKDRAETVIIGGGCVGVSLAYHLAKAGMKDVVLLEKSELTAGSTWHAAGLTTYFHPGINLKKIHYDSIKLYEKLEEETGQVVGFHQPGSIRLATTPVRVDEFKYQMTRTGWHATEQYLIEPEKIQEMFPLLNMNKVLAGLYNPGDGHIDPYSLTMALAAGARKCGALLKYPAPVTSLKARSDGTWDVETPQGSMRANRIVNAAGFWAREVGKMIGLEHPLIPVQHQYVVTSTISEVKALKRELPVLRDLEGSYYLRQERDGLLFGPYESQEKMKVQDSWVTNGVPPGFGKELFESDLDRIMEHIKAAMEMVPVLKKADIINVVNGPITYSPDILPMVGPHQGVRNYWVAIGFGYGIIHAGGVGKYLSDWILHGEPPFDLIELDPNRYGKWTTTQYTEAKARESYGFNNIVGYPKEERFAGRPTQRVSGLYQRLESKCSMGFHAGWEQPHWFYKPGQDTQYRPSFRRTNWFEPVGSEYKQVMQRVAVTDLSPFGKFNIKGQDSIRLLDHLFANVIPKVGFTNISHMLTPKGRVYAELTVSHQSPGEFLLITGSGSELHDLRWIEEEAVKGGYDVEIKNITDELGVLGVAGPQARKVLQKLTSEDLSDDVFKFLQTKSLKVSNIPVTAIRISYTGELGWELYHRREDSVALYDAIMNAGQEEGIDNFGTYAMNALRLEKAFRAWGLEMNCDTNPLEAGLEYFVKLNKPADFIGKQALKQIKAKGLKRRLVCLTLATDDVDPEGNESIWYNGKVVGNTTSGSYSYSIQKSLAFAYVPVQLSEVGQQVEVELLGKNYPAVIIQEPLVLTEPTRNRLQKKGGKDKT

SEQ ID NO: 26696 - protein, 394 aa, Homo sapiens
MWSCWRNQSSRLDLPGTQYGIIHAGGVGKYLSDWILHGEPPFDLIELDPNRYGKWTTTQYTEAKARESYGFNNIVGYPKEERFAGRPTQRVSGLYQRLESKCSMGFHAGWEQPHWFYKPGQDTQYRPSFRRTNWFEPVGSEYKQVMQRVAVTDLSPFGKFNIKGQDSIRLLDHLFANVIPKVGFTNISHMLTPKGRVYAELTVSHQSPGEFLLITGSGSELHDLRWIEEEAVKGGYDVEIKNITDELGVLGVAGPQARKVLQKLTSEDLSDDVFKFLQTKSLKVSNIPVTAIRISYTGELGWELYHRREDSVALYDAIMNAGQEEGIDNFGTYAMNALRLEKAFRAWGLEMNCDTNPLEAGLEYFVKLNKDQNSCFAHFKEENGWVSRWAIRPY

SEQ ID NO: 26697 - protein, 314 aa, Homo sapiens
MAATASAGAGGIDGKPRTSPKSVKFLFGGLAGMGATVFVQPLDLVKNRMQLSGEGAKTREYKTSFHALTSILKAEGLRGIYTGLSAGLLRQATYTTTRLGIYTVLFERLTGADGTPPGFLLKAVIGMTAGATGAFVGTPAEVALIRMTADGRLPADQRRGYKNVFNALIRITREEGVLTLWRGCIPTMARAVVVNAAQLASYSQSKQFLLDSGYFSDNILCHFCASMISGLVTTAASMPVDIAKTRIQNMRMIDGKPEYKNGLDVLFKVVRYEGFFSLWKGFTPYYARLGPHTVLTFIFLEQMNKAYKRLFLSG

SEQ ID NO: 26698 - protein, 263 aa, Homo sapiens
MAATASAGAGGIDGKPRTSPKSVKFLFGGLAGLSAGLLRQATYTTTRLGIYTVLFERLTGADGTPPGFLLKAVIGMTAGATGAFVGTPAEVALIRMTADGRLPADQRRGYKNVFNALIRITREEGVLTLWRGCIPTMARAVVVNAAQLASYSQSKQFLLDSGYFSDNILCHFCASMISGLVTTAASMPVDIAKTRIQNMRMIDGKPEYKNGLDVLFKVVRYEGFFSLWKGFTPYYARLGPHTVLTFIFLEQMNKAYKRLFLSG

SEQ ID NO: 26699 - protein, 181 aa, Homo sapiens
MFKKFDEKENVSNCIQLKTSVIKGIKNQLIEQFPGIEPWLNQIMPKKDPVKIVRCHEHIEILTVNGELLFFRQREGPFYPTLRLLHKYPFILPHQQVDKGAIKFVLSGANIMCPGLTSPGAKLYPAAVDTIVAIMAEGKQHALCVGVMKMSAEDIEKVNKGIGIENIHYLNDGLWHMKTYK

SEQ ID NO: 26700 - protein, 169 aa, Homo sapiens
MENYSFLDKEKGIKNQLIEQFPGIEPWLNQIMPKKDPVKIVRCHEHIEILTVNGELLFFRQREGPFYPTLRLLHKYPFILPHQQVDKGAIKFVLSGANIMCPGLTSPGAKLYPAAVDTIVAIMAEGKQHALCVGVMKMSAEDIEKVNKGIGIENIHYLNDGLWHMKTYK

SEQ ID NO: 26701 - protein, 182 aa, Homo sapiens
MGKGRFDEKENVSNCIQLKTSVIKGIKNQLIEQFPGIEPWLNQIMPKKDPVKIVRCHEHIEILTVNGELLFFRQREGPFYPTLRLLHKYPFILPHQQVDKGAIKFVLSGANIMCPGLTSPGAKLYPAAVDTIVAIMAEGKQHALCVGVMKMSAEDIEKVNKGIGIENIHYLNDGLWHMKTYK

SEQ ID NO: 26702 - protein, 669 aa, Homo sapiens
MAIVQTLPVPLEPAPEAATAPQAPVMGSVSSLISGRPCPGGPAPPRHHGPPGPTFFRQQDGLLRGGYEAQEPLCPAVPPRKAVPVTSFTYINEDFRTESPPSPSSDVEDAREQRAHNAHLRGPPPKLIPVSGKLEKNMEKILIRPTAFKPVLPKPRGAPSLPSFMGPRATGLSGSQGSLTQLFGGPASSSSSSSSSSAADKPLAFSGWASGCPSGTLSDSGRNSLSSLPTYSTGGAEPTTSSPGGHLPSHGSGRGALPGPARGVPTGPSHSDSGRSSSSKSTGSLGGRVAGGLLGSGTRASPDSSSCGERSPPPPPPPPSDEALLHCVLEGKLRDREAELQQLRDSLDENEATMCQAYEERQRHWQREREALREDCAAQAQRAQRAQQLLQLQVFQLQQEKRQLQDDFAQLLQEREQLERRCATLEREQRELGPRLEETKWEVCQKSGEISLLKQQLKESQAELVQKGSELVALRVALREARATLRVSEGRARGLQEAARARELELEACSQELQRHRQEAEQLREKAGQLDAEAAGLREPPVPPATADPFLLAESDEAKVQRAAAGVGGSLRAQVERLRVELQRERRRGEEQRDSFEGERLAWQAEKEQVIRYQKQLQHNYIQMYRRNRQLEQELQQLSLELEARELADLGLAEQAPCICLEEITATEI

SEQ ID NO: 26703 - protein, 374 aa, Homo sapiens
MESLLQHLDRFSELLAVSSTTYVSTWDPATVRRALQWARYLRHIHRRFGRHGPIRTALERRLHNQWRQEGGFGRGPVPGLANFQALGHCDVLLSLRLLENRALGDAARYHLVQQLFPGPGVRDADEETLQESLARLARRRSAVHMLRFNGYRENPNLQEDSLMKTQAELLLERLQEVGKAEAERPARFLSSLWERLPQNNFLKVIAVALLQPPLSRRPQEELEPGIHKSPGEGSQVLVHWLLGNSEVFAAFCRALPAGLLTLVTSRHPALSPVYLGLLTDWGQRLHYDLQKGIWVGTESQDVPWEELHNRFQSLCQAPPPLKDKVLTALETCKAQDGDFEVPGLSIWTDLLLALRSGAFRKRQVLGLSAGLSSV

SEQ ID NO: 26704 - protein, 710 aa, Homo sapiens
MLTTLKPFGSVSVESKMNNKAGSFFWNLRQFSTLVSTSRTMRLCCLGLCKPKIVHSNWNILNNFHNRMQSTDIIRYLFQDAFIFKSDVGFQTKGISTLTALRIERLLYAKRLFFDSKQSLVPVDKSDDELKKVNLNHEVSNEDVLTKETKPNRISSRKLSEECNSLSDVLDAFSKAPTFPSSNYFTAMWTIAKRLSDDQKRFEKRLMFSHPAFNQLCEHMMREAKIMQYKYLLFSLHAIVKLGIPQNTILVQTLLRVTQERINECDEICLSVLSTVLEAMEPCKNVHVLRTGFRILVDQQVWKIEDVFTLQVVMKCIGKDAPIALKRKLEMKALRELDRFSVLNSQHMFEVLAAMNHRSLILLDECSKVVLDNIHGCPLRIMINILQSCKDLQYHNLDLFKGLADYVAATFDIWKFRKVLFILILFENLGFRPVGLMDLFMKRIVEDPESLNMKNILSILHTYSSLNHVYKCQNKEQFVEVMASALTGYLHTISSENLLDAVYSFCLMNYFPLAPFNQLLQKDIISELLTSDDMKNAYKLHTLDTCLKLDDTVYLRDIALSLPQLPRELPSSHTNAKVAEVLSSLLGGEGHFSKDVHLPHNYHIDFEIRMDTNRNQVLPLSDVDTTSATDIQRVAVLCVSRSAYCLGSSHPRGFLAMKMRHLNAMGFHVILVNNWEMDKLEMEDAVTFLKTKIYSVEALPVAAVNVQSTQ

SEQ ID NO: 26705 - protein, 648 aa, Homo sapiens
MLTTLKPFGSVSVESKMNNKAGSFFWNLRQFSTLVSTSRTMRLCCLGLCKPKIVHSNWNILNNFHNRMQSTDIIRYLFQDAFIFKSDVGFQTKGISTLTALRIERLLYAKRLFFDSKQSLVPVDKSDDELKKVNLNHEVSNEDVLTKETKPNRISSRKLSEECNSLSDVLDAFSKAPTFPSSNYFTAMWTIAKRLSDDQKRFEKRLMFSHPAFNQLCEHMMREAKIMQYKYLLFSLHAIVKLGIPQNTILVQTLLRVTQERINECDEICLSVLSTVLEAMEPCKNVHVLRTGFRILVDQQVWKIEDVFTLQVVMKCIGKDAPIALKRKLEMKALRELDRFSVLNSQHMFEVLAAMNHRSLILLDECSKVVLDNIHGCPLRIMINILQSCKDLQYHNLDLFKGLADYVAATFDIWKFRKVLFILILFENLGFRPVGLMDLFMKRIVEDPESLNMKNILSILHTYSSLNHVYKCQNKEQFVEVMASALTGYLHTISSENLLDAVYSFCLMNYFPLAPFNQLLQKDIISELLTSDDMKNAYKLHTLDTCLKLDDTVYLRDIALSLPQLPRELPSSHTNAKVAEVLSSLLGGEGHFSKDVHLPHNYHIDFEIRMDTNRNQVLPLSDVDTTSATDIQRLLTYISFAGLSELKS

SEQ ID NO: 26706 - protein, 361 aa, Homo sapiens
MDPLGAAKPQWPWRRCLAALLFQLLVAVCFFSYLRVSRDDATGSPRAPSGSSRQDTTPTRPTLLILLWTWPFHIPVALSRCSEMVPGTADCHITADRKVYPQADTVIVHHWDIMSNPKSRLPPSPRPQGQRWIWFNLEPPPNCQHLEALDRYFNLTMSYRSDSDIFTPYGWLEPWSGQPAHPPLNLSAKTELVAWAVSNWKPDSARVRYYQSLQAHLKVDVYGRSHKPLPKGTMMETLSRYKFYLAFENSLHPDYITEKLWRNALEAWAVPVVLGPSRSNYERFLPPDAFIHVDDFQSPKDLARYLQELDKDHARYLSYFRWRETLRPRSFSWALDFCKACWKLQQESRYQTVRSIAAWFT

SEQ ID NO: 26707 - protein, 666 aa, Homo sapiens
MGQTKSKIKSKYASYLSFIKILLKRGGVKVSTKNLIKLFQIIEQFCPWFPEQGTLDLKDWKRIGKELKQAGRKGNIIPLTVWNDWAIIKAALEPFQTEEDSVSVSDAPGSCIIDCNENTRKKSQKETESLHCEYVAEPVMAQSTQNVDYNQLQEVIYPETLKLEGKVPELVGPSESKPRGTSRLPAGQVPVTLQPQTQVKENKTQPPVAYQYWPPAELQYRPPLESQYGYPGMPPAPQGRAPYPQPPTRRLNPTAPPSRRGSELHEIIDKSRKEGDTEAWQFPVTLEPMPPGEGAQEGEPPTVEARYKSFSIKMLKDMKEGVKQYGPNSPYMRTLLDSIAHGHRLIPYDWEILAKSSLSPSQFLQFKTWWIDGVQEQVRRNRAANPPVNIDADQLLGIGQNWSTISQQALMQNEAIEQVRAICLRAWEKIQDPGSTCPSFNTVRQGSKEPYPDFVARLQDVAQKSIAIEKARKVIVELMAYENPNPECQSAIKPLKGKVPAGSDVISEYVKACDGMGGAMHKAMLMAQAITGVVLGGQVRTFGGKCYNCGQIGHLKKNCPVLNKQNITIQATTTGREPPDLCPRCKKGKHWASQCRSKFDKNGQPLSGNEQRGQPQAPQQTGAFPIQPFVPHGFQGQQPPLSQVFQGISQLPQYNNCPPPQAAVQQ

SEQ ID NO: 26708 - protein, 575 aa, Homo sapiens
MRPWTGSWRWIMLILFAWGTLLFYIGGHLVRDNDHPDHSSRELSKILAKLERLKQQNEDLRRMAESLRIPEGPIDQGPAIGRVRVLEEQLVKAKEQIENYKKQTRNGLGKDHEILRRRIENGAKELWFFLQSELKKLKNLEGNELQRHADEFLLDLGHHERSIMTDLYYLSQTDGAGDWREKEAKDLTELVQRRITYLQNPKDCSKAKKLVCNINKGCGYGCQLHHVVYCFMIAYGTQRTLILESQNWRYATGGWETVFRPVSETCTDRSGISTGHWSGEVKDKNVQVVELPIVDSLHPRPPYLPLAVPEDLADRLVRVHGDPAVWWVSQFVKYLIRPQPWLEKEIEEATKKLGFKHPVIGVHVRRTDKVGTEAAFHPIEEYMVHVEEHFQLLARRMQVDKKRVYLATDDPSLLKEAKTKYPNYEFISDNSISWSAGLHNRYTENSLRGVILDIHFLSQADFLVCTFSSQVCRVAYEIMQTLHPDASANFHSLDDIYYFGGQNAHNQIAIYAHQPRTADEIPMEPGDIIGVAGNHWDGYSKGVNRKLGRTGLYPSYKVREKIETVKYPTYPEAEK

SEQ ID NO: 26709 - protein, 308 aa, Homo sapiens
MRPWTGSWRWIMLILFAWGTLLFYIGGHLVRDNDHPDHSSRELSKILAKLERLKQQNEDLRRMAESLRIPEGPIDQGPAIGRVRVLEEQLVKAKEQIENYKKQTRNGLGKDHEILRRRIENGAKELWFFLQSELKKLKNLEGNELQRHADEFLLDLGHHERSIMTDLYYLSQTDGAGDWREKEAKDLTELVQRRITYLQNPKDCSKAKKLVCNINKGCGYGCQLHHVVYCFMIAYGTQRTLILESQNWRYATGGWETVFRPVSETCTDRSGISTGHWSGTPIMNLLVITLFPGQLDCTIDTQKIHFVE

SEQ ID NO: 26710 - protein, 412 aa, Homo sapiens
MTDLYYLSQTDGAGDWREKEAKDLTELVQRRITYLQNPKDCSKAKKLVCNINKGCGYGCQLHHVVYCFMIAYGTQRTLILESQNWRYATGGWETVFRPVSETCTDRSGISTGHWSGEVKDKNVQVVELPIVDSLHPRPPYLPLAVPEDLADRLVRVHGDPAVWWVSQFVKYLIRPQPWLEKEIEEATKKLGFKHPVIGVHVRRTDKVGTEAAFHPIEEYMVHVEEHFQLLARRMQVDKKRVYLATDDPSLLKEAKTKYPNYEFISDNSISWSAGLHNRYTENSLRGVILDIHFLSQADFLVCTFSSQVCRVAYEIMQTLHPDASANFHSLDDIYYFGGQNAHNQIAIYAHQPRTADEIPMEPGDIIGVAGNHWDGYSKGVNRKLGRTGLYPSYKVREKIETVKYPTYPEAEK

SEQ ID NO: 26711 - protein, 169 aa, Homo sapiens
MHRQIWHLHWTLVRYPNYEFISDNSISWSAGLHNRYTENSLRGVILDIHFLSQADFLVCTFSSQVCRVAYEIMQTLHPDASANFHSLDDIYYFGGQNAHNQIAIYAHQPRTADEIPMEPGDIIGVAGNHWDGYSKGVNRKLGRTGLYPSYKVREKIETVKYPTYPEAEK

SEQ ID NO: 26712 - protein, 695 aa, Homo sapiens
MALLLVSLLAFLSLGSGCHHRICHCSNRVFLCQESKVTEIPSDLPRNAIELRFVLTKLRVIQKGAFSGFGDLEKIEISQNDVLEVIEADVFSNLPKLHEIRIEKANNLLYINPEAFQNLPNLQYLLISNTGIKHLPDVHKIHSLQKVLLDIQDNINIHTIERNSFVGLSFESVILWLNKNGIQEIHNCAFNGTQLDELNLSDNNNLEELPNDVFHGASGPVILDISRTRIHSLPSYGLENLKKLRARSTYNLKKLPTLEKLVALMEASLTYPSHCCAFANWRRQISELHPICNKSILRQEVDYMTQARGQRSSLAEDNESSYSRGFDMTYTEFDYDLCNEVVDVTCSPKPDAFNPCEDIMGYNILRVLIWFISILAITGNIIVLVILTTSQYKLTVPRFLMCNLAFADLCIGIYLLLIASVDIHTKSQYHNYAIDWQTGAGCDAAGFFTVFASELSVYTLTAITLERWHTITHAMQLDCKVQLRHAASVMVMGWIFAFAAALFPIFGISSYMKVSICLPMDIDSPLSQLYVMSLLVLNVLAFVVICGCYIHIYLTVRNPNIVSSSSDTRIAKRMAMLIFTDFLCMAPISFFAISASLKVPLITVSKAKILLVLFHPINSCANPFLYAIFTKNFRRDFFILLSKCGCYEMQAQIYRTETSSTVHNTHPRNGHCSSAPRVTNGSTYILVPLSHLAQN

SEQ ID NO: 26713 - protein, 633 aa, Homo sapiens
MALLLVSLLAFLSLGSGCHHRICHCSNRVFLCQESKVTEIPSDLPRNAIELRFVLTKLRVIQKGAFSGFGDLEKIEISQNDVLEVIEADVFSNLPKLHEIRIEKANNLLYINPEAFQNLPNLQYLLISNTGIKHLPDVHKIHSLQKVLLDIQDNINIHTIERNSFVGLSFESVILWLNKNGIQEIHNCAFNGTQLDELNLSDNNNLEELPNDVFHGASGPVILSELHPICNKSILRQEVDYMTQARGQRSSLAEDNESSYSRGFDMTYTEFDYDLCNEVVDVTCSPKPDAFNPCEDIMGYNILRVLIWFISILAITGNIIVLVILTTSQYKLTVPRFLMCNLAFADLCIGIYLLLIASVDIHTKSQYHNYAIDWQTGAGCDAAGFFTVFASELSVYTLTAITLERWHTITHAMQLDCKVQLRHAASVMVMGWIFAFAAALFPIFGISSYMKVSICLPMDIDSPLSQLYVMSLLVLNVLAFVVICGCYIHIYLTVRNPNIVSSSSDTRIAKRMAMLIFTDFLCMAPISFFAISASLKVPLITVSKAKILLVLFHPINSCANPFLYAIFTKNFRRDFFILLSKCGCYEMQAQIYRTETSSTVHNTHPRNGHCSSAPRVTNGSTYILVPLSHLAQN

SEQ ID NO: 26714 - protein, 669 aa, Homo sapiens [sequence omitted]

SEQ ID NO: 26715 - protein, 729 aa, Homo sapiens
MALLLVSLLAFLSLGSGCHHRICHCSNRVFLCQESKVTEIPSDLPRNAIELRFVLTKLRVIQKGAFSGFGDLEKIEISQNDVLEVIEADVFSNLPKLHEIRIEKANNLLYINPEAFQNLPNLQYLLISNTGIKHLPDVHKIHSLQKVLLDIQDNINIHTIERNSFVGLSFESVILWLNKNGIQEIHNCAFNGTQLDELNLSDNNNLEELPNDVFHGASGPVILNRRTRTPTEPNVLLAKYPSGQGVLEEPESLSSSIDISRTRIHSLPSYGLENLKKLRARSTYNLKKLPTLEKLVALMEASLTYPSHCCAFANWRRQISELHPICNKSILRQEVDYMTQARGQRSSLAEDNESSYSRGFDMTYTEFDYDLCNEVVDVTCSPKPDAFNPCEDIMGYNILRVLIWFISILAITGNIIVLVILTTSQYKLTVPRFLMCNLAFADLCIGIYLLLIASVDIHTKSQYHNYAIDWQTGAGCDAAGFFTVFASELSVYTLTAITLERWHTITHAMQLDCKVQLRHAASVMVMGWIFAFAAALFPIFGISSYMKVSICLPMDIDSPLSQLYVMSLLVLNVLAFVVICGCYIHIYLTVRNPNIVSSSSDTRIAKRMAMLIFTDFLCMAPISFFAISASLKVPLITVSKAKILLVLFHPINSCANPFLYAIFTKNFRRDFFILLSKCGCYEMQAQIYRTETSSTVHNTHPRNGHCSSAPRVTNGSTYILVPLSHLAQN

SEQ ID NO: 26716 - protein, 1311 aa, Homo sapiens
MSLLQSALDFLAGPGSLGGASGRDQSDFVGQTVELGELRLRVRRVLAEGGFAFVYEAQDVGSGREYALKRLLSNEEEKNRAIIQEVCFMKKLSGHPNIVQFCSAASIGKEESDTGQAEFLLLTELCKGQLVEFLKKMESRGPLSCDTVLKIFYQTCRAVQHMHRQKPPIIHRDLKVENLLLSNQGTIKLCDFGSATTISHYPDYSWSAQRRALVEEEITRNTTPMYRTPEIIDLYSNFPIGEKQDIWALGCILYLLCFRQHPFEDGAKLRIVNGKYSIPPHDTQYTVFHSLIRAMLQVNPEERLSIAEVVHQLQEIAAARNVNPKSPITELLEQNGGYGSATLSRGPPPPVGPAGSGYSGGLALAEYDQPYGGFLDILRGGTERLFTNLKDTSSKVIQSVANYAKGDLDISYITSRIAVMSFPAEGVESALKNNIEDVRLFLDSKHPGHYAVYNLSPRTYRPSRFHNRVSECGWAARRAPHLHTLYNICRNMHAWLRQDHKNVCVVHCMDGRAASAVAVCSFLCFCRLFSTAEAAVYMFSMKRCPPGIWPSHKRYIEYMCDMVAEEPITPHSKPILVRAVVMTPVPLFSKQRSGCRPFCEVYVGDERVASTSQEYDKMRDFKIEDGKAVIPLGVTVQGDVLIVIYHARSTLGGRLQAKMASMKMFQIQFHTGFVPRNATTVKFAKYDLDACDIQEKYPDLFQVNLEVEVEPRDRPSREAPPWENSSMRGLNPKILFSSREEQQDILSKFGKPELPRQPGSTAQYDAGAGSPEAEPTDSDSPPSSSADASRFLHTLDWQEEKEAETGAENASSKESESALMEDRDESEVSDEGGSPISSEGQEPRADPEPPGLAAGLVQQDLVFEVETPAVLPEPVPQEDGVDLLGLHSEVGAGPAVPPQACKAPSSNTDLLSCLLGPPEAASQGPPEDLLSEDPLLLASPAPPLSVQSTPRGGPPAAADPFGPLLPSSGNNSQPCSNPDLFGEFLNSDSVTVPPSFPSAHSAPPPSCSADFLHLGDLPGEPSKMTASSSNPDLLGGWAAWTETAASAVAPTPATEGPLFSPGGQPAPCGSQASWTKSQNPDPFADLGDLSSGLQGSPAGFPPGGFIPKTATTPKGSSSWQTSRPPAQGASWPPQAKPPPKACTQPRPNYASNFSVIGAREERGVRAPSFAQKPKVSENDFEDLLSNQGFSSRSDKKGPKTIAEMRKQDLAKDTDPLKLKLLDWIEGKERNIRALLSTLHTVLWDGESRWTPVGMADLVAPEQVKKHYRRAVLAVHPDKAAGQPYEQHAKMIFMELNDAWSEFENQGSRPLF

SEQ ID NO: 26717 - protein, 1232 aa, Homo sapiens
MSLLQSALDFLAGPGSLGGASGRDQSDFVGQTVELGELRLRVRRVLAEGQLVEFLKKMESRGPLSCDTVLKIFYQTCRAVQHMHRQKPPIIHRDLKVENLLLSNQGTIKLCDFGSATTISHYPDYSWSAQRRALVEEEITRNTTPMYRTPEIIDLYSNFPIGEKQDIWALGCILYLLCFRQHPFEDGAKLRIVNGKYSIPPHDTQYTVFHSLIRAMLQVNPEERLSIAEVVHQLQEIAAARNVNPKSPITELLEQNGGYGSATLSRGPPPPVGPAGSGYSGGLALAEYDQPYGGFLDILRGGTERLFTNLKDTSSKVIQSVANYAKGDLDISYITSRIAVMSFPAEGVESALKNNIEDVRLFLDSKHPGHYAVYNLSPRTYRPSRFHNRVSECGWAARRAPHLHTLYNICRNMHAWLRQDHKNVCVVHCMDGRAASAVAVCSFLCFCRLFSTAEAAVYMFSMKRCPPGIWPSHKRYIEYMCDMVAEEPITPHSKPILVRAVVMTPVPLFSKQRSGCRPFCEVYVGDERVASTSQEYDKMRDFKIEDGKAVIPLGVTVQGDVLIVIYHARSTLGGRLQAKMASMKMFQIQFHTGFVPRNATTVKFAKYDLDACDIQEKYPDLFQVNLEVEVEPRDRPSREAPPWENSSMRGLNPKILFSSREEQQDILSKFGKPELPRQPGSTAQYDAGAGSPEAEPTDSDSPPSSSADASRFLHTLDWQEEKEAETGAENASSKESESALMEDRDESEVSDEGGSPISSEGQEPRADPEPPGLAAGLVQQDLVFEVETPAVLPEPVPQEDGVDLLGLHSEVGAGPAVPPQACKAPSSNTDLLSCLLGPPEAASQGPPEDLLSEDPLLLASPAPPLSVQSTPRGGPPAAADPFGPLLPSSGNNSQPCSNPDLFGEFLNSDSVTVPPSFPSAHSAPPPSCSADFLHLGDLPGEPSKMTASSSNPDLLGGWAAWTETAASAVAPTPATEGPLFSPGGQPAPCGSQASWTKSQNPDPFADLGDLSSGLQGSPAGFPPGGFIPKTATTPKGSSSWQTSRPPAQGASWPPQAKPPPKACTQPRPNYASNFSVIGAREERGVRAPSFAQKPKVSENDFEDLLSNQGFSSRSDKKGPKTIAEMRKQDLAKDTDPLKLKLLDWIEGKERNIRALLSTLHTVLWDGESRWTPVGMADLVAPEQVKKHYRRAVLAVHPDKAAGQPYEQHAKMIFMELNDAWSEFENQGSRPLF

SEQ ID NO: 26718 - protein, 521 aa, Homo sapiens
MSSDSDRQCPVDGDIDQQEMIPSKKNAVLVDGVVLNGPTTDAKAGEKFVEEACRLIMEEVVLKATDVNEKVCEWRPPEQLKQLLDLEMRDSGEPPHKLLELCRDVIHYSVKTNHPRFFNQLYAGLDYYSLVARFMTEALNPSVYTYEVSPVFLLVEEAVLKKMIEFIGWKEGDGIFNPGGSVSNMYAMNLARYKYCPDIKEKGLSGSPRLILFTSAECHYSMKKAASFLGIGTENVCFVETDGRGKMIPEELEKQVWQARKEGAAPFLVCATSGTTVLGAFDPLDEIADICERHSLWLHVDASWGGSALMSRKHRKLLHGIHRADSVAWNPHKMLMAGIQCCALLVKDKSDLLKKCYSAKASYLFQQDKFYDVSYDTGDKSIQCSRRPDAFKFWMTWKALGTLGLEERVNRALALSRYLVDEIKKREGFKLLMEPEYANICFWYIPPSLREMEEGPEFWAKLNLVAPAIKERMMKKGSLMLGYQPHRGKVNFFRQVVISPQVSREDMDFLLDEIDLLGKDM

SEQ ID NO: 26719 - protein, 418 aa, Homo sapiens
MSSDSDRQCPVDGDIDQQEMIPSKKNAVLVDGVVLNGPTTDAKAGEKFVEEACRLIMEEVVLKATDVNEKVCEWRPPEQLKQLLDLEMRDSGEPPHKLLELCRDVIHYSVKTNHPRFFNQLYAGLDYYSLVARFMTEALNPSVYTYEVSPVFLLVEEAVLKKMIEFIGWKEGDGIFNPGGSVSNMYAMNLARYKYCPDIKEKGLSGSPRLILFTSAECHYSMKKAASFLGIGTENVCFVETDGRGKMIPEELEKQVWQARKEGAAPFLVCATSGTTVLGAFDPLDEIADICERHSLWLHVDASWGGSALMSRKHRKLLHGIHRADSVAWNPHKMLMAGIQCCALLVKDKSDLLKKCYSAKASYLFQQDKFYDVSYDTGDKSIQCSRRPDAFKFWMTWKALGTLGLEERVNRALALSRY

SEQ ID NO: 26720 - protein, 694 aa, Homo sapiens
MGMKVPGKGESGPSALLTPPMSSSSRGPGAGARRRRTRCRRCRACVRTECGDCHFCRDMKKFGGPGRMKQSCLLRQCTAPVLPHTAVCLLCGEAGKEDTVEGEEEKFGLSLMECTICNEIVHPGCLKMGKAEGVINAEIPNCWECPRCTQEGRTSKDSGEGPGRRRADNGEEGASLGSGWKLTEEPPLPPPPPRRKGPLPAGPPPEDVPGPPKRKEREAGNEPPTPRKKVKGGRERHLKKVGGDACLLRGSDPGGPGLLPPRVLNPSQAFSSCHPGLPPENWEKPKPPLASAEGPAVPSPSPQREKLERFKRMCQLLERVPDTSSSSSDSDSDSDSSGTSLSEDEAPGEARNGRRPARGSSGEKENRGGRRAVRPGSGGPLLSWPLGPAPPPRPPQLERHVVRPPPRSPEPDTLPLAAGSDHPLPRAAWLRVFQHLGPRELCICMRVCRTWSRWCYDKRLWPRMDLSRRKSLTPPMLSGVVRRQPRALDLSWTGVSKKQLMWLLNRLQGLQELVLSGCSWLSVSALGSAPLPALRLLDLRWIEDVKDSQLRELLLPPPDTKPGQTESRGRLQGVAELRLAGLELTDASLRLLLRHAPQLSALDLSHCAHVGDPSVHLLTAPTSPLRETLVHLNLAGCHRLTDHCLPLFRRCPRLRRLDLRSCRQLSPEACARLAAAGPPGPFRCPEEKLLLKDS

SEQ ID NO: 26721 - protein, 651 aa, Homo sapiens
MGMKVPGKGESGPSALLTPPMSSSSRGPGAGARRRRTRCRRCRACVRTECGDCHFCRDMKKFGGPGRMKQSCLLRQCTAPVLPHTAVCLLCGEAGKEDTVEGEEEKFGLSLMECTICNEIVHPGCLKMGKAEGVINAEIPNCWECPRCTQEGRTSKDSGEGPGRRRADNGEEGASLGSGWKLTEEPPLPPPPPRRKGPLPAGPPPEDVPGPPKRKEREAGNEPPTPRKKVKGGRERHLKKKPKPPLASAEGPAVPSPSPQREKLERFKRMCQLLERVPDTSSSSSDSDSDSDSSGTSLSEDEAPGEARNGRRPARGSSGEKENRGGRRAVRPGSGGPLLSWPLGPAPPPRPPQLERHVVRPPPRSPEPDTLPLAAGSDHPLPRAAWLRVFQHLGPRELCICMRVCRTWSRWCYDKRLWPRMDLSRRKSLTPPMLSGVVRRQPRALDLSWTGVSKKQLMWLLNRLQGLQELVLSGCSWLSVSALGSAPLPALRLLDLRWIEDVKDSQLRELLLPPPDTKPGQTESRGRLQGVAELRLAGLELTDASLRLLLRHAPQLSALDLSHCAHVGDPSVHLLTAPTSPLRETLVHLNLAGCHRLTDHCLPLFRRCPRLRRLDLRSCRQLSPEACARLAAAGPPGPFRCPEEKLLLKDS

SEQ ID NO: 26722 - protein, 665 aa, Homo sapiens
MGMKVPGKGESGPSALLTPPMSSSSRGPGAGARRRRTRCRRCRACVRTECGDCHFCRDMKKFGGPGRMKQSCLLRQCTAPVLPHTAVCLLCGEAGKEDTVEGEEEKFGLSLMECTICNEIVHPGCLKMGKAEGVINAEIPNCWECPRCTQEGRTSKDSGEGPGRRRADNGEEGASLGSGWKLTEEPPLPPPPPRRKGPLPAGPPPEDVPGPPKRKEREAGNEPPTPRKKVKGGRERHLKKVGGDACLLRGSDPGGPGLLPPRVLNPSQAFSSCHPGLPPENWEKPKPPLASAEGPAVPSPSPQREKLERFKRMCQLLERVPDTSSSSSDSDSDSDSSGTSLSEDEAPGEARNGRRPARGSSGEKENRGGRRAVRPGSGGPLLSWPLGPAPPPRPPQLERHVVRPPPRSPEPDTLPLAAGSDHPLPRAAWLRVFQHLGPRELCICMRVCRTWSRWCYDKRLWPRMDLSRRKSLTPPMLSGVVRRQPRALDLSWTGVSKKQLMWLLNRLQGLQELVLSGCSWLSVSALGSAPLPALRLLDLRWIEDVKDSQLRELLLPPPDTKPGQTESRGRLQGVAELRLAGLELTDASLRLLLRHAPQLSALDLSHCAHVGDPSVHLLTAPTSPLRETLVHLNLAGCHRLTDPAGLGPWAPGLYNTVCYKTQNLP

SEQ ID NO: 26723 - protein, 739 aa, Homo sapiens
MPSPRPVLLRGARAALLLLLPPRLLARPSLLLRRSLSAASCPPISLPAAASRSSMDGAGAEEVLAPLRLAVRQQGDLVRKLKEDKAPQVDVDKAVAELKARKRVLEAKELALQPKDDIVDRAKMEDTLKRRFFYDQAFAIYGGVSGLYDFGPVGCALKNNIIQTWRQHFIQEEQILEIDCTMLTPEPVLKTSGHVDKFADFMVKDVKNGECFRADHLLKAHLQKLMSDKKCSVEKKSEMESVLAQLDNYGQQELADLFVNYNVKSPITGNDLSPPVSFNLMFKTFIGPGGNMPGYLRPETAQGIFLNFKRLLEFNQGKLPFAAAQIGNSFRNEISPRSGLIRVREFTMAEIEHFVDPSEKDHPKFQNVADLHLYLYSAKAQVSGQSARKMRLGDAVEQGVINNTVLGYFIGRIYLYLTKVGISPDKLRFRQHMENEMAHYACDCWDAESKTSYGWIEIVGCADRSCYDLSCHARATKVPLVAEKPLKEPKTVNVVQFEPSKGAIGKAYKKDAKLVMEYLAICDECYITEMEMLLNEKGEFTIETEGKTFQLTKDMINVKRFQKTLYVEEVVPNVIEPSFGLGRIMYTVFEHTFHVREGDEQRTFFSFPAVVAPFKCSVLPLSQNQEFMPFVKELSEALTRHGVSHKVDDSSGSIGRRYARTDEIGVAFGVTIDFDTVNKTPHTATLRDRDSMRQIRAEISELPSIVQDLANGNITWADVEARYPLFEGQETGKKETIEE

SEQ ID NO: 26724 - protein, 685 aa, Homo sapiens
MDGAGAEEVLAPLRLAVRQQGDLVRKLKEDKAPQVDVDKAVAELKARKRVLEAKELALQPKDDIVDRAKMEDTLKRRFFYDQAFAIYGGVSGLYDFGPVGCALKNNIIQTWRQHFIQEEQILEIDCTMLTPEPVLKTSGHVDKFADFMVKDVKNGECFRADHLLKAHLQKLMSDKKCSVEKKSEMESVLAQLDNYGQQELADLFVNYNVKSPITGNDLSPPVSFNLMFKTFIGPGGNMPGYLRPETAQGIFLNFKRLLEFNQGKLPFAAAQIGNSFRNEISPRSGLIRVREFTMAEIEHFVDPSEKDHPKFQNVADLHLYLYSAKAQVSGQSARKMRLGDAVEQGVINNTVLGYFIGRIYLYLTKVGISPDKLRFRQHMENEMAHYACDCWDAESKTSYGWIEIVGCADRSCYDLSCHARATKVPLVAEKPLKEPKTVNVVQFEPSKGAIGKAYKKDAKLVMEYLAICDECYITEMEMLLNEKGEFTIETEGKTFQLTKDMINVKRFQKTLYVEEVVPNVIEPSFGLGRIMYTVFEHTFHVREGDEQRTFFSFPAVVAPFKCSVLPLSQNQEFMPFVKELSEALTRHGVSHKVDDSSGSIGRRYARTDEIGVAFGVTIDFDTVNKTPHTATLRDRDSMRQIRAEISELPSIVQDLANGNITWADVEARYPLFEGQETGKKETIEE

SEQ ID NO: 26725 - protein, 447 aa, Homo sapiens
MELLKLNRSVQGTGPGPGASLCRPGAPLLNSSSVGNLSCEPPRIRGAGTRELELAIRITLYAVIFLMSVGGNMLIIVVLGLSRRLRTVTNAFLLSLAVSDLLLAVACMPFTLLPNLMGTFIFGTVICKAVSYLMGVSVSVSTLSLVAIALERYSAICRPLQARVWQTRSHAARVIVATWLLSGLLMVPYPVYTVVQPVGPRVLQCVHRWPSARVRQTWSVLLLLLLFFIPGVVMAVAYGLISRELYLGLRFDGDSDSDSQSRVRNQGGLPGAVHQNGRCRPETGAVGEDSDGCYVQLPRSRPALELTALTAPGPGSGSRPTQAKLLAKKRVVRMLLVIVVLFFLCWLPVYSANTWRAFDGPGAHRALSGAPISFIHLLSYASACVNPLVYCFMHRRFRQACLETCARCCPRPPRARPRALPDEDPPTPSIASLSRLSYTTISTLGPG

SEQ ID NO: 26726 - protein, 516 aa, Homo sapiens
MELLKLNRSVQGTGPGPGASLCRPGAPLLNSSSVGNLSCEPPRIRGAGTRELELAIRITLYAVIFLMSVGGNMLIIVVLGLSRRLRTVTNAFLLSLAVSDLLLAVACMPFTLLPNLMGTFIFGTVICKAVSYLMGVSVSVSTLSLVAIALERYSAICRPLQARVWQTRSHAARVIVATWLLSGLLMVPYPVYTVVQPVGPRVLQCVHRWPSARVRQTWSVLLLLLLFFIPGVVMAVAYGLISRELYLGLRFDGDSDSDSQSRVRNQGGLPGGAGPREQNLGEAELWRATGPAGVGGTEMKVRVRRKLEMELSWERRSGGDWAGDWGDSPFSLTAHPLCSGAVHQNGRCRPETGAVGEDSDGCYVQLPRSRPALELTALTAPGPGSGSRPTQAKLLAKKRVVRMLLVIVVLFFLCWLPVYSANTWRAFDGPGAHRALSGAPISFIHLLSYASACVNPLVYCFMHRRFRQACLETCARCCPRPPRARPRALPDEDPPTPSIASLSRLSYTTISTLGPG

SEQ ID NO: 26727 - protein, 381 aa, Homo sapiens
MSVGGNMLIIVVLGLSRRLRTVTNAFLLSLAVSDLLLAVACMPFTLLPNLMGTFIFGTVICKAVSYLMGVSVSVSTLSLVAIALERYSAICRPLQARVWQTRSHAARVIVATWLLSGLLMVPYPVYTVVQPVGPRVLQCVHRWPSARVRQTWSVLLLLLLFFIPGVVMAVAYGLISRELYLGLRFDGDSDSDSQSRVRNQGGLPGAVHQNGRCRPETGAVGEDSDGCYVQLPRSRPALELTALTAPGPGSGSRPTQAKLLAKKRVVRMLLVIVVLFFLCWLPVYSANTWRAFDGPGAHRALSGAPISFIHLLSYASACVNPLVYCFMHRRFRQACLETCARCCPRPPRARPRALPDEDPPTPSIASLSRLSYTTISTLGPG

SEQ ID NO: 26728 - protein, 592 aa, Homo sapiens
MAVSGFTLGTCILLLHISYVANYPNGKVTQSCHGMIPEHGHSPQSVPVHDIYVSQMTFRPGDQIEVTLSGHPFKGFLLEARNAEDLNGPPIGSFTLIDSEVSQLLTCEDIQGSAVSHRSASKKTEIKVYWNAPSSAPNHTQFLVTVVEKYKIYWVKIPGPIISQPNAFPFTTPKATVVPLPTLPPVSHLTKPFSASDCGNKKFCIRSPLNCDPEKEASCVFLSFTRDDQSVMVEMSGPSKGYLSFALSHDQWMGDDDAYLCIHEDQTVYIQPSHLTGRSHPVMDSRDTLEDMAWRLADGVMQCSFRRNITLPGVKNRFDLNTSYYIFLADGAANDGRIYKHSQQPLITYEKYDVTDSPKNIGGSHSVLLLKVHGALMFVAWMTTVSIGVLVARFFKPVWSKAFLLGEAAWFQVHRMLMFTTTVLTCIAFVMPFIYRGGWSRHAGYHPYLGCIVMTLAVLQPLLAVFRPPLHDPRRQMFNWTHWSMGTAARIIAVAAMFLGMDLPGLNLPDSWKTYAMTGFVAWHVGTEVVLEVHAYRLSRKVEILDDDRIQILQSFTAVETEGHAFKKAVLAIYVCGNVTFLIIFLSAINHL

SEQ ID NO: 26729 - protein, 626 aa, Homo sapiens
MAVSGFTLGTCILLLHISYVANYPNGKVTQSCHGMIPEHGHSPQSVPVHDIYVSQMTFRPGDQIEVTLSGHPFKGFLLEARNAEDLNGPPIGSFTLIDSEVSQLLTCEDIQGSAVSHRSASKKTEIKVYWNAPSSAPNHTQFLVTVVEKYKIYWVKIPGPIISQPNAFPFTTPKATVVPLPTLPPVSHLTKPFSASDCGNKKFCIRSPLNCDPEKEASCVFLSFTRDDQSVMVEMSGPSKGYLSFALSHDQWMGDDDAYLCIHEDQTVYIQPSHLTGRSHPVMDSRDTLEDMAWRLADGVMQCSFRRNITLPGVKNRFDLNTSYYIFLADGAANDGRIYKHSQQPLITYEKYDVTDSPKNIGGSHSVLLLKVHGALMFVAWMTTVSIGVLVARFFKPVWSKAFLLGEAAWFQVHRMLMFTTTVLTCIAFVMPFIYRGGWSRHAGYHPYLGCIVMTLAVLQPLLAVFRPPLHDPRRQMFNWTHWSMGTAARIIAVAAMFLGMDLPGLNLPDSWKTYAMTGFVAWHVGTEVVLELKYWMMTEFRSFSHLLQWKQRVMLLKRQCWQFMSVGMLLFSSYFYLQSTIYEQAKTLAFAGQVIIIIKPKKLEACPDCLEHICEFSLGRLGSCL

SEQ ID NO: 26730 - protein, 417 aa, Homo sapiens
MESNLSGLVPAAGLVPALPPAVTLGLTAAYTTLYALLFFSVYAQLWLVLLYGHKRLSYQTVFLALCLLWAALRTTLFSFYFRDTPRANRLGPLPFWLLYCCPVCLQFFTLTLMNLYFAQVVFKAKVKRRPEMSRGLLAVRGAFVGASLLFLLVNVLCAVLSHRRRAQPWALLLVRVLVSDSLFVICALSLAACLCLVARRAPSTSIYLEAKGTSVCQAAAMGGAMVLLYASRACYNLTALALAPQSRLDTFDYDWYNVSDQADLVNDLGNKGYLVFGLILFVWELLPTTLLVGFFRVHRPPQDLSTSHILNGQVFASRSYFFDRAGHCEDEGCSWEHSRGESTRCQDQAATTTVSTPPHRRDPPPSPTEYPGPSPPHPRPLCQVCLPLLAQDPGGRGYPLLWPAPCCSCHSELVPSP

SEQ ID NO: 26731 - protein, 396 aa, Homo sapiens
MESNLSGLVPAAGLVPALPPAVTLGLTAAYTTLYALLFFSVYAQLWLVLLYGHKRLSYQTVFLALCLLWAALRTTLFSFYFRDTPRANRLGPLPFWLLYCCPVCLQFFTLTLMNLYFAQVVFKAKVKRRPEMSRGLLAVRGAFVGASLLFLLVNVLCAVLSHRRRAQPWALLLVRVLVSDSLFVICALSLAACLCLVARRAPSTSIYLEAKGTSVCQAAAMGGAMVLLYASRACYNLTALALAPQSRLDTFDYDWYNVSDQADLVNDLGNKGYLVFGLILFVWELLPTTLLVGFFRVHRPPQDLSTSHILNGQVFASRSYFFDRAGHCEDEGCSWEHSRGESTSMSGSLGSGSWYGAIGREPGWYGGSQTKTTPLLFSQVPGPGGHHHSLYSTPQT

SEQ ID NO: 26732 - protein, 346 aa, Homo sapiens
MESNLSGLVPAAGLVPALPPAVTLGLTAAYTTLYALLFFSVYAQLWLVLLYGHKRLSYQTVFLALCLLWAALRTTLFSFYFRDTPRANRLGPLPFWLLYCCPVCLQFFTLTLMNLYFAQVVFKAKVKRRPEMSRGLLAVRGAFVGASLLFLLVNVLCAVLSHRRRAQPWALLLVRVLVSDSLFVICALSLAACLCLVARRAPSTSIYLEAKADLVNDLGNKGYLVFGLILFVWELLPTTLLVGFFRVHRPPQDLSTSHILNGQVFASRSYFFDRAGHCEDEGCSWEHSRGESTSMSGSLGSGSWYGAIGREPGWYGGSQTKTTPLLFSQVPGPGGHHHSLYSTPQT

SEQ ID NO: 26733 - protein, 475 aa, Homo sapiens
MLWAVRTRCYVVKAQLGPTVALEGRAPRAPGPSCLGNGNCQRPGPITSRNVTRASLPDMESNLSGLVPAAGLVPALPPAVTLGLTAAYTTLYALLFFSVYAQLWLVLLYGHKRLSYQTVFLALCLLWAALRTTLFSFYFRDTPRANRLGPLPFWLLYCCPVCLQFFTLTLMNLYFAQVVFKAKVKRRPEMSRGLLAVRGAFVGASLLFLLVNVLCAVLSHRRRAQPWALLLVRVLVSDSLFVICALSLAACLCLVARRAPSTSIYLEAKGTSVCQAAAMGGAMVLLYASRACYNLTALALAPQSRLDTFDYDWYNVSDQADLVNDLGNKGYLVFGLILFVWELLPTTLLVGFFRVHRPPQDLSTSHILNGQVFASRSYFFDRAGHCEDEGCSWEHSRGESTRCQDQAATTTVSTPPHRRDPPPSPTEYPGPSPPHPRPLCQVCLPLLAQDPGGRGYPLLWPAPCCSCHSELVPSP

SEQ ID NO: 26734 - protein, 320 aa, Homo sapiens
MESNLSGLVPAAGLVPALPPAVTLGLTAAYTTLYALLFFSVYAQLWLVLLYGHKRLSYQTVFLALCLLWAALRTTLFSFYFRDTPRANRLGPLPFWLLYCCPVCLQFFTLTLMNLYFAQVVFKAKVKRRPEMSRGLLAVRGAFVGASLLFLLVNVLCAVLSHRRRAQPWALLLVRVLVSDSLFVICALSLAACLCLVARRAPSTSIYLEAKGTSVCQAAAMGGAMVLLYASRACYNLTALALAPQSRLDTFDYDWYNVSDQADLVNDLGNKGYLVFGLILFVWELLPTTLLVGFFRVHRPPQDLYVGQSRLWELVWCHRA

SEQ ID NO: 26735 - protein, 299 aa, Homo sapiens
MVGKARSSNFTLSEKLDLLKLVKPYVKILEEHTNKHSVIVEKNRCWDIIAVNYNAIGVDRPPRTAQGLRTLYKRLKEYAKQELLQQKETQSDFKSNISEPTKKVMEMIPQISSFCLVRDRNHIQSANLDEEAQAGTSSLQVMLDHHPVAITVEVKQEEDIKPPPPLVLNSQQSDTLEQREEHELVHVMERSLSPSLSSVDMRMTSSPSSIPRRDDFFRHESGEHFRSLLGYDPQILQMLKEEHQIILENQKNFGLYVQEKRDGLKRRQQLEEELLRAKIEVEKLKAIRLRHDLPEYNSL

SEQ ID NO: 26736 - protein, 158 aa, Homo sapiens
MLDHHPVAITVEVKQEEDIKPPPPLVLNSQQSDTLEQREEHELVHVMERSLSPSLSSVDMRMTSSPSSIPRRDDFFRHESGEHFRSLLGYDPQILQMLKEEHQIILENQKNFGLYVQEKRDGLKRRQQLEEELLRAKIEVEKLKAIRLRHDLPEYNSL

SEQ ID NO: 26737 - protein, 365 aa, Homo sapiens
MGPCSGSRLGPPEAESPSQPPKRRKKRYLRHDKPPYTYLAMIALVIQAAPSRRLKLAQIIRQVQAVFPFFREDYEGWKDSIRHNLSSNRCFRKVPKDPAKPQAKGNFWAVDVSLIPAEALRLQNTALCRRWQNGGARGAFAKDLGPYVLHGRPYRPPSPPPPPSEGFSIKSLLGGSGEGAPWPGLAPQSSPVPAGTGNSGEEAVPTPPLPSSERPLWPLCPLPGPTRVEGETVQGGAIGPSTLSPEPRAWPLHLLQGTAVPGGRSSGGHRASLWGQLPTSYLPIYTPNVVMPLAPPPTSCPQCPSTSPAYWGVAPETRGPPGLLCDLDALFQGVPPNKSIYDVWVSHPRDLAAPGPGWLLSWCSL

SEQ ID NO: 26738 - protein, 373 aa, Homo sapiens
MTAESGPPPPQPEVLATVKEERGETAAGAGVPGEATGRGAGGRRRKRPLQRGKPPYSYIALIAMAIAHAPERRLTLGGIYKFITERFPFYRDNPKKWQNSIRHNLTLNDCFLKIPREAGRPGKGNYWALDPNAEDMFESGSFLRRRKRFKRSDLSTYPAYMHDAAAAAAAAAAAAAAAAIFPGAVPAARPPYPGAVYAGYAPPSLAAPPPVYYPAASPGPCRVFGLVPERPLSPELGPAPSGPGGSCAFASAGAPATTTGYQPAGCTGARPANPSAYAAAYAGPDGAYPQGAGSAIFAAAGRLAGPASPPAGGSSGGVETTVDFYGRTSPGQFGALGACYNPGGQLGGASAGAYHARHAAAYPGGIDRFVSAM

SEQ ID NO: 26739 - protein, 318 aa, Homo sapiens
MATYCDDLGPSSAPPGQAQATAHPPGYEPGDLGAVGGGPLLWVNAPALSPKSYASGPGPAPPYAAPSYGAPGPLLGAPGGLAGADLAWLSLSGQQELLRLVRPPYSYSALIAMAIQSAPLRKLTLSQIYQYVAGNFPFYKRSKAGWQNSIRHNLSLNDCFKKVPRDEDDPGKGNYWTLDPNCEKMFDNGNFRRKRKRRAEASAAVRSGARSVGGAEAPALEPPSAACLDLQASPSPSAPEAATCFSGFASAMSALAGGLGTFPGGLAGDFSFGRRPPTVATHAPQTLNPSPGFAPGHQTAAAGFRLSHLLYSREGTEV

SEQ ID NO: 26740 - protein, 660 aa, Homo sapiens
MAAAAAALSGAGTPPAGGGAGGGGAGGGGSPPGGWAVARLEGREFEYLMKKRSVTIGRNSSQGSVDVSMGHSSFISRRHLEIFTPPGGGGHGGAAPELPPAQPRPDAGGDFYLRCLGKNGVFVDGVFQRRGAPPLQLPRVCTFRFPSTNIKITFTALSSEKREKQEASESPVKAVQPHISPLTINIPDTMAHLISPLPSPTGTISAANSCPSSPRGAGSSGYKVGRVMPSDLNLMADNSQPENEKEASGGDSPKDDSKPPYSYAQLIVQAITMAPDKQLTLNGIYTHITKNYPYYRTADKGWQNSIRHNLSLNRYFIKVPRSQEEPGKGSFWRIDPASESKLIEQAFRKRRPRGVPCFRTPLGPLSSRSAPASPNHAGVLSAHSSGAQTPESLSREGSPAPLEPEPGAAQPKLAVIQEARFAQSAPGSPLSSQPVLITVQRQLPQAIKPVTYTVATPVTTSTSQPPVVQTVHVVHQIPAVSVTSVAGLAPANTYTVSGQAVVTPAAVLAPPKAEAQENGDHREVKVKVEPIPAIGHATLGTASRIIQTAQTTPVQTVTIVQQAPLGQHQLPIKTVTQNGTHVASVPTAVHGQVNNAAASPLHMLATHASASASLPTKRHNGDQPEQPELKRIKTEDGEGIVIALSVDTPPAAVREKGVQN

SEQ ID NO: 26741 - protein, 614 aa, Homo sapiens
MAAAAAALSGAGTPPAGGGAGGGGAGGGGSPPGGWAVARLEGREFEYLMKKRSVTIGRNSSQGSVDVSMGHSSFISRRHLEIFTPPGGGGHGGAAPELPPAQPRPDAGGDFYLRCLGKNGVFVDGVFQRRGAPPLQLPRVCTFRFPSTNIKITFTALSSEKREKQEASESPVKAVQPHISPLTINIPDTMAHLISPLPSPTGTISAANSCPSSPRGAGSSGYKVGRVMPSDLNLMADNSQPENEKEASGGDSPKDDSKPPYSYAQLIVQAITMAPDKQLTLNGIYTHITKNYPYYRTADKGWQNSIRHNLSLNRYFIKVPRSQEEPGKGSFWRIDPASESKLIEQAFRKRRPRGVPCFRTPLGPLSSRSAPASPNHAGVLSAHSSGAQTPESLSREGSPAPLEPEPGAAQPKLAVIQEARFAQSAPGSPLSSQPVLITVQRQLPQAIKPVTYTVATPVTTSTSQPPVVQTVHVVHQIPAVSVTSVAGLAPANTYTVSGQAVVTPAAVLAPPKAEAQENGDHREVKVKVEPIPAIGHATLGTASRIIQTAQTTPVQTVTIVQQAPLGQHQLPIKTVTQNGTHVASVPTAVHGQVNNGPLGLRRPPCASSDWSCLS

SEQ ID NO: 26742 - protein, 328 aa, Homo sapiens
MAAAAAALSGAGTPPAGGGAGGGGAGGGGSPPGGWAVARLEGREFEYLMKKRSVTIGRNSSQGSVDVSMGHSSFISRRHLEIFTPPGGGGHGGAAPELPPAQPRPDAGGDFYLRCLGKNGVFVDGVFQRRGAPPLQLPRVCTFRFPSTNIKITFTALSSEKREKQEASESPVKAVQPHISPLTINIPDTMAHLISPLPSPTGTISAANSCPSSPRGAGSSGYKVGRVMPSDLNLMADNSQPENEKEASGGDSPKDDSKPPYSYAQLIVQAITMAPDKQLTLNGIYTHITKNYPYYRTADKGWQRGESFAHVGNTRIRIGLPAHKAPQR

SEQ ID NO: 26743 - protein, 175 aa, Homo sapiens
MTRTPVGSARTRPKPRKLGPQRGKALQASSRLSESPALVKKRMPDACTLGRAGIGLPKMCLHMAVRHSKAQKTGPGILQQRQKPPAPRASGGPALLGKRRGCSEAGSASLEPLSSSRAAAGCLNQVPLSPFLAGPRNTRRLPAPERERIELAATLCLEGWPLRCLASKGKLHCVY

SEQ ID NO: 26744 - protein, 431 aa, Homo sapiens
MGPVIGMTPDKRAETPGAEKIAGLSQIYKMGSLPEAVDAARPKATLVDSESADDELTNLNWLHESTNLLTNFSLGSEGLPIVSPLYDIEGDDVPSFGPACYQNPEKKSATSKPPYSFSLLIYMAIEHSPNKCLPVKEIYSWILDHFPYFATAPTGWKNSVRHNLSLNKCFQKVERSHGKVNGKGSLWCVDPEYKPNLIQALKKQPFSSASSQNGSLSPHYLSSVIKQNQVRNLKESDIDAAAAMMLLNTSIEQGILECEKPLPLKTALQKKRSYGNAFHHPSAVRLQESDSLATSIDPKEDHNYSASSMAAQRCASRSSVSSLSSVDEVYEFIPKNSHVGSDGSEGFHSEEDTDVDYEDDPLGDSGYASQPCAKISEKGQSGKKMRKQTCQEIDEELKEAAGSLLHLAGIRTCLGSLISTAKTQNQKQRKK

SEQ ID NO: 26745 - protein, 341 aa, Homo sapiens
MMCDPLDQLATRTQKKKSATSKPPYSFSLLIYMAIEHSPNKCLPVKEIYSWILDHFPYFATAPTGWKNSVRHNLSLNKCFQKVERSHGKVNGKGSLWCVDPEYKPNLIQALKKQPFSSASSQNGSLSPHYLSSVIKQNQVRNLKESDIDAAAAMMLLNTSIEQGILECEKPLPLKTALQKKRSYGNAFHHPSAVRLQESDSLATSIDPKEDHNYSASSMAAQRCASRSSVSSLSSVDEVYEFIPKNSHVGSDGSEGFHSEEDTDVDYEDDPLGDSGYASQPCAKISEKGQSGKKMRKQTCQEIDEELKEAAGSLLHLAGIRTCLGSLISTAKTQNQKQRKK

SEQ ID NO: 26746 - protein, 183 aa, Homo sapiens
MTTASTSQVRQNYHQDSEAAINRQINLELYASYVYLSMSYYFDRDDVALKNFAKYFLHQSHEEREHAEKLMKLQNQRGGRIFLQDIKKPDCDDWESGLNAMECALHLEKNVNQSLLELHKLATDKNDPHLCDFIETHYLNEQVKAIKELGDHVTNLRKMGAPESGLAEYLFDKHTLGDSDNES

SEQ ID NO: 26747 - protein, 1039 aa, Homo sapiens
MAVQLVPDSALGLLMMTEGRRCQVHLLDDRKLELLVQPKLLAKELLDLVASHFNLKEKEYFGIAFTDETGHLNWLQLDRRVLEHDFPKKSGPVVLYFCVRFYIESISYLKDNATIELFFLNAKSCIYKELIDVDSEVVFELASYILQEAKGDFSSNEVVRSDLKKLPALPTQALKEHPSLAYCEDRVIEHYKKLNGQTRGQAIVNYMSIVESLPTYGVHYYAVKDKQGIPWWLGLSYKGIFQYDYHDKVKPRKIFQWRQLENLYFREKKFSVEVHDPRRASVTRRTFGHSGIAVHTWYACPALIKSIWAMAISQHQFYLDRKQSKSKIHAARSLSEIAIDLTETGTLKTSKLANMGSKGKIISGSSGSLLSSGSQESDSSQSAKKDMLAALKSRQEALEETLRQRLEELKKLCLREAELTGKLPVEYPLDPGEEPPIVRRRIGTAFKLDEQKILPKGEEAELERLEREFAIQSQITEAARRLASDPNVSKKLKKQRKTSYLNALKKLQEIENAINENRIKSGKKPTQRASLIIDDGNIASEDSSLSDALVLEDEDSQVTSTISPLHSPHKGLPPRPPSHNRPPPPQSLEGLRQMHYHRNDYDKSPIKPKMWSESSLDEPYEKVKKRSSHSHSSSHKRFPSTGSCAEAGGGSNSLQNSPIRGLPHWNSQSSMPSTPDLRVRSPHYVHSTRSVDISPTRLHSLALHFRHRSSSLESQGKLLGSENDTGSPDFYTPRTRSSNGSDPMDDCSSCTSHSSSEHYYPAQMNANYSTLAEDSPSKARQRQRQRQRAAGALGSASSGSMPNLAARGGAGGAGGAGGGVYLHSQSQPSSQYRIKEYPLYIEGGATPVVVRSLESDQEGHYSVKAQFKTSNSYTAGGLFKESWRGGGGDEGDTGRLTPSRSQILRTPSLGREGAHDKGAGRAAVSDELRQWYQRSTASHKEHSRLSHTSSTSSDSGSQYSTSSQSTFVAHSRVTRMPQMCKATSAALPQSQRSSTPSSEIGATPPSSPHHILTWQTGEATENSPILDGSESPPHQSTDE

SEQ ID NO: 26748 - protein, 403 aa, Homo sapiens
MKLEVFVPRAAHGDKQGSDLEGAGGSDAPSPLSAAGDDSLGSDGDCAANSPAAGGGARDTQGDGEQSAGGGPGAEEAIPAAAAAAVVAEGAEAGAAGPGAGGAGSGEGARSKPYTRRPKPPYSYIALIAMAIRDSAGGRLTLAEINEYLMGKFPFFRGSYTGWRNSVRHNLSLNDCFVKVLRDPSRPWGKDNYWMLNPNSEYTFADGVFRRRRKRLSHRAPVPAPGLRPEEAPGLPAAPPPAPAAPASPRMRSPARQEERASPAGKFSSSFAIDSILRKPFRSRRLRDTAPGTTLQWGAAPCPPLPAFPALLPAAPCRALLPLCAYGAGEPARLGAREAEVPPTAPPLLLAPLPAAAPAKPLRGPAAGGAHLYCPLRLPAALQAASVRRPGPHLPYPVETLLA

SEQ ID NO: 26749 - protein, 292 aa, Homo sapiens
MGNELFLAFTTSHLPLAEQKLARYKLRIVKPPKLPLEKKPNPDKDGPDYEPNLWMWVNPNIVYPPGKLEVSGRRKREDLTSTLPSSQPPQKEEDASCSEAAGVESLSQSSSKRSPPRKRFAFSPSTWELTEEEEAEDQEDSSSMALPSPHKRAPLQSRRLRQASSQAGRLWSRPPLNYFHLIALALRNSSPCGLNVQQIYSFTRKHFPFFRTAPEGWKNTVRHNLCFRDSFEKVPVSMQGGASTRPRSCLWKLTEEGHRRFAEEARALASTRLESIQQCMSQPDVMPFLFDL

SEQ ID NO: 26750 - protein, 206 aa, Homo sapiens
MGNELFLAFTTSHLPLAEQKLARYKLRIVKPPKLPLEKKPNPDKDGPDYEPNLWMWVNPNIVYPPGKLEVSGRRKREDLTSTLPSSQPPQKEEDASCSEAAGVESLSQSSSKRSPPRKRFAFSPSTWEGPPPESEASASQQPGGEALVPAPSQLLPPNCPGIKKQFPLWPQRATDLQFHSELLGLILLCSCCGPSPGPSEGGRVQL

SEQ ID NO: 26751 - protein, 1586 aa, Homo sapiens
METSASATASEKQEAKSGILEAAGFPDPGKKASPLVVAAAAAAAVAAQGVPQHLLPPFHAPLPIDMRHQEGRYHYEPHSVHGVHGPPALSGSPVISDISLIRLSPHPAGPGESPFNAPHPYVNPHMEHYLRSVHSSPTLSMISAARGLSPADVAQEHLKERGLFGLPAPGTTPSDYYHQMTLVAGHPAPYGDLLMQSGGAASAPHLHDYLNPVDVSRFSSPRVTPRLSRKRALSISPLSDASLDLQRMIRTSPNSLVAYINNSRSSSAASGSYGHLSAGALSPAFTFPHPINPVAYQQILSQQRGLGSAFGHTPPLIQPSPTFLAQQPMALTSINATPTQLSSSSNCLSDTNQNKQSSESAVSSTVNPVAIHKRSKVKTEPEGLRPASPLALTQGQVSGHGSCGCALPLSQEQLADLKEDLDRDDCKQEAEVVIYETNCHWEDCTKEYDTQEQLVHHINNEHIHGEKKEFVCRWQACTREQKPFKAQYMLVVHMRRHTGEKPHKCTFEGCSKAYSRLENLKTHLRSHTGEKPYVCEHEGCNKAFSNASDRAKHQNRTHSNEKPYICKIPGCTKRYTDPSSLRKHVKTVHGPDAHVTKKQRNDVHLRTPLLKENGDSEAGTEPGGPESTEASSTSQAVEDCLHVRAIKTESSGLCQSSPGAQSSCSSEPSPLGSAPNNDSGVEMPGTGPGSLGDLTALDDTPPGADTSALAAPSAGGLQLRKHMTTMHRFEQLKKEKLKSLKDSCSWAGPTPHTRNTKLPPLPGSGSILENFSGSGGGGPAGLLPNPRLSELSASEVTMLSQLQERRDSSTSTVSSAYTVSRRSSGISPYFSSRRSSEASPLGAGRPHNASSADSYDPISTDASRRSSEASQCSGGSGLLNLTPAQQYSLRAKYAAATGGPPPTPLPGLERMSLRTRLALLDAPERTLPAGCPRPLGPRRGSDGPTYGHGHAGAAPAFPHEAPGGGARRASDPVRRPDALSLPRVQRFHSTHNVNPGPLPPCADRRGLRLQSHPSTDGGLARGAYSPRPPSISENVAMEAVAAGVDGAGPEADLGLPEDDLVLPDDVVQYIKAHASGALDEGTGQVYPTESTGFSDNPRLPSPGLHGQRRMVAADSNVGPSAPMLGGCQLGFGAPSSLNKNNMPVQWNEVSSGTVDALASQVKPPPFPQGNLAVVQQKPAFGQYPGYSPQGLQASPGGLDSTQPHLQPRSGAPSQGIPRVNYMQQLRQPVAGSQCPGMTTTMSPHACYGQVHPQLSPSTISGALNQFPQSCSNMPAKPGHLGHPQQTEVAPDPTTMGNRHRELGVPDSALAGVPPPHPVQSYPQQSHHLAASMSQEGYHQVPSLLPARQPGFMEPQTGPMGVATAGFGLVQPRPPLEPSPTGRHRGVRAVQQQLAYARATGHAMAAMPSSQETAEAVPKGAMGNMGSVPPQPPPQDAGGAPDHSMLYYYGQIHMYEQDGGLENLGSCQVMRSQPPQPQACQDSIQPQPLPSPGVNQVSSTVDSQLLEAPQIDFDAIMDDGDHSSLFSGALSPSLLHSLSQNSSRLTTPRNSLTLPSIPAGISNMAVGDMSSMLTSLAEESKFLNMMT

SEQ ID NO: 26752 - protein, 1258 aa, Homo sapiens
MALTSINATPTQLSSSSNCLSDTNQNKQSSESAVSSTVNPVAIHKRSKVKTEPEGLRPASPLALTQGQVSGHGSCGCALPLSQEQLADLKEDLDRDDCKQEAEVVIYETNCHWEDCTKEYDTQEQLVHHINNEHIHGEKKEFVCRWQACTREQKPFKAQYMLVVHMRRHTGEKPHKCTFEGCSKAYSRLENLKTHLRSHTGEKPYVCEHEGCNKAFSNASDRAKHQNRTHSNEKPYICKIPGCTKRYTDPSSLRKHVKTVHGPDAHVTKKQRNDVHLRTPLLKENGDSEAGTEPGGPESTEASSTSQAVEDCLHVRAIKTESSGLCQSSPGAQSSCSSEPSPLGSAPNNDSGVEMPGTGPGSLGDLTALDDTPPGADTSALAAPSAGGLQLRKHMTTMHRFEQLKKEKLKSLKDSCSWAGPTPHTRNTKLPPLPGSGSILENFSGSGGGGPAGLLPNPRLSELSASEVTMLSQLQERRDSSTSTVSSAYTVSRRSSGISPYFSSRRSSEASPLGAGRPHNASSADSYDPISTDASRRSSEASQCSGGSGLLNLTPAQQYSLRAKYAAATGGPPPTPLPGLERMSLRTRLALLDAPERTLPAGCPRPLGPRRGSDGPTYGHGHAGAAPAFPHEAPGGGARRASDPVRRPDALSLPRVQRFHSTHNVNPGPLPPCADRRGLRLQSHPSTDGGLARGAYSPRPPSISENVAMEAVAAGVDGAGPEADLGLPEDDLVLPDDVVQYIKAHASGALDEGTGQVYPTESTGFSDNPRLPSPGLHGQRRMVAADSNVGPSAPMLGGCQLGFGAPSSLNKNNMPVQWNEVSSGTVDALASQVKPPPFPQGNLAVVQQKPAFGQYPGYSPQGLQASPGGLDSTQPHLQPRSGAPSQGIPRVNYMQQLRQPVAGSQCPGMTTTMSPHACYGQVHPQLSPSTISGALNQFPQSCSNMPAKPGHLGHPQQTEVAPDPTTMGNRHRELGVPDSALAGVPPPHPVQSYPQQSHHLAASMSQEGYHQVPSLLPARQPGFMEPQTGPMGVATAGFGLVQPRPPLEPSPTGRHRGVRAVQQQLAYARATGHAMAAMPSSQETAEAVPKGAMGNMGSVPPQPPPQDAGGAPDHSMLYYYGQIHMYEQDGGLENLGSCQVMRSQPPQPQACQDSIQPQPLPSPGVNQVSSTVDSQLLEAPQIDFDAIMDDGDHSSLFSGALSPSLLHSLSQNSSRLTTPRNSLTLPSIPAGISNMAVGDMSSMLTSLAEESKFLNMMT

SEQ ID NO: 26753 - protein, 1241 aa, Homo sapiens
MALTSINATPTQLSSSSNCLSDTNQNKQSSESAVSSTVNPVAIHKRSKVKTEPEGLRPASPLALTQEQLADLKEDLDRDDCKQEAEVVIYETNCHWEDCTKEYDTQEQLVHHINNEHIHGEKKEFVCRWQACTREQKPFKAQYMLVVHMRRHTGEKPHKCTFEGCSKAYSRLENLKTHLRSHTGEKPYVCEHEGCNKAFSNASDRAKHQNRTHSNEKPYICKIPGCTKRYTDPSSLRKHVKTVHGPDAHVTKKQRNDVHLRTPLLKENGDSEAGTEPGGPESTEASSTSQAVEDCLHVRAIKTESSGLCQSSPGAQSSCSSEPSPLGSAPNNDSGVEMPGTGPGSLGDLTALDDTPPGADTSALAAPSAGGLQLRKHMTTMHRFEQLKKEKLKSLKDSCSWAGPTPHTRNTKLPPLPGSGSILENFSGSGGGGPAGLLPNPRLSELSASEVTMLSQLQERRDSSTSTVSSAYTVSRRSSGISPYFSSRRSSEASPLGAGRPHNASSADSYDPISTDASRRSSEASQCSGGSGLLNLTPAQQYSLRAKYAAATGGPPPTPLPGLERMSLRTRLALLDAPERTLPAGCPRPLGPRRGSDGPTYGHGHAGAAPAFPHEAPGGGARRASDPVRRPDALSLPRVQRFHSTHNVNPGPLPPCADRRGLRLQSHPSTDGGLARGAYSPRPPSISENVAMEAVAAGVDGAGPEADLGLPEDDLVLPDDVVQYIKAHASGALDEGTGQVYPTESTGFSDNPRLPSPGLHGQRRMVAADSNVGPSAPMLGGCQLGFGAPSSLNKNNMPVQWNEVSSGTVDALASQVKPPPFPQGNLAVVQQKPAFGQYPGYSPQGLQASPGGLDSTQPHLQPRSGAPSQGIPRVNYMQQLRQPVAGSQCPGMTTTMSPHACYGQVHPQLSPSTISGALNQFPQSCSNMPAKPGHLGHPQQTEVAPDPTTMGNRHRELGVPDSALAGVPPPHPVQSYPQQSHHLAASMSQEGYHQVPSLLPARQPGFMEPQTGPMGVATAGFGLVQPRPPLEPSPTGRHRGVRAVQQQLAYARATGHAMAAMPSSQETAEAVPKGAMGNMGSVPPQPPPQDAGGAPDHSMLYYYGQIHMYEQDGGLENLGSCQVMRSQPPQPQACQDSIQPQPLPSPGVNQVSSTVDSQLLEAPQIDFDAIMDDGDHSSLFSGALSPSLLHSLSQNSSRLTTPRNSLTLPSIPAGISNMAVGDMSSMLTSLAEESKFLNMMT

SEQ ID NO: 26754 - protein, 829 aa, Homo sapiens
MALTSINATPTQLSSSSNCLSDTNQNKQSSESAVSSTVNPVAIHKRSKVKTEPEGLRPASPLALTQGQVSGHGSCGCALPLSQEQLADLKEDLDRDDCKQEAEVVIYETNCHWEDCTKEYDTQEQLVHHINNEHIHGEKKEFVCRWQACTREQKPFKAQYMLVVHMRRHTGEKPHKCTFEGCSKAYSRLENLKTHLRSHTGEKPYVCEHEGCNKAFSNASDRAKHQNRTHSNEKPYICKIPGCTKRYTDPSSLRKHVKTVHGPDAHVTKKQRNDVHLRTPLLKENGDSEAGTEPGGPESTEASSTSQAVEDCLHVRAIKTESSGLCQSSPGAQSSCSSEPSPLGSAPNNDSGVEMPGTGPGSLGDLTALDDTPPGADTSALAAPSAGGLQLRKHMTTMHRFEQLKKEKLKSLKDSCSWAGPTPHTRNTKLPPLPGSGSILENFSGSGGGGPAGLLPNPRLSELSASEVTMLSQLQERRDSSTSTVSSAYTVSRRSSGISPYFSSRRSSEASPLGAGRPHNASSADSYDPISTDASRRSSEASQCSGGSGLLNLTPAQQYSLRAKYAAATGGPPPTPLPGLERMSLRTRLALLDAPERTLPAGCPRPLGPRRGSDGPTYGHGHAGAAPAFPHEAPGGGARRASDPVRRPDALSLPRVQRFHSTHNVNPGPLPPCADRRGLRLQSHPSTDGGLARGAYSPRPPSISENVAMEAVAAGVDGAGPEADLGLPEDDLVLPDDVVQYIKAHASGALDEGTGQVYPTESTGFSDNPRLPSPGLHGQRRMVAADSNVGPSAPMLGGCQLGFGAPSSLNKNNMPVQWNEASATWLSGT

SEQ ID NO: 26755 - protein, 812 aa, Homo sapiens
MALTSINATPTQLSSSSNCLSDTNQNKQSSESAVSSTVNPVAIHKRSKVKTEPEGLRPASPLALTQEQLADLKEDLDRDDCKQEAEVVIYETNCHWEDCTKEYDTQEQLVHHINNEHIHGEKKEFVCRWQACTREQKPFKAQYMLVVHMRRHTGEKPHKCTFEGCSKAYSRLENLKTHLRSHTGEKPYVCEHEGCNKAFSNASDRAKHQNRTHSNEKPYICKIPGCTKRYTDPSSLRKHVKTVHGPDAHVTKKQRNDVHLRTPLLKENGDSEAGTEPGGPESTEASSTSQAVEDCLHVRAIKTESSGLCQSSPGAQSSCSSEPSPLGSAPNNDSGVEMPGTGPGSLGDLTALDDTPPGADTSALAAPSAGGLQLRKHMTTMHRFEQLKKEKLKSLKDSCSWAGPTPHTRNTKLPPLPGSGSILENFSGSGGGGPAGLLPNPRLSELSASEVTMLSQLQERRDSSTSTVSSAYTVSRRSSGISPYFSSRRSSEASPLGAGRPHNASSADSYDPISTDASRRSSEASQCSGGSGLLNLTPAQQYSLRAKYAAATGGPPPTPLPGLERMSLRTRLALLDAPERTLPAGCPRPLGPRRGSDGPTYGHGHAGAAPAFPHEAPGGGARRASDPVRRPDALSLPRVQRFHSTHNVNPGPLPPCADRRGLRLQSHPSTDGGLARGAYSPRPPSISENVAMEAVAAGVDGAGPEADLGLPEDDLVLPDDVVQYIKAHASGALDEGTGQVYPTESTGFSDNPRLPSPGLHGQRRMVAADSNVGPSAPMLGGCQLGFGAPSSLNKNNMPVQWNEASATWLSGT

SEQ ID NO: 26756 - protein, 318 aa, Homo sapiens
MASPGCLLCVLGLLLCGAASLELSRPHGDTAKKPIIGILMQKCRNKVMKNYGRYYIAASYVKYLESAGARVVPVRLDLTEKDYEILFKSINGILFPGGSVDLRRSDYAKVAKIFYNLSIQSFDDGDYFPVWGTCLGFEELSLLISGECLLTATDTVDVAMPLNFTGGQLHSRMFQNFPTELLLSLAVEPLTANFHKWSLSVKNFTMNEKLKKFFNVLTTNTDGKIEFISTMEGYKYPVYGVQWHPEKAPYEWKNLDGISHAPNAVKTAFYLAEFFVNEARKNNHHFKSESEEEKALIYQFSPIYTGNISSFQQCYIFD

SEQ ID NO: 26757 - protein, 349 aa, Homo sapiens
MALLRKINQVLLFLLIVTLCVILYKKVHKGTVPKNDADDESETPEELEEEIPVVICAAAGRMGATMAAINSIYSNTDANILFYVVGLRNTLTRIRKWIEHSKLREINFKIVEFNPMVLKGKIRPDSSRPELLQPLNFVRFYLPLLIHQHEKVIYLDDDVIVQGDIQELYDTTLALGHAAAFSDDCDLPSAQDINRLVGLQNTYMGYLDYRKKAIKDLGISPSTCSFNPGVIVANMTEWKHQRITKQLEKWMQKNVEENLYSSSLGGGVATSPMLIVFHGKYSTINPLWHIRHLGWNPDARYSEHFLQEAKLLHWNGRHKPWDFPSVHNDLWESWFVPDPAGIFKLNHHS

SEQ ID NO: 26758 - protein, 228 aa, Homo sapiens
MSYAEKPDEITKDEWMEKLNNLHVQRADMNRLIMNYLVTEGFKEAAEKFRMESGIEPSVDLETLDERIKIREMILKGQIQEAIALINSLHPELLDTNRYLYFHLQQQHLIELIRQRETEAALEFAQTQLAEQGEESRECLTEMERTLALLAFDSPEESPFGDLLHTMQRQKVWSEVNQAVLDYENRESTPKLAKLLKLLLWAQNELDQKKVKYPKMTDLSKGVIEEPK

SEQ ID NO: 26759 - protein, 131 aa, Homo sapiens
MQTPVNIPVPVLRLPRGPDGFSRGFAPDGRRAPLRPEVPEIQECPIAQESLESQEQRARAALRERYLRSLLAMVGHQVSFTLHEGVRVAAHFGATDLDVANFYVSQLQTPIGVQAEALLRCSDIISYTFKP

SEQ ID NO: 26760 - protein, 1025 aa, Homo sapiens
MSNGYSTDENFRYLISCFRARVKMYIQVEPVLDYLTFLPAEVKEQIQRTVATSGNMQAVELLLSTLEKGVWHLGWTREFVEALRRTGSPLAARYMNPELTDLPSPSFENAHDEYLQLLNLLQPTLVDKLLVRDVLDKCMEEELLTIEDRNRIAAAENNGNESGVRELLKRIVQKENWFSAFLNVLRQTGNNELVQELTGSDCSESNAEIENLSQVDGPQVEEQLLSTTVQPNLEKEVWGMENNSSESSFADSSVVSESDTSLAEGSVSCLDESLGHNSNMGSDSGTMGSDSDEENVAARASPEPELQLRPYQMEVAQPALEGKNIIICLPTGSGKTRVAVYIAKDHLDKKKKASEPGKVIVLVNKVLLVEQLFRKEFQPFLKKWYRVIGLSGDTQLKISFPEVVKSCDIIISTAQILENSLLNLENGEDAGVQLSDFSLIIIDECHHTNKEAVYNNIMRHYLMQKLKNNRLKKENKPVIPLPQILGLTASPGVGGATKQAKAEEHILKLCANLDAFTIKTVKENLDQLKNQIQEPCKKFAIADATREDPFKEKLLEIMTRIQTYCQMSPMSDFGTQPYEQWAIQMEKKAAKEGNRKERVCAEHLRKYNEALQINDTIRMIDAYTHLETFYNEEKDKKFAVIEDDSDEGGDDEYCDGDEDEDDLKKPLKLDETDRFLMTLFFENNKMLKRLAENPEYENEKLTKLRNTIMEQYTRTEESARGIIFTKTRQSAYALSQWITENEKFAEVGVKAHHLIGAGHSSEFKPMTQNEQKEVISKFRTGKINLLIATTVAEEGLDIKECNIVIRYGLVTNEIAMVQARGRARADESTYVLVAHSGSGVIEHETVNDFREKMMYKAIHCVQNMKPEEYAHKILELQMQSIMEKKMKTKRNIAKHYKNNPSLITFLCKNCSVLACSGEDIHVIEKMHHVNMTPEFKELYIVRENKALQKKCADYQINGEIICKCGQAWGTMMVHKGLDLPCLKIRNFVVVFKNNSTKKQYKKWVELPITFPNLDYSECCLFSDED

SEQ ID NO: 26761 - protein, 221 aa, Homo sapiens
MSNGYSTDENFRYLISCFRARVKMYIQVEPVLDYLTFLPAEVKEQIQRTVATSGNMQAVELLLSTLEKGVWHLGWTREFVEALRRTGSPLAARYMNPELTDLPSPSFENAHDEYLQLLNLLQPTLVDKLLVRDVLDKCMEEELLTIEDRNRIAAAENNGNESGVRELLKRIVQKENWFSAFLNVLRQTGNNELVQELTGSDCSESNAGICNFTEEDSSNSA

SEQ ID NO: 26762 - protein, 578 aa, Homo sapiens
MLPCLVVLLAALLSLRLGSDAHGTELPSPPSVWFEAEFFHHILHWTPIPNQSESTCYEVALLRYGIESWNSISNCSQTLSYDLTAVTLDLYHSNGYRARVRAVDGSRHSNWTVTNTRFSVDEVTLTVGSVNLEIHNGFILGKIQLPRPKMAPANDTYESIFSHFREYEIAIRKVPGNFTFTHKKVKHENFSLLTSGEVGEFCVQVKPSVASRSNKGMWSKEECISLTRQYFTVTNVIIFFAFVLLLSGALAYCLALQLYVRRRKKLPSVLLFKKPSPFIFISQRPSPETQDTIHPLDEEAFLKVSPELKNLDLHGSTDSGFGSTKPSLQTEEPQFLLPDPHPQADRTLGNREPPVLGDSCSSGSSNSTDSGICLQEPSLSPSTGPTWEQQVGSNSRGQDDSGIDLVQNSEGRAGDTQGGSALGHHSPPEPEVPGEEDPAAVAFQGYLRQTRCAEEKATKTGCLEEESPLTDGLGPKFGRCLVDEAGLHPPALAKGYLKQDPLEMTLASSGAPTGQWNQPTEEWSLLALSSCSDLGISDWSFAHDLAPLGCVAAPGGLLGSFNSDLVTLPLISSLQSSE

SEQ ID NO: 26763 - protein, 422 aa, Homo sapiens
MSSSCSGLSRVLVAVATALVSASSPCPQAWGPPGVQYGQPGRSVKLCCPGVTAGDPVSWFRDGEPKLLQGPDSGLGHELVLAQADSTDEGTYICQTLDGALGGTVTLQLGYPPARPVVSCQAADYENFSCTWSPSQISGLPTRYLTSYRKKTVLGADSQRRSPSTGPWPCPQDPLGAARCVVHGAEFWSQYRINVTEVNPLGASTRLLDVSLQSILRPDPPQGLRVESVPGYPRRLRASWTYPASWPCQPHFLLKFRLQYRPAQHPAWSTVEPAGLEEVITDAVAGLPHAVRVSARDFLDAGTWSTWSPEAWGTPSTGTIPKEIPAWGQLHTQPEVEPQVDSPAPPRPSLQPHPRLLDHRDSVEQVAVLASLGILSFLGLVAGALALGLWLRLRRGGKDGSPKPGFLASVIPVDRRPGAPNL

SEQ ID NO: 26764 - protein, 390 aa, Homo sapiens
MSSSCSGLSRVLVAVATALVSASSPCPQAWGPPGVQYGQPGRSVKLCCPGVTAGDPVSWFRDGEPKLLQGPDSGLGHELVLAQADSTDEGTYICQTLDGALGGTVTLQLGYPPARPVVSCQAADYENFSCTWSPSQISGLPTRYLTSYRKKTVLGADSQRRSPSTGPWPCPQDPLGAARCVVHGAEFWSQYRINVTEVNPLGASTRLLDVSLQSILRPDPPQGLRVESVPGYPRRLRASWTYPASWPCQPHFLLKFRLQYRPAQHPAWSTVEPAGLEEVITDAVAGLPHAVRVSARDFLDAGTWSTWSPEAWGTPSTGTIPKEIPAWGQLHTQPEVEPQVDSPAPPRPSLQPHPRLLDHRDSVEQVAVLASLGILSFLGLVAGALALGLW

SEQ ID NO: 26765 - protein, 1336 aa, Homo sapiens
MTLDRPGEGATMLKTFTVLLFCIRMSLGMTSIVMDPQPELWIESNYPQAPWENITLWCRSPSRISSKFLLLKDKTQMTWIRPSHKTFQVSFLIGALTESNAGLYRCCYWKETGWSKPSKVLELEAPGQLPKPIFWIQAETPALPGCNVNILCHGWLQDLVFMLFKEGYAEPVDYQVPTGTMAIFSIDNLTPEDEGVYICRTHIQMLPTLWSEPSNPLKLVVAGLYPKPTLTAHPGPIMAPGESLNLRCQGPIYGMTFALMRVEDLEKSFYHKKTIKNEANFFFQSLKIQDTGHYLCFYYDASYRGSLLSDVLKIWVTDTFPKTWLLARPSAVVQMGQNVSLRCRGPVDGVGLALYKKGEDKPLQFLDATSIDDNTSFFLNNVTYSDTGIYSCHYLLTWKTSIRMPSHNTVELMVVDKPPKPSLSAWPSTVFKLGKAITLQCRVSHPVLEFSLEWEERETFQKFSVNGDFIISNVDGKGTGTYSCSYRVETHPNIWSHRSEPLKLMGPAGYLTWNYVLNEAIRLSLIMQLVALLLVVLWIRWKCRRLRIREAWLLGTAQGVTMLFIVTALLCCGLCNGVLIEETEIVMPTPKPELWAETNFPLAPWKNLTLWCRSPSGSTKEFVLLKDGTGWIATRPASEQVRAAFPLGALTQSHTGSYHCHSWEEMAVSEPSEALELVGTDILPKPVISASPTIRGQELQLRCKGWLAGMGFALYKEGEQEPVQQLGAVGREAFFTIQRMEDKDEGNYSCRTHTEKRPFKWSEPSEPLELVIKEMYPKPFFKTWASPVVTPGARVTFNCSTPHQHMSFILYKDGSEIASSDRSWASPGASAAHFLIISVGIGDGGNYSCRYYDFSIWSEPSDPVELVVTEFYPKPTLLAQPGPVVFPGKSVILRCQGTFQGMRFALLQEGAHVPLQFRSVSGNSADFLLHTVGAEDSGNYSCIYYETTMSNRGSYLSMPLMIWVTDTFPKPWLFAEPSSVVPMGQNVTLWCRGPVHGVGYILHKEGEATSMQLWGSTSNDGAFPITNISGTSMGRYSCCYHPDWTSSIKIQPSNTLELLVTGLLPKPSLLAQPGPMVAPGENMTLQCQGELPDSTFVLLKEGAQEPLEQQRPSGYRADFWMPAVRGEDSGIYSCVYYLDSTPFAASNHSDSLEIWVTDKPPKPSLSAWPSTMFKLGKDITLQCRGPLPGVEFVLEHDGEEAPQQFSEDGDFVINNVEGKGIGNYSCSYRLQAYPDIWSEPSDPLELVGAAGPVAQECTVGNIVRSSLIVVVVVALGVVLAIEWKKWPRLRTRGSETDGRDQTIALEECNQEGEPGTPANSPSSTSQRISVELPVPI

SEQ ID NO: 26766 - protein, 1327 aa, Homo sapiens
MTLDRPGEGATMLKTFTVLLFCILMDPQPELWIESNYPQAPWENITLWCRSPSRISSKFLLLKDKTQMTWIRPSHKTFQVSFLIGALTESNAGLYRCCYWKETGWSKPSKVLELEAPGQLPKPIFWIQAETPALPGCNVNILCHGWLQDLVFMLFKEGYAEPVDYQVPTGTMAIFSIDNLTPEDEGVYICRTHIQMLPTLWSEPSNPLKLVVAGLYPKPTLTAHPGPIMAPGESLNLRCQGPIYGMTFALMRVEDLEKSFYHKKTIKNEANFFFQSLKIQDTGHYLCFYYDASYRGSLLSDVLKIWVTDTFPKTWLLARPSAVVQMGQNVSLRCRGPVDGVGLALYKKGEDKPLQFLDATSIDDNTSFFLNNVTYSDTGIYSCHYLLTWKTSIRMPSHNTVELMVVDKPPKPSLSAWPSTVFKLGKAITLQCRVSHPVLEFSLEWEERETFQKFSVNGDFIISNVDGKGTGTYSCSYRVETHPNIWSHRSEPLKLMGPAGYLTWNYVLNEAIRLSLIMQLVALLLVVLWIRWKCRRLRIREAWLLGTAQGVTMLFIVTALLCCGLCNGVLIEETEIVMPTPKPELWAETNFPLAPWKNLTLWCRSPSGSTKEFVLLKDGTGWIATRPASEQVRAAFPLGALTQSHTGSYHCHSWEEMAVSEPSEALELVGTDILPKPVISASPTIRGQELQLRCKGWLAGMGFALYKEGEQEPVQQLGAVGREAFFTIQRMEDKDEGNYSCRTHTEKRPFKWSEPSEPLELVIKEMYPKPFFKTWASPVVTPGARVTFNCSTPHQHMSFILYKDGSEIASSDRSWASPGASAAHFLIISVGIGDGGNYSCRYYDFSIWSEPSDPVELVVTEFYPKPTLLAQPGPVVFPGKSVILRCQGTFQGMRFALLQEGAHVPLQFRSVSGNSADFLLHTVGAEDSGNYSCIYYETTMSNRGSYLSMPLMIWVTDTFPKPWLFAEPSSVVPMGQNVTLWCRGPVHGVGYILHKEGEATSMQLWGSTSNDGAFPITNISGTSMGRYSCCYHPDWTSSIKIQPSNTLELLVTGLLPKPSLLAQPGPMVAPGENMTLQCQGELPDSTFVLLKEGAQEPLEQQRPSGYRADFWMPAVRGEDSGIYSCVYYLDSTPFAASNHSDSLEIWVTDKPPKPSLSAWPSTMFKLGKDITLQCRGPLPGVEFVLEHDGEEAPQQFSEDGDFVINNVEGKGIGNYSCSYRLQAYPDIWSEPSDPLELVGAAGPVAQECTVGNIVRSSLIVVVVVALGVVLAIEWKKWPRLRTRGSETDGRDQTIALEECNQEGEPGTPANSPSSTSQRISVELPVPI

SEQ ID NO: 26767 - protein, 242 aa, Homo sapiens
MTLDRPGEGATMLKTFTVLLFCIRMSLGMTSIVMDPQPELWIESNYPQAPWENITLWCRSPSRISSKFLLLKDKTQMTWIRPSHKTFQVSFLIGALTESNAGLYRCCYWKETGWSKPSKVLELEAPGQLPKPIFWIQAETPALPGCNVNILCHGWLQDLVFMLFKEGYAEPVDYQVPTGTMAIFSIDNLTPEDEGVYICRTHIQMLPTLWSEPSNPLKLVVAGGCGYGCWHLAIVVPGIMAG

SEQ ID NO: 26768 - protein, 1341 aa, Homo sapiens
MTLDRPGEGATMLKTFTVLLFCIRMSLGMTSIVMDPQPELWIESNYPQAPWENITLWCRSPSRISSKFLLLKDKTQMTWIRPSHKTFQVSFLIGALTESNAGLYRCCYWKETGWSKPSKVLELEAPGQLPKPIFWIQAETPALPGCNVNILCHGWLQDLVFMLFKEGYAEPVDYQVPTGTMAIFSIDNLTPEDEGVYICRTHIQMLPTLWSEPSNPLKLVVAGLYPKPTLTAHPGPIMAPGESLNLRCQGPIYGMTFALMRVEDLEKSFYHKKTIKNEANFFFQSLKIQDTGHYLCFYYDASYRGSLLSDVLKIWVTDTFPKTWLLARPSAVVQMGQNVSLRCRGPVDGVGLALYKKGEDKPLQFLDATSIDDNTSFFLNNVTYSDTGIYSCHYLLTWKTSIRMPSHNTVELMVVDKPPKPSLSAWPSTVFKLGKAITLQCRVSHPVLEFSLEWEERETFQKFSVNGDFIISNVDGKGTGTYSCSYRVETHPNIWSHRSEPLKLMGPAGYLTWNYVLNEAIRLSLIMQLVALLLVVLWIRWKCRRLRIREAWLLGTAQGVTMLFIVTALLCCAISFAGLCNGVLIEETEIVMPTPKPELWAETNFPLAPWKNLTLWCRSPSGSTKEFVLLKDGTGWIATRPASEQVRAAFPLGALTQSHTGSYHCHSWEEMAVSEPSEALELVGTDILPKPVISASPTIRGQELQLRCKGWLAGMGFALYKEGEQEPVQQLGAVGREAFFTIQRMEDKDEGNYSCRTHTEKRPFKWSEPSEPLELVIKEMYPKPFFKTWASPVVTPGARVTFNCSTPHQHMSFILYKDGSEIASSDRSWASPGASAAHFLIISVGIGDGGNYSCRYYDFSIWSEPSDPVELVVTEFYPKPTLLAQPGPVVFPGKSVILRCQGTFQGMRFALLQEGAHVPLQFRSVSGNSADFLLHTVGAEDSGNYSCIYYETTMSNRGSYLSMPLMIWVTDTFPKPWLFAEPSSVVPMGQNVTLWCRGPVHGVGYILHKEGEATSMQLWGSTSNDGAFPITNISGTSMGRYSCCYHPDWTSSIKIQPSNTLELLVTGLLPKPSLLAQPGPMVAPGENMTLQCQGELPDSTFVLLKEGAQEPLEQQRPSGYRADFWMPAVRGEDSGIYSCVYYLDSTPFAASNHSDSLEIWVTDKPPKPSLSAWPSTMFKLGKDITLQCRGPLPGVEFVLEHDGEEAPQQFSEDGDFVINNVEGKGIGNYSCSYRLQAYPDIWSEPSDPLELVGAAGPVAQECTVGNIVRSSLIVVVVVALGVVLAIEWKKWPRLRTRGSETDGRDQTIALEECNQEGEPGTPANSPSSTSQRISVELPVPI

SEQ ID NO: 26769 - protein, 375 aa, Homo sapiens
MQKLQLCVYIYLFMLIVAGPVDLNENSEQKENVEKEGLCNACTWRQNTKSSRIEAIKIQILSKLRLETAPNISKDVIRQLLPKAPPLRELIDQYDVQRDDSSDGSLEDDDYHATTETIITMPTESDFLMQVDGKPKCCFFKFSSKIQYNKVVKAQLWIYLRPVETPTTVFVQILRLIKPMKDGTRYTGIRSLKLDMNPGTGIWQSIDVKTVLQNWLKQPESNLGIEIKALDENGHDLAVTFPGPGEDGLNPFLEVKVTDTPKRSRRDFGLDCDEHSTESRCCRYPLTVDFEAFGWDWIIAPKRYKANYCSGECEFVFLQKYPHTHLVHQANPRGSAGPCCTPTKMSPINMLYFNGKEQIIYGKIPAMVVDRCGCS

SEQ ID NO: 26770 - protein, 330 aa, Homo sapiens
MPRSFLVKSKKAHTYHQPRVQEDEPLWPPALTPVPRDQAPSNSPVLSTLFPNQCLDWTNLKREPELEQDQNLARMAPAPEGPIVLSRPQDGDSPLSDSPPFYKPSFSWDTLATTYGHSYRQAPSTMQSAFLEHSVSLYGSPLVPSTEPALDFSLRYSPGMDAYHCVKCNKVFSTPHGLEVHVRRSHSGTRPFACDICGKTFGHAVSLEQHTHVHSQERSFECRMCGKAFKRSSTLSTHLLIHSDTRPYPCQFCGKRFHQKSDMKKHTYIHTGEKPHKCQVCGKAFSQSSNLITHSRKHTGFKPFSCELCTKGFQRKVDLRRHRESQHNLK

SEQ ID NO: 26771 - protein, 284 aa, Homo sapiens
MPRSFLVKSKKAHTYHQPRVQEDEPLWPPALTPVPRDQAPSNSPVLSTLFPNQCLDWTNLKREPELEQDQNLARMAPAPEGPIVLSRPQDGDSPLSDSPPFYKPSFSWDTLATTYGHSYRQAPSTMQSAFLEHSVSLYGSPLVPSTEPALDFSLRYSPGMDAYHCVKCNKERSFECRMCGKAFKRSSTLSTHLLIHSDTRPYPCQFCGKRFHQKSDMKKHTYIHTGEKPHKCQVCGKAFSQSSNLITHSRKHTGFKPFSCELCTKGFQRKVDLRRHRESQHNLK

SEQ ID NO: 26772 - protein, 662 aa, Homo sapiens
MEPLVTWVVPLLFLFLLSRQGAACRTSECCFQDPPYPDADSGSASGPRDLRCYRISSDRYECSWQYEGPTAGVSHFLRCCLSSGRCCYFAAGSATRLQFSDQAGVSVLYTVTLWVESWARNQTEKSPEVTLQLYNSVKYEPPLGDIKVSKLAGQLRMEWETPDNQVGAEVQFRHRTPSSPWKLGDCGPQDDDTESCLCPLEMNVAQEFQLRRRQLGSQGSSWSKWSSPVCVPPENPPQPQVRFSVEQLGQDGRRRLTLKEQPTQLELPEGCQGLAPGTEVTYRLQLHMLSCPCKAKATRTLHLGKMPYLSGAAYNVAVISSNQFGPGLNQTWHIPADTHTEPVALNISVGTNGTTMYWPARAQSMTYCIEWQPVGQDGGLATCSLTAPQDPDPAGMATYSWSRESGAMGQEKCYYITIFASAHPEKLTLWSTVLSTYHFGGNASAAGTPHHVSVKNHSLDSVSVDWAPSLLSTCPGVLKEYVVRCRDEDSKQVSEHPVQPTETQVTLSGLRAGVAYTVQVRADTAWLRGVWSQPQRFSIEVQVSDWLIFFASLGSFLSILLVGVLGYLGLNRAARHLCPPLPTPCASSAIEFPGGKETWQWINPVDFQEEASLQEALVVEMSWDKGERTEPLEKTELPEGAPELALDTELSLEDGDRCKAKM

SEQ ID NO: 26773 - protein, 660 aa, Homo sapiens
MEPLVTWVVPLLFLFLLSRQGAACRTSECCFQDPPYPDADSGSASGPRDLRCYRISSDRYECSWQYEGPTAGVSHFLRCCLSSGRCCYFAAGSATRLQFSDQAGVSVLYTVTLWVESWARNQTEKSPEVTLQLYNSVKYEPPLGDIKVSKLAGQLRMEWETPDNQVGAEVQFRHRTPSSPWKLGDCGPQDDDTESCLCPLEMNVAQEFQLRRRQLGSQGSSWSKWSSPVCVPPENPPQPQVRFSVEQLGQDGRRRLTLKEQPTQLELPEGCQGLAPGTEVTYRLQLHMLSCPCKAKATRTLHLGKMPYLSGAAYNVAVISSNQFGPGLNQTWHIPADTHTEPVALNISVGTNGTTMYWPARAQSMTYCIEWQPVGQDGGLATCSLTAPQDPDPAGMATYSWSRESGAMGQEKCYYITIFASAHPEKLTLWSTVLSTYHFGGNASAAGTPHHVSVKNHSLDSVSVDWAPSLLSTCPGVLKEYVVRCRDEDSKQVSEHPVQPTETQVTLSGLRAGVAYTVQVRADTAWLRGVWSQPQRFSIEVQVSDWLIFFASLGSFLSILLVGVLGYLGLNRAARHLCPPLPTPCASSAIEFPGGKETWQWINPVDFQEEASLQEALVVEMSWDKGERTEPLEKTELPEGAPELALDTELSLEDGDRCDR

SEQ ID NO: 26774 - protein, 381 aa, Homo sapiens
MEPLVTWVVPLLFLFLLSRQGAACRTSECCFQDPPYPDADSGSASGPRDLRCYRISSDRYECSWQYEGPTAGVSHFLRCCLSSGRCCYFAAGSATRLQFSDQAGVSVLYTVTLWVESWARNQTEKSPEVTLQLYNSVKYEPPLGDIKVSKLAGQLRMEWETPDNQVGAEVQFRHRTPSSPWKLGDCGPQDDDTESCLCPLEMNVAQEFQLRRRQLGSQGSSWSKWSSPVCVPPENPPQPQVRFSVEQLGQDGRRRLTLKEQPTQLELPEGCQGLAPGTEVTYRLQLHMLSCPCKAKATRTLHLGKMPYLSGAAYNVAVISSNQFGPGLNQTWHIPADTHTDGMISAHCNLRLPDSRDSPASASRVAGITGICHHTRLILYF

SEQ ID NO: 26775 - protein, 577 aa, Homo sapiens
MNKLYIGNLNESVTPADLEKVFAEHKISYSGQFLVKSGYAFVDCPDEHWAMKAIETFSGKVELQGKRLEIEHSVPKKQRSRKIQIRNIPPQLRWEVLDSLLAQYGTVENCEQVNTESETAVVNVTYSNREQTRQAIMKLNGHQLENHALKVSYIPDEQIAQGPENGRRGGFGSRGQPRQGSPVAAGAPAKQQQVDIPLRLLVPTQYVGAIIGKEGATIRNITKQTQSKIDVHRKENAGAAEKAISVHSTPEGCSSACKMILEIMHKEAKDTKTADEVPLKILAHNNFVGRLIGKEGRNLKKVEQDTETKITISSLQDLTLYNPERTITVKGAIENCCRAEQEIMKKVREAYENDVAAMSLQSHLIPGLNLAAVGLFPASSSAVPPPPSSVTGAAPYSSFMQAPEQEMVQVFIPAQAVGAIIGKKGQHIKQLSRFASASIKIAPPETPDSKVRMVIITGPPEAQFKAQGRIYGKLKEENFFGPKEEVKLETHIRVPASAAGRVIGKGGKTVNELQNLTAAEVVVPRDQTPDENDQVIVKIIGHFYASQMAQRKIRDILAQVKQQHQKGQSNQAQARRK

SEQ ID NO: 26776 - protein, 438 aa, Homo sapiens
MNKLYIGNLNESVTPADLEKVFAEHKISYSGQFLVKSGYAFVDCPDEHWAMKAIETFSGKVELQGKRLEIEHSVPKKQRSRKIQIRNIPPQLRWEVLDSLLAQYGTVENCEQVNTESETAVVNVTYSNREQTRQADEVPLKILAHNNFVGRLIGKEGRNLKKVEQDTETKITISSLQDLTLYNPERTITVKGAIENCCRAEQEIMKKVREAYENDVAAMSLQSHLIPGLNLAAVGLFPASSSAVPPPPSSVTGAAPYSSFMQAPEQEMVQVFIPAQAVGAIIGKKGQHIKQLSRFASASIKIAPPETPDSKVRMVIITGPPEAQFKAQGRIYGKLKEENFFGPKEEVKLETHIRVPASAAGRVIGKGGKTVNELQNLTAAEVVVPRDQTPDENDQVIVKIIGHFYASQMAQRKIRDILAQVKQQHQKGQSNQAQARRK

SEQ ID NO: 26777 - protein, 330 aa, Homo sapiens
MEGAPPGSLALRLLLFVALPASGWLTTGAPEPPPLSGAPQDGIRINVTTLKDDGDISKQQVVLNITYESGQVYVNDLPVNSGVTRISCQTLIVKNENLENLEEKEYFGIVSVRILVHEWPMTSGSSLQLIVIQEEVVEIDGKQVQQKDVTEIDILVKNRGVLRHSNYTLPLEESMLYSISRDSDILFTLPNLSKKESVSSLQTTSQYLIRNVETTVDEDVLPGKLPETPLRAEPPSSYKVMCQWMEKFRKDLCRFWSNVFPVFFQFLNIMVVGITGAAVVITILKVFFPVSEYKGILQLDKVDVIPVTAINLYPDGPEKRAENLEDKTCI

SEQ ID NO: 26778 - protein, 74 aa, Homo sapiens
MPVINIEDLTEKDKLKMEVDQLKKEVTLERMLVSKCCEEVRDYVEERSGEDPLVKGIPEDKNPFKELKGGCVIS

SEQ ID NO: 26779 - protein, 506 aa, Homo sapiens
MPAAAVQEAVGVCSYGMQLSWDINDPQMPQELALFDQFREWPDGYVRFIYSSDEKKAQRHLSGWAMRNTNNHNGHILKKSCLGVVVCTQACTLPDGSRLQLRPAICDKARLKQQKKACPNCHSALELIPCRGHSGYPVTNFWRLDGNAIFFQAKGVHDHPRPESKSETEARRSAIKRQMASFYQPQKKRIRESEAEENQDSSGHFSNIPPLENPEDFDIVTETSFPIPGQPCPSFPKSDVYKATCDLATFQGDKMPPFQKYSSPRIYLPRPPCSYELANPGYTNSSPYPTLYKDSTSIPNDTDWVHLNTLQCNVNSYSSYERSFDFTNKQHGWKPALGKPSLVERTNHGQFQAMATRPYYNPELPCRYLTTPPPGAPALQTVITTTTKVSYQAYQPPAMKYSDSVREVKSLSSCNYAPEDTGMSVYPEPWGPPVTVTRAASPSGPPPMKIAGDCRAIRPTVAIPHEPVSSRTDEAETWDVCLSGLGSAVSYSDRVGPFFTYNNEDF

SEQ ID NO: 26780 - protein, 136 aa, Homo sapiens
MWSRLVWLGLRAPLGGRQGFTSKADPQGSGRITAAVIEHLERLALVDFGSREAVARLEKAIAFADRLRAVDTDGVEPMESVLEDRCLYLRSDNVVEGNCADELLQNSHRVVEEYFVAPPGNISLPKLDEQEPFPHS

SEQ ID NO: 26781 - protein, 153 aa, Homo sapiens
MADEIDFTTGDAGASSTYPMQCSALRKNGFVVLKGRPCKIVEMSTSKTGKHGHAKVHLVGIDIFTGKKYEDICPSTHNMDVPNIKRNDYQLICIQDGYLSLLTETGEVREDLKLPEGELGKEIEGKYNAGEDVQVSVMCAMSEEYAVAIKPCK

SEQ ID NO: 26782 - protein, 467 aa, Homo sapiens
MVLAFQLVSFTYIWIILKPNVCAASNIKMTHQRCSSSMKQTCKQETRMKKDDSTKARPQKYEQLLHIEDNDFAMRPGFGGSPVPVGIDVHVESIDSISETNMDFTMTFYLRHYWKDERLSFPSTANKSMTFDHRLTRKIWVPDIFFVHSKRSFIHDTTMENIMLRVHPDGNVLLSLRITVSAMCFMDFSRFPLDTQNCSLELESYAYNEDDLMLYWKHGNKSLNTEEHMSLSQFFIEDFSASSGLAFYSSTGWYNRLFINFVLRRHVFFFVLQTYFPAILMVMLSWVSFWIDRRAVPARVSLGITTVLTMSTIITAVSASMPQVSYLKAVDVYLWVSSLFVFLSVIEYAAVNYLTTVEERKQFKKTGKISRMYNIDAVQAMAFDGCYHDSEIDMDQTSLSLNSEDFMRRKSICSPSTDSSRIKRRKSLGGHVGRIILENNHVIDTYSRILFPIVYILFNLFYWGVYV

SEQ ID NO: 26783 - protein, 866 aa, Homo sapiens
MGAARSPPSAVPGPLLGLLLLLLGVLAPGGASLRLLDHRALVCSQPGLNCTVKNSTCLDDSWIHPRNLTPSSPKDLQIQLHFAHTQQGDLFPVAHIEWTLQTDASILYLEGAELSVLQLNTNERLCVRFEFLSKLRHHHRRWRFTFSHFVVDPDQEYEVTVHHLPKPIPDGDPNHQSKNFLVPDCEHARMKVTTPCMSSGSLWDPNITVETLEAHQLRVSFTLWNESTHYQILLTSFPHMENHSCFEHMHHIPAPRPEEFHQRSNVTLTLRNLKGCCRHQVQIQPFFSSCLNDCLRHSATVSCPEMPDTPEPIPDYMPLWVYWFITGISILLVGSVILLIVCMTWRLAGPGSEKYSDDTKYTDGLPAADLIPPPLKPRKVWIIYSADHPLYVDVVLKFAQFLLTACGTEVALDLLEEQAISEAGVMTWVGRQKQEMVESNSKIIVLCSRGTRAKWQALLGRGAPVRLRCDHGKPVGDLFTAAMNMILPDFKRPACFGTYVVCYFSEVSCDGDVPDLFGAAPRYPLMDRFEEVYFRIQDLEMFQPGRMHRVGELSGDNYLRSPGGRQLRAALDRFRDWQVRCPDWFECENLYSADDQDAPSLDEEVFEEPLLPPGTGIVKRAPLVREPGSQACLAIDPLVGEEGGAAVAKLEPHLQPRGQPAPQPLHTLVLAAEEGALVAAVEPGPLADGAAVRLALAGEGEACPLLGSPGAGRNSVLFLPVDPEDSPLGSSTPMASPDLLPEDVREHLEGLMLSLFEQSLSCQAQGGCSRPAMVLTDPHTPYEEEQRQSVQSDQGYISRSSPQPPEGLTEMEEEEEEEQDPGKPALPLSPEDLESLRSLQRQLLFRQLQKNSGWDTMGSESEGPSA

SEQ ID NO: 26784 - protein, 832 aa, Homo sapiens
MGAARSPPSAVPGPLLGLLLLLLGVLAPGGASLRLLDHRALVCSQPGLNCTVKNSTCLDDSWIHPRNLTPSSPKDLQIQLHFAHTQQGDLFPVAHIEWTLQTDASILYLEGAELSVLQLNTNERLCVRFEFLSKLRHHHRRWRFTFSHFVVDPDQEYEVTVHHLPKPIPDGDPNHQSKNFLVPDCEHARMKVTTPCMSSGSLWDPNITVETLEAHQLRVSFTLWNESTHYQILLTSFPHMENHSCFEHMHHIPAPRPEEFHQRSNVTLTLRNLKGCCRHQVQIQPFFSSCLNDCLRHSATVSCPEMPDTPEPIPGPGSEKYSDDTKYTDGLPAADLIPPPLKPRKVWIIYSADHPLYVDVVLKFAQFLLTACGTEVALDLLEEQAISEAGVMTWVGRQKQEMVESNSKIIVLCSRGTRAKWQALLGRGAPVRLRCDHGKPVGDLFTAAMNMILPDFKRPACFGTYVVCYFSEVSCDGDVPDLFGAAPRYPLMDRFEEVYFRIQDLEMFQPGRMHRVGELSGDNYLRSPGGRQLRAALDRFRDWQVRCPDWFECENLYSADDQDAPSLDEEVFEEPLLPPGTGIVKRAPLVREPGSQACLAIDPLVGEEGGAAVAKLEPHLQPRGQPAPQPLHTLVLAAEEGALVAAVEPGPLADGAAVRLALAGEGEACPLLGSPGAGRNSVLFLPVDPEDSPLGSSTPMASPDLLPEDVREHLEGLMLSLFEQSLSCQAQGGCSRPAMVLTDPHTPYEEEQRQSVQSDQGYISRSSPQPPEGLTEMEEEEEEEQDPGKPALPLSPEDLESLRSLQRQLLFRQLQKNSGWDTMGSESEGPSA

SEQ ID NO: 26785 - protein, 529 aa, Homo sapiens
MSGLLTDPEQRAQEPRYPGFVLGLDVGSSVIRCHVYDRAARVCGSSVQKVENLYPQIGWVEIDPDVLWIQFVAVIKEAVKAAGIQMNQIVGLGISTQRATFITWNKKTGNHFHNFISWQDLRAVELVKSWNNSLLMKIFHSSCRVLHFFTRSKRLFTASLFTFTTQQTSLRLVWILQNLTEVQKAVEEENCCFGTIDTWLLYKLTKGSVYATDFSNASTTGLFDPYKMCWSGMITSLISIPLSLLPPVRDTSHNFGSVDEEIFGVPIPIVALVADQQSAMFGECCFQTGDVKLTMGTGTFLDINTGNSLQQTTGGFYPLIGWKIGQEVVCLAESNAGDTGTAIKWAQQLDLFTDAAETEKMAKSLEDSEGVCFVPSFSGLQAPLNDPWACASFMGLKPSTSKYHLVRAILESIAFRNKQLYEMMKKEIHIPVRKIRADGGVCKNGFVMQMTSDLINENIDRPADIDMSCLGAASLAGLAVGFWTDKEELKKLRQSEVVFKPQKKCQEYEMSLENWAKAVKRSMNWYNKT

SEQ ID NO: 26786 - protein, 301 aa, Homo sapiens
MSGLLTDPEQRAQEPRYPGFVLGLDVGSSVIRCHVYDRAARVCGSSVQKVENLYPQIGWVEIDPDVLWIQFVAVIKEAVKAAGIQMNQIVGLGISTQRATFITWNKKTGNHFHNFISWQDLRAVELVKSWNNSLLMKIFHSSCRVLHFFTRSKRLFTASLFTFTTQQTSLRLVWILQNLTEVQKAVEEENCCFGTIDTWLLYKLTKGSVYATDFSNASTTGLFDPYKMCWSGMITSLISIPLSLLPPVRDTSHNFGSVDEEIFGVPIPIVALLKVPGYDQNICYIFGKGTIEPVFYHGSTL

SEQ ID NO: 26787 - protein, 250 aa, Homo sapiens
MFGECCFQTGDVKLTMGTGTFLDINTGNSLQQTTGGFYPLIGWKIGQEVVCLAESNAGDTGTAIKWAQQLDLFTDAAETEKMAKSLEDSEGVCFVPSFSGLQAPLNDPWACASFMGLKPSTSKYHLVRAILESIAFRNKQLYEMMKKEIHIPVRKIRADGGVCKNGFVMQMTSDLINENIDRPADIDMSCLGAASLAGLAVGFWTDKEELKKLRQSEVVFKPQKKCQEYEMSLENWAKAVKRSMNWYNKT

SEQ ID NO: 26788 - protein, 436 aa, Homo sapiens [sequence omitted]

SEQ ID NO: 26789 - protein, 380 aa, Homo sapiens
MVGFGANRRAGRLPSLVLVVLLVVIVVLAFNYWSISSRHVLLQEEVAELQGQVQRTEVARGRLEKRNSDLLLLVDTHKKQIDQKEADYGRLSSRLQAREGLGKRCEDDKVKLQNNISYQMADIHHLKEQLAELRQEFLRQEDQLQDYRKNNTYLVKRLEYESFQCGQQMKELRAQHEENIKKLADQFLEEQKQETQKIQSNDGKELDINNQVVPKNIPKVAENVADKNEEPSSNHIPHGKEQIKRGGDAGMPGIEENDLAKVDDLPPALRKPPISVSQHESHQAISHLPTGQPLSPNMPPDSHINHNGNPGTSKQNPSSPLQRLIPGSNLDSEPRIQTDILKQATKDRVSDFHKLKQNDEERELQMDPADYGKQHFNDVL

SEQ ID NO: 26790 - protein, 177 aa, Homo sapiens
MVGFGANRRAGRLPSLVLVVLLVVIVVLAFNYWSISSRHVLLQEEVAELQGQVQRTEVARGRLEKRNSDLLLLVDTHKKQIDQKEADYGRLSSRLQAREGLGKRCEDDKVKLQNNISYQMADIHHLKEQLAELRQEFLRQEDQLQDYRKNNTYLVKRLEYESKRPKRFNQMMERNWI

SEQ ID NO: 26791 - protein, 415 aa, Homo sapiens
MVVIVVLAFNYWSISSRHVLLQEEVAELQGQVQRTEVARGRLEKRNSDLLLLVDTHKKQIDQKEADYGRLSSRLQAREGLGKRCEDDKVKLQNNISYQMADIHHLKEQLAELRQEFLRQEDQLQDYRKNNTYLVKRLEYESFQCGQQMKELRAQHEENIKKLADQFLEEQKQETQKIQSNDGKELDINNQVVPKNIPKVAENVADKNEEPSSNHIPHGKEQIKRGGDAGMPGIEENDLAKVDDLPPALRKPPISVSQHESHQAISHLPTGQPLSPNMPPDSHINHNGNPGTSKQNPSSPLQRLIPGSNLDSEPRIQTDILKQATKDRVSDFHKLKQSRFFDENESPVDPQHGSKLADYNGDDGNVGEYEADKQAELAYNEEEDGDGGEEDVQDDEERELQMDPADYGKQHFNDVL

SEQ ID NO: 26792 - protein, 142 aa, Homo sapiens
MSDSLVVCEVDPELTEKLRKFRFRKETDNAAIIMKVDKDRQMVVLEEEFQNISPEELKMELPERQPRFVVYSYKYVHDDGRVSYPLCFIFSSPVGCKPEQQMMYAGSKNRLVQTAELTKVFEIRTTDDLTEAWLQEKLSFFR

SEQ ID NO: 26793 - protein, 142 aa, Homo sapiens
MRGTSCVGGGAESPGGAGLSEGPRGRWLRLAPVCAYFLCVSLAAVLLAVYYGLIWVPTRSPAAPAGPQPSAPSPPCAARPGVPPVPAPAAASLSCLLGVPGGPRPQLQLPLSRRRRYSDPDRRPSRQTPRETPEAAEGRRPG

SEQ ID NO: 26794 - protein, 600 aa, Homo sapiens
MPEIRVTPLGAGQDVGRSCILVSIAGKNVMLDCGMHMGFNDDRRFPDFSYITQNGRLTDFLDCVIISHFHLDHCGALPYFSEMVGYDGPIYMTHPTQAICPILLEDYRKIAVDKKGEANFFTSQMIKDCMKKVVAVHLHQTVQVDDELEIKAYYAGHVLGAAMFQIKVGSESVVYTGDYNMTPDRHLGAAWIDKCRPNLLITESTYATTIRDSKRCRERDFLKKVHETVERGGKVLIPVFALGRAQELCILLETFWERMNLKVPIYFSTGLTEKANHYYKLFIPWTNQKIRKTFVQRNMFEFKHIKAFDRAFADNPGPMVVFATPGMLHAGQSLQIFRKWAGNEKNMVIMPGYCVQGTVGHKILSGQRKLEMEGRQVLEVKMQVEYMSFSAHADAKGIMQLVGQAEPESVLLVHGEAKKMEFLKQKIEQELRVNCYMPANGETVTLPTSPSIPVGISLGLLKREMAQGLLPEAKKPRLLHGTLIMKDSNFRLVSSEQALKELGLAEHQLRFTCRVHLHDTRKEQETALRVYSHLKSVLKDHCVQHLPDGSVTVESVLLQAAAPSEDPGTKVLLVSWTYQDEELGSFLTSLLKKGLPQAPS

SEQ ID NO: 26795 - protein, 499 aa, Homo sapiens
MPEIRVTPLGAGQDVGRSCILVSIAGKNVMLDCGMHMGFNDDVDDELEIKAYYAGHVLGAAMFQIKVGSESVVYTGDYNMTPDRHLGAAWIDKCRPNLLITESTYATTIRDSKRCRERDFLKKVHETVERGGKVLIPVFALGRAQELCILLETFWERMNLKVPIYFSTGLTEKANHYYKLFIPWTNQKIRKTFVQRNMFEFKHIKAFDRAFADNPGPMVVFATPGMLHAGQSLQIFRKWAGNEKNMVIMPGYCVQGTVGHKILSGQRKLEMEGRQVLEVKMQVEYMSFSAHADAKGIMQLVGQAEPESVLLVHGEAKKMEFLKQKIEQELRVNCYMPANGETVTLPTSPSIPVGISLGLLKREMAQGLLPEAKKPRLLHGTLIMKDSNFRLVSSEQALKELGLAEHQLRFTCRVHLHDTRKEQETALRVYSHLKSVLKDHCVQHLPDGSVTVESVLLQAAAPSEDPGTKVLLVSWTYQDEELGSFLTSLLKKGLPQAPS

SEQ ID NO: 26796 - protein, 578 aa, Homo sapiens
MPEIRVTPLGAGQDVGRSCILVSIAGKNVMLDCGMHMGFNDDRRFPDFSYITQNGRLTDFLDCVIISHFHLDHCGALPYFSEMVGYDGPIYMTHPTQAICPILLEDYRKIAVDKKGEANFFTSQMIKDCMKKVVAVHLHQTVQIKVGSESVVYTGDYNMTPDRHLGAAWIDKCRPNLLITESTYATTIRDSKRCRERDFLKKVHETVERGGKVLIPVFALGRAQELCILLETFWERMNLKVPIYFSTGLTEKANHYYKLFIPWTNQKIRKTFVQRNMFEFKHIKAFDRAFADNPGPMVVFATPGMLHAGQSLQIFRKWAGNEKNMVIMPGYCVQGTVGHKILSGQRKLEMEGRQVLEVKMQVEYMSFSAHADAKGIMQLVGQAEPESVLLVHGEAKKMEFLKQKIEQELRVNCYMPANGETVTLPTSPSIPVGISLGLLKREMAQGLLPEAKKPRLLHGTLIMKDSNFRLVSSEQALKELGLAEHQLRFTCRVHLHDTRKEQETALRVYSHLKSVLKDHCVQHLPDGSVTVESVLLQAAAPSEDPGTKVLLVSWTYQDEELGSFLTSLLKKGLPQAPS

SEQ ID NO: 26797 - protein, 571 aa, Homo sapiens
MLDCGMHMGFNDDRRFPDFSYITQNGRLTDFLDCVIISHFHLDHCGALPYFSEMVGYDGPIYMTHPTQAICPILLEDYRKIAVDKKGEANFFTSQMIKDCMKKVVAVHLHQTVQVDDELEIKAYYAGHVLGAAMFQIKVGSESVVYTGDYNMTPDRHLGAAWIDKCRPNLLITESTYATTIRDSKRCRERDFLKKVHETVERGGKVLIPVFALGRAQELCILLETFWERMNLKVPIYFSTGLTEKANHYYKLFIPWTNQKIRKTFVQRNMFEFKHIKAFDRAFADNPGPMVVFATPGMLHAGQSLQIFRKWAGNEKNMVIMPGYCVQGTVGHKILSGQRKLEMEGRQVLEVKMQVEYMSFSAHADAKGIMQLVGQAEPESVLLVHGEAKKMEFLKQKIEQELRVNCYMPANGETVTLPTSPSIPVGISLGLLKREMAQGLLPEAKKPRLLHGTLIMKDSNFRLVSSEQALKELGLAEHQLRFTCRVHLHDTRKEQETALRVYSHLKSVLKDHCVQHLPDGSVTVESVLLQAAAPSEDPGTKVLLVSWTYQDEELGSFLTSLLKKGLPQAPS

SEQ ID NO: 26798 - protein, 606 aa, Homo sapiens
MCGAGFGHFEWLAGGGAGQDVGRSCILVSIAGKNVMLDCGMHMGFNDDRRFPDFSYITQNGRLTDFLDCVIISHFHLDHCGALPYFSEMVGYDGPIYMTHPTQAICPILLEDYRKIAVDKKGEANFFTSQMIKDCMKKVVAVHLHQTVQVDDELEIKAYYAGHVLGAAMFQIKVGSESVVYTGDYNMTPDRHLGAAWIDKCRPNLLITESTYATTIRDSKRCRERDFLKKVHETVERGGKVLIPVFALGRAQELCILLETFWERMNLKVPIYFSTGLTEKANHYYKLFIPWTNQKIRKTFVQRNMFEFKHIKAFDRAFADNPGPMVVFATPGMLHAGQSLQIFRKWAGNEKNMVIMPGYCVQGTVGHKILSGQRKLEMEGRQVLEVKMQVEYMSFSAHADAKGIMQLVGQAEPESVLLVHGEAKKMEFLKQKIEQELRVNCYMPANGETVTLPTSPSIPVGISLGLLKREMAQGLLPEAKKPRLLHGTLIMKDSNFRLVSSEQALKELGLAEHQLRFTCRVHLHDTRKEQETALRVYSHLKSVLKDHCVQHLPDGSVTVESVLLQAAAPSEDPGTKVLLVSWTYQDEELGSFLTSLLKKGLPQAPS

SEQ ID NO: 26799 - protein, 557 aa, Homo sapiens
MMVVLLGATTLVLVAVAPWVLSAAAGGKNLKSPQKVEVDIIDDNFILRWNRSDESVGNVTFSFDYQKTGMDNWIKLSGCQNITSTKCNFSSLKLNVYEEIKLRIRAEKENTSSWYEVDSFTPFRKAQIGPPEVHLEAEDKAIVIHISPGTKDSVMWALDGLSFTYSLVIWKNSSGVEERIENIYSRHKIYKLSPETTYCLKVKAALLTSWKIGVYSPVHCIKTTVENELPPPENIEVSVQNQNYVLKWDYTYANMTFQVQWLHAFLKRNPGNHLYKWKQIPDCENVKTTQCVFPQNVFQKGIYLLRVQASDGNNTSFWSEEIKFDTEIQAFLLPPVFNIRSLSDSFHIYIGAPKQSGNTPVIQDYPLIYEIIFWENTSNAERKIIEKKTDVTVPNLKPLTVYCVKARAHTMDEKLNKSSVFSDAVCEKTKPGNTSKIWLIVGICIALFALPFVIYAAKVFLRCINYVFFPSLKPSSSIDEYFSEQPLKNLLLSTSEEQIEKCFIIENISTIATVEETNQTDEDHKKYSSQTSQDSGNYSNEDESESKTSEELQQDFV

SEQ ID NO: 26800 - protein, 434 aa, Homo sapiens
MMVVLLGATTLVLVAVAPWVLSAAAGGKNLKSPQKVEVDIIDDNFILRWNRSDESVGNVTFSFDYQKTGMDNWIKLSGCQNITSTKCNFSSLKLNVYEEIKLRIRAEKENTSSWYEVDSFTPFRKAQIGPPEVHLEAEDKAIVIHISPGTKDSVMWALDGLSFTYSLVIWKNSSGVEERIENIYSRHKIYKLSPETTYCLKVKAALLTSWKIGVYSPVHCIKTTVENELPPPENIEVSVQNQNYVLKWDYTYANMTFQVQWLHAFLKRNPGNHLYKWKQIPDCENVKTTQCVFPQNVFQKGIYLLRVQASDGNNTSFWSEEIKFDTEIQAFLLPPVFNIRSLSDSFHIYIGAPKQSGNTPVIQDYPLIYEIIFWENTSNAERKIIEKKTDVTVPNLKPLTVYCVKARAHTMDEKLNKSSVFSDAVCENISLNSH

SEQ ID NO: 26801 - protein, 496 aa, Homo sapiens
MMVVLLGATTLVLVAVAPWVLSAAAGGKNLKSPQKVEVDIIDDNFILRWNRSDESVGNVTFSFDYQKTGMDNWIKLSGCQNITSTKCNFSSLKLNVYEEIKLRIRAEKENTSSWYEVDSFTPFRKAQIGPPEVHLEAEDKAIVIHISPGTKDSVMWALDGLSFTYSLVIWKNSSGVEERIENIYSRHKIYKLSPETTYCLKVKAALLTSWKIGVYSPVHCIKTTVENELPPPENIEVSVQNQNYVLKWDYTYANMTFQVQWLHAFLKRNPGNHLYKWKQIPDCENVKTTQCVFPQNVFQKGIYLLRVQASDGNNTSFWSEEIKFDTEIQAFLLPPVFNIRSLSDSFHIYIGAPKQSGNTPVIQDYPLIYEIIFWENTSNAERKIIEKKTDVTVPNLKPLTVYCVKARAHTMDESDAVCEYFSEQPLKNLLLSTSEEQIEKCFIIENISTIATVEETNQTDEDHKKYSSQTSQDSGNYSNEDESESKTSEELQQDFV

SEQ ID NO: 26802 - protein, 488 aa, Homo sapiens
MDNWIKLSGCQNITSTKCNFSSLKLNVYEEIKLRIRAEKENTSSWYEVDSFTPFRKAQIGPPEVHLEAEDKAIVIHISPGTKDSVMWALDGLSFTYSLVIWKNSSGVEERIENIYSRHKIYKLSPETTYCLKVKAALLTSWKIGVYSPVHCIKTTVENELPPPENIEVSVQNQNYVLKWDYTYANMTFQVQWLHAFLKRNPGNHLYKWKQIPDCENVKTTQCVFPQNVFQKGIYLLRVQASDGNNTSFWSEEIKFDTEIQAFLLPPVFNIRSLSDSFHIYIGAPKQSGNTPVIQDYPLIYEIIFWENTSNAERKIIEKKTDVTVPNLKPLTVYCVKARAHTMDEKLNKSSVFSDAVCEKTKPGNTSKIWLIVGICIALFALPFVIYAAKVFLRCINYVFFPSLKPSSSIDEYFSEQPLKNLLLSTSEEQIEKCFIIENISTIATVEETNQTDEDHKKYSSQTSQDSGNYSNEDESESKTSEELQQDFV

SEQ ID NO: 26803 - protein, 406 aa, Homo sapiens
MRGSVECTWGWGHCAPSPLLLWTLLLFAAPFGLLGEKTRQVSLEVIPNWLGPLQNLLHIRAVGTNSTLHYVWSSLGPLAVVMVATNTPHSTLSVNWSLLLSPEPDGGLMVLPKDSIQFSSALVFTRLLEFDSTNVSDTAAKPLGRPYPPYSLADFSWNNITDSLDPATLSATFQGHPMNDPTRTFANGSLAFRVQAFSRSSRPAQPPRLLHTADTCQLEVALIGASPRGNRSLFGLEVATLGQGPDCPSMQEQHSIDDEYAPAVFQLDQLLWGSLPSGFAQWRPVAYSQKPGGRESALPCQASPLHPALAYSLPQSPIVRAFFGSQNNFCAFNLTFGASTGPGYWDQHYLSWSMLLGVGFPPVDGLSPLVLGIMAVALGAPGLMLLGGGLVLLLHHKKYSEYQSIN

SEQ ID NO: 26804 - protein, 325 aa, Homo sapiens
MVATNTPHSTLSVNWSLLLSPEPDGGLMVLPKDSIQFSSALVFTRLLEFDSTNVSDTAAKPLGRPYPPYSLADFSWNNITDSLDPATLSATFQGHPMNDPTRTFANGSLAFRVQAFSRSSRPAQPPRLLHTADTCQLEVALIGASPRGNRSLFGLEVATLGQGPDCPSMQEQHSIDDEYAPAVFQLDQLLWGSLPSGFAQWRPVAYSQKPGGRESALPCQASPLHPALAYSLPQSPIVRAFFGSQNNFCAFNLTFGASTGPGYWDQHYLSWSMLLGVGFPPVDGLSPLVLGIMAVALGAPGLMLLGGGLVLLLHHKKYSEYQSIN

SEQ ID NO: 26805 - protein, 356 aa, Homo sapiens
MNGVSEGTRGCSDRQPGVLTRDRSCSRKMNSSGCLSEEVGSLRPLTVVILSASIVVGVLGNGLVLWMTVFRMARTVSTVCFFHLALADFMLSLSLPIAMYYIVSRQWLLGEWACKLYITFVFLSYFASNCLLVFISVDRCISVLYPVWALNHRTVQRASWLAFGVWLLAAALCSAHLKFRTTRKWNGCTHCYLAFNSDNETAQIWIEGVVEGHIIGTIGHFLLGFLGPLAIIGTCAHLIRAKLLREGWVHANRPKRLLLVLVSAFFIFWSPFNVVLLVHLWRRVMLKEIYHPRMLLILQASFALGCVNSSLNPFLYVFVGRDFQEKFFQSLTSALARAFGEEEFLSSCPRGNAPRE

SEQ ID NO: 26806 - protein, 362 aa, Homo sapiens
MNASAASLNDSQVVVVAAEGAAAAATAAGGPDTGEWGPPAAAALGAGGGANGSLELSSQLSAGPPGLLLPAVNPWDVLLCVSGTVIAGENALVVALIASTPALRTPMFVLVGSLATADLLAGCGLILHFVFQYLVPSETVSLLTVGFLVASFAASVSSLLAITVDRYLSLYNALTYYSRRTLLGVHLLLAATWTVSLGLGLLPVLGWNCLAERAACSVVRPLARSHVALLSAAFFMVFGIMLHLYVRICQVVWRHAHQIALQQHCLAPPHLAATRKGVGTLAVVLGTFGASWLPFAIYCVVGSHEDPAVYTYATLLPATYNSMINPIIYAFRNQEIQRALWLLLCGCFQSKVPFRSRSPSEV

SEQ ID NO: 26807 - protein, 377 aa, Homo sapiens
MTLLAWCTRGANPAAMNASAASLNDSQVVVVAAEGAAAAATAAGGPDTGEWGPPAAAALGAGGGANGSLELSSQLSAGPPGLLLPAVNPWDVLLCVSGTVIAGENALVVALIASTPALRTPMFVLVGSLATADLLAGCGLILHFVFQYLVPSETVSLLTVGFLVASFAASVSSLLAITVDRYLSLYNALTYYSRRTLLGVHLLLAATWTVSLGLGLLPVLGWNCLAERAACSVVRPLARSHVALLSAAFFMVFGIMLHLYVRICQVVWRHAHQIALQQHCLAPPHLAATRKGVGTLAVVLGTFGASWLPFAIYCVVGSHEDPAVYTYATLLPATYNSMINPIIYAFRNQEIQRALWLLLCGCFQSKVPFRSRSPSEV

SEQ ID NO: 26808 - protein, 613 aa, Homo sapiens
MRAPGALLARMSRLLLLLLLKVSASSALGVAPASRNETCLGESCAPTVIQRRGRDAWGPGNSARDVLRARAPREEQGAAFLAGPSWDLPAAPGRDPAAGRGAEASAAGPPGPPTRPPGPWRWKGARGQEPSETLGRGNPTALQLFLQISEEEEKGPRGAGISGRSQEQSVKTVPGASDLFYWPRRAGKLQGSHHKPLSKTANGLAGHEGWTIALPGRALAQNGSLGEGIHEPGGPRRGNSTNRRVRLKNPFYPLTQESYGAYAVMCLSVVIFGTGIIGNLAVMCIVCHNYYMRSISNSLLANLAFWDFLIIFFCLPLVIFHELTKKWLLEDFSCKIVPYIEVASLGVTTFTLCALCIDRFRAATNVQMYYEMIENCSSTTAKLAVIWVGALLLALPEVVLRQLSKEDLGFSGRAPAERCIIKISPDLPDTIYVLALTYDSARLWWYFGCYFCLPTLFTITCSLVTARKIRKAEKACTRGNKRQIQLESQMNCTVVALTILYGFCIIPENICNIVTAYMATGVSQQTMDLLNIISQFLLFFKSCVTPVLLFCLCKPFSRAFMECCCCCCEECIQKSSTVTSDDNDNEYTTELELSPFSTIRREMSTFASVGTHC

SEQ ID NO: 26809 - protein, 372 aa, Homo sapiens
MACNSTSLEAYTYLLLNTSNASDSGSTQLPAPLRISLAIVMLLMTVVGFLGNTVVCIIVYQRPAMRSAINLLLATLAFSDIMLSLCCMPFTAVTLITVRWHFGDHFCRLSATLYWFFVLEGVAILLIISVDRFLIIVQRQDKLNPRRAKVIIAVSWVLSFCIAGPSLTGWTLVEVPARAPQCVLGYTELPADRAYVVTLVVAVFFAPFGVMLCAYMCILNTVRKNAVRVHNQSDSLDLRQLTRAGLRRLQRQQQVSVDLSFKTKAFTTILILFVGFSLCWLPHSVYSLLSVFSQRFYCGSSFYATSTCVLWLSYLKSVFNPIVYCWRIKKFREACIELLPQTFQILPKVPERIRRRIQPSTVYVCNENQSAV

SEQ ID NO: 26810 - protein, 1170 aa, Homo sapiens
MKDSCITVMAMALLSGFFFFAPASSYNLDVRGARSFSPPRAGRHFGYRVLQVGNGVIVGAPGEGNSTGSLYQCQSGTGHCLPVTLRGSNYTSKYLGMTLATDPTDGSILACDPGLSRTCDQNTYLSGLCYLFRQNLQGPMLQGRPGFQECIKGNVDLVFLFDGSMSLQPDEFQKILDFMKDVMKKLSNTSYQFAAVQFSTSYKTEFDFSDYVKRKDPDALLKHVKHMLLLTNTFGAINYVATEVFREELGARPDATKVLIIITDGEATDSGNIDAAKDIIRYIIGIGKHFQTKESQETLHKFASKPASEFVKILDTFEKLKDLFTELQKKIYVIEGTSKQDLTSFNMELSSSGISADLSRGHAVVGAVGAKDWAGGFLDLKADLQDDTFIGNEPLTPEVRAGYLGYTVTWLPSRQKTSLLASGAPRYQHMGRVLLFQEPQGGGHWSQVQTIHGTQIGSYFGGELCGVDVDQDGETELLLIGAPLFYGEQRGGRVFIYQRRQLGFEEVSELQGDPGYPLGRFGEAITALTDINGDGLVDVAVGAPLEEQGAVYIFNGRHGGLSPQPSQRIEGTQVLSGIQWFGRSIHGVKDLEGDGLADVAVGAESQMIVLSSRPVVDMVTLMSFSPAEIPVHEVECSYSTSNKMKEGVNITICFQIKSLIPQFQGRLVANLTYTLQLDGHRTRRRGLFPGGRHELRRNIAVTTSMSCTDFSFHFPVCVQDLISPINVSLNFSLWEEEGTPRDQRAQGKDIPPILRPSLHSETWEIPFEKNCGEDKKCEANLRVSFSPARSRALRLTAFASLSVELSLSNLEEDAYWVQLDLHFPPGLSFRKVEMLKPHSQIPVSCEELPEESRLLSRALSCNVSSPIFKAGHSVALQMMFNTLVNSSWGDSVELHANVTCNNEDSDLLEDNSATTIIPILYPINILIQDQEDSTLYVSFTPKGPKIHQVKHMYQVRIQPSIHDHNIPTLEAVVGVPQPPSEGPITHQWSVQMEPPVPCHYEDLERLPDAAEPCLPGALFRCPVVFRQEILVQVIGTLELVGEIEASSMFSLCSSLSISFNSSKHFHLYGSNASLAQVVMKVDVVYEKQMLYLYVLSGIGGLLLLLLIFIVLYKVGFFKRNLKEKMEAGRGVPNGIPAEDSEQLASGQEAGDPGCLKPLHEKDSESGGGKD

SEQ ID NO: 26811 - protein, 1223 aa, Homo sapiens
MKDSCITVMAMALLSGFFFFAPASSYNLDVRGARSFSPPRAGRHFGYRVLQVGNGVIVGAPGEGNSTGSLYQCQSGTGHCLPVTLRGSNYTSKYLGMTLATDPTDGSILACDPGLSRTCDQNTYLSGLCYLFRQNLQGPMLQGRPGFQECIKGNVDLVFLFDGSMSLQPDEFQKILDFMKDVMKKLSNTSYQFAAVQFSTSYKTEFDFSDYVKRKDPDALLKHVKHMLLLTNTFGAINYVATEVFREELGARPDATKVLIIITDGEATDSGNIDAAKDIIRYIIGIGKHFQTKESQETLHKFASKPASEFVKILDTFEKLKDLFTELQKKIYVIEGTSKQDLTSFNMELSSSGISADLSRGHAVVGAVGAKDWAGGFLDLKADLQDDTFIGNEPLTPEVRAGYLGYTVTWLPSRQKTSLLASGAPRYQHMGRVLLFQEPQGGGHWSQVQTIHGTQIGSYFGGELCGVDVDQDGETELLLIGAPLFYGEQRGGRVFIYQRRQLGFEEVSELQGDPGYPLGRFGEAITALTDINGDGLVDVAVGAPLEEQGAVYIFNGRHGGLSPQPSQRIEGTQVLSGIQWFGRSIHGVKDLEGDGLADVAVGAESQMIVLSSRPVVDMVTLMSFSPAEIPVHEVECSYSTSNKMKEGVNITICFQIKSLIPQFQGRLVANLTYTLQLDGHRTRRRGLFPGGRHELRRNIAVTTSMSCTDFSFHFPVCVQDLISPINVSLNFSLWEEEGTPRDQRAQGKDIPPILRPSLHSETWEIPFEKNCGEDKKCEANLRVSFSPARSRALRLTAFASLSVELSLSNLEEDAYWVQLDLHFPPGLSFRKVEMLKPHSQIPVSCEELPEESRLLSRALSCNVSSPIFKAGHSVALQMMFNTLVNSSWGDSVELHANVTCNNEDSDLLEDNSATTIIPILYPINILIQDQEDSTLYVSFTPKGPKIHQVKHMYQGVHGLVEMQTSKQILCRPAGDAEHTVGAQEGELPCPWGVSEAFRDNIRAGPCRVRIQPSIHDHNIPTLEAVVGVPQPPSEGPITHQWSVQMEPPVPCHYEDLERLPDAAEPCLPGALFRCPVVFRQEILVQVIGTLELVGEIEASSMFSLCSSLSISFNSSKHFHLYGSNASLAQVVMKVDVVYEKQMLYLYVLSGIGGLLLLLLIFIVLYKVGFFKRNLKEKMEAGRGVPNGIPAEDSEQLASGQEAGDPGCLKPLHEKDSESGGGKD

SEQ ID NO: 26812 - protein, 1086 aa, Homo sapiens
MKDSCITVMAMALLSGFFFFAPASSYNLDVRGARSFSPPRAGRHFGYRVLQVGNGVIVGAPGEGNSTGSLYQCQSGTGHCLPVTLRGSNYTSKYLGMTLATDPTDGSILFAAVQFSTSYKTEFDFSDYVKRKDPDALLKHVKHMLLLTNTFGAINYVATEVFREELGARPDATKVLIIITDGEATDSGNIDAAKDIIRYIIGIGKHFQTKESQETLHKFASKPASEFVKILDTFEKLKDLFTELQKKIYVIEGTSKQDLTSFNMELSSSGISADLSRGHAVVGAVGAKDWAGGFLDLKADLQDDTFIGNEPLTPEVRAGYLGYTVTWLPSRQKTSLLASGAPRYQHMGRVLLFQEPQGGGHWSQVQTIHGTQIGSYFGGELCGVDVDQDGETELLLIGAPLFYGEQRGGRVFIYQRRQLGFEEVSELQGDPGYPLGRFGEAITALTDINGDGLVDVAVGAPLEEQGAVYIFNGRHGGLSPQPSQRIEGTQVLSGIQWFGRSIHGVKDLEGDGLADVAVGAESQMIVLSSRPVVDMVTLMSFSPAEIPVHEVECSYSTSNKMKEGVNITICFQIKSLIPQFQGRLVANLTYTLQLDGHRTRRRGLFPGGRHELRRNIAVTTSMSCTDFSFHFPVCVQDLISPINVSLNFSLWEEEGTPRDQRAGKDIPPILRPSLHSETWEIPFEKNCGEDKKCEANLRVSFSPARSRALRLTAFASLSVELSLSNLEEDAYWVQLDLHFPPGLSFRKVEMLKPHSQIPVSCEELPEESRLLSRALSCNVSSPIFKAGHSVALQMMFNTLVNSSWGDSVELHANVTCNNEDSDLLEDNSATTIIPILYPINILIQDQEDSTLYVSFTPKGPKIHQVKHMYQVRIQPSIHDHNIPTLEAVVGVPQPPSEGPITHQWSVQMEPPVPCHYEDLERLPDAAEPCLPGALFRCPVVFRQEILVQVIGTLELVGEIEASSMFSLCSSLSISFNSSKHFHLYGSNASLAQVVMKVDVVYEKQMLYLYVLSGIGGLLLLLLIFIVLYKVGFFKRNLKEKMEAGRGVPNGIPAEDSEQLASGQEAGDPGCLKPLHEKDSESGGGKD

SEQ ID NO: 26813 - protein, 372 aa, Homo sapiens
MSSRGGKKKSTKTSRSAKAGVIFPVGRMLRYIKKGHPKYRIGVGAPVYMAAVLEYLTAEILELAGNAARDNKKGRVTPRHILLAVANDEELNQLLKGVTIASGGVLPNIHPELLAKKRGSKGKLEAIITPPPAKKAKSPSQKKPVSKKAGGKKGARKSKKKQGEVSKAASADSTTEGTPADGFTVLSTKSLFLGQKLNLIHSEISNLAGFEVEAIINPTNADIDLKDDLGNTLEKKGGKEFVEAVLELRKKNGPLEVAGAAVSAGHGLPAKFVIHCNSPVWGADKCEELLEKTVKNCLALADDKKLKSIAFPSIGSGRNGFPKQTAAQLILKAISSYFVSTMSSSIKTVYFVLFDSESIGIYVQEMAKLDAN

SEQ ID NO: 26814 - protein, 369 aa, Homo sapiens
MSSRGGKKKSTKTSRSAKAGVIFPVGRMLRYIKKGHPKYRIGVGAPVYMAAVLEYLTAEILELAGNAARDNKKGRVTPRHILLAVANDEELNQLLKGVTIASGGVLPNIHPELLAKKRGSKGKLEAIITPPPAKKAKSPSQKKPVSKKAGGKKGARKSKKKQGEVSKAASADSTTEGTPADGFTVLSTKSLFLGQKLQVVQADIASIDSDAVVHPTNTDFYIGGEVGNTLEKKGGKEFVEAVLELRKKNGPLEVAGAAVSAGHGLPAKFVIHCNSPVWGADKCEELLEKTVKNCLALADDKKLKSIAFPSIGSGRNGFPKQTAAQLILKAISSYFVSTMSSSIKTVYFVLFDSESIGIYVQEMAKLDAN

SEQ ID NO: 26815 - protein, 371 aa, Homo sapiens
MSSRGGKKKSTKTSRSAKAGVIFPVGRMLRYIKKGHPKYRIGVGAPVYMAAVLEYLTAEILELAGNAARDNKKGRVTPRHILLAVANDEELNQLLKGVTIASGGVLPNIHPELLAKKRGSKGKLEAIITPPPAKKAKSPSQKKPVSKKAGGKKGARKSKKQGEVSKAASADSTTEGTPADGFTVLSTKSLFLGQKLNLIHSEISNLAGFEVEAIINPTNADIDLKDDLGNTLEKKGGKEFVEAVLELRKKNGPLEVAGAAVSAGHGLPAKFVIHCNSPVWGADKCEELLEKTVKNCLALADDKKLKSIAFPSIGSGRNGFPKQTAAQLILKAISSYFVSTMSSSIKTVYFVLFDSESIGIYVQEMAKLDAN

SEQ ID NO: 26816 - protein, 505 aa, Homo sapiens
MSLIINTFYSNKEIFLQELISNASDALDKIRYESLTDPSKLDGGKELKIDIIPNPRECILTLVNTGIGMTKADLINNLGAIAKSGTEAFMEAFQSCAEISMIGQFGVGFYSAYLVAEKVAITKHNDEEQYSWVSSAGSSFTLHVDHGEPIDRDTKVILHLKEDQTEYLEERWVKEVVKKHPQFIGCLIAVYLEKEPEKEISDDEEEKGEKEEEDKDDKEKPKTEDVGSDEEDDTDKNNKKKTKKIKEKYTDREELNQTKPIWTRNPDDITQEECGEFYKSLTSAWEDHLAVKQFPVEEQEENEQLCVHHVWIMDSFDDLMPEYVGFVREDKENNKKLDEVFSKISWLGIHEDSINWRHLSELLWSHTFQSGDEMTSLSEYVSCMKEAQKSICDIIGECKEQVANSAFVEQEWKKGFEVIYMSEPIDEYCVQQLKEFDGKSLLSVTKEGLELPEDEEEKKIMEESNVKFENLCRLMKEILDKKVERVTISSRLVSSPCRIVTSTYS
